United States Patent Application Publication US 2011/0014706 A2 - sequence listing, part 54

SEQ ID NO: 167426 - DNA, 1897 bp, Arabidopsis thaliana landsberg
catctttgggagaggcgatattgctcagattcttagttacctgaattgatctcaattcagtccaaagaaagagtttggcttttgcctctctgtaatctctgtttttgatggtatacaaggcttgaacaattcctagacaatcactgattcaaatcttgttgtgtttatgttaactcttcgttgtggttttggaaactgacttagtactcaaaggacgggggaagtgccacagctatgatctggggagcatcgcctcagtcacggtctgatcggcagaaggatagagttgaaaccaatcctgaacaactggctgctgcttctgctcaggctgatatatcctttttataaacttgcttttttcagattgatggtctatgtgtattttagttatggtttggttaaaacaagagtgttttgtagtcttccttcactaatttcgacacagaatgacgatatcaacgggcagaactacacgggtcattggatggtaccactcccatcctcatattaccgttcttccttcccatgtcggtatgtatcatcatcattgtaacttctcgatgtttttatcttgttcctcatatttatgtcctgtttctgcctgcagatgttcgaacacaagctatgtatcagcttttagattctggttttattggcctcatcttttcctgttttagtgaagatgctaacaaggttagttagtatttgctatgagtggattagctacttgaaacttttcaaaaatacttctcttcagcttatacatattgctgaatttgcttagttgatgtttccaggttggcagaatccaagttatcgctttccagtcttctgatggaaagccgaatagtattcctaaatcaatgagcctggttcttgcaaataaagattctgttatcgatttagaatcttcatttagttcttcggactcgatataccagagatcgtcttctgctcggggagacaatcctgagctcgacacaagtgatacagctacaacttccggatctaaggtctctttttccaaaagctatagcattttactcgagcttatgttcaattttgtcaaattacaatttgtgcataatacaactcatttttcgaattcttaagacaatgatggtactatttctgactgaaccgttggctgatatgtatatacacattgatgtctgagccttgtatgtgtgtgtgcctgagtagggtggaggacgcgtttcagattttggggccttctttcaacaatattaggccaacaacaccagaagagatgaaactcacaaatcaggcaatctcagcagcacagcaataggaattgacttgatggacatgtctgaaagtatgcaaagcaatgctccgttcaaatttagataccaggtatttctcaacatacgcttctaggcttatgaacactacaatttttcaattacgtaattactaagcttaggaatttacgtgcagtggtgcggggtatgttagaaaagaagtcccacttcatgttttgccaacttcatcccttcttccagtcaattcacctttagcatctattaaaagcctgcaacgagtactgttcaggcaggaacgagcagcgtactaacaatcagttcagcttaacataaggttttcaattgatggtttccacaccctaatcatagagattttagtgctaaagctccttctgtttcttctctagaaatgggcgagttcatcctcttgctttcattcacaacacatcaacatatcgagcctccatgtgcaagttgatcgaatactggttagtgaagcgtgttaaaacatctgatacgtggttttgtcattcgttatatgaaaatcaaacttttgcagcttgagtcctgccattaacgcacttcaagataggcacaaggagaacaaaatc

SEQ ID NO: 167427 - DNA, 1391 bp, Arabidopsis thaliana landsberg
ttgtgagtcaagaaaaccaaatcgaaaaactttcggatgaagatgacgaactcgccaacatctctagcgaagaggaagaagaaggggaactcaaggaaacccactcttgcatggctacctgcatgcttagtggggaaattcccacaaaccctaatctcggcggaattgggactcaagaaggagctagctctagaggaagcttgggggtcacacaacttgaccgatctgttcaagtaggtgaagaccttgatgcagcccaaagagtctaaccaagtcgttttcggactccttatccaagaagagccggtgaaagctatccggctcaacactaccgaccccctatcttgcctatgccatcgacccgagaccgctctcacatgccttggaagcacaagactcatgaaaagaacttgaagtcttggtgagccaattcttagatcaataaaccttggatacaagaaagctcaatgcaaggatcaatggcattgaggttactctcttgagtataattgatggtcttttgtacaggttcaagaagttgaagctaacaaagaaaggttcaagaagatcaaagatgagaaagagaggcatcttaagagcgctcaagacaacgccatcaacattagggcgttgttaaggcaaatatcaagctcggacaaagactgtgatgcaaagattgcggctttgtctgacaaggatactaacttggtgagccggttgggtaagcttgaagaccatttttatgaggagcaaagaagggttgatgacctaagctactaacaaaatcggtttcatgagaccttatccgaaaggcctattcttaccgcgggcaatgacgaactcaagccggaagacaaacatgagtggtcgccttgctccggtaaagatttctcttcgattagctaagatgacctaggagaatctaatctaggatggaaggtgtcgatgagagcatatggagacttcaaacgcggattaatcaattagaagataatgacgcgaacgaatatgtggctttggaggaggtgataaggagacaaggcaaagttgaggagaaccaagtcaagaacattgatgatcaattaaaaatctgggcatcacttagaagagtgaccatggattcctcaaggaaatacgtggagttgctagatagaattcttgatttggacaagaaagttgataacctatcaacacgcatataagggcatgaaccgatggtgagcaaagaggaagactctagcccttatgtgctttgcgatgcggttacaacttaccaagaacctcgtgaccttaaagaaggagagatcgacgagaggaatgaagatcctccgggaagaacaagcgtttacaaccggctcactctcctagaagccagtggcatccacgcatga

SEQ ID NO: 167428 - DNA, 2566 bp, Arabidopsis thaliana landsberg
caaacccaacacgagctcgattattccatgatgaatctttggcaaatgaggatacttatgagcctttcttgaggtgagtccctatgcaaaagttttacaattgttatttggtacaggcaagtttttttttataggacagaattggttattgggtcgaactgttgtttctgctggcccttgtcagtttattattttaactacaatcttcctgacaaacgggaaacatatgttaaatgccattgatggaaactgctttcagctacatttgtgcttgattttggctgcttaattgcttagcttcaaaagatcatgccatctaaaagatgtgtcctctttcaggttgctttggaagggaaattggttcattcaagaccttgcctgtataataaggtattcaatactgcctatctatcataattctatcatttcatgtatatcatgtttgatttgatggtctaatctacatttgtagtgattcggatcattgttcaattctcaagtcttgtttcatgtatgtaacatacagcctcacttacatatagtgctaggccaaaatcttgtaatggtgttattgctaatggagaagcttcgggttcaaagaaacatattactgcaattgatgatgttctcaagagtttggtggaatggcttcgtgctcaggtttcttcttcttttctcttactctctttcctctttgttttctttcttgtttatgttggtcctgcactagtgcttaaatgttagttgtttttgttagtcttgtagacaatgccattgttagagctagtgttcagtggtatagcatgtaaatagtgggaaagactgaggcagttaatatttatttgtttttgtggagatcagcaattaaaattctactctctccatacctttgttagattacaagaatgcaacacaaaccaaattagttcaattgaaaacaaaccttctgcttaggcaaaagtctttaatttggtaaatatttagatgcaagtttggtgatatggaagaaacatttatgttgtgactgggtgaatccataaaagttgttgatgtccaccatggatattacaatccttgtctttgatatgtagttgaagaaaccttctcactactcatggtgttgcaattgcaatttgctgcctgtccttactgcttaaggaacctgttgtcagatcatcgtttgtccaggcagatggggttaagttacttgtccctttagtctccccaccatccactcagcagtatattttcaggggaaaattttccactaaagttgtaaataagttataacactctagggatgaaaataactttgaatttcaaatcacgactatatgttgatttatattgcttccttattctaaagtgaggactagacaaattagcaacgatttgatagttctgttttagttgtcagacaaaagaacaactctctttttgctataatttctcagtacctaattcatgtgatttgtgtgctttcgaccgacagcttctatatgaaacatgtctctacgtgtggcttctgtcctattatgaacctgcaatagagtacttggcaacatctaggacaatgcaaaggctcacagaagtggttaagagctcgacaaaggaaaaggtgagctatgatttttttttctgttttttaatttgcataaatgtggtgtgatgcacttgttattatgtttatctgacggtattatatcttacaggttgtcagggtggtcatattaacgttcaggaacttgcttccaataggtacatttggtgcacagatggttgattttggactcccgcatattatccagtctaaaaacacaagcatgaagtgacgaggtaagaggacaatataaatacaaagcctgaggattgctgcttattaggtttttctatggggaagatgaatttcttaaatttctgctaaatgtacagtgaaaaatcttgtttatagaagtgatgctgataacattagatgtgttaagtacaagttcatggttaaacccgttaaattttgaattttaaggacttgttggatgcattgaatcaaccagaagaagggctaaaagaaaagatcaggaaattgagttcctttgacaagtatatgcaagaggttcttcttggccatcttgactggaacctaatgcacactgaggccaatttctggcatgggaatgtcacaagctttgaggagaatgacttccaggtattccttctttaatcctaactcgggaatcaaccaccacaacaaaaccctgaagcacctgttaaaaacttgttggatgcagatactcaagctcctcctcacgaaactggacacgtcgagtgatccaagatcgttggcggtggcatgctttaatctatcacagttcatacagtaccatacaacagggagagtgatcgtaacagacctcaaggccaaagaacgggtgatgaaactgatgaaccacgagaacactcaggttaccaaaaatgccacttgtgcatccagaggctgttactaggtgctaagtatggacttgcatgcaatcttgatcagacttgcatactgctttctgtatatggaaag

SEQ ID NO: 167429 - DNA, 1302 bp, Arabidopsis thaliana landsberg
tgtttccacagcaagtttctgcacattctctccaggtgatttctcgtatagaaatatacttccagattctgttttctattaaaaagggggtgtagtttgcattgcgaggagtgttttgttgtgtcttcttagtcatcattcctatcttgatttgaactcgtgtatatttaatttgcagggaaaagctgcttacgcgaacacactcttgccttatgggaaatcagacattgctaatggggtctcatcaattgcttcatatagttataaaccttgttccaagatttatgatgccagaggtgataacaacacaactggaagtacatatacgagtgaacaaaatcgaggatcgagaacgagaagatcaagaaatcaactaattgtcaaagcatatacaaccaaagctggaaatgctgatgcggaaggaaatattgtgataaatcctgatcgatataataaagaagatttcagtattgaatacagcgatgccaggttttttgtgattaagtcgtatagtgaagatgatgttcacaagagcatcaaatatggtgtctggtcatctacattgaatgggaacaagaaattgcagagtgtatatgaagatgctcagagaatagccactgagaagtctcgtgaatgtcctattttcttattcttttctgtgagtcgattcttcccctttgtcccttgtgcgaatgtgtttgcattcatactttgtgctcatgctgatgtagtgcttccttcgttttaggtcaattccagtggtctgttctgtggcgtggctgagatgaccggtccagtttccttcgaccgagacatggatttttggcagcacgacaaatggagcggaagctttcctgtcaagtggcacattattaaagatgttcctaatagctatttcaggcacattattttacataataacgagaataagccagtgaccaacagccgagacacacacgaggtgagctttcctatcttgacacttcactttgaagaccaggttccgagaactctgcttttgatatctcaaatctcaatctaatcattctcgtttctgtgcagataatactgaaacaaggactcgaggtgctaaaactattcaaacatcatgcggaaaagacttcactattagatgattttatgtactacgaagaccgccagagactcatgcaggaagagagagctagacttccatttaggacctttcgcaggccatttcccgtgctcaatctagatttttctgacagaagcaagaaaagctccaaggatgtcggtaagaagccttcagtgacctctgcagaa

SEQ ID NO: 167430 - DNA, 458 bp, Arabidopsis thaliana landsberg; identical to SEQ ID NO: 64420

SEQ ID NO: 167431 - DNA, 571 bp, Arabidopsis thaliana landsberg
atggtccaacggtacagtgctttcgtgaacaaacctaaaggtgagaagcaatttgtgttataaatgtatctctcttttgtttcttttggtatatgatatgttatgtgatttgtttatggtatttttctcaggatggacttctttcactgtctgtggtaagctacgacgattagtcaaagtgaaaaaggtttgtgcttatatccttgtcttgtccaatatttgaatttgtatgcttttttttcgctgctagctgatgagtgtttctcaggtgggtcatgctggaacacttgatcccatggctactggtctattaatcgtctgcgtcggtaaagccactaaggttgttgacaggtttgtcattccttgatccaaagtttatgcttatgatgatttacagaaagagaacataaaagtcatctgtatctgcagataccaaggtatgatcaaaggttatagcggagtttttcgtcttggtgaagccacttcaactctagacgctgactctcctgtactccaacaacccctttccttgattttatggttcatttctacattagatgactcatctgga

SEQ ID NO: 167432 - DNA, 1201 bp, Arabidopsis thaliana landsberg
gtgatatggtatcaactgtgagttcttacaccgtctctgatagttccactaccatcggaagctcgatctcttcaacttccacggttagtagtatatcgtcactttcttataaatgttcagtttcttagtgttctgacatttccttcttggttttcatactgatgcacaggaaagtccacttgtcggaaataacgtggaacaacaggtaaagcttttcaggaacataaatttggtcctggatttgcagaatgtcaacatgatttgatatggtctatccttttcgacagaatcaaaatcttgaagcagaggtgaggagactgagactggaattgaagcagtttaacaaggacaaagacactacaaaccaaaaagaaaacgtaagatactgttatcttccatgttgatgacaattgttgtgaataataatcattagatattacattatgtagtcccaagaaaccccatggtcagatgaaaaaatagagctgcctagagcattgtctgatagggaaacgcagaaaacgcagtctgctacattccaagcagctgaaatagcaaagcgcatagcgaaaatggagagccaaaagagaagattacttgagatgcaagccaatttggacaaacagatgatgttcacaacggtttcttacagacgttatagtatcaaagatgttgaagatgcaacctatggtttttctgatgctctaaagattggggaagtagggtatggacctgtgtataaagccgttcttgaaaacacttctgttgccatcaaactcttgaagtcagatgtctcacaaggcctgaagcagtttaaccaagaggtaataatataatccgacattatcctaatgtattgcatgtcctctccatactaattaacatatgtgtctcctcactagatcgaggttctaagttgcatgaggcaccctaacatggtgatcctcctcggtgcttgtcccgaatatggctgcctggtgtatgagtacatggaaaatggaacattagaagatcgtctcttttgcaaagataatactccaccactatcttggagagcacggttcagaatcgctgctgagattgctacaggacttcttttccttcatcaggccaaacccgagccgctagtacatcgagatctgaagccagcaaacattctgatagacagacatttcactagcaaaatcagtgacgttgggtt

SEQ ID NO: 167433 - DNA, 577 bp, Arabidopsis thaliana landsberg
gaaaaacatccaacgatgactggattcggccccaatgaaaaacgatcggggcccgaacagccaatcagaaaatgatggtccaggctgcagataacaatgatattgtttttgccatcggacccgctggtacgggtaagacctatacagctgtagctattgctgttcgtgccttaaaaaacaaaattgtcaaaaaaatcatactgacccgtcccgcagtgaaagcgggggaaagcctaggatttttaccgggggatttaaaagaaaagatcgatccatacctaagagcccctttatgatgccctggataacatgattccggccgataagctgggttattatatgagtaaccgaaccattgaaattgcacctttggcttatatgagggccagaaccctggataatgcctttattattctggatgaatcccaaaatgccaatgatctgcagttaaaaatgtttcttacccgtattggcgccaatgcaaaggctattatcacggaggatccaccacagatcgatttacctaagaatcaacgctgagggctcggaaagccgttccatacgcgcaaattacgaa

SEQ ID NO: 167434 - DNA, 1183 bp, Arabidopsis thaliana landsberg
gtcttagcgaatccaggtccacttaaggacattgtgttatatgatcaagagaaacatgtttcatctgctgtttgggatggccaggttttaactcttatggctcttctctatagttataatcgatttgttgaagctgtgacattaattggatgcttttgcttagtgttgttgtttatgtattttgcattttgtttatgtggtttaggagcgaggtgcgttgaggtgtcatgagcatacatcaaagttgggtgagtggaagcttaaaccaaagcagatagaattggtggagagagctggttttgggtttttgagacggatccctgctattagtcttgataaccctcttatctctgcgttggttgagcgatggaggagagagaccaacacttttcacttcactgttggggaaatgactgtgactcttgaggacattgccttgttactgggattggggattgatggtaaacctgtcattggattaacgtatacaacttgttttgcggtatgtaagaggtacttagaaaagtcaccagcatctaattccgctagtgttggaatggttaagcttagctggttgaaaaataatttctctgaatgtccttatgatgcatcttttgaagaagttgagcgccgtacacgggcttaccttttgtacttagtagggagtaccatcttctcaacaacctctggaaacaaggtgcctgttatgtatcttccgctgtttgaggattttgatgatgctggaacatttgcttggggtgctgctgctttggctttcttgtatagagcacttgggaatgcttctgttaaatcccaaagcacgatatgtggttgcttgacgctattacaggtacttaaggtttttcatttcctgttctttaaactgttgatccaagaggatattattaccgaacctatccagaatgtctctgctagtttcagcattgaatacattgacttaatcttctttccttatcttctgtttcctgtagtgttggagttactatcacttaaacattggcaggccaaagctgaatcgtgagcccatccatgatcagttcccatttgtgcttaagtggaacggtaagcataatggtcctacagcaaaaaatgatgtggtcttttaccgcaaagcattggacgtcatgaagccaactgatgtaagtttgtttataattcatat

SEQ ID NO: 167435 - DNA, 4027 bp, Arabidopsis thaliana landsberg
tggaaccgcatatggtcgcggtatgaccgaagttttagtggttttgagaaagcaaaagggtcttaggactcaggaagaagttaatgataatgaatctttagccattaaggagcaaaaggcgattaaaggttttaacttctgggatgagagaatagttgatggacaatggattaatcaaccgaatgcagaacttattcagaagttctttcgtgtgttggcaatttgccacactgctattcctgatgttaacagtgatacaggagagatcacatatgaagctgagtctccggatgaagcggcttttgttatagcttctcgagagcttggatttaaattctttgtaaggtctcaaactagtatttccttgcatgaaatataccacatgaccggtgaaaaagttgacaggtaaatcacaaaggtcttaatctctctcgcttggtcaaagaattttatcacatttttgttaaaacgtgcagagtatatgagcttcttcatgtcctagagttcagcagttcacggaaaagaatgtcggtgattgtccgaaatcccgaaaaccggttgttgttactttcgaaaggcgcagacaggttaatacttttttctttgtggagaagctcaaatcttgaaatgattgcattttatttcagtggaaatatcttatattgtaatgtgtttcagtgtaatgtttgaaagacttgcgaaacatggacggcaaaatgagagagagacaaaggaacatatcaagaagtatgcagaggcgggtttaagaacattggtgattacctatagagaaatcgatgaagacgagtacatagtatgggaagaagagtttctgaatgccaaaactttggttactgaagatagagatgctttgattgatgcagctgctgataagattgagaaagatttgattcttcttggttctactgcagtggaagacaaactgcagaaaggtgtaagtgacaaaaacgaaatttggttacatttttgagtttcttacttaagcatatcatttgttgcttttttcttgttaaataggttccagattgtattgagaaattatctcaggctggagtcaagatatgggttttaaccggcgataagacagaaaccgcgataaatatcgggtaattttcagactcctcttgatcatctttttttctgtaagaagttcaaatgtattaagctgtgttgttattgacaggtatgcttgtagtctcttaagagaaggcatgaaaaagattttgataactctagattcatctgacattgaagccttggaaaaacaaggagacaaggaggctgttgcaaaggtagtttgtttttcctatggacatagctgctaaaatgacttgtaatgtttgaaatgatgagaatgtttttttttgtttgttgataggcttcttttcatagtattaaaaaacagttacgagaaggaatgtcacaaactgctgcagtaaccgatgattcagctaaagaaaactcggaaatgtttggtttagtgattgatggaaagtctttaacttttgcattggactcaaagctggagaaagagttcttggaacttgcgattcgatgtaattctgttatatgttgtcggtcttcgccaaaacaaaaggcgctcgtaagattcgtgtcaacacttctcgtactgttttcacgttggagtaatctgattaagatatgttttaggttacaagattggtaaagaacgagacaggtagaacaacactggccattggagatggcgcaaatgatgttggaatgcttcaagaagctgatattggagttggtataagtggtgctgaaggaatgcaggtaacagattttcttaggatcttctatttactgttaaaatggtcattagagtattgaagttttctgttacaggcggtgatggctagtgattttgcgattgctcagtttcggtttctggaacgtttgttacttgttcacggtcattggtgttatagacgaatcgcattgatggtaacaagatttaaaaactaaactcattgcaagatttaaacttatttttgattgttttcttgtgatgtttagatatgttacttcttctacaagaacctcgcattcgggttcacgctgttttggtacgaagcttatgcttctttctctggaaaaccggcttataacgattggtacatgtcgtgctacaacgtcttcttcacttcacttcctgttatcgccctaggagtcttcgatcaagacgtctctgctcgcctttgtctcaaggtagatattcttctctatctttcttgatttaaaacaaatcgcttagcgtttctttattttggtttccgcagtatccgttactataccaagaaggagtacaaaacgtattattcagctgggaacggatcctaggatggatgttgaatggagtcataagctcaatgatcattttcttcctcactatcaacacaatggcaactcaagcttttaggaaggatggacaagtagttgattactcggtcctcggagtcacaatgtactcttccgtggtctggactgtgaattgccaaatggcgatttcgataaactacttcacttggatccaacattgcttcatatggggaagcattggggtttggtatttgtttcttgtcatctacggttcccttcctccgacgttttccactaccgcgtttcaggtcttcgtcgagacttcagcaccgagtccgatctattggctcgttcttttccttgtggtgttctctgctctcttgccttatttcacttacagggcgtttcagattaagttcagaccaatgtaccacgatattattgttgaacagaggagaacagaacggacagagaccgcgccaaatgcggttcttggtgagcttccggtgcaagttgagtttactttgcatcatcttagggcaaatttgtctagaagagattcttggaattgattcgtaatttacacaacttagcgtcgtttttttttccttcttctgacttttgtatatatatggaggttcaaaaggagatgagagtgtgactgatttaaaaatgtggttagtttgtagatatttgaagtaagttcagcgataaatggatgctataaatttgataatttaatagataaaaaagttcgacattgtgatatttgaaggaaaatcgaagccaagatatggtgtatgatctaacacaagctcaaaggcaatgcaataaatgtttttaatgcaattggtgtatgaatctcgttttcaataatcaatttggttattttgtttcttatgtgctcatgacaactcacaattttagagatactatttcatcatcggtcaacgttttcttaatgaataggtattttaataacatttgagatttacaactacgcaaaacaatatagaattctatattagtactgaatccggataatgtgacgatatggtctaatggtggaagaaaataatgtaagaaagatcgttgatttgattttgatagcgattacaagtctcttttgcttggctcataagacttcgtcaagaaaagtgataacgacttctagaagtatagcgagttacaacaatttgatcttatgcaagaatttttgttttggatgctacaaattttaatgttttagcttagatcaaaaaagaatattttcttttttttagcttagagaaatatgtttggtatataaaaaaaaatggtgacattgtagaatttgttcatgtagatcaaggaaaatcgaaaccaaagactttgaagtgtatatttattcgacatctacaatggattaagagttatataaggtgtagttgctttatatcaataagggttattcgcggtaatctagtatttgatgaagaaaagttgtacaaagacctatttcatgagctaaaaatggttttgattagcgtaattatactcaactcaagcacgagtttgtgcatataggcaatacaactgttttataaaccgatatataatatgaatctcgttttcaatatacaagtaatcaatttggttatttgtttctaatactcacaattct

SEQ ID NO: 167436 - DNA, 407 bp, Arabidopsis thaliana landsberg
  unsure (1)..(407): unsure at all n locations
cagaaagcaagcaagaagagagtttcgatggctacgacgataagaaccggcggttactactctactcaccaagagtactctatcgatgtcttcggaaacacgttatccgtcaccgtaacttcggatttcgccatcatcagccaatggatccatgaggtcgaatacaacaactgtcgtccgtactatctacaacctctcgtcgttggagtcggcgtccagtggacaccgccagtaagttacgacgccaatcctccaccggataggtactactccgannnnnnnnnnnnnnnnnnnnnnnnnnnnnnnnctccaccgaataggtacgacgccaatgatcttccggccgataggtactacgatcatcaaactggaggttactacgagcattctgcgccgagagatcacaa

SEQ ID NO: 167437 - DNA, 1087 bp, Arabidopsis thaliana landsberg
atggatgatatcattctgtttccgaactttttccgactatcagtggatgggactatttgcgtttttgttgtgaatgtgttcaagaagtttgtggcaccggatgagttcgaactgggcgtcatattggcagatcaaacggtaatatattgcgaatatgtttaattttgtttctttcacataacttgcaggtatatagttaaaattatttggtgtagggtccccgttcccgaatcaaggctaccattcctcgtcgccttgcgtcattttactttgatcgaatacgagaatatgagtatgagtggataattaccactaatttctcggtccgaaacgacgctgagtctgtgagagcaacatcccatgactaccagatatggtttattgaacaaactattgttactaaagctttgaaaacggatgcactctcgttttggaattttactccttttgacaacatcatagagaagacggttaacaagaatgtgttggtcggtgagttattttaacaattttatagtattttctttgagaaattgtacgaatacttacttctattattatacacaagatgcggtaggtgcgattatttggtagagccgattgaccgaaggcatcgagggtgtgaagttttctttcaagataatgaatcaacagtaagtgcctccatcttaacttattataatgaaacttggtttctattttgggattagttcaaatggttcaaatgatatagtttaaacggttcacctattttagttcacatggtgcacctattctagttcaaatggttcaaatgctttagttcacatgttcacctactctagttcaaatggttcaaattgctatagttcacatggtgcacctactctagttcaaatggttcaaattgctatagttcacatggttcacttggtctattctgatggttcaagtgctatagttcaaatggttcagcagacctggttcagatagtcatgttcacaatttctgatcaagtaaataatttctatgaattgcagcaatgaagttctctattgtgaagcacacaatcaacaagctttggactttcaagctcactttcggagtc

SEQ ID NO: 167438 - DNA, 881 bp, Arabidopsis thaliana landsberg
gtttcagctgccgaacgccacatgtgggtgccaggttcctcacagattattgaaggtttgtcctccaagatggggatagctatgtaataaagataggaatctgatcacgatatataaccctagcactgtagagtacataaccttatgacttatccaacacgttaaatgaaagcactaaaataaagaaaccctattttgtgtatgatccgatcgaaagacaatacaaggtgttgtgtgtgtcaagtcaagctcgaaagcatcaagttttgacgttagaaaatggaggaaattattatggagaatttgttgattgttccattcctcatactcctaaatgtgttgggatatgcatcaacgggcatttgtattataaagctatggaaaatgaatatcagttgatgatagttcgctttgacattaggtctgagaagttcaagtttactactattaataattatgaagctgtccagatccagttcttgcttcggactctgatagattacaaggtaaaattaggtgcgcttatcaccgatttagatggtatgttttctagagcgactacatgcattgagttttgggttttagatgatgttgaggaacataaatggtggagacattacataccgcctttgtgggagagtttagttgaaaattactggttagtgattgtcaggatgactcgtaacggtgagattgtgttgacctcactcgagttatatgatcctttctacactttttgttacaatatgaagaggaagactattacaagaatcaaaatccaagggatggaagcttttaagggtcggaatatttttacatttactgaccatatagaagatgtgaggcttatggaagcgattatggctaccaaggccggctga

SEQ ID NO: 167439 - DNA, 1283 bp, Arabidopsis thaliana landsberg
acgttgtaagtcggtaaatgttgtttaatacgaacctttagttcctttccttttctatgtgttagtggctcatgtttgggcaaatcgttggtaaagtgatagaataaccaaaaacttcaccatagagtcttgaacttattaccctcatgagttaccattcgcctttctgaagagatgggtatgaatctaatttgagttgatatgtttgaaagaaaatatgtttgttctggtatgcagtagctatcattctctccccccacagaatccaccttttccctgtcgattctactcctaggatagtcgattctttatgtggggagtcgtttagatacttactaccatagttccctagttttgcttttacactaaagatgaaaataaagtggctttctcttcttggtgtagtgattttattggaagaatctggatctcattgacttttgtttttgtttctggactcagattctttataattagtgtgacaacttcgatcttgataggaaacctttatcgctgatattcttggcttgctatgcttttttcttctcatagattcgtctttcaatgggactttgtgtttattccgtgttgttgttgttgtgtgtggagataactttttgatataaaaaagtaaagaatctttctctcagtacgcaaccagtaaaaggtatcacattagacatgcttcataacttgtagactttcctaatctgctcaatttagtagtgtgattgatcttttgacatataatcttacaattttaaaaagacattttttcttcttattttcaggagccatttgtgaatattccagaccataaaatccgcatggcactgaaagtgcttctaggtaactatgaatcatatagaagcgctgaaataaaagaacacatgtaaccacactttttgtatgctttctaattctaacttggtttattaacaactctccttttaaaatcctcagatgagaaaaaccatcctgttctgattcattgtaagcgaggcaaggtaaatcattcactccaatcctaaacatttcatcttttgtctccaccactgaagaagaaaatgagtttctaagtatgaatctggaatttgcagcatcggaccggttgtcttgttggttgcttgaggaagctccagaaatggtgtttgacatcgatattcgacgagtaccaacgatttgcagcagcgaaagctagagtttcagatcaaagattcatggagatattcgatgtttccagcttcagtcatattccaatgtcattctcttgttccatcagg

SEQ ID NO: 167440 - DNA, 2906 bp, Arabidopsis thaliana landsberg
acgcaaccccatcttcactcgatttctcctccatcactcgaccttgttttctcctccataacccaataaactcgagcccattcctccccttattcatcaccaccaacaaacccatcctcatcaaagccacaaagaactcgacctcttcaccacttgaccgagctccccgttcgcataaacactcgaccaccgcttctctctcatctatccaggcacaaaatcactcgacctcgcctcccacttcaccatctccacatcagctcttgttcttcgtttactcgaccactacacagccttctctagctcacgaatccactcgacttcacgcaagagcgcctccgcttctccaccaccgattcaatcactcgaatcaccgctcctctaacaacactcgacctccgccatcaattcgccttcaacacttctcgctcaaaatcactcggccacagctctcatcacctctccactaccacaaccactcgaccccttcacaccaccgtcttctcttcttccgcgagctccactttacttgatccccaatcaccatcttcttcatcgtttcatcactcgattgcatctaccaaccgtctacaatcactcgacttcttctcacatcatctcatcaccttctccgtccaagcctcactactcgaccaaggtgccatcgttctcacatctctcaagtccattcatcactcgattcaccgccaaagcgacgccactcgaccacaagcccgccttcatttcacagttcactcgaccgctcctctatttccacggtcaaaccgcagctgctctcctgctctccaagctcaccactcgaccaaacaaaatcactcgatcaaccgaaaaaaaaattcaaaaccgacggtttactcaattacttcactcgaccggttcacttgattggtttgtgtttttggtttgctgttactaacgtattaacgtttatctttgagtttcgtttgttttcaggtttcatcatgagtaactacagtggagaatcctctatggaccctgattacaatgtggatgaagctgagtcctggtccgctagaccgagagagcaacatgtttaccagagcttcagggatgaattcgaacgctctgcagcccgacgtaatcagagaagagctaaaatcgctagaggaaagagggcgatgtcaagtagatatgagctgattgatgaggatatcgaaactgagtatgtgccagagtcatggcgcaaggagacgaagttgctgaacaaacctgacgaggttacagtggaggagtatatcaggttctttgagatgaatgacttctggggaacgaggtatccgtgctatgagactttagcccagctggggttactggaggacgtacagcatctgttcgagaagtgtcatctggagatactcatgtcttacccttaccatgcctataaggaggagacaatcgagtttctttccacgctgcaagtggagatgtatgagggactcacagactttgagctggataccatgggattaggcttcttgacgttctcagtggatgaacagcggtatcagctttcgatcaagaagttagaagaactgtttggtttccctagtggaatgggaaccaaacccagatttgacagagaggagcttaaggatttgtgggccactatagggaacaatctaccgctaaactcagcgcggtctaagagcaaccaaatccgaagtcctgtgatccgctactttcagcgatcagtcgccaacgtcttttactccagggagtctacaggcaccgtgtctaacacggacatggagatgatagattatgcgcttacagggattctccgccggacgaaggggaagaatgtcttgagaggtgatctcaacaacgcaccaccagtaatgcctctgttgatgcatctgtgtggatacaggaagtgggcgttgacaaacgggaagaagaaggtgagaggagcactatgcgtgggtggcgttgtgacgccaattctggaagcttgtggagtcccgctcaaggaaccaggtttagcaccgaggatgatggacttggatcatttgcgcagatgtgagttcttggagtttgacatggctggcgactttcaccgctacaggttcgagcattcatcgattagaatcgccaacattcttctcccctgcattgacgctactaggattcttgagggcaggaacattgacttcaagcctgcgcttgaagatctttatttcgagggcagtccgccaaccgaggagtttagtcacaccgaaggagctacaacagaagatgttgatgagacggacgatatagatgaggcggagtttgacacgagcatgtatcatttcagtgagcatatacctcctgcgagggaaagcaagagtttgagcgaagctcacaggaacaacagcaagctgcagaagtggtgcaagaaaccggacaagttactcgccaagtgcttaagggctatcaagtttctgaaggacaagctcagctgctccttttccactacagctattccgcagggacatctccctcaggacatgccttcgaggagatatgacgcgcccgagccaagtcggcgcaggcctgagcctagagatcaggagattccgcatgtccctgcgaggaattcatcattcgagcctcgtgaatctgggaggaagaggaggaccacactcactcgatctagcagtaggagcggacgacttctccagtctcgtagtttacgcgacggcggtgctggccgcagcagaaggagagaggtcgagtttcctcagagcggtgctggccgccacagagctgatgaggtcgagtacccacctgctggagctgatacagaacaaggcggttcgtctatgacctgggagcaatcgcaggtagccattgacgagcaactacgttcattcttcgactga

SEQ ID NO: 167441 - DNA, 3809 bp, Arabidopsis thaliana landsberg
atgaaggagcctaatgacggtggcgcaagtcgggaagcacttgggcgtgacctagtggtcagtggtgagcttctcggagctgcccgggttcaagtctccttggccggatactttttggacttattatttccaaacggccggttcttgacatgtcttcactctttgggtcatatcttccaaacggcttcatggattgcttcgattcgacttcgacgttaatcttgactcttctagctttcgatacataccaaaatatctggttgccgtgatgggaaagacttcggccggatgctaaacttctcaagtactagaatgatcgccttttgatgcttttagcttcaaaacttttaaaaccttcttggcacctagaatacgtgtttctcctcttattggctctagaatggtgttggggtcggattccacccaggatagcgagccaaccacacctcaacgcctcgagagacatcgatgagttatcccgaaccgggccacaaaacgcctcggagatctcgtcaagaatccacaccgaggcgatgtcgagaatgcttcggagcagtctcatgaaatggtcccctgacccgacctcgaaacgcctcgggcataaaacccggcaaatcgtcccgaggcgggctccaagacacctcgggaatctgtcctcaaataccgtggaccgagcatcccaagcacgacccgaggccagcttaatcacggctcggaagagtctcgggttagacgaggaaaacttcaaaagacttagccggtataagttcaaaacacatcatctctgaaaaccccggaagagattatcttcaaagatatcaccggatacagaaagtcccagaatcttcggaagataagggcaatctccttcaacaagataaagataaagagaaatcttccgagaatatcgcgagaggtgatattctcgaactctataaaaagcacctcagaggacaaataaagaggacatacactaaaacgctctcaacttcaggctatcaaaaacgctctgactttgaaggaagaaacacttattttcatattctagcacacttgtacgatcaaatcattactttctcattaatacaatcaagaacaccgtcagcggtaattgagaattgtgttgttctttgagaatctcacaaagatccgttctttgaagaaacccttaaaataaattctattgtgcgagttttgacacttacaaatggcaccaaatgctctttgaaacataaaaaaaaacaatagctaaaacgggctaaaaaccgtgttatcaatcatgcatcaacattataacaaaggagaaatcgaagaggctcgtgataaggagctataacctttgaatctttggatcttttagtgcttgtaatgacatggtctctgaatctttagaatatttccacaacttgtcaaacacattcttgcataaacaaacacatgaaactagatatactcattctattttttgtttttgcaagtgttgctgtgtaaataatgggaatgtgaagctgatatttggctcttattatgcgacatgttagtatcatcttgatcaccactgtttctttttgtcttgaacatcattgtggctttgtgtattgaacatgattgtttctttttgtcttgaacatcactatggctttgtgtattgaacatgattgtttctttttgtcttgaacatcactgtggctttgtgtattgaacatgactgttttgttttgtctagaacatcactgtggcttcgtgtattgaacattactatttttttttgtcgtgaaaataactgtggctttgtgtattgaacattactgtttcttttgtcttgaacatcattgtggctttgtgtattgaacattactgtttcttttttgtcttgaacatcactgtagttttttgtcttgaacatcactatttctttttgtcttgaacatcactgtggctttgtgtattgaacattactgtttctttttgtcttgaacatcactctcggtttttgtcttgaacatcatagtgaatatgagtttgcggctaaatataaagtgatttagatatgtttcaagagtctttcatataatctggaatcattcttttggtattaaaggttttaaaacacgttttcaatttataatggtggacaaggattgggtgcatctttgcaggtaagattttcagtaggaaaatctggagatcttacctctctttttattctccttttaacttttcactgaagagttgatcatatattgatttttttattaccctttaactcttctctgaaaagttgagcctgcttatgagagaggggctacaaagtttgtacgagatgtggatgcagctctgggagacgtagatatgattatatgtccctgcattgattatcgctgtttagatcgtcattcaacctctgttgttgttgatcatcttgtaacaaggggaatagatgaggcatataagaagcggtgtgactggtatcatcatggggaatcaaactctagggctgagagtgataccaaagtgagtcagtggaatgatgaggtacttgggttatatcaagctgctgaatttttggatgaagagtttgcttataaggttggcttgagtgagattccagagtgtgatgacaagaaagaagatgagttccttgcaaagcttgcaaatgctgaaacaccgttgtatccaagttgtgtgaaccatagcaagctgtcggctattgtatctttgtttagacttaagacaaaaaacgggtggtctgacaagagcttcaatgatcttctagagatattgttggagatgttgccaaaggcacatcaatgtatgaggtgaagaagtttttgaaatcttttgatatgggttaccagaagatccatgcatgtgtcaatgactgctgcctattcagaaagaattacaagaagcttgacagttgtcctaaatgcaacgcttcaagatggaaaactaacttgcacactagtgaaataaagaaaggtgtcccacagaaagtattaaggtactttccgataatcccgcgccttaacagaatgtttaggtctgaagaaatggctaagaatttaaggtgacactttagcaacaaagcagcgatggaaaactccatcaccttgtagattcagtaacatgggatcagatgaatgccaaatacccgtcatttgtagctgacgaaaggaacctgaggcttgggctttctacagatggatttaattcattcaaaatgaagaacgctagatatagttgttggcctgttttgttagttaactacaatctgcctcctgatttatgcatgaagaaggagaacatcatgttgactttgctaattcctggtgcacaacaacctggtaataacattgacgtctacttagaacctcttctagaggatctatgccacctgtgggacaatggggaattgacatatgactcttacagtaaatcaacatttaatctgaaggcaatgttgctttggacgattagtgatttccctgcttacgggaatctagctggctgcaaagtaaaaggaaaaatgggatgtcctctatgtgggaaaaatacagatatcatgtggttgaagttcagcagaaaacatgtttacatgtgccacagaaagggtctgcaaccaacacatcatttcagaatgaagaagtcttggtttgatgggaaagctgaaaatggcaggaagaggagaatattgagtggtcaggaaatttaccaaaattttaagaataactttgggactttgaaacaatctgcaagtaaaaagaaaaggacgatgaatattgaaacagactctgatagtgatggtc

SEQ ID NO: 167442 - DNA, 2403 bp, Arabidopsis thaliana landsberg
atggtggctgattcttcttcttcttcttcttccggtcaattatatctcgcctcagcatcaagtcttccttaatttccgtgggaaacaactgcggaacggtttcgtcagccatctggagaaagccttgaggagggatggaatcaacgtctttatcgacagaaacgaaaccaaaggtagagatctcagtaaccttttctcgagaatccaggagtcgaggatcgcgctagcgattttctcgagcatgtatacggagtcgcattggtgcttggacgagcttgagaagattaaggagtgtgttgatttaggcacacttgtggttattcccatcttctacatggtggacacagacgatgtcaaaaacctaaacggggtttttggtgacacgttctgtaaattggctaagacttatgatggtgaaaagctcgataagtggaaacaagctttaaaggatgttcctaaaaagcttggctttacgttgagcgaaatgaggtaactttatccttgaattgtcaaaggacataactttgtttgcctattagagggatcttatggtttatgtgattgattcttttcacttgtcttgtagcgatgaaggcgaatccatcaatcaaattgtaggggaagtcataaaggtgctatcatctgatgttgtgcctgatctggaaagagaaatccccattgatgatccttgtgcaggaggagaagaagtatctgaagctgctcctgactcgcctcctcctctgtttggcattgaaacacgacttaagcaattggaagagaagttggattttgagtgcaaggatactcttaccattggtgttgttgggatgccaggtattggcaagaccaccctggctagtatgttgtatgaaaagtggcaacacgagttcctacgctgtgtttttcttcatgatgtccgtaagatgtggaaagactgcatgatggatcggagcattttcattgaagagttgttgaaggatgataacgtgaaccaagaagtcgctgacttttcacctgagtccttgaaggcacacctactgagtacgaaatctcttgttgttcttgataatgtgagcgacaagaaacagatagaggttcttctcggggaatcagactggattaagagaggtagtagaatctttatcacaactagcgacaggtcggtgatcgaggggatggttgatgatacatatgaggtcctgagattgactggtagagacagctttgagtactttagctattttgcctttagtggtaagctttgtcctccagtgggaactttgatgaatctgtctagattgtttgcggattatgctaaaggcaacccattagctctcaagatattgggtaaggagctaaatggaaaagacaagactcactgggaagagaaacttagcaagctgatgcaaagtcccaataagacaatacaagatgtcttgcgggtaagctatgatgaactaggtttgtctcacaaagatgtctttcttgatgtcgcatgtttctttagatcaaaggatgagtattacgtgaggtctttagtggaatcttgtgacactgaagccattgatactgtgagtgaaataaaggatcttgccagcaaattcttgataaacatttctggcggacgagtgcagatgcatgatttactgtatacatttggtaaggaacttggttcacaagggtcgcgtaggctgtggaaccataaagccgttgtaggtgcgctgaagaatagagtggtaagataaaccttagaactgtttgatagcgactgtagcaaaatttgaagttctcttttcatgataattagaagctcactcagcactcgacttctacttgctgatttcttgtctttaattggttaaccagggagctgtgagaggtatttttcttgacatgtctgaactgaagaagaaacttcctttggacagaagtaccttcatcaagatgcgcaatcttagatacctcaaattctatagttctcgttgtgatcgggaatgtgaagctgatagcaaactaaactttccggagggacttgagtttccgttggatgagatacgttacctctattggctaaaattcccgttgatgaaacttccaaaagacttcaaccccaagaatcttaccgactttaacctgccttacagcgagattgaagagctctgggagggtgctaaggtacgtgtgtctttgttttataatttcaacgttatgatttttagcttacttgattagggctgcttaatttttcttactgttcattgcaggatacacaggaacttaaagtgggttggatctttagtccactcaagcaaaggttatgccaattcctggccaggggcttggcctaaaatgccttggagaagggtcttcccccaaaggacctttaatattctttggaaaggg

SEQ ID NO: 167443 - DNA, 426 bp, Arabidopsis thaliana landsberg
atgcagaccggaaaagtttacctgctgcccactgttctgtatgatgatgcgctgcagaccattcccgcatatgtattggatgccgtgaaggattgccaggtattttttacagaaaatgaaagaacggcccggcgtttcctgaaatctatatggagggaaatggtgatagatgcataccagtggttcacgatacacaaggccgaagaagaagtaaaacagtctttcctgaagctgcttaaagaaggcaggaatatcggcatcatcagcgaggcaggctgccccggcatcgcagaccctgggcagttgctggtggaagctgcgcagaagcaccatatcgtggtaacaccgctggaaggcaaaaactccatcctgctcgcgctgatggccagcggtatgaacggccagtgtttccagtttacggagtct

SEQ ID NO: 167444 - DNA, 587 bp, Arabidopsis thaliana landsberg
aagtggggcccaatcatgctcgcgtcgtggtgaagccgctcgagccgggctcgggccatacgctcggcaatgcactgcgtcgcgtgctgctttcgtccattcccggttcggccatcaccgaggtcgagatcgacggcgtgttgcatgagtacaccacgctggagggcctgcaggaggacgtcatcgaggtacttttgaacctcaaggacgtggccatcaggcagcacagcggcgacgaggtcatgctgaccctcaccaagaagggcaagggcgaggtcaaggccggcgacatcaccgtcgaccacacggtcgagatcatcaatcccgagcacgtgatctgtcacctgaccaaggacatcacgctgagcatgcgcctgaaggtgagccgcgggctcggctatcagccggccagtacccgccagcatccggatgacgaggccagtccgatcggccgcctgcaactggatgcctccttcgcgccggtgcggcgcgtggcctacaaggtcgccgcaccccgtgtcgagcagcgcaccaacctaaacaagaaagtcctggacatcaataccaatggtgcgatcagcgccgag

SEQ ID NO: 167445 - DNA, 2424 bp, Arabidopsis thaliana landsberg
atggagcttgtggcggattacgacttggatatagcgtaccatccgggcaaggccaaccaagtcgccgacgccctgagtaggaggcgctcggaagttgaggcggaacggagccaagtggacttggttaacatgatggggacattgcatgtgaatgccttgtctaaagaagttgaacccttagggttgggagctgccgatcaggccgacctgcttagtaggatcaggctggctcaggaacgggacgaggagataaaaggatgggcactaaacaataagaccgagtaccaaacctcgaacaatggtacaatcgtggtgaacggtcgagtatgtgtgccgaacgatagggcattaaaggaggagatcctaagagaggcccatcaatcgaagttctcaatccatcctgggtcgaacaagatgtaccgtgaccttaaaaggtactaccattgggtaggaatgaagaaagacgtggccagatgggtggccaagtgcccgacttgtcaactggtcaaagcggagcatcaagtaccaagtgggttgttacaaaacctacctataccggaatggaagtgggaccacataacgatggacttcgtcaccggactgccaacggggatcaagtccaaacacaatgcggtatgggttgtggtagaccgattgactaagtctgcgcacttcatggcgatctcggataaggatggagcagaaatcattgccgagaagtatatagacgagatcgtgcggttacatgggattccggttagtatagtgtcagaccgagacacaaggttcacgtcaaagttttggaaggctttccaaaaggccttaggaactcgagtgaacctaagtactgcctaccacccacagacggacggacagtccgaacgaacgattcaaaccctcgaggacatgttgagggcatgcgtcttagattggggaggaaactgggagaaatatctaaggttagtagagtttgcatacaataatagttttcaagctagtattggtatgtctccctatgaggcgttgtatggccgagcttgtagaacaccgttgtgttggacgcccgtgggcgaacgtcggttgtttggacctacgatcgtggatgaaaccacggagagaatgaagttcttaaaaatcaagttaaaggaagcccaagatcgacagaaaagctacgccaacaaacgtcgaaaggaattggaattccaagtaggagatttggtgtacttaaaggcgatgacctacaaaggggcagggcgattcacctcaaggaaaaagttaagcccaaggtatgttggcccgtacaaggtgatcgaacgagtaggggcggtggcatacaaacttgaccttcctccaaaattaagtgcgtttcacaacgtcttccatgtgtcacaattacggaagtgtttaagtgatcaagaagaaagcgtggaagatatacctcccgggttaaaggaaaatatgacggtggaagcatggccggtacggatcatggaccgaatgacgaaagggactcggggaaaatcaagggatttgttaaaagtcttgtggaattgtggagaccgtgaggaatacacttgggaaaccgagaataagatgaaggccaattttccggagtggttcaaggagatgggtaaagatcaacttgatgcggattcgaggacgaatccaattcaagggggggagacttgtaacgcccgcgatcctcaataggatcgttggctaggacttggtccgagagaggaaggtggagtctcggacaagtgagaaggagctggccataagctcggacaaaggggaaatcatgcaggctaagctaggatcataaagaaatcacatgggtcagctcgcccaaagctcaagctcagctggaaggagtgacggttactcaggtcgagtgacagtccagctcgggcagctggacgagtaacagttgagctcgaggtagctggacgagtgacggacgagctcgaggcagctggacgagtgacggttgagctcgaggtggctggacgagtgacggacgagctcgaggtagctggacgagtgacggacgaactgggcggttatgggcgaagagatgcaactcttcggaagggcgcaactcttcggaaaggtgcaactcttcggaaaggtgcaaggaacggatgtgttgattcgggaagcatccattcgccccctatataaggaagggcgcccaggaccattccactcaccacaacacaccgaaaacacagagaaactcaccattaaaactctctccctcttgggagaataaatagtcttaggattcggtagccgggctgtggccggcaataaagaaggagggtcggatcgacctaacctcgagaaggaaggtaagggatcctagactttgagtctaagggttctaggatgtgagttagtagtcggatccttgaaaggatc

SEQ ID NO: 167446 - DNA, 909 bp, Arabidopsis thaliana landsberg
gatggtaagaggaagggagcacaagctttatctatgagaatctctggcaacaaagcagcttgtctacaactgtaaattttacggttatcaagacacgatttgcgatgacaccggaaaccatttcttcaaagactgctacatcgaaggcacatttgatttcatctttggaagcggacgctctctgtacctcgtacctacctaattagatctcttgctccatagtgtatatatacaataacgatgatcattaacgttaatcgttttgtatgttaatgaaaatagggtacacaactaaacgttgtgggagatggaatcagagtgatcacagctcatgcgggaaaaagcgctgcagagaaaagcggatactcgttcgtccactgcaaggttacagggactggaaccgggatctacttgggtcgatcatggatgagccaccccaaggttgtttatgcatacacggatatgtcaagtgttgtgaacccatctggatggcaagaaaaccgcgaggccggacgtgacaagtatgtatagtccaaagtccaaaccatagtatatcaatcaaaaactatgtgacataagttttaatgtaaaatgcactgattgatgagcaggacggtgttctatggagaatataagtgcacaggaacaggatcgcacaaggagaagagagtaaagtatacacaagacattgatgacatagaagctaagtacttcatctcgcttggctacatccaaggatctagctggctcttgcctcctccttctttctaatgtaactaccaaattaatcaaccactccgttttaaattactatatttggaagaagaaaaaaaaacacaaaaacatgtaacttgttgtactattacatttttttcgtttttcagatattgtaattattggagaagctga

SEQ ID NO: 167447 - DNA, 435 bp, Arabidopsis thaliana landsberg
taaacagctctcggccggatcgtcgggttcaggcttcttgccgtgcatggccaccgtatccggctaacggaaggccgcctcaagtatcggccagtaccttttcctgaagcacggcggcaagatcgtcttcttcgggcggttcctggcgtttctgcggaccttcgcggcgctgctggcgggcgcgaaccgcatgcagtggcgtcgcttcctggtgatgaacggggcaggcggcctggcctggacggtgctcttcggtggcggagcctaccttttcggcaaccgcctgacaggcgtggcaggacctttaggcaccgcggcgcttgtcggcgttgcaatggcgatcattttgattgccttcctgatgcatcgctacgaagcgcgcttggaggcgcgcgcccggtcgtcgctctcgctgggccctgagcggaagctgag

SEQ ID NO: 167448 - DNA, 1350 bp, Arabidopsis thaliana landsberg
ttgttttgattttcctggttagaaatttctggttacggcttttgttttgtcaaaactccgcgcaccgagacgatctccctccgatccataaaaggaggatggtttggagctcgtcggaagatgccgaaccgagttcgagtcaccagggtgatgcggcttcatcatctaatacgcccgaagagccgagccctttcatggctcaagaagatacttccgctgatatagctcgggaactcgatcttcgagaggatcctgagccatctcttgttcgaaggcctcatgtcccaactgctaacgaggctggaacgtccaattgatgggatgtgcccgaacctttcttccctcaggtgaaggtcgaggatgatcttttcttcaggccgaacgaggctgagggcatctttcaggtggccgagcggattgcgatgtgcaaagctgacaaagggaaaaagaaaaagaaaaagaaaaagaaaaagaaacaggttatgcccgacccgcctggttcaactctttgcaccgagcagtcgcttcgggatctggcttctcggtttcacttcggcgaagatgttatcctgctcttccgaccccgagcaaaagagtcgataaccctccggagggtttcttcgccctcaacgagaggttttctaccattgtttcctctggttcccaatcccaaggttgattttggaaatacgtgacttcctaccagatcgcgctttcccagatcactactcgttcactaaggtatctcgtcaggattatagtgcgaaactacgagacgtggaatgagatcacactcacacacttgagaaactatttggagatttgccgagttcccaagtcggtggtggatagatactacatttccccggcgaaggataagaaaatcatctggggtttcctagtaaggacgagccatatacttaccatttctgctttgtggctctcgacgatgtcaatgttcccgaaaaccttatcgggacgattttgacgagttggggcactcttggtagttagacttagagttattagcttgcccccgagacggttgttagaaattggcgtttaacttgtttcattgttcttttttgcagctcggcggtgcaattagctaaaccacttttctagggatagagtcgaacgagccctaaagttaagctgcggcgtatcttgtacttctagttcggaatttttggatcatcgacctctcccgaggcgattattgcggctgccgaacctactgtagtgcaagagccttcgctggcttcgagcgttgctgttgccatagttggattggccgctcgagatcggtctaaggcctcgtggaagcacacaagaacctcaaatcccaag

SEQ ID NO: 167449 - DNA, 520 bp, Arabidopsis thaliana landsberg
  unsure (1)..(520): unsure at all n locations
ggtccggcgccggcatgatggaatgcaagaaggccctgttcgagaacaacggtgacatcgacgtcgccatcgagtggctgcgcaagaacggcctggccaaggccgacaagaaggccgaccgcgtcgccgccgaaggccgcatcgtgaccgcccagtccgccggaaagacggtgctggtggaagtcaactgcgagaccgacttcgtcaccaagaacccggacttcgtcaagttcagcgacaccgtcgccaccgtggcgctggaatctggcgccgccgacatcgacgcgctgaaggccgccgcgttcccgggcgccagcaacgtcgaggaaggcgccaannnnnnnnnnnnnnnnnncggcgagagattgaagtgcgccgcatgcgcgcgtcgagaccgacggcgtgatcggcagctacatccacggcggccgcatcggcgtgctggtggccctgaaaggcggctccgaggagctggccaagggtgtggccatgcatgtggctgcgatgaacccgcagtacc

SEQ ID NO: 167450 - DNA, 664 bp, Arabidopsis thaliana landsberg
tttgtgacattaaatatgtgaggttactgttttgctgattattcatgtgattctacagagaatctttaaatggttggcacaattgttactggctgttaactatttgcactcaaaccgtgtagttcacatggatctaacggtatatatttaaatcctagtacattactcttgctgatgtgtgattcttttttgtgttatttcttgaagaatggcttctctgattatcgattatctatgcagtgttcaaatattttcctgccgaaagatgatcacgtccagcttggtatgataaatgagaatactgaatttactcttcattggaaactatatatttgtctttttatgcactagttagcttttaatctctactcatggcacaggtaattatggtctggcgaaacttataaatccagaaaagcctgtttccatggtgtgttatctatacctttttgttttctatttatagtatctctctgcacccatttgtacatctagtatctcaaatgtcagttctttttagattatctaattaagagtactttttgcataggtttcgggtatctctaacagcatgtgccctgaggtattagaagatcaaccatatggatataaatctgacatatggtcgctgggtaagttaagtttgaacaatgtagactttttt

SEQ ID NO: 167451 - DNA, 470 bp, Arabidopsis thaliana landsberg
atgttcgggttcgaccttttgaaacagtatgcaggcacaacagaacaaatttccacggcggctgaagcgctagtcgggaggtcaacgacattgacagaagcactcaaagcagcggcgataaatgtcggccgtaaaccggtagaaaccaccgacttggctgccataaaagaggtggaagctagggctataggaggtgatatagaaagcgatggtggtgtaaccgctgtagcaagtaaagcggttgctcgtaaccaaaaaataggagaagataatgagaagacaaatctcggcgacgttatcgcggagattgatgtgaaagtaacgagagatagagaagtgacaagtgaagacgcagaagcagtgattcgggctgagctgaatcattctcctttcaataatattattcctggaggtgttgtgttgctgaatccgtcactgcagcttataaacttaattgcaatccatgcaat

SEQ ID NO: 167452 - DNA, 2112 bp, Arabidopsis thaliana landsberg; identical to SEQ ID NO: 2103

SEQ ID NO: 167453 - DNA, 838 bp, Arabidopsis thaliana landsberg; identical to SEQ ID NO: 720

SEQ ID NO: 167454 - DNA, 2077 bp, Arabidopsis thaliana landsberg
tggctatgaggttccttaattgggttaaacaaaaggatgggttttcgcatagagttggaatttacaataccatgcttagcatagctggagaagcgacaaatctccatatggtagatgaattggtgagtaaaatggaaaagaatggttgtgataaggatatcaggacatggaccattcttatctcagtgtacgggaaggcaaaaaagattggaaaaggtctgctagtttttgagaagatgaggaaaagtggattcgaactcgatgctacggcttacaatatcatgattaggtctctatgtattgctggtagaggtgatcttgcgcttgaattctataaggaaatgatggaaaaaggtatcacttttggattaagaacgtacaagatgttactggattgcatagcgaaatcagagaaagttgatgtagtccagtccattgcagatgacatggttaggatatgtgagatatcagaacatgacgcttttggttatttgctcaagagtttttgtgtttccggtaagataaaagaagctctggaactgatccgcgagcttaagaacaaggaaatgtgccttgactctaagtattttgagattttggtaaaaggactttgtagagccaatagaatggtagatgctctagagattgttgatataatgaagagaaggaaactggatgactctaatgtctatggtatcatcatcagtgggtatctcaggcaaaatcgatgtttcacaagcacttgaacagtttgaggttattaaaaaatcagggcgtccacctagagtttctacatacactgagattatgcaacacctcttcaagttgaaacagtttgaaaagggttgcaacttattcaatgagatgatagagaacgggattgagcctgacagcgttgctatcacagccgtggttgctggtcatttgggccaaaaccgagtagcagaggcatggaaggtgtttagcagcatggaggaaaaaggcatcaaacctacatggaaatcgtattcgatatttgtgaaagagctctgtagatcatcaagatatgatgagatcattaagatatttaatcaaatgcacgcctccaagatagttattagagatgatatcttttcttgggttatctctagtatggagaaaaatggtgaaaaggagaagattcatcttatcaaagaaatccagaaaagatccaattcctattgtgatgaactaaacggatctggcaaagcagaatttagtcaagaagaagagcttgttgatgactataattgtccacaactagtgcagcagtcagctcttccaccagctttatctgctgttgataaaatggatgtgcaagaaatttgtcgggtgttatcatcctcccgagattgggagagaacacaagaagctctagaaaaatcgacagtccagttcacaccagaactggtagttgaggttctacgtcatgccaagatacaaggcaacgcagttttacgtttcttttcatgggtgggaaagagaaatggctataagcacaattcagaggcatacaacatgagcatcaaagttgcaggctgtgggaaagattttaagcagatgagaagtctgttttacgagatgagaagacaaggctgcttgataacacaagatacttgggcaatcatgataatgcagtatggtagaaccggtcttaccaacattgctattagaacgttcaaggaaatgaaagatatgggtctgatcccgagctcttcgactttcaagtgtttaatcacagttctttgtgagaagaaaggcagaaacgttgaagaagccaccagaacattccgggagatgattcgttcaggttttgtcccagatagagaactagtccaagactacttgggatgcttatgtgaagttggtaacacgaaggatgcaaaaagttgtttggattctctcggcaagataggtttccctgtcactgtggcctactcaatttacataagagctctttgtcgaattggaaagctagaagaagctttatcagaattagccagttttgaaggagagagatctttactagaccagttacttatggaagcattgttcatgg

SEQ ID NO: 167455 - DNA, 944 bp, Arabidopsis thaliana landsberg; identical to SEQ ID NO: 35598
  unsure (1)..(944): unsure at all n locations

SEQ ID NO: 167456 - DNA, 392 bp, Arabidopsis thaliana landsberg; identical to SEQ ID NO: 72911

SEQ ID NO: 167457 - DNA, 1521 bp, Arabidopsis thaliana landsberg
  unsure (1)..(1521): unsure at all n locations
atgaagaagactgagacgaagagtaacgaccggaagcgagtacagaatcagatcttagggtaaagagtcttcgtcgtcaccgtcgtactcgccttttttatactcgcggttatgttggtttcctcttctctcacctcttactccggttctcgtttacttaaacctgtttatatttttgataaccggattcatttcgtcgagaaccggataatttttcctgcacgagcaaatcttgagccacacatttttttggtgttcttcttcttcacctctgctgatggaaaaatcgtgagtttagaagcaaaaatggttgattttcttcgagaaatttgacagaactttccccaggtttcatatttttatcattaatcagataattcatagagatttacgcttatggtagttagtattctcatgaaattttgagtcttggaatgttgattgagctcgatttctgagaaatttgcaatcttttgttcattgtaaacgtaaaaattgaatctttgagtagaatgtgtattttgtttagtctatagtttctcttcaagaaataactctttgatagatttctgtaaggtttggtaattggtactgtgagttttgattatcatgtcatgtttcctgattagatggtgcattattgtgtgaccaagattgcttaaggaaatgggtttggtgggttgtgttggtaagtcttctcttgtatctatggagttgaggtgggcaaggaggagaaaatctgataatgctgcatcggcattgcctcgatcgatacctatatatatatctacgttgaagaaagacataaatctagaggaattgaggaatttgtattcactttgtaaccattcttgcaaccgtttgtctgagaaagacaacaacgttgaaaagattgttgacatgaaaaagctgagaaagncaaactctcgcagtgatgttattgtatctgtgttttgcaaaccacaacacgtggatgttgatgatgcggttttgtattcagaagaagaaagtttatcttcttctttgtatacttcagaatttgggagacaaaataaggatgatagttttctgggagacttgtttcagaatgcggtgcctctcactccttccaatggacagcttgttggattcggtcgtgcttattctgattatggcttgaccgcttctatccatgatctaatggtacttttacctatagcacaagtttaacaggttatatagtggaattcgcttcattacctggtctagtcgagctgtaatagcttctgtttggtgctaagatatgtgatttggtctcagtgttttccaggttttaccttcactacaaaggatggggattggtaaactgatagtaaacagaattgtcaggtctgatggtattttccactatgattttgctttacttaaaacccttaaacttctcttaaaggttagatcctcattcatcaaaaactgttacaataggctactcacaagcagagacatatacgacatagcagctctctgcttcaaggatgaaag

SEQ ID NO: 167458 - DNA, 779 bp, Arabidopsis thaliana landsberg
gattcatctgcggaatcatgattacagattcgatcaccaacgcttctgctacttcagctccgagagattccggaaagaagaagagggtaacgtaatcctctttgataaatctcattcctttctctgaaattgattcaaagttttgatttttaatggttttgttattgcattacgttttgcagaacaataagtcggctaagatgaagcagaacaagcttggtctccgtcgtgagcaatggctttctcaaggttaaaacttcatctttctctcctttaatgtttcaattctgcctgattcgtttggttagatttggttgtctatgtattgattttgggtttttgattttgatattagttgcggtgagcaataaggaagttaaagaggagaggagtgttaatcgtagtcaaaagcctcatcatgagagttcagataaggtgcgtagagaagaggataacaatggtgggaataatcttcttcatcatgagagttttatggagtcaccttcaaatagctctgttggtggtacatattcgagcactaacttcagtgggagaagtagcaggagtagtagtagcagcagtggcttttgctctggtaatataacagaagaggaaaatgtagacgatgatgatgatgggtgtgtggatgattgggaagctgttgctgatgcgttagcggctgaggaagagattgagaaaaagagtcgtcctcaagagtctgtgaaacagcaagtgagtgttggacaatcagcttctaatgtgtgtgattcgtcgattag

SEQ ID NO: 167459 - DNA, 2572 bp, Arabidopsis thaliana landsberg
atggccgtcccatgctcgtgagtagtccgtaaaaccagaagtgcccgaaagagttgagtctgattggtggtacctgcagaagaacctaaatattaggaggttcgaaaatgtgtgatcagaaagagacacttcacacaccttcacatacctcgcatgtccgaaaccttgtatttactatatctataagtcgattttaagagaaacttcatctacttttttacatgaattcaaatatccaatattttgtcatcataaaatatgataaatcatactaaatacccatcactagtaagataatataagcaaaaatgtactgatctgatcatatttgttactcttaagtcttatcattgcgaaataatttaaatacctcgctttctgaggatactaatttagaaacgtaggtaaatttaatggaaggaaattcttgaaacgtgtgataaaagaagccttgagacatacgtacgcaactttaatttaatacggcacaaaaattgcatgtccaattccaaacagagattaaaaatgtacacacatacataatgacatcattagtggtatacaaacatatgcaaaatagtatcttaacatttatttcatctttatatttttgttagagaagctttttttccagagattgatgataggtgtagaagaaccatgaaatcgatattaattggatttgttttctttcttttatcatcatttcgtagcttcttcgtgaccactacctattcccaagtgatccatcaccgacgtctacggccatggccaccgccagaatctgggtccggcccatcacctggcccatctccatcaccacataacaaaaccacaccggcagtgtttttctttggggattcgatcatagatacaggaaataataataatctaacaacagaaatgaaatgtaattttagtccttatggtaaggattttccactcggagttgcaactggtagattcagcaacggaaaggtcgtttccgattatatatgttcgtactctttctctccctctctttctttctttcctcttcttttgtgccggacttggaagatttgtttatatcataacatgtattatgtgactttgaacataattggtgatagattgataatatactaggttatagtatatattatgattatatgttaaattttatgtttgttttacagctgaatatttgggagtaaaaccaattgtaccagcatattttgaccccaatgtacaactagaagatcttctcacgggtgtatcatttgcttcaggtggtagtggctattaccatttgactcccaaaatatccgtaagatgaaaattaatcacatatagatttatatctaaccatttatcctaatcatttgggtaaaatataaacagagagtaaagtcaatgttggagcaattgacatatttccaacgacacatagcgagagtaaagaggttagtaggggaagagaagacggatcaactgttagccaagggcttatccgttgtggtcgcaggcagcaacgatttggctattacatattatggtcatggtgctcaattgctcaaagatgatatccactactttacttcaaagatggcaaattccgcggcaagttttgttatggtacgtaactcatccatctttttcttttagagagttcatatagcttcactccaaataaagttaaaagttcatgcaatacgttcaatgatttcaaaactatatattatgatttattgtaaggtaagaagacactccaaaactatcataataccaaaaatttgcatgtaatgtatttaacattaaaaagtgacatttgtcaaaggtagtaaaattaacttgttaaaagttaggactttagttctgcttcttaaaaataatcttacttttgttcaaaacaaaaataatcttagtaaaacacataatagctattgatgtaacgaatttaatttttaacaaaagagatctaaggtactcaatagaataataatgtagataactagatgtacataaacttgacaaccaccaatattgaatttggtcatgacccacgtttttttctttttgggataaaatgtgaaattactcccaaaaggaattattgtttcacaaaggttttaaactaaactaaatttgttcatgattatgtttaatatagggtacccacacatacataaattacaatttccttacaaagattttctttactggactagcgtaaataatttaatcccaatcccctatctatatggatacccttgaacagcaattatggatatatggaccaagccaaatcgcggttttaggaccaccaccattgggtggggtcccaattataggacttttaaaagaggtttttgtaaaaagtgggctccagatattaactatggttttcagcttttcaacgtcaaactctcccaccttttggacccattggcaaaaaacctacccaattccaatctcatttacattgacatatactctgctttcagtcacatcttagaaaattcagcagattatggtaatattagaacgtgaatatttaattcttataagtactaaactatcaagctcatgt

SEQ ID NO: 167460 - DNA, 923 bp, Arabidopsis thaliana landsberg
ggggattaaagtctatcggtctttgtttgagattttcttgttttgatcaggatgtgacaatgaagggtatgccgtattcttaacaaggatctcgagctatctcgcattctttctgcaactggttcgatctctaatgtcactcttggtcaacctaccaatgcaggtggcactcttacatatgaggtaacaaaacattgaatcaaatttcgttagtacctcgttttgaaatatatatcgagtaaaactgttatgtgttttttcttttctaagggtcggtttgagatactatcgctatctggttcctttatgcctactgaaaatggaggaacaaaaggtcgggctggtgggatgagcatttctttagccggaccaaatggcaatatatttggtggtggccttgccggtatgcttatagcagctggtcctgttcaggtgacacgatttgattacatgaatgaaacatatttacagattcaggagtatagaaaactctaaagtcttataatatgtgacaggtggtaatgggaagtttcattgtgatgcatcaagcagaacaaaatcagaagaagaaacctagagttatggaggcttttgctccaccacaaccacaagcaccaccacaactgcaacaacaacaacctcctacttttaccataacaaccgtgaattcaacttctccttcggtgaacaccgtagaggagcagaaaccacaagcttatggtggtggtatagtgagaccgatggctcaaatgccttcttctttccaaaacgacaattcaactatgaacaatttcacaccggcctatcatggatacgggaatatgaacactggtactactcacaaagaagaacatgaagatgaagatggtggtgatgatgatgatgattcaggcgatactaggagccaatctcatagtggttga

SEQ ID NO: 167461 - DNA, 497 bp, Arabidopsis thaliana landsberg
atggacacgagcatccccattccgctgaatgaacgagaactgcacgcatacggcgtagtcgtcaaggaccagatcgagaaactgcacgagctggccacagatgaacagttcaatgccttcgctctcagcttcgcggagaagttcgaggactggttgagggaacacgctccagatggagagctgttgaagttgctggatcgatcgaggcaggaataaccatttaactaggagcagtacatggcacgtagtatcaatcgggtgacccttctgggcaacgtcgggactgacgccgagattcgccaggtggggtccacgcaggtcgctaatctgtctcttgcaacttctcgcacctggaaggacaaggacggagagcagcaggagaagacggcctggcataggctggttggttggggcaagaccgcggagattatcggtgagtacgtgaagaaaggagaccggctattcatcgaaggggagatcgagtatcggtcttgtag

SEQ ID NO: 167462 - DNA, 690 bp, Arabidopsis thaliana landsberg
  unsure (1)..(690): unsure at all n locations
atgagtgatgaattatggaatgacatccaacatatggaattgggtcgtgaactctttattccatatcatgcttatgctggagcttttgcttctaatagattaagtcatcttggaagaattcttaatcctcaaactcaaagtgttgaaagagctatactggagttaccttatccgtggggcctaggttctcaagttcatggacgtatccttgatgacaggtgctttcaatttcgttttcgttctgaggcatacctacttaatgtcctaaggagagcgccatgggtgtataatgaatggtgtacttcagagatgggaagattttgctacagaggatattcttacttatatagactatagtttcaaattagaggaatacattcaccttatgtatcagagaggacaattgagttcattgcaagtactttaggtgaggttgtggctatggatttcaatgaagaaactacaacgcagattaccttcattcgagtcaaggttagaattgattttattgagccactacgtttctttagaagagtgcgctttgaatctcgagaaggggccatgaannnnnnnnnnnnnnnnnnnnnnnnncaagtttgcactaattgttgccgtccaaatcatcaagtcagccattgtccgtattaaagtgcataaaaggatttgatataatacagtatgtgttccttc

SEQ ID NO: 167463 - DNA, 2146 bp, Arabidopsis thaliana landsberg
cttgggtcgttgtaggctctccgggaaattcttgagcaagttcgcactttttcaaagctagaagcactcttgcttaggaaaaaatcattacacaatggtgatacccttcaacgccacagtgagaaggtgagaaactagagacaatccacaacattcactattttggttggtttgttcttatttgtctcagaaattttgtcctgctatagaagtttttattagcttcttttttctcactatgtatcttgcaggtcgataaactgaaagttctatcagaatccttactcaattccacttcgaaagccgaaaagcgaatcatggatcataggtgagaaaatgtaacatagcaatctcaaattttatctacaatcttttattaccatagttgagatctatctttttccatatgacaaagcagaagccaaaaagaagaagctctaagctaccgagtttctaaaactactgaagttggtcagctggagaaggttggttcagtactttggacttgtctcttcatgtttttagtacatcttcttattattatgggctgagtaaaaatgtaatatccaggatgtagctgcagaattaaaaaaacttgagattttgaaggaagatcttgaagctgagctgaaaagggtaactttgatcacaaaaactttattcaatagtgaactgttagagatatagatttgtaggtcatattacagagttcaaatgtattctttgaaggtcaacacctcaataacatctgcccgggctcgctttggcaatgcacaagaagaaagagagcagtttgataatgcaagtaacgaaattcttatgcacctgaagtcaaaggtacgtaactactttgtccttcccccttgtattagcctataagaagatatagtttgtgatgtttgggtggcatatgttgtaggaagaagagctgactcgttcgataacttcatgccgagtagaggcagatgttgtaaataagtggatcaaatttttggaagatacatggattctccagtctaaattttctcaacaaaaggataaccaagttaggtatgtcttgtctccacgttgcaaaaatctcaggaactatgttgtttccctaataactttgcattaaatctgtctgttaccattccttacaccatgaaatcgatgatgctcaagtggtgagatggagagatatagtgaccatttcatcgacctgattgttcaactcctattttttttcaaggtaattcaaaatgtttatacgaaaggtagtgccaaatgtattatgatacatatctcacattcatattttgtaatatcaaatcaggaacaattggatccatatataccaaaaatccgaggagtcgtggaaagtttggaaccaagtaaagggtaattatatatctgttcatttatctgttctggtaaattttatttgacactaagttaggatggtagctaaagttgatctgcttatggggaaatattaggttagaagcagagaaaatcatagacaacaaggattcaaagccattcgattctagaaaacagcttgagaaggaatatctagacctcgaagctaaggtaaatggctttatgaaatagacatctagatcacttttctcaatgtgcatagtaaaacagaacattcctaagcttgtggcacaagttactactctgcatgtccttttacgtaacagctcttctgattatttaatagctttaacagtttgtaacaacattaagtgtggtggatgcgatgaaaaagccattctattcacaaacagaaggtatctccaggtaaagctacaaaatctttgaaaaaactatagtcaagatctaacttcacttttgttttaaccgtgcttggtgttcttttggatccaggaaagatgataaaagagtgaaagaactatttgaggtattggacaaaacaaaacaagagtttgaggctatcgaacgcccgcttctagatattgagtctccttctagaacctcatcgtcttcacgctcaccgtccttgaaaatgactcatgagactccactttccgatacagtcctgaaactttccggtggtgatgattcaccacacagtaaaaaagggtcttcagggaaaaaagataacccggcaaagaaacaactcgagttggaactggac

SEQ ID NO: 167464 - DNA, 351 bp, Arabidopsis thaliana landsberg
attcccgcgctgctgcgcgaagtgccagcgctgcgcatcctgctgctgaccggctacgcgtccatcgccaccgcggtggaagccatcaagcgcggcgcccatgactatcttgccaaaccggtcgatgccgacgcggtggtgcgcgcgctgctgtacgaccgcaccgatgatgcggaaacggacccgcccgaactgccgttgcctctgcgccgcctcgagtgggaacacatccagcgcacgctccaggattgcgacggcaacgtctccgaagcggcccggcggctgggcatgcatcgccgcaccctgcaacgcaagctggccaagcacccgacgcgcgagcacgacgcgtaa

SEQ ID NO: 167465 - DNA, 1587 bp, Arabidopsis thaliana landsberg
atgtcgggagatcacgccaagaaggagatggagaccggcgaaaagcccactacaagccacgggagcacttcatcggaagagtcccgcaccaaaaggagggagaagaagaagagctcctccaacaaagggaaggagaagaaatcttcttctcaccacaaagagaagaaggaaaaatcttcttcccacaagccgcatcggaaaggcgacaaacacaagaggatgaggaaggtggtctactacgagaccgacacttcatcaacatcgacctccggctccgatgcgccctccgtcacttctaagcgccaagagcgtaagaagtatagtaagattcccctacactaccctcgcatttctaaacatgcacctttactttccgtcccattaggcaaaccaccaacttttgatggtgaagattatgctaggtggagtgatttaatgcgatttcatctaacctcactccacaaaagtatatgggatgttgttgagtttggtgcacaggtaccgtccgtaggggataaagactatgatgaggatgaggtggcccaaatcgagcacttcaactctcaagcgacaacaatactcctcgcctctctaagtagagaggagtataacaaagtgcaagggttgaagagcgccaaggaggtttgggatgtgctcaaaaccgcgcacgaaggagatgagctcacaaagatcaccaagcaggagacgattgaggggagctcggtcggttccggctttgcaaaggggaggagccacaacacatgtacaatcggctcaagaccttggtgaaccaagcgcgcaacctcgggagcgtaaagtgggatgaccacgaggtggttaaggttattctaagatcactcattttccttaaccctactcaagttcaattaattcgtggtaatcctagatatactaaaatgacccccgaggaagttatcgggaattttgtaagttttgagtgcatgatcgaaggctcgaggaagatcaacgagcttgatgatgccaccacatccgaagctcaacccgttgcattcaaggcaacagaggagaagaaggaggagtctacaccaagtcgacaacccatagacgcctccaagctcgacaatgaggaaatggcgctcgtcatcaagacgttccgccaaatcctcaagcaaaggagggggaaagactacaagtcccgctccaagaaggtttgctataagtgtggtaagcccggtcactttattgctaaatgtccattatcaagtgatagtgacaggggcaacgacaagaaggggagaagaaaggagaagaagaggtactacaagaagaagggcggcgatgcccatgtttgtcgggagtgggactccgacgaaagctctagcgactcctccgacgacgaggacgccgccaacatcgccgtcaccaaaggacttctcttccccaacgtcggccacaagtgcctcatggcaaaggacggcaaaaagaagaaggttaaatctaaatcctccactagatatgaatcctctagtgatgaaaatgttagtgatgaggaagataacttgcgctctctttttgccaacctcaacatgcaacaaaaagagaaac

SEQ ID NO: 167466 - DNA, 2779 bp, Arabidopsis thaliana landsberg
tgcacaagagttacggccatcacacgtccagatgtcgtagcctcggagcgagattggcagcaaaattccctggccaggagaaattggtggaggcttgaccatcgaggacttagaggcagaaaagggtcaaaccgagcaggtcaacgctgtggccaatcccgagcagaccgcccccgcggcgaaccccgaaggacctaaaagaggccagggtaatcgcgaaacagacgacgatgaaccagaagctgctcggggaaggatcttcacaattttaggggattcagctttatgtcaagatacggcagcatcaatcaaggcatatcaaaggaaggccgacgcaaatcataactggacgcggccatttaacggacgaaatgacgaagtaacttttcacgaaagcgataccaacggcttaaaccgtccgcacatgaccctttagtcattacactgaccatcggtgatttcaacgtcgaacgagtcctagtcgacaccggaagcacactggacatcatttttctgacaacgctgcgagaaatgaaaatcgagatgacccaaattgtaccaaccccacgacctgtgctcggattttctggggaaaccactatgactctcgggaccatcaagttaccagtccgagccaaaggggtaacaaaaatcgtcgatttttctcttcccgaccagccgaccgtttacaacgcaatcatcagcacaccatggtaaaatcaattccgagctgtcgcttcgacgtatcatctatgcctgaaatttcccacaagcgacagcgtgaaaaccatctggggaaatcagaaaaatgctcgaatcttcttcatggcagcacacaaactcaggaaccccgtcactgaatcgacggccgacgcgaatcataagaaggccaagcttggccgagctgaagaaaaagcaatttctgagcagttatagcaactaaagatcgaggaggctcgggaatctacaacaccaactcccgatccggtaatctccatctgccttgacgacaaaaaacccgagcgatgcgtagaaatcggcggagatctaggagaagaattaacagctgagctcaccgctttcctcagggaaaatgtcaatacgttcgcctgggccccagaagttttgcctggagtaagtgttgacatcgtgtcacacgagctcaacatcgacccgacgttcaaacctattaagcagaaaagaagaaaattgggtcgggagcgagcaaaagccgtgaaagccgaagtagaaaaattactgagaatcggctccatcaccgaggcaaaatatcccgattggatcgcgaacccggtcgtagtaaaaaatgaaaacggcaaatggagagtctgcgtagatttcaccgaccttaacaaagcctgcccgaaagacagcttccccttaccgcacatcgatcgcctcgtagaatcaacttctggaaacaagctactgtcattcatggacgcttttgctggttacaaccagatgccattcggactcaagaatgctggggcaacttatcaacgcttcgtcaacaaaatctttgcattacagatcgggaagacaatggtagtttacatcgacgacatgttagtaaaatccatggcagaaaaagatcacatatcccacttacgcgaatgtttccagcagcttaccctcgacaatgtcaagcttatccggccaagtgccgcttcagagtgagatccggtgagttcatgggatacctagtcacgcatcgctgcatcgaggcaaatccaaagcaaatcgaggcttactccagatcatctaactggaagagtcgcaacccttaactgattcatctcccgatccacttacaagtgcttggctttttacgatgtgctttggggaaacaaaaagtttgaatggacaacctgatgcgaggatgcttttcaggaactcaagaagtatctggcgaggcaaccaacaacgtggccgaatacgaagcactcgtggccgggctaaatatagcttgggagctgaagatcgcaaaaataaaagctttttgcgattctcagctcgtcgcgaatcagtggaacagaaaatacactactcgggacgaacaaatgaaagcctatttggctcatgtacaagagcagtttgacgagttcgagttaacaaggattccccaaggggaaaatacgtcgaccgacgccctagctgctctggcctcaacatccgacccgaacctgaggagagttatccctagggagtttatcgaaaagccaagcatcgagttcgacaaagaggaacatgccttccccgtccaggttatcgcagattgcgaagatgcttcggatgacagtccagacctgggttgtgattcagaatgaatagaacccatcagaagctacatatccgaaggaaaagtgcccttggagaagttggaagctcggaagctaaaagctcaagctgcgcgtttcgttctggtcgaggagaaactcttcaagtagcgagttatccgggcctttaatgacctgcgtagaaaaagaagcagctcgcaaagttatgaaaaaagtccacgaaggctagtgtggaaatcactccagagtaagagccctagaaatcaagataaagcgccacaggtttttctggccgacaatgatcaaagactgcgaaaaattctcaaaacgatgcaaaaagtgccaaagacatgcacccacgatctatcaaccgaccgagcttctttcatcaatagcctcaccgtatccattcatgcgttggtcgattgacatcatcggtccagcatgagggacgccccagt

SEQ ID NO: 167467 - DNA, 944 bp, Arabidopsis thaliana landsberg
cattatgaaaaagataaggagcacttctttcaccgctggctatgtaacgcattggaacatggtgtctccgagcttcatgtacgtcatatccaacaaaaccattaagaaactctcggttacctgtttgaactatcgttattatggtactgttcctagaaatatttcatttgacacaccgaatgttgttgatttcaactactctgattatcttcgtcgtgaatctccacaatgtcacttggattcacttgccaaagctacattggaccttcatttcttcgaagatgacaagagagcagatgtgacagatctcatcagtgggctacataatgtcaagacccttcacttaacttcttctactgtcgaggtcagtacttgtgtgtatggacaatcatctcatgttttggttaagaacaggacatcattcattgtctgtgtttcaggttatttcggtatgctgcaaaggtggactaccagtgttcaacaacctcgttgatttagtattttctagttaaaaagaaggttggaaagtgcttctgccacttctgatagagcgttctccaaacctcaaaaatctagttctctcggtatgaagcaaaccatctacaattcttactttatatatatatgattgtggcatgacattagagtagtctctcttctcgatgcttcagggtctggatggtttcacatgtagacgacatcggtttactcgaattcctcacatgtagacgacatcggttataaagatgctgagtataatgaaatgtcaaggatatccaagcgaaaggaaacacattagatatttattagtgaatatggagtgtcttgaagtggcgaaagttcatgctgcagctgaaatggatgacaccaaaaagatgcaactcacagaggatcttgcgaagtttcctgccgcttcatctaagctcaagatacaagtcatgtga

SEQ ID NO: 167468 - DNA, 790 bp, Arabidopsis thaliana landsberg
tatgattttaaagaagcaacgccaaaattggttcttgagataatgaatctaaaaggattaagtattgcccatgtcaagagtcatttacaggtaatcttcatcgtctgttattctaagattatcccagttttgttcatctttttcaatgttttcatgtttctgatttcaagatgtatcaaagtaagaagctcgagccgtcttctcgccatggtaagttagttttgatccgcagacatttaccattccttcaatgggtttcataattaatggaaatgacttttgaacaggatttggagctttcatgagtggacaaagaagctatttgatggacatgatcgactctcgatgtatcccttatggcgatttaagacatgcctgtaactctaaaaccgttccttcgaggtcatacatagaaacaagttccagttactaaaatgtttcacatttgtatatccgatccgaccaaggaagttaaaattgcaattctctgcagggtactgaatcaagatgcgctcttaacaaatcttggaggtaactttcttatgcgaccttcaagctggttgagcgggttatgcataaacgaccgagacagcatagagaaagagaacaagactctgcctctactcgaggtaactacctacttttcgttttacgagttattgaaggtaaaaacaatgaaagatattgtagtctttggtgaaatcttatgcagattagaaagacgatcaatgagaaaagagtccgagatgaagaagtatcatcagtcagacgattgaaatcatgaacggat

SEQ ID NO: 167469 - DNA, 1129 bp, Arabidopsis thaliana landsberg
  unsure (1)..(1129): unsure at all n locations
atgtctttaaggtaagtacaactcaaaatcgatatagcctgttgttctttttttaaaaaatggtctatttgagatttattaatgtgattgtaatatatgcagctactcgacaatcgcttgggcaacctcggtgaagaaaggagttcatccaaatgtagactactcgtctagagcatctacaacctcaggaaatgtattcgacttcttgaatgcactagaagatgtggcatttgcgtatgcaggtcacaacgttgtgttgcagatacaagctactattccttcaacacctgagaaaccatcaaagattgcaatgtggaaaggagtagtagttgcatacatcgttgttgccatatgctactttcccgttgcatttgtttgctactatatctttggaaacagtgtggacgacaatattctcatgacgttggagaaacccatctggcttatcgccattgctaacgcattcgtggttgtccatgtcattggaagctaccaaatatacgcaatgccggtcttnnnnnnnnnnnnnnnnnnnnnnnnnnnnnnnatgatgttcgctccttccttcaaactccgcttcatcactcgtactctatatgttggtaagttcttattcatattaaatcaattctcctagatagtaacatatgaatttataacattggatcaatggaacagctttcacgatgttcgttgccatatgcatcccattttttggtggattgctcgggtttttcggaggattcgcctttgccccaacaacttactatgtaagtaatttaatacactaattaagcctattcatttgtttgaaaattctagtaactcaacttgatctaccttttgtattgtactatgtttagctaccatgcatcatgtggctttgtatcaagaaaccaaagaagtatggattgtcttggtgtattaattgggtatattttcttttactcatcatcttcttctactaaatatgtgtttttatttctaccctatatatttgacaataacaagttgtttggttctgtaattgcagttttgcatagtagttggtgttatattgacgatcctagctcccattggtggcctcagaaccattattatctcagccaaaaactacgaattcttctct

SEQ ID NO: 167470 - DNA, 1117 bp, Arabidopsis thaliana landsberg
agagttgcagtttacgcaactgtaaagagagtattgcttgcttcatctcctagtgtctcaggttccaacgtttctgcgattggagtggtttaccgtgatcagctgggacgtttccatcacgcattgatacgggacagaggagaggtgatactgtctgctggtgcactcggtagcccacagttgctttttcttagtgggattggtccaaggagttatctttcaacttgggggatccctgtggctcttgaccagcctcatgtgggggattttgtgtatgataacccgaggaatggtatctccattgttcctccggttccaatggagaactcactgatacaagtcgtgggtgttactgaggatggggcttttctggaggctgcttcgaatgtgattccgtttgcatcgcctttacattctgtgttcatcagagctccagcttctcctttgtacgtccctgtgacaactataatggaaaagatcctaggtccagtgtctattggtttactaaggttggcgtcaacggatgtgaggattaacccagttgttagattcaactacttcagtgatccacaggatctagagagatgtgtcaatgggactaggaagattggagaaatactcaggagccgagctatgcaggactttatgataagggaatggtttgggaaccgtaggttcaggtttgttggagctccattgcctgtggaccaatcaaatgatcttgtgatggcagatttctgcagacgaactgtgagcacaatctggcactaccatggaggcgctgttgtaggaaaagtagtggactctgatctcaaagtcattggtgttaattctcttagactcgtggatggatcaaccttcaatatctctccagggactaatcctcaggctaccttgatgatgcttggaaggtaagaagaaaccatcaaagtgtatactcttcgaaactgtatcagtcctttttgaccagacttaaaaacaaatttcattggctttaattgcaggtacatggggctgaagatgctgagagagagaggatgagatagaaatgatttccgcaagatgggctctttcgcattttctggattagtttgctgattctttttctgttatacgt

SEQ ID NO: 167471 - DNA, 1069 bp, Arabidopsis thaliana landsberg
aatcttagtgatgcaaactatggctgaatctttaagttcttgtttgatgagtattgtgcacactttctttgggaatctgtaatacggtgagatgtttcagttctcatccgtttaggctcattgctaagctctgatgttcatgactctgattttgtagatatgtttgtcacgctgaagtcaatgccatactaaacacaaaccacgcatcggcggctggccaggtttgtttctttggaatttgttcagtgtttattttctcacaaatcatggtgtttctggcttgagtgaaaagattaaaacttttaaagtatcctacacaagatcattgtcagaatattctcttttaggtttctgcgcaaaagctaataagttggaaatgctatttggtatagaaaacttagggaactctgctgcagtttctgttccgaagtatttgtgtgtggatggtttatatgagtttgttttgtgctcctcagaatctcttgcagaagctttatgtgacaatgttcccttgcaatgaatgtgccaagattattttacaggtttgttctatataccattggcttgatttgtcaaatttggatccttaataagctactctagtaatcttttatggtcaatgtcttcagctaagcagtcatatagaaaacaaaatgttctagttagtccaattaaccaatttgatgcaagtagatcatcacaatcatatggacttttgtcatttcggttttctttcttgcagtctggtgttgctgaggtaatctattttgtggaaaagagaccaaatgactcagatgttgcctatgtagcttctcacaagctcttatccatggcaaacgtcaaagtaattaaagccttcgtagatttggacatgaaatttctgtacagtgattgtaatgggaagtctcatttggtatataaatctgtctgaaaccaaaattttcaggtcaggacacatcacgcagagatggatcagtttttgatcaagttcgaagaacttctgactccaaccagagacctaattgttcaaattcaaaatgtagggccaaatccgagactcttaagagtt

SEQ ID NO: 167472 - DNA, 591 bp, Arabidopsis thaliana landsberg
gctcgctgcaccgacctgccgcgtctggaggcgcgaccaagtgctcgagctgttcgacctacaggttcagggaccaggttgtcccgcgcgcactcagtgcatcagtagatccacgactcgaacgccgtgcaagtgtcgaccctgctgtcgatcaagaccggcggctgccccgaggattgcgcctactgcccgcaggccgcgcgctatgacaccggcgtgcaggcgcagaagctgatggagatcgacgacgtgctggcgcgcgcgaaagccgccaaggccgcaggcgccagtcgcttctgcatgggcgcggcgtggcgcgggccgaaggatcgcgacattcccaaggtcgccgccatcgtcagcgcggtgaaggggctgggcctggaaacctgcgccacgttgggcctgcttggcgacggtcacgcgcaggcactgaaggatgccgggctggactactacaaccacaacatcgacaccgcgccggaattctacggcgagatcatccacacccgcgaataccaggaccggctggaaacgctgggccaggtgcgcgacgccggcctgaagacctgctgcggcgagacatcgacg

SEQ ID NO: 167473 - DNA, 2691 bp, Arabidopsis thaliana landsberg
ctgcatgcatatgctatcaaagaagttaaaggagctgaagccacacctaaggaagaatgggaaaacgagtgtatggagatataacaatacgaacaaaggaagcttttaaacatctttgtgaccgccaagctgcaaccatgctaaatctaacatcacaagttgttgacgaggaagcagaggcatatgagaaatggcagaggttatcaaatatcgaagaggggtacctgcaacagaaagcaaaacttcactggatgaaagctggagatcaaaataacaaagctttctacaatgccatgaaggtgagggaaaaccgaatcaaaattagtgaaatccaatgtcttgatggaacaaacgtttcaggacatgatgggataaagaatgaggcggagaggtactttaaggaattcctaaaaattaagcctgcagactatgaggaatggtcaccaaatcaaataggagaactattacagtttcagtgtgatgaaggagataaattgttgcttacaagggaagtaacaacagaggaaattaggaaaactctcttctcaatgccagtgaataaatcccctggccggatggtttcacgtgtgaattctttaaggaaacttggtcaacagtgggcagtgacttcgtagtggctatcaagtcttttttcaggacaggatttctaccaaaaggagttaactcgaccattctcgctctgattccgaagaagaaagaagctaaagtcatgaaagatgacagaccaatctcgtgttgcaatgtcctctataaggtcatttcaaaaattctagcaaaccttctcaaaacaatccttcctcgtttcatttccgcaaaccaatccgcgttcataaaggatagactcttaatggaaaacctcctgcttgccacagaaattgtcaaagattatcacaaagaagcagtctctccccgctgcgcaatgaaaattgacatatcgaaagctttcgattctatccaatggagttttttgctaaacacgctacaagctcttaaatttccggagaaatatattcaatggatcaaaacttgcatctccacggcgtctttctcagtacaaataaatggagagctagtaggatattttggaagcgaaagagggtttcggcaaggctgttctctaagcccgtacctcttcgtcatatgtatgaacgttctctcgaagatgatagataaggctgctacagacaagaagattgctctccatccaaattgtaagaaaatgaagctcactcatttgtgttttgcagatgatctgatggtgtttgtgaaagcagataagaaatcaatacaaagcacattggcaatcttttgaggaatttgctacacactcggggctcaagatcagtttggaaaaatccacaatttacatggcaggcataccggaagcagaaaggatatcgattcttcaacaatttccttttgagttttgttcattaccggtacgatacctgggactcccgctactcacgagaaagatgactgcctcggattatcttcctttggtggaaaaaataagatcacaaatcagcacttggacagctcgagccttctcttttgcaggtcgtctccaactgctaagttcggtagtcttcagtctcacaaatttttggatatctgcattccgccttccaaaagcgtgtattcgagacatagacaagttgtgttcagcttttctgtggtcaggtccagtattaaatccacggaaagcaaaagttgcttggaaagaggtctgcacactcaaaagtgaaggagggttaggactgcgatctatagaagaagctaacaaagttagcatgctgaaactaatttggcggctgctttcggctaaaggctctctttgggtggactgggtgcagcaaaatttgatacggattggttccttctgggcagaaaagaatattacaacgcatggctcttggatttggaggaaactactgaaatacagagacatagccaaacaatttcataaagtggaggtgaaagacgggaaacattcttctttttggttcgactcatggagctctcttggtcgtataatagagagagttggagaacgagggtacattgatcttggcatcccaaaaactgccacagttgtagaggtaatggctatggaaagaagaagaatccacaggaaggacctgctgaaccaaatagaagaggaaattaaaaaacagagagtatatgttagagaaggagagaaggatattgctctttggaaaggagataagggcgtatatcgaaataagtttgagacaagagagacgtggatgcaaatccgtaacataaaaccggagatggaggagcataaggggatatggttttctcactcaacccccaaatactcgttcatcacatggttagtcgcaaaaaatagagtagacacgggagataggatgtttttgtggaatcaccaagtgaacacaagttgtgtcctatgtggcgatcccatggaaacaattgaccacctcttctttgtctgcaactactcaagaaaggtatgggaggatgtcgcaaagcagattctccaacacaagtactcgctgaattggcgggcaattctcacacttacatgcgaggaggactcggacaacacaataaattttatcatccgttacatattctagaatacaatccattcggtgtggagtgaacggaacgctccaagcg

SEQ ID NO: 167474 - DNA, 1047 bp, Arabidopsis thaliana landsberg
  unsure (1)..(1047): unsure at all n locations
aggacaggagcaattgactcttttggattatacttgtatggtgtggttcttaaagaaaagggaaatgaaagtcttgcacgtgccagccttgtggagtctgtcaacagttatccttggaactggagtgcctggtcagagctgcagtctctgtgtacttcgatcgaaatcttgaatagccttaacttaaacaatcactggatgaaagatttttttcttggcaatgcttatcaagaactcagaatgcacaccgagtctttggcgaagtacgagtatttgcaaggtattttcagttttagcaattacatccaagctcaaactgcaaaagctcagtatagtcttagggaattcgaccaggttgaaatcatgtttgaagaacttctgagaaacgatccatatcgggtagaagatatggatttgtattctaatgttctgtatgcaaaagaagcatgtgctgcgctgagttaccttgcacataaggtgtttttgactgataagtacagacctgagtcttgctgcatcattggcaactactacagtttaaaaggccagcatgagaaagcagttatgtatttccggagagctttgaaactgaacaagaagtatttatctgcgtggactcttatgggccatgaatatgttgagatgaagnnnnnnnnnnnnnnnnnnnnnnnnnntcgacgagctgttgatataaaccctactgattatcgagcttggtatgggttaggacaagcatatgagatgatggggatgcctttctatgcacttcactattttcgcaaatccatattctttcttccaaatgattctcggttgtggatagccatggctaaatgttatcaaaccgaacagctttacatgcttgaagaggccatcaagtgttacaaaagagctgtgaactgtactgacacggaaggaatagcacttaatcagctggcaaagcttcaccagaagcttggacgtaatgaagaaaaatgcatataacttcgagaaggatttagagagaatggatgctgaaggagtagaagggccgaacatgttaagggt

SEQ ID NO: 167475 - DNA, 2799 bp, Arabidopsis thaliana landsberg
  unsure (1)..(2799): unsure at all n locations
aaccatggtggtaacgaaggtggcaaaaaaaaagttctaaaaatagatagttgcatctttgctagcaatgttgaacaagataaaccctcatgttggtgcatttaggattgcccgtgatagattcaacagagagaaagaaaagacgattttttatatgaggattattcactattcaccagaaagatggcagagtatttaaccttccatctatagcggaagttgctacattgatacctagagatttcgacgagaatctagataaaagagatatagtcctacagatgaagtttggtaagttacagaggatacatgaatgtcacgtttcatatctagcacttcagtatccattgttacttccaaaaggagaggatgggtataggcttggaataaaacaaaaacacctaccaaaacatcaaaaagaaagaagaagcaaaaagatgttagtatgaggcagtggtttgactaccgtttacaagagagaaaaaatgagaagcacatcctccttcgctcagaacgcttacttcaacagttcatagttgacgcttttacaatgatagagtctaatcggctaagatttatcaaaaaaaatcagacgaagttgcgcagtaccaacaagcaggcagttcaagatgcttctgatgctggagataatgatctttctaataaaggaaaaagtgttgttattcctccatctttcaccggtggtccagcttatatgcaacagaactacttagatgcaatgggtacctgtaaacatttcggctttcccgacctgtttataaccttcacatgtaatcgtaagtggccagagatcacaagatttgtaaaagagcggaagttgaatgctgaggacaggccggatatcatttgcaggatttataaaatgaaactcgacaacttgatggatgatctaacaaagaatcatatctttggcacaaccaaatcaggtactacattatttcatatttttatacatatatttcatgaattttaacttacaagtgacattaacttataattattatgttgaaccagctatgtatacagtagaatttcaaaaaagaggtcttccacatgctcacataattgtttggatggatcctagatacaagtttcctacagctgatcacgttgacaagattatttttgccgaaattccagataaagaaaaagatccagagctatatcaagctgtctcggaatgtatgattcatggaccatgcggattggttaatcctaatttgccatgcatggaaaatggtaaatgttccaagtattatccaaagaaccatgttgagaacacgtctcttgacaatgaaggttatccaatatataggcgcagagatactggtcgtttcatcgagaagaataagtatcaatgtgacaaccggtatgttgttccatataacgctgtcctattacggaaatacagggctcacatcaatgtagagtggtgtaaccaatccgtctctgttaaatacttattcaagtatgttaacaagggacctgatcgtgtaactgtctctgtagagcctcatcgaaaagaagttgtctctgagcaaaacaatgtaggagaaacaaataatgatccacaagaacgaaatcaagttcaggattattttgattgtaggtacttttccttattttatttcattttattgtaaacattattaataaactattttaaatataaaaattaatggaaaataactcaaatgtcgtttaatagatacgtatctgcatgtgaagcgatgtggaggattagagggtatcctatacattatcgacaaacatcagtaactaaacttacgttccatgagaaggcaaacaacctatttatgtcaaggaaggtgagactcctgaatctgttttgtatagagtgaacaatgatgagactcagtttactgcatggtttgagcttaataagcgtgatctggaagcggcaaaacttttatatgaacaaatacctaatttctatacgtggaatggtaaagataaggatttttgcagaagaaaaaatgccaggttttgctgttggtagaataaatcatgtacctccaaagatagatgatgcatatcaccttcgcatccttattaacaacataagaggtccaaaaggttttgatgatatcaaaatcgtcgagggtgttgttcataaaacatacagagatgcatgatatgctctaggtttgcttgatgatgataagccatatatccccggtattgaggaggctaattattggtgtatatcctaagtatgtttgcaagttgtttgttattatgcttatttccgaaagcttgagttcnccagccgttgtatgggaacacacttggaagatactgtctgaagattttaagaggaaactaagaaatcagttagaacgtgcaggttagttaaattattatttttaaattaaatatacaattttatagatgtttttagaaatattttagtacattcaatcttatattaatttatatgcagaatacatattgcctgacgaagacaggattcgattatgtttacaagagctgcaaaaaatattaaaaaggcatggaacagatctttggaggtataagatgttgcctcagcttgaaccaggcgatgaacctgcctttaatcagttgatcctcgatgagcgcaactacaactgtgagtcattgaaaacaaaacatgataattggttaaagatgctaactgctgaacagaagaaggtatataatgaaataatggatgttgtccttaatgacaaatgaggtgtttttttcttatatggatttggaggaacactgagacga

SEQ ID NO: 167476 - DNA, 754 bp, Arabidopsis thaliana landsberg
aaaaatctatgaacttttcctcccaatgtgtggatagacccccaagtcaaaatctacttaatagtaacacaaacgtgattaatgttcaaaatggctgtatgcttgaatgaaaatttgtattgggtttgatttcgtaaaaagaatgatcccttgtgctaccacattcataaattcggtttctcgaacagcatatgggtgagattttgtaacctaccttttgggagaaaccatgatggggatgctcttgtccttggtgtctttagaggagatcggttttcgttgctaaagcaatgcatggtgacaaagaagattgaggtttttgtgaccgagaacaagattaaccatgagaatggtgatgacgtggtttggaagaatttcatgactttttcaagtcctaacttgcctgatttagtagagacggtaaaattctctaatccaagttacttcatcgaaggtaaaaggcttgtggtgtgctctcgtgacaacactggtcacgcttggatctatatactgggggatagtaagttgatcagtaaaactcgtatagagtgtgtggttgatccttggcctttgcactgtacctttgttcccagtttggtaccggttcctgcttcatgccgaagagaagaacaagcagaattacaagtttagttttattacatttttgcttcttgtttggtatgttatagagaaagctgaactcgatttgaattttggtgtttctattcactaccattttctttgcttaaactag

SEQ ID NO: 167477 - DNA, 771 bp, Arabidopsis thaliana landsberg
ttcttcttcaaaaaagacgatgatgacaacgattcccaatcttccagacgaattggaatcggaaatactctctagggttccggcgaagtctctagcgaaatggaagactatttgcaaacgatggtacgctttgttcagagatccgagattcgtgaagaagaacttgtgtaaatcagcgagggaagtgatgttactgatgaatgatagggttcactcaattagcgtcaatcgccatggaattcacgagggcgttgatccatccatggagttttcaggttaactcatccggctaagcgattcgaaagacgtcgtagtatctaaaatctatcagtgcgagggtttggtgttatgcaccacatatgggaacaatagacttgttgtttggaacccatgtacgggtcaaagaaggtggaacttgttaccggtataatgatggctatgctcttggatacgttaacagaaaatcttcgtgtagctgagtttgaaatctttgattttggatctgattgtggaagggttattgatgatgctatcacttggggaatattctctgctggtgtgtctttcaatggtaatacttactggattggtggagagaaagaaactggttttttcttgatggattttgatttcacaacagagaggtttgggcgttttcctcttccgtatcagagttatgattatgaagatatcgcggttctaacggtagttaaggaagaaaaactctccttgatgaatcagaatattcatagaaattcttcagagataaga

SEQ ID NO: 167478 - DNA, 858 bp, Arabidopsis thaliana landsberg
atggcaccgaagaaagcttcagcgactggggctgcagcactgcaaccgctggaccccaaccaggagaccgtctctctccgggaggcccgaaaccagaagaggaaggctgtcagcccgacgattcaggaggatgaactagaccaagagatcagggacatggagatgctacatcaacaggtgcagaggaagaaggagaagatggccaggctagctgagctgcagaggcagatagacgaagcttctgaagaagtccgtcatcttacccacgatgagcagaaccgaaggcctcaacaaaaagaccttcatcaggagggcttcttcaatgaagatgactggtatgataattttcatcatcgaaattttgtttttgacgatgcttctcctctgtccgctgagctgcaggctacaccttgggcttcgtcctataagccaccccagcttcccatgttcgatggccattcggacccgaagcagttcttgatgagttacgaagcaacagtgtcttcgtatggtggcaatgctgcagtaatggcaaagtctttcgttatggccgtcaggagtgttgctcagacctggtattcctcccttcggccaggaacgatcacttcatggcagaagctgaaggatatgttattgaccagctttcaaggatttcagacgaagccggtcactgctcaagccttgttccagtgtactcaggatcatgaagaataccttcaggcgtatgttagaagattcttgcgtttgagggcgcagcaccaacggtgcccaatgaaattgtcaccgaagccatgatcaaggacttcgtcctggacctgctgctcaatactttgctaggaagcctcctcagaccctgga

SEQ ID NO: 167479 - DNA, 712 bp, Arabidopsis thaliana landsberg
tgcatcggaggaccatcaactccatggatcatcctctttccgaacgtatttgttgaaagaaacaacgattcatgtaagttgtatgatcctcgtaactatagttcctacatagtaagagatctcaggtttgatatggctaggagtcgttgtttggccagtccgatagctggttccttatgttagactataacaacgatttccacgttttgaatctgtttactcgagagaggattcctcttccgtctctagaatcaaccgatggatttccgatgaatattacgaatagactagacactgcggttttgtgggtagatgaaaaaagcagagattacttagttgcttggagttacggtgacatttttgcatatcgcaagaatggagatggaaacaatagctggaaagtgattgagcctttaaagaatcaacgatgcgttgatatggtgtgtaaagaaagcaagctttacgtgtttagtgatactcgagtcactgtgtttgatttctcccgtagtgattctccaatggaatgtgcaagtttattttttatctggagtttcacaaaagtcctgttgtgactttgtctggagaagttttggtcattgctagcagagtggaaccacatcctgggacgttcttattcttcgtctacaagttggatcctaagtcatcaaaatggagcaaaatcaaatctataggggacgaagcattgattttg

SEQ ID NO: 167480 - DNA, 714 bp, Arabidopsis thaliana landsberg
attggtcgcattccacttggacctaatgttgcggctgtgattgtgaagacagtggaagacaccacaacatctttgtggaggcctacaccatctgtttacacacttggtgaagctttggggaacaagattgcttggccttttgatatgatcatcttggacagtgaagtagcttccccttctgagaatcagactgcaggatcttcggtaattttcttcccatgtcacttgtcaattatctagtaagatcactcactgctcacttataatttatgcaccattctttaggctaaaaatgcaccatcagttaagatcaagataattgattggaatatggctgattctgtggttggtgagggtcgattgtgttcaacagaccgaaaagaacttgtgaacaatatgcctcttggtccttctgctgcaattgttaaggttgaaaaggtgtttaacaaagccgcgtatttgtggagaccaagtccaggaaagtttgttatgggagatgtactaaatgagaacattgcatggccacttcatagtatacaatatgtgaattcatctcctccactgtatgaaacaacatcaccagataaaagaccagcacctcctctggtaaccccctgcactttaacttacagcgtagaaaagaccatcacctgaatgcttggtattatttttgattcttatagaccctgagtatcagtactaaagcaccatggt

SEQ ID NO: 167481 - DNA, 1465 bp, Arabidopsis thaliana landsberg
  unsure (1)..(1465): unsure at all n locations
aaccggcacaaaaaccactagactggaacactcgtattaagattgctttaggagcagcaaaaggaattgagtatttccatgatgaggctgatcctccagtgatttaccgggatcttaaatcgtcaaatatattacttgacccagaatacgttgcgaaattattggatttcggtttagcaaagctaggtcctgttggagacacactacatgtgtcttcccgagttatgggaacttatggttattgtgctcctgaatatcaaagaactggctatctaacaaataaatcagatgtctacagctttggagttgtgttgttggaacttatatccggaagacgagctattgatggcgatagaccacctgaagaacaaaacttgatctcttgggtactttatcaagcaagagtcttgttaacatatttttgttgttgcttgagaagaaagaaaccgattaaagtcttttttttttttggnnnnnnnnnnnnnnnnnnaaagatagaaggatgtttgcgcagattgtggatccaaatctagaagggaattacccagtaaaagggttgcatcaagctctagcgattgcagcgatgtgtttgcaagaagaagcagagactaggccattgatgggagatgtggtcacagcacttgagttcttggctaagcctatagaggtggttgataacactaacactactcctgcctctcctactcagacatcatcatctgattcatcaaactaatttattttctttttcatccttttaaatcattaagtttttttttttcttttaacgtaaaacccaagaaaagtaattagggttagagttcgaagtcaatcggatgcaaacagttctttgtaatatggtgtaatttggcattggggagatcgcatcatctgtgaatcacattattaatctcttttgttgatatgttaaatcttgatctcttttatttacatttcaggattttgaaacctttgatggtttgatggttttggaggaagcactggattgttgataaaaccttgtcgatacagagtttcgatttctcaaaagagacatttgagaccttgttggagtcttttcatcactcatccatcgggatccagtggaaagattctctttctttaggggttttcagaggagatcgactttcgttgttacataagtcccgagtaacaagtaagatacacttgtgggtgatgaagaagcattggagtaggttaatgacagttggtctacctgaatttcccaagtttccaatatattcaagtcacttcattgagaatcatggtaagattctgctatatattcgtcactttgtaactaggtcaattagcatctacgttgtgggagagacataagaatgcccgaaagttgaatgttactcttctatggagtcttcaattggtggtcctggttgctactatatatgtcccaagcttacttccggttccaggcttttctagg

SEQ ID NO: 167482 - DNA, 633 bp, Arabidopsis thaliana landsberg
atgtatttcccaccgtcggaatatgtgaaaaaaaacaagctatcaacctggtgctatattcacgaagtgttgactacattcgataagttggagcctatgatgagcaagtctgagaggtcatggtttgagaaccatccgagttttcaacacatcttccacatgccaaaagacccaaaccaccgacttatgggtatgtggatgctccttcttcgcacggcgcacattaaaaggaagaaagaaccgtggttcatcgtcaatggcgtttcaatccgatatggtatatcagaacacgcattgatatcgggcttcaattgcaagaactatggatttatacacttgggtataaaaatcagggaaaacttggatttcaagaagaagcatttcaagaatactgttgtgaaacacgaagacgtgagagagaagctcatagaaatggtaccgttgggtgaaagatcaaaagaaaggttgaggatgatggttttgtatttcttaagcaacattatcatagcgcctatcaagaccggggataaggcacctcaagtggatgaattttgcctcaacgctgtgagtgatctcacattttgtaggaattttcagtgggggaggtattctttcgattacatgttaggaaac

SEQ ID NO: 167483 - DNA, 1204 bp, Arabidopsis thaliana landsberg
  unsure (1)..(1204): unsure at all n locations
atgggatctgttaattgttgtagggttcgtagttcgttgttaatggcgggttggtcgatggtagccgacgaggatgccgtcgattatagcaagactccaaagagtctcgatgcgaataggtctcctgaaagcgttaacccagaatctacagggtttgaaaagaagattaaagaactcatctccttgttccgacctttgcttgattcttttctcgctgagttttgttcggcggatggttttctacctcttcctgcgatgaccggtgaaggaaggaccgttgatttgttcaatctctttttgaacgtgactcacaaaggcggattcgatgcagtttctgagaatgggtcatgggatgaagttgttcaagagtctggattagagtcttatgactctgcatctgcgaaattgatctatgttaagtatcttgatgcatttggtcgatggttgaacagagttgttgcaggagatactgatgttagtagcgtggagttgtctggaatctctgatgctttggtggctagacttaacggttttttatctgaagtgaaaaagaaatatgagctgaggaaaggtagacctgcaaaggagttaggagcagagcttaaatggtttnnnnnnnnnnnnnnnnnnnnnnnnnnnnnnnnnnnnnnnnnnnnagagtctgcttcgaatgatgctgtgaaagagtttcagggatcaaaattggcggagaggagactggagcagataatgatccttgaatcagttactcaggaatgctcttctcctgggaagagaaaacgagaatgtcctttggagacattgaaatggttaagcgatgttgctaaggatccatgtgacccatctcttggtattgtgccagatagatcagagtgggtatcttatggaagtgaagagccatggaaacaacttcttctgtttagggcctcaagaacaaacaatgattcagcttgtgaaaagacttggcaggtgggtatataggtacagttattccataatctgcagttactggtattaaaaaaaaagcctataggtagatgcaccaactttcctccttctatgtcgatttgaaaattcgttattgattttaactgtggtgatgtgaacttttgcctgtaaaatcacccatcccatgtgtcattgaagcattctaagaagaaactaatagaaaattctccatcagattttagcagaagccactcga

SEQ ID NO: 167484 - DNA, 596 bp, Arabidopsis thaliana landsberg
  unsure (1)..(596): unsure at all n locations
gcgcccgagcaccctatcccgcgnggctcgacgacagtctggcggcgctccgctgggcagctctgaacggccccgacggggtcggagcggcgagccacttgggcttggccggtgattccgccggcggaaatctcgcggctgcggcctgcgtccggcttgtcggggcgggggaagcggtgcctgaccgactggcgctgatttgcgcggcgctggacgtggcgccgccgaagtctgtggccgctggcgacgtccacgtcgatgccgcaggcgtggcgatgatgatgtcgctctacgcgccgggcgcggagtcgctcgagcaggccgagctctcgccgatcaatgcatccgccgagacgctcgaaaacttccccccaaccctgttgcaggcgagcggcgcggaatatctgctcgacgacgcgcagcgctttatgtcgcgactgactgcgtcgcgacggcgcgccgtgctcagcatttggccggacctgccgcacgtttggcacgccttcacttcgctgcttccagaagctaagccgcgctcgacgaggtggcggactttctcgcggggcgggcgtagggtatgccgttacggaacccga

SEQ ID NO: 167485 - DNA, 449 bp, Arabidopsis thaliana landsberg
gcgatctacctgaccgagcaggggttgaagtccgacgacgatgtggtcgtctactgccgcatcggcgagcgctcctcgcacacctggttcgtgctcacgcagctgctcggcttcggcaatgtgcacaactacgacggctcgtggaccgagtggggcaactcggtgcgagtcccggtcgagctcggagcgccggccgagtgagtgcaggcgaccttcccgcgccgctggcggagctgatcgacgagttcggctcggtcggccccaaggatcggttgcagttgttgctggagctgaacgaggacctacctgatctgccggcacggtacgccgaccatcctgagcagctggagcaggtgcacgagtgccagaccccgttgttcctggcggtcgaggtgaccgacgggatcgtgcacctctttttaacgcgccccggaggcaccgacaacgcg

SEQ ID NO: 167486 - DNA, 937 bp, Arabidopsis thaliana landsberg; identical to SEQ ID NO: 15146

SEQ ID NO: 167487 - DNA, 1825 bp, Arabidopsis thaliana landsberg
  unsure (1)..(1825): unsure at all n locations
aagatgatgaacatgcccacaagagtgttcattgtccacatgtcctcttctctagcctcaagggtcttcattaaagcaaaggagctaggtttgatgaatccaggatatgtctggatccttaccaatggagttatcgatggcttacggtcgataaatgaaacgggtattgaggctatggaaggggtattgggtattaaaacttatattagaaaatccaaagatctagaaaaatttagatcacgttggaagaggagattcccacatatggagctgaatgtctatggattgtgggcttatgatgctaccaccgcattggccatggccattgaagaagctggaataaataatatgactttcagtaatgtggatacggggaggaatgtttctgaacttgatggtcttggtttatcacaattcggtccaaagcttctccaggcgctctcaacagttcagttcaaaggacttgcaggagacttccattttgtcagcaagcaactgcaaccatcggtgtttgagattgtcaatatgatcggaactggagaaaggtcaataggattctggacggagggaaatggtcttgtgaagaaacttgacaaagaacctcgaagcataggtactttatccacttggcaagatcatcttaaacatataatatggcctggagaggccagttctgttccaaaaggatgggagatcccgactaatggaaagaagttgcgcattggagttcccaagagaatcaatttcactgatctcgtgaaggtcacaagggatcctatcaccaattcaacggtagtcaaaggtttttgcatagatttttttgaggttgtaattcaagcaatgccttatgacgtctcttatgagttcattccttttgaaacatcggacggtaaaccagccggaaatcacaacgatctaatctaccaagtttaccttggggtgagttagaccatccatgcattcccaacacactcccatttagagagattatcctagtgaggtccctaattgaatctccttttacatttttttgtctctatcgcagaattatgacgcggttgtgggagatacgactatattggcaaataggtcctcttatgtcgacttcacatttccatttactaaatctggtgtgggattgattgtccccgtagaagaccaagtggcaagagacagtatcagtttcttgaagcccttaacatggaaactttggatgacttcctttttcttcttcttcctcattggttttactgtttgggttattgaacataggattaatccggactttcgcggaccagctaagtaccaagttagtacaatcttctggtttgccttttctaccatggtttttgctccaagtaaattccctttccatatctcaacatatagtgagtgttaaaaaaatacttctttccttaatgcttactctattaatatgcaacttgcaggagaaagagtgttcagctttggagctaggcttctggttatcacatggtactttattgtgctcgcgttgactcagagtaacacagccagcatggcgtcccttttgccatcacgacaacttgatccatcggtaaccagcatgagaagtttgctcgaaaaaggataaaatgtgggatatccaaggacatcattcatctttggaagacttaaannnnnnnnnnnnnnnnnnnnnnnnctcataccctttgatagcgcgtaagattccgacaagcttttgagaaaagtaccaaagaaaggcggtatctttgcagctttcatggaaggaccctgggtgaggctctttaatggagcaaaatgcacagattatcaaatggttaaa

SEQ ID NO: 167488 - DNA, 1195 bp, Arabidopsis thaliana landsberg
  unsure (1)..(1195): unsure at all n locations
aaaacccaagcgagacctttattggcaaatntgtgttgttttcagtatcatatcactatttttagatcaatcaccaaagcaaaggacatgctacctaatgtagaaagatcaccaactggtggttgcatggaacaaagtcatttttttatgcttgtatgtgaagacatacgcttctctcaaacatccaacatagattcatcagctcaatagcaagaagtagttctaaacgagctaattactccgagaagtctgtttcaaatgtctatacaaacaactgcagattcgaggatgattcaatccatcttccaagttgtgcttgttagtcttctagttctaggatccgtgagatggatacttgatgaactcaagagcaaagaaagtcgaatatccaaactatatggtttcagacagaaagaggcagtgtttgtcactaaagaggatcagcttgatgagagctgcaatgtctttgaaggacaatgggtttgggacaatgtctcttatcctctttatacagagaagagctgtccttatttagtcaaacacaacaacatgtcaacgaaatggacggcctgattcttattaccagaactggagatggaaaccgagctcatgcgacttgccaaggtaagaaacaaaaagcatgtgttgtttcatgatctcagattcaaacttgcgcagtgtttaaaacctctgagatgtttcaggttcaatgctctgaaactgttggacgtgttgagaaacaaaagactaatgttcataggagactcagtgcagagaagcacgttcgagtcaatggtctgtatggtgcaatcagtaattcctgagaagaagaagtccttccataggattcctcctatgaagatcttcaaagctgaggtacatcaaaactcatcttcctagaagagattttcaacatgaattgtaagacaaaaggctaatatggtttcttatactaaagtttatgcaattgatcaggaatacaatgcatccatcgagtattactgggcacctttcatcgtggaatcgatttcagatcatgcaactaatcatacagtacacaaaaggttggttaagctcgacgccattgaaaaacatagcaagagctgggaaggggttgatgttctagtctgtgagagctatgtatggtggatgcatcaacctaagatcaatgcaacgtaagctgtataacgcataa

SEQ ID NO: 167489 - DNA, 2511 bp, Arabidopsis thaliana landsberg
atgtccaaaaatcgtcgatattctttcggatcaagtgatggaagtcgcttaaaaattcttcaagtatcattatcgtcggggaagctccacctctgacgacacccatattgatgtggccggatctttgttcatgtgtgtgcataaagaagtggtatagatattacttgtcgaactaattggtgggaacatagaggatttgtgaagaaaccaaagacatcaacaatcaccaatagatggagatctaaactcgcaaggcaagagagaacttgataaaagtggtatcaaaagtcttgtccgaaatcaaaattattgatatcgtcgaagcaaaatttatagacctaattaaacagaaaaaacaaaaactgaaattaatatccgatttggattagagcatgatcgtttctaaagaaacgagaagggtaagagaaaaaaaaaaagctctcgaaagtatcctattgatttacatgatatgataagagatttataaagcaaaataaaaagctatagcctcaaaattgaaacaatcatgctgtagattcctatttttttttctcgcatcccaaataatagcacaactttatagtctttagaaggtctgtacattttttctctttttctaaaaaaagttttatatctatttctccatgaatcaaaagatctctatctaaactccctgaattgatacttcaacatttattaacccatatttttgggtttattcggttaactatactgttaaccatttataaccagagaaaaccatacatcaacgaaagaagaaaacaaaaatactctagcgagatttctctcttaggcactcttcccgagtgaccccaaagcagtaaagagtttttgaaaaaccagatctcacccacttttacttcctatacaaggcaattttacaactccggtgacctttctttgctctttctcgccgaggaaacttctcttaccatgccaccaggcatgggcggttggactatcaactcaacaggactccagaggactcaaacctcacttcggccctcccgctagagtatgtttctcaaccttgaagctctggaagaagactccaacaaccgtattctctcttctcacggtatggtttaaccttctgtccagcttctaacaatatcttaacctcgttgaactctcttggaaccttttttagcacttgaaccagcctgtatgtcatgctctatggcttagcaatgtacagttctcttactggggaagataactctcacctctaagtgaagaaccctctcgaaactttttaaaaactctgaagaaccgtctcccatcatctctcccaagtcattctgcccaagtctcatcatggccttaaggcactcttactctgcaaaaggtaaaggcatcctagagagtcctccttctcagacagagacattagacagtcctcttataacaatgaaaaggaaagatctcgagagtacatacctcatcccagaagtcgcccctctacaccatctcttagtgagcaagactcttcaaagcagtttatgccccctgctccaagacgtatcaaagccctactctggacaactcagaccttatccaggaaaactctctgaccctaattggacgactcacaaatctttctatccaaaggctatggtccctcatcccctttctctccaacagatggaacctgaaaggcaaggcaattggctcagacctaggaaaagatggcttccaattcaggtttgaccatgaagaagatctacaaaaggttctaaacaacagaccttaccattttgattactggatggttattctccaacgctgggagcctatcatatttgcctcattcccgtctcagatccccttttagattgaaatacaaggacttcctctacattactggaagccgaaaatgttgacagacatcgcagaggacattggagaccacctggaccatgaacttaccccctctgcagcaagaatctaagttatgataaacgggctacaacctattactaaagaaaccattgtggagttctctgaccgcagcgaagtcctagtcaccttggactacaaaagactgaagtctcactgtaaacactatctcaggcttactcatgcggagaaaaactgtccgggactagcccttattaaagggtctccaagggaccaagggataccctccgcctcaaagagcaaatctatccaaagctcctccaacaaaacgcaacaaaaagaaacccgagactctgtaaaatcccattaccacccctactctagacacaaaagctctcaccctgagaatttcaatgatagaaggaaagagtaccgtaatgattcctggaaaccatctacaaataagcggtctccgcgtcgacaatctccaccaagagatcagaactcatatagaggagattccaacaggtccttgagatcctccctgttcgccatcctgctagaacctctagagatcatcttacctcatctcttcagtggtgggaaaaatcaccacccaaggagcatcgt

SEQ ID NO: 167490 - DNA, 1898 bp, Arabidopsis thaliana landsberg
  unsure (1)..(1898): unsure at all n locations
tctctgttccaatgcgtagatttagactcaaatcgtattgaattccaaaaaaattgaacctcgatctcgtctcttgaagcccttgtgttctgcttccaagtctctctctgttagactcaagagacacaatctctaggagtgaaccgaacaatctccaattaaaacaaaccgaaccaatccaaataattcaattgaatgaaccattaacacatgttcgaaccaaaccgatactcatcagcctggaattcgaatctctcccggtagagaaaatttctaccgattagaatgaaccgattttgaatacaaaatatttcattaaaatttaatagttttactaacaatacacaaaaatcacaattaaatatatttcaaataaatatgataattaattattttatttcattattttgttttctagtaaatcctaaaccaaaccaaatcgaactgaacaatcgaatgtagaggtttatctnnnnnnnnnnnnnnnnnnnnnnnnnaactcaaaaggaagtttccttattgagaagcgttacattaaccaaaaaccatagtaatggtaagttaaaaaataaaaaaaatggtatgaatgttaagtatggtaagtaaaattaatgaagggaaattaagtatatataggaatggaaacaaaaacatatctctctctctataagaatgcctaatgaagtaaatggtatctcgacaattctctcataatgtcgttcttgtcagttcgtggccgcggcaatttagtacaaaaactacgaaccaacagaattttcaccggaatttgaagcgattttgcttctttatttcgcttttttcctcttcttctgttgctcctgagaaaacgattgactcggtggctactgagtcggtgttgaattcggtggtgaagatcaacactttttctagcaagcctaacatttgttatccttggcaaaataagccacaaaaaaaatccaaaggctcaggtatatatatcagcatgtgcatgcaattcgtatattacgtacaagccttgttttggtgcatgccattagtatatattacgtacaacaagccttgttttggtgtatataaggctataatatactcatgtggtagctagtcacatattggtatgttaattactttgattttagggtttgtgattccggggaagatgattattacaaacgctcatgtggtggctaatcacatattggtgctagtcataaagcgtggctcaccaaagaagtacaaagcagaagttaaagctattgggcgtgaatgtgatttggctattttggtgatcgaaagcaaagagttttgggaagatatgaatcctttggagcttggagacatgccctttttgcaagaatcagtaaatgttattggctatccaacaggtaatttgacaagtttattatgtttttgattggtagattatgttatatataataattcagttttccagtttgtgttttgagacgatttttacttcacttaagttggaaaactctctcggttttagagaaaattaatacattcttagcaaaatattcaatggcaggtggtgagaatatctccgttacaaaaggtgttgtgtctagaatagaatcaatggattatgctcacggtgccattaatctaccggcaatacaaacagatgcagcaatgaaccctggcaatagtggtggtccggtttgcataggaaacaaagttgttggtgtagcatttcaaacccttggacattctaataacataaggtaagtttttggatgatattgttctctcttttttttttagtgattatagtcaaaaatttaactgaagaatttgtgcatgtgggctttatcaaacaagtgcttaatcccagctcccagggttaaacattttataaccggtgttgaaaaaac

SEQ ID NO: 167491 - DNA, 345 bp, Arabidopsis thaliana landsberg
cccagcatggtattcactaacgtctacaatccgcgttcgctgatcgagcgcaaagacgaataccgcaatacgctggtcaaaaaaggggccacattgggtgccaactgcaccattgtctgtggcatcaccatcggtgagttcgccttcgtgggtgctggcgcggtggtcaacaaggacgtgccggcttatgcgctgatggtgggggtgccagcgcgtcagatcggatggatgagcgaatttggagaacagctgaaattgccacttgtaggggagggcgaggctacgtgttcacgtacaggtgtgctctatatattgcgcgcaggtagtgtctacaaggtggtttaa

SEQ ID NO: 167492 - DNA, 2723 bp, Arabidopsis thaliana landsberg
  unsure (1)..(2723): unsure at all n locations
gggtccatcatagacctgtccgcgttctccttccatcataaacactcgacttttccctttcacgttcatcccaacaacactcgactctcacttctctcatcaaccctcactctcaagctcaccaaacactcgatctcaatcaccaattcgccttaaccacttctcgctcataaccactcgaccactcttcgccaccaccacctctcattcgtctccgttttactcgaccacaactctcatcgcctctccatcatcaccgcctgctccctctctccaaggaaacaactcgacctcaccatttgattcactcgaccgccactttacgtcttctcaatcatactctcattcactcgacctctcgacaagagcacctccgcctctccatcgccacttctcaccttatcatgccaccaacaacactcgaccgcgactcctacatagcctcatcgtttccaccgctttgccacattcactcgaccaagctaccaccactttctcttctcaccgaatcattcactcgacttctccactgctttccaccgctcaagctccattagttcactcgacatcatctcattctcaaatcaactcgttcccaaatcaaacgagaagaagaaggaagacgccaccatcaacaaccgcttcactctaaccacgaaactagtttcactcgaccttacaaaatcactcgatcacaatccacagaccgaaaaagaaaaaagaaaaaaatcttcaaaaccgataggttcactttaacggtttactctgctgtattgtgtttttggttttattggaactaacgtattaacgtttatctttgagtttcatttgttttcaggtttcatcatgagtaacaacaatggaaaatcctttatggatcctgattataatgtagatgaagctgagtcttggtccactagaccagagagagaagaacacgtttacgagagctttagaggagaattcgaacgcaccgcagctcgacgtaatcagagaagagctgaaatcgccagaggaaagagagcgatgtcgagtagatatgagatgattgatgaagatatcaaaactgagtatgagcccgagtcatggcgcaaggagacgaagctgctgaacatacccgacgaggttacaatggaggaatatatcaggttctttaagatgaatgatttctggggaacgaggtatccgtgctatgagactttagcccagttggggttactggaggatgtgcaacatctgttcgagaagtgtcatctggagacactcatgtcttacccttacgctgcctatttggaggagacaatcgagtttctttccacgctgcaagtggagatgtatgaggcactcacagactttgagctggataccatggggttaggcttcttgacgttctcagtggatgaacagcggtatcagctttcgatcaagaagttggaagaactgtttggtttccctagtggaaagggaaccaaacccagatttgacagagaggagcttaaggatttgtgggccactatagggaacaatctaccgctaaactcggcgcggtccaagagcaaccaaatccagaatcctgtgatccactactttcagagatcggttgccaatgtcttttactcnnnnnnnnnnnnnnnnnnnnnnnnnnnnnnngacatggagatgatagattctacgcttacagggattctccgccggacgaacggaaagaatgtcttgagaggcgatctcaacaacgcaccaccagtaatgcctctgttgatccatctgtgtggatacaggaagtgggcattgacgaacgaaaagaagaaggtgagaggagcactatgcgtgggtggcgttgtgacgccaattctggaagcttgtggagtaccgctcaaggaaccagggttagcactgaggatgatgaacttggatcatttacgcatatgtgagttcttggagtttgacatggctggcgactttcaccgctacaggttcgagcaatcatcgattagaatcgccaactaggattctcgagggcaggaacattgacttcaagtgctgcgcttgaagatctttatttcgagggcagtccgccaactgaggagatcagtcacacagaaggagctagaacagaagatgttgatgagacagttgaaatagatgaggcggagtttgacacgagtatgtatcatttcagtgagcatatacctcctgcgagggaaatcaagagtttgagcgaagctcacaagaacaacagtaagctgcagaagtggtgcaagaaactggataagttacacgccaagtgcctcagggctatcaagtttcttaaggacaagcttagctgctcctcttccacgacagctatcccgcagggacagctccctcaggacatgccctcgaggagatatgacgcgcttgaggcaagtcggcgtaggcctgagccaagtcaccataggcctgagcctagtgaccgagtagtttcacaggtccctacgaggcattcatcattcgagcctcgggagctcgggagaaagaacaaggctgcactggctcggtctggcagcaggagtacacgacttctccagtcccgtagcttatgcgaccgcggtgctggctgcagcagaagaagagaggtcgagtatcatcagagcggtgctgaccgcgacgaaggagcagaggtcgagtacccccagggggaagctgagacacaatagggagattcttcgatggcctaggagcaa

SEQ ID NO: 167493 - DNA, 385 bp, Arabidopsis thaliana landsberg
ttattgattatgcaagatattatcctcgcatcccaatcgccccgccgcaaaatgctgcttgaatgggcagagataccgtttgatgtgatcgtgaagaatacggatgaatcctacccgccaggactggactttcccgatatcgccattcatattgcatacaacaaggcgaagacagtgcatgcgcatgtgcaggaagcctatcatggacaactggccaaacgcaccatacttgctgccgataccattgtggtacttaatggagaagtgatcggtaaacctaccgaccgttcagaagccattcgcatactcggtaaattaaacggcaaccgccaccaggtgatcaccggcgtagctatattgcagaacgggggtgaaatactgtttc

SEQ ID NO: 167494 - DNA, 1166 bp, Arabidopsis thaliana landsberg
ttagggagataagtccttttccttagagatcagcccttgtataaaaaaagaccttaaggtcacgtaatgaagaacacaattcgatcgatatgtttgcaactcttgacaaaccttttatccttttttttctttctttctactgcttatagaattttttccgtttcttataaagcaggctctaaagaagattgctgatgttgtggtcgcgaaggatgggaccggaaagtacagcacagtgaatgcggccattgcagcggcacctcaacacagccaaaagaaattcatcatctatataaagacaggcatttatgatgaaatcgtcgccattgagaatacgaaacccaatttaactcttataggtgatggtcaagattcaaccatcatcacgggcaatttaagcgctagcaatgttagaagaacgttctacactgcaacttttggtaagagtttgtgttctattcttgaataatttatagttttatcttctttataccaaactataacattcttaaagacaattctaattatactaaaaatatgtttgaagcttctaatggtaagggattcatcggagtagacatgtgcttccgaaacacggccgggccggcaaaaggaccagctgttgccctccgtgtgagtggtgatatgtccgtcatttacagatatcgtgtcgaggggtatcaggatgccttgtatcctcacatagaccgccagttttatagggagtgctttattaccggtactgtagatttcatttgtggaaacgcagcggcggtatttcaattctgccagattgtagcaagacagcctaagatggggcaaagcaatgtcataaccgctcaatcacgcgagactaaggacgacaaatcgggcttctcaattcaaaactgcaacatcacagcaagttcggatctagatacaacaaccgtaaaaacgtatcttggaaggccttggaggatattttcaacagtcgcggttctgcagtctttcatcggtgatttagttgatcccgcaggctggactccttgggaaggagaaactggtctgtcaactctccactaccgcgaatatcaaaataggggtccgggagctgtgactagcagaagggtgaagtggtcgggctttaaagttatgaaagatcctaaacaggctacaggattcactga

SEQ ID NO: 167495 - DNA, 2290 bp, Arabidopsis thaliana landsberg
tatccacaaacatttgtacaagacttgttttggaaaagtgtgcacatgttctcggagaatatcttaaatcgatggcctttcaagaagctcataagagaaagagctatccgaagggctttggaacttatccattaccatgacgaagccacccaatacattaccggtggaggtgtgccaaaggtaaacggtataagaatcaaaaatagaaaaaaaaaaaaaaaaatacaaagaattaaaaaacaattgtaaagagaaaccaaaaagttatatagagagattatgaaccgatacttttattaatcacttagggattcatagttatacatgagttagagaatctagttgacatatatgattgatctctctaagatattaataccaaaactatgtatactgaatcttataatatctatactaataagttatatggttaaaaaaaaaatgttttaggtgtttcatatgcttgcttgttgggcagaaggtcccgagagtggttactttaaaaaacatcttgctcgtgtctctggtttcatatggatttcggaggacggcctaaaaatccaggttagttcatttttatttggcactaatgcgaattcactaatgtatagagtttgacctttaaatcattttttcaagataacatcaaattatttccataatgtgtagagttttggtagccaaatatgggatacagttttgttgctaaaagtcatgttagctgctgatattgatgatgagataagatcaatgctaataaagggatactctttcttgaggaagtctcagcttatagagaatcctcctggttactatatcaaaatgtttagagacatatccaaaggaggatggggtttttcagacaaagatcaaggatggccagcttcagattgtacttccgagagtttagaggtgtgtgtttctctatcattcaatcccaatatattgatctgattactaattcccgtgtgtggtcagtgctgcctgatctttgagagcatgccttctaatttcattgatgagaaaatggacgtggagaggctttatgatgccgtcaatatgcttctctatttgcaggtaattgttacgagaacactttagacttatatctagtaataggagccgtagctatagtttgagagtagaagaagattaaagcaaagcttcctcttaacccaagtctctcttagaaaatcaggttaattgttggaagttcggtttcttattgattataagaggaccttatatagttcctcatacaaaccgacttaacaaaattaaaaggaaaactcccaaaaccaaaacacctaaactcttatcacatatcattcatttttttttatattaattttaaacaccacaagctgattagtaacacaattctcattcaaccaaaaagaaaacatacatttctcttattgacagagcgaaaatggaggtaaagctgtatgggagagagcgagtgggaaaaagtggctagaggtagtaatcatttgttcaagtttcatttttatttggatataaatgaaaaatatgatttcaaatattcaaatgcagtggcttattcccatagagtttatggaagagacaatactcgagcatgagtatgtagaatgcacggggtcagcagtagtagtgttgactcgcttcatgaaacagtttccaaggcacagaacaaaagaaatagaaacatttatatagctaaagctgtaaaatacatagagagtttgcaaatggcggatggttcgtggtatggaaattggggagtgtgtttcatatacgcgaccttctttgctgttcgaggtttagttgctgcgggcaagacttaccaaagctatgagccgatccgtcgagcggttcaattccttcttaagatacaaaatgatgaaggtggttggggagagagttttctctcttgtcccggcaagaagtatatttctttggaggggaataagaccaatgtggtaaataccgggacaagcaatgatggttctaataatgagtggtcagatggagagagatccattaccagttcatcgtgctgcgaaagttttaatcaactcgcaaatggagaatggtgattttccacaacaggtaacaagttgcatcaaccacatcattgtttggattttctcttagttaacggttaagtgattatcttgactctctatatcaggaaataatgggagtcttcaataggaactgcatgataacatatgccgcgtatcgaaacatttttccgatatgggcgttgggggagtaccgttgtcaggtattattgcaacaagga

SEQ ID NO: 167496 - DNA, 546 bp, Arabidopsis thaliana landsberg
catccggaaagtgcctggataggcgcctgcctgtttggcgccgtatctgctttctgggctaccatggctttcttcctggaaaaaccgccttacagttattctcttttactgatcggcttattcggcattatcggtaccggtggcgcgcttatttctccctacgtgggaaaggtaaccgaccggcagggccctttcaaacccatgcgctggggtattttgatgatggtggcgggctggctgatcttgtttgaagggcgcctgggcatcagcctggtgatcgtgggaattatcctgattgatatgggtatgcaaagtacacatgtgcctaacctggcccggaattacgccctgctgcccgaagcccgcacccggctcaataccatttatatgaccgcctttttcatcggcggcaccatcggctctaccgttggcagcatcgcctggaatataggtgaatggaccggcgtttgtatcgccgggatggtgatggctgttttgggggctctccccctatattttagaaaagagagaaggcaatctaaaaag

SEQ ID NO: 167497 - DNA, 1256 bp, Arabidopsis thaliana landsberg
  unsure (1)..(1256): unsure at all n locations
tcaaatactctccctcgtcgtctctatgaactcaaactcgggggagtatattnccttgtgccctcaagcacaagtaaaactggaaaacggaagatttcgtgttcttgaagacgtctcgtggcgcaccaataacaagtggcattgcctttctgtaaactggcggacattcaagttatcaagagaagaagacactctccattttatctgcataggttgcaatggcgataaccataaagaatttaacaatgttcctgttgagatcaaccatcctcttcatccaaatcattctctccagcttgtcgtgttgcaggaagatagtaccagggaatgctattgttgtgatgaagctcttagccgtatactttattattgctcggcttgcgattttgctataagtatactttgtgcgaggaaaccaccagtctttttgataaaccatcaccgtccggagtggcatggtcatcctcttgctctgtttccaagacaagctttcttaacttgcaacctttgcgccttggccgatccaagctctcctatctatatgtgtccgccttgtgactttgtgactcatctaagatgtatcaacttaccacgtgtcataaagatctctcgccacagccatcgtatatattttactccttcgtttgaccaagaaggtttgtcttgtggtgtttgtcgcagaaagatcaacaatgattatgggggatatttcttgcatcaaggagggttgtttgtatgcagcacattcaaaatgtgctacacaaagaaatgtgtgggatggtaaagaacttgagggagagcaagaagaagaaattaaagaagttgagccatttgtcaagataagcgatggaatcatacaacattttagtcatcaacatcatcatttgagacttgatgacaacataaatagagactacgatgagaacaaggagtgtcaagcatgcatcaggccaatctattttggtaacttctactcatgcatgcagtgtgagtttattctccacgaagaatgtgcaaatctttttcgccaaatttatcatcctatacatccacatatgctcagtctaggatatgacaatattgtggaccatgaggttatgtgtgcagcttacccttcgttgtggacagccggtttcttctacgagtgtggtaaagaaggatgtgatttcaggctacctgtgcggtatgacacatcctctgacccactatgccatgtaagccacatgtggtcctttattcctaacatccaaccctgt

SEQ ID NO: 167498 - DNA, 3992 bp, Arabidopsis thaliana landsberg
acttgcggtaacatccgagccaatctcacaaacaagaaagagacgggctaaggtcctcaacttacataatctgcgccaaatccagcttcctgaggtcgagggattgagatcccagaagctcttattcctgatgaggttgactcttacccacgacacccaaagcgagcctgcagccgtgaaaagcatccagataagctttagagccagcaccttattccaagccaactaaattcccgctagccaaggccgccacaaactttggaggaacaaacaatgtcccaggataacttcgcacctatggccgaattcggggctcctttcaaagaaaggcattatacatttgctccagttttcgtaaacactgattgggtaagaggaagatggaggtctaaaaattaatagtagagaagatgacagacttgagaagctgcaatcttcccgcaaaagaaaggtgccgagaagtccatgaactattcactttgtcgatgaggggttgaaaatcctgcctcctcattctgagacatgaaggcatgcttcgtgttcattatacataccacacatccataaaacagaccaaaacgacatcgtatatccctgcccaaatgccacgtcaatgccacaaatcgtttgattcatcaaccgttaatcgcaaattatcaccgtatattcttatgttgaaatcgtctaattttctttaagttcaggtagattatttgaataattcttaggtttaggtttaaaataaatcaaaggattgagttcaggttggaaaaacccgccaacaaaaagtttgggttgataaaagccgttttcccatcacatgtactctactgatttatgctagtgttgtattgtgttactatttgggttcaagtccacgtaatgcatgttgttgaaaaaaattacggtataaccaagtgtgggtgttaaattgtaaatgaagtatactgcaaacacctatgtgttcttaaatcttaagtaacatgttagtgaagggctttaggttcggaaacccgaaatttggtaaattggcaacaaaacaagaatggtagtatgagcagcctaaagtcaaatctgtttgaaagatagttttctgatgtggtgaaaccaaaagtggagcttacggtcctctattttgttgccttatatctaaatgtaaaggagaagtatagttaaggttataaatgtaattattcatgagctaaaccctatggttaagcctctatatatattgtaaatcattcctatcaatacataatacaacctacgttcatatggtatcagagccttaagatctgaaaacctaaaattttaagtttaaacggccgcctcctttttccaccttcttttcttcatcatttcttcaacgtgatcttcacgtcttatttaccggccatgtctacctcctccgagatcgttgccaactctgacgcaaccacgcttctcaacatcaacatgaacaacgtgactaaactcacaccaacgaacttcttgatgtggaggcgccaagtccatgccttgtttgatggctacgacttagctgggtaccttgacggatcgatcactgctcctgccacccagctcaccaccgacggcatcaccactgcaaatcctgcctacaaacactggaagagacaagacaaactcaactacgctgcgcttctcggtgcaatcacgatggccgtgcaacctattctctctaaggcaatgacatcggctgagatttggactacactcaacgagacgtatgcaaatccaagtcggggtcacatcctgcagattcgtgatcagctcaaacattggaagaaaggcaccaaaactatcgatgagtttttccaagggttcattactcgatttgatgagttagctcttcttgaaagtgctctactccatgaggatcaaatcgcacatattctggctggacttcctgcagattacaaagatgtcatcactcaaattgaaggccgtgagatcccaccaaagctctctgaaattcatgaaaaactcattaatcatgaattgaagctgaagaacatgcttgatgatgcctctgtagctccggtgactgcaaatgctgccacctacaaggcatctaatgcaaatcacaacggcaacaacaacaacaatcgcaacaacaaccagaatcgctctcgtgggaatcaaccatggaatcaaaacaactctgcacctcgttttgactcccgtggctcacaaggcaagggatatcaaggaaaatgccagatttgtgggatccatgggcatagtgcacggaggtgttcacagttccaaggtcctagtagtggctacccatctgctggcggtggttatcaagcatcaccgttcacgccgtggcaacctcgtgccaatgttgcaacggcaccatggatttttgacactggcgcgacccaccatttgacttcggatctcgccaacctgtcaatgcaccagccatatcatggaggcgaggaagtgaccattgccgatggttcgggtctcccgataacacacacgggttctggtcttcttcctactccctctagatctctttctctaaaggatatattatatgtgcctgatgttcgcaaaaaccttatttcggtttatcgattgtgtaatactaatggtgtgtcggtggaattctttcctgctcattttcaggtgaaggatctcagcacgggggtccagttactccaaggcaaaactaagaatgagctatatgagtggccggttaatcatcacgccatcaccgctttctccgcatcaccatcaccaaaaaccgacctctcatcttggcattatagacttgggcatcctactttatctactctcaaaaccattgtttcccagttttctttacctctttcaaattcgtttcacaaacaattgtcatgttccgattgtttgatcaataagagtcacaaattgccttttcacttaaacacaatcacttccactcaacctcttgaatatctctacacagacgtgtggacgtctccggttatgtctattgatcatttcaaatattatttggtgattgttgatcatttcacgagatatacatggttgtatccattgaaacaaaaatctcaagtcaaagaggtgtttatagcgttcaaggcacttgtagaaaaccggttccagacccgcgtgcgcaccttatactctgacaatggtggcgaatttattgcattgcggtcttatttggcggtacatggcatctctcatctcaccacaccaccacatacaccggaacataatggtattgctgagaggaagcatcgtcatatcgttgagacgggactcactctccttactcatgcctctataccaaagtcatattggccatatgcgttcgctactgcggtgtatttaatcaatcgaatgccaaccgaggtcataaacggggtgtctccttatgccaaactatttaagcaatctccaaattacttgaagcttcgagtttttggatgtgtatgttttccatggctgcgaccgtaccgggctaacaagttgcaagagcgatcaacgccgtgtgtgttcgtcgggtattcactaacgcaaagtgcctacttgtgcttggaaatacagagtggtcggctctacacttctagacatgtgcaatttattgaaacgagttttctttttagctcgccggtgttgccgtcatccaccgttgttgctgaatcgccaatctcgcctggtcaacctccggtgacattcgtgcccactaaaatagctcattcttctctgcctccgtgctcggttcttcaccctccgtcgccagctcaaccatcatcagtgtcacccaataacgcatcaccgtcgttgtcgccaatcactccgtcgtcatcaccacacagctcgtcgtcgacgtctccacctgcgccacaattctcatctcctccaaattcagaacgggcctcattcaacaagggcccaacaacatcaactccaagcccaaacaggggatcctctagagtcgacctgcaggc

SEQ ID NO: 167499 - DNA, 587 bp, Arabidopsis thaliana landsberg
agcgctcaattcatctaccgtcacgttctctctagcccgtcaagcctcaagcctctcgtaagcttaatctcgtctcgcgtgaaacgcacgcgaagctgggcggttgctttaaaaggcttaatgctaatgcacggcttcttcctctgtaaatcaaccgtagcagaatcgatcggacggttacctttcgatctttcgagtttcggcgaaggtaattcacggattatgagcaaatccggtgggtttaatctcttcgtacgtgcttatttcgcgtttcttgatcgaagatcgattctgtttcacgatgggaatcgtcatcgatacaacgaagaatcatcggttctgattcgacttgtgattattcgtaagatgcagattattgttgattctttgattagaatcaaaccgattggtgaaaacatgatgatacctgtgattaatgaagctatggagaatgtggttagtgagattatggagatttacggttggatttgtcgtcgtattgctgaagttttacctaacgtgcactccaagataggtaaaacagaggcagacttggcgttgaagattgttgctaaatccatgaagca

SEQ ID NO: 167500 - DNA, 2652 bp, Arabidopsis thaliana landsberg
  unsure (1)..(2652): unsure at all n locations
gacataacaacaaccagggtggctacaaaggatacaataacttcaaaaccaacaatcccaacctctcttaccgcagcaccaacgttgctaatcctcaggatcaggtgtatcctccacagcaacaacaaggtcagaacaaaccttttgttccctacaaccaaggtttcgttcctaagctgcaatttcaggggaactaccagccgccaccaccacctgggtttgcaactcagcaaaaaccaaagtcccgctgctcttgatgctgaaatgaaacaaatggtccaacagctgctacagggacaagcatctagctcaatggaaattgctaagaagttatctgaattacaccataagctggactgcagctacaatgacctaaatgccaaagtggaggtattgaacacaaaagtcagatacttggaaggacaatcagcttctacctctgttcccaaagttacaggacttccagggaagtcaattcagaatcccaaggagtatgctaatgttcatgctatcaccatcaggaatggaagagagttatccattagagagagacccaagtcagtcactaaggacagtacataccaagatggggaggatttcagtctcaataaagatcaagctgacaaacaactcgagcaatcactcgaccagtcactcgagcagccactcgacaaatcactcgagtagccactcgaccagtcactagagcagccactcgaccactgtactcgaccgacattcccagcaatatcaccatctactctgaaaccagttgttgtcaaaaacaaagaaaaagtcttcattcctcatccttacaagcccccacttccatttcctggtcgacacaagaaagagttagaagataagtacagagctatgtttgccaagaacataaaacaagttgaagccaagatacctcttgttgatactctcacgcgtatcccggattcccaaaaattcctgaaagacttgatcatggagagaattcaagaggttgagaaaacaacagttatgagccattagtgtagtgccataatacaggagaaagatgaaccagagaagctaggagaccctggttcattcactctaccatgctccctaggttcattgacattcaataaatgcctttgtgacctagcagcatcagtaagtctaatgccactctcagtagctaagaggttgggttttaacaaatataaatattgcaatatcttcttgattttggctgatgggtctgttagacaaccgcatgggttattagaacatttgcctatcaagattggaaatgtggaggtgcctacagactttatattgtttaacatggatgttgaaccaaaagatcccttgatcttaggaaggccctttttggctacatctggagcaatcatagatgttaagaaaggaaagattgattttaatatggggaaggattttaaaatgaagtttgacatcaatgatgctatgaagaagccgacaatagaaggacaaaccttcttagttgaggaaaaggatctgctagttgatgaacttctagtggagcttaaagaagcaaataactcaaaaactgttttgaccaacagtggtaaagctgggtatctccctagtgaaactttgagttctgagaagtcattagactcacacaaggcaacagttggctcaaaggtttacaagggcttgatggggtctgacacaaaggttatgaaagctaatgaagtaagttcaacacatgctcgaccaactgattccaccaacaactcgaagaagcctccaacttgccctgaaagctcatgctcgaccaaacaactcatggtaagcactcagaagttagatgattggttagaactcaaggagagatctaaatggcaggagaaagccatacaagagctaacacatattgtgaaagagctgaaggatcaaatcaaggagctcaatggaaaagccaaccaagtaccactcaacatcaaggacgcccctgacgatggagccactattcttgtcagcaaagaaggatgtgaattcacatcggaatggtgtagaggagaagactatcttgataaaaaagaagcttactgtgaggacatggcctctgagtacccaattgcagacctgtcaagaaaccctaatgagtatgatgatcactctactcaagaaggagaggagaccacatttcctctctacaacccaccctgagcctaatgagtatgagaagtcaagcttagagacttaaaacaagctcacttgggaggaaatcccatgtctatctttgtacatatctttatttttccttgttgattttgatgcatttggttagtgtcttcaggagataagtataaagagcctagtgaaatggattctgattctgcgagtaaagcagtatactcgaccacagagcaatgaaaaatactcgaccatgttttannnnnnnnnnnnnnnnnnnncactcgaccgcggttctgggcgtagcagaagaagggaggtctagtatactcagggtggtgctggccgcaacagagctggtgaggtcgagtacccacctgctggagctgatacagaacagggcggctcgtctatggcctaggatcaatcataggcagccattgacgaccaactccgttcattcttcgactaaggtaagcgcctcacttcaccatt

SEQ ID NO: 167501 - DNA, 1240 bp, Arabidopsis thaliana landsberg; identical to SEQ ID NO: 18974

SEQ ID NO: 167502 - DNA, 1103 bp, Arabidopsis thaliana landsberg; identical to SEQ ID NO: 62109

SEQ ID NO: 167503 - DNA, 537 bp, Arabidopsis thaliana landsberg
atgtctctagttgaaacctttttcttgagccacaatccaaaagacgtaagatcactccagagaccatagagtctccgtctcctaattgcaatcattggttcgtccgcaataagatctgtatctcctgctatacaacagtggacaatttcgaaggcagatcttttgattatctctacaaagggatgcagatgagtaacgaagctttaggttttacaaaagggctcatctctcaaacctcttggcttgaagacaagaagcttcacttagtacttgacttggaccagacgcttattcacaccattaaaacttcactgctttatgaatctgaaaagtatataatagaggaagttgaatcgaggaaagatataaagagattcaacactggctttcctgaagaatctttgataaagttgagaccttttgttcaccagtttctgaaagaatgtaatgagatgttctctatgtacgtttacacaaagggtggttatgactatgctcggctcgtgttggagatgattgatccggacaaggtttact

SEQ ID NO: 167504 - DNA, 2364 bp, Arabidopsis thaliana landsberg
tctacggtacgctgctctagccctcattaatggcgttttgtgcccaacgtcgggtagaagcaaaatatctccggtacatgcggacatggacgaaaatctggataagttttttaatcatccgtggggaactacatcttttttattgacgttgaagagtgttacagcaaggggtgctaataagcttatgcggaaatctgtaacggttcagggattcccacacgcaatccaactattgttccttgaaagtgtgcctcgaattagggaattgcaattccctgaggttgacgaagatgatgactcagagatggaggaaacgcagaaggaaattgagcgtctatggagcttgaagttggatattgtctggaaagtcgataggcagtcccaggtaatcagtgcatttcgtgcttttataaaatacatagtatcttacttttatatcatgctatacaaaactgtagttactgtaattctccataacttgatttttaagtgtctagtatgatttattgatagatcacatgttttaaatatatgtaatatgctttaatttaatcacccgtgttatgtttcgtctgtagttgggtgtaaatctagttggtttaggggataacgtaataatgtattagctattttactacaccttcgtattgttttaaatttatatcatctgctatttatcaatatactctggcttttaaaagtaaaactaaacattcttcatttataacaatagcatgatcttaaattaataaattttcatttttttgcaaaccaaagtcacatctgttatgagtggtacagctaatggtgaccctttctcgagagggtggattgatgacgaagctgaccctcgtgttgacaacttattgcaacttattagagaggatcacctttttaagggatccatgttcttaagtggtgtagtccctgatttgttgcctgatgaaaagaatgacagcagcgatgtttgtagcactcatgattgtggtgatgatgacaaccatcaaactgatggaaccatggatggctcctccaaaactcgtaaagctaaaggccagtttaacataccagactcgatcaaaaactatattgacaaaaaagacaagcgaatggagactcgtatgttgaaggctatagctgattcggaggctagattaaacagcttactgagagcaacccatggcaaacatcacacgtatgaagaggttcaacgtactggagttggtggaaaggaaggatctgttgttgatctggatacatctgtgggagtgcatactatgaagaatagtgcaacatatattcttgatcaagttttaggggaagtgatggaagatatcaatgatgattcatctgcacagccgacaaatacaaaacatcgctcatttccgaaggcaaagcaactgaaccgtagttcgctggtaataatttgtaaggttatcttcttttacctactatttgttaccaattactaattctataactttttgtcatgtacagaaggggaggagagtacacaatagtacaacgtctaccacccttccacctgttgaggtaaacactagatcaggagatattgctgcttaagtagagaaaccattatcacctcaagctgatacgatcgctcaagttaaaggttacgggattgttggcgactccgatgaagtacctcaagatggaaatcatgacagtccttcaagcaatgaaacaccaattccagatgaagctccccaactccatgttccagttaatcctgacacagaagataatgcttatattgaattggagccaaacatcacggaaccatatatggtattgcattcaccttttggaactaagaacccatcctctttgcaagttgttgaattaacatgttttcccaattcattggtcctatttggttcattgatgtttgttttttggttttccagtttgacgcagatacgaatagcaatgataaatccagaccacacccacaggacgaagagattgtgtcagggaaagatgaagaaacaatcgctgccccacctactttatgtgatgcggttagagctgattatttgtatagttagtttgtttgatgtcatcttaccacatatttatgttgtgggtttgatgtaggctaatttatccaaaccatcggctgatgccattgtttctgacagagatgcacatagaatagccgatcctcctgctttaaatgatgaggtaagagctgaatttttaaaataccgtgtgtgcgatgtaatgtaccacatttgaatgtttttcccacaatgtaagccaatttatccagctcggtgatgataaatgcttcggcctcaggctccccgccaactgaagtagtggctgacctgcgatgacaag

SEQ ID NO: 167505 - DNA, 455 bp, Arabidopsis thaliana landsberg
ctcatgtgtgttagctcaaagtggtgcaaaaccaacggctggttcgatcaacatcacagccactaatttttgcccaccaaattatcaagaaccggttcagtaccattggtgcaaccctcctaacaagcactttgatctatcaatgaaaatgttcactacggtggctgagtaccgagcagggatagttccggtgaagttccggcgagtggcctgtcataagagaggtggtgttaggtttgagattaagggcaatccttattatatcatggttttggtttataacgttggaggggcaggagatgtgagtaacgttgaaattagagggcaaaagagtaattggatcgttatgaagagaaattgggggcaaatttgggataccggtttagatttggttggacaaagtatctcgtttatggttcggaccagcgatggtaggagcatgacgttgtttaatg

SEQ ID NO: 167506 - DNA, 1584 bp, Arabidopsis thaliana landsberg; identical to SEQ ID NO: 25948

SEQ ID NO: 167507 - DNA, 1817 bp, Arabidopsis thaliana landsberg; identical to SEQ ID NO: 34677

SEQ ID NO: 167508 - DNA, 400 bp, Arabidopsis thaliana landsberg
agaaaaatgaagcgcccgccgattgcggtgattgcggttgtaaccatagtggttctggcgctggtcgggctggtgagctggcggctgctgtcgaagccaggcggcactgtgcccggcaccgaaatggcgacgacaacggcgccccccgtcgccgaggccaaggggccgctggcggtctatgccaagggcgcgctggccaagctggtaacgaacgaggcgcctgtcacaatagcggatatcagctttatcgaccgcaaccagaaaccggtcaagctcagcgatttcaagggccaggtcgtggtgctgaatgtctgggcgacgtggtgcgcgccctgccggttcgagatgccgaccctggccaagcttcaggaacactatgccggcaagggcgtgaaagtgt

SEQ ID NO: 167509 - DNA, 3214 bp, Arabidopsis thaliana landsberg
  unsure (1)..(3214): unsure at all n locations
aaagatcgtctccggaaaggctggagctggaagctcgctgacccgggagactccactgtctacctctccgacaacagaatggacacggattgcgaggaagaagaagactggggagaagcaagccgttctttctgttcctccgacctcaaaggagaacggaaagaaagtcgccacgacagcagcaccattctaccccgacgtcctcttcatcgggagagcggagtcgcctgccatctctgatgatgaaccgaccgcgcctggagaagaaccacctcaacgagagtcccgccgacggaggaaccgatgcaggaacatccgacgacatcacgcagctggagaacgggatccggagcagcctgtctcgcgagacgaggtctcagagatgggagaaactccggaagaacgcgtcttcagggaacgaaggaactcccgacgacgagatcgccatcggactcaggagcaagccgagcaagatgcaaggcaacgacgcgagaatccgctcttcgggcgcaacctgaaccccgacttcgcccgagctatgaatacgccgagcgaagtcagaggcgttctagcccggatagctgacggacttcctcggacccccgacgccgagggataccggcgcctgttcactcaggcagccaaccatcttctaccgctcgctcacccgccgaacgatctacgacacgccatcaacagtcgccgagacgcgcgaagctctatcaatcgttcgcgtgaacggcggcacgagaacgaaattcgtcgccgggaggagtacgacagggatcacggcatcccagctcggagtcaggcaaccagaaccgagtcagcaacggcttcgactagcggtactacccggggtcggtcgaggaaccacaacgactactcccctccccgggacagacatcatccccgacgacgggaggacacgtgtggagtgacagcccttactccgcgccttagggccattcagtggccccctaacttcaaggtatccaatgtcgacaaatatgaacctaagcaggatccaggaggctggttggccgtctacaccactgccgcccgagccgccggggcgtccgaggatgtgatgaccgcgtacttacccattgtcctcgggcaagacgcgctacaatcgctgtgacatctaccccgacactgcatcgacgactggggagacttcagtcggcgcttcaccgccaattttcagtccctctccgacaaaccggcgcaaccgtgggacctcaaatccatcaagcgccggggagacgaaactctccggtcatacctcaaaaggttccagaccatgagaaatcgtatccctgaggtcacggaggcggccgtgatcgaggacttctacagaggatccaatgactcggccttcgtccgagccatattgcaaaaggcgccgactacctccgaggagctgttccgagaagccgacctctacatcaccgccgacgagcgggcccaggacctcatcggaggagcgacgccgcaccggcagcaccacgacgcgacgtgaaccagcaacccgacaaacgctgggagaagaggcccgcgaagaagtcacgccgccgggcaccaacctctcgtgccgaggaggcctcgcggaggcgaacgcacactggacgacatcctcgacgcccagtgcccgtaccacaaggacatgcgccacacccttcggaactgcagagacttcaagcactccgtcggacacggtcggcccttccaacctctacctcctcctccgccgcggggaggaccaggagaaccgcgacaaccccagcagcaggaggaaggaggaggtggagccttcccgcgcgttgacagagaggtcaacgtcatcttcggcggacacggatcgcaggagaacagaagacaacaaaaggtcaacgnnnnnnnnnnnnnnnnnnnnnnnnncggtcctcccgccccataccggtggtcagaacatccgatcaccttcactcgggaagatcaatggctcaacttcgaccaccccggcaaatacccgctcctcgtcgatccggtgatccgagagagccgggtgaagaaggtgctagtggacggggggagtagcatcaacgtcaccttcccccggacacttcaaggcttgggggttcacctcaaagagctccacgagtcggacactcctttctttggcatcgtgccgactgaaggggaatacccgctgggccacatctacatgcctgtcaccttcggaactccggataattacagaaccgagttcctgaggttcgaagtggcgaacttcgactgcgggtacaacgccatcatcggaaggccagggctggccaagttcatggccattccacactacacgtacatgatactgaagatgccaggaccacgaggaatcataactgtacgcgccgacttccaaggcgccgcagagtgtttccgagtggccatccaagcggccctcaccaccaagccatcagcgatttcttctacaccggcgaactctaagcctgacgaagacctcgcagtaccggcaaacgaagctcaggccgcgacctctatgcggccgactgaagaaactaaaaggatcaacctggggttcgctgatgaacgcaagactgccattatcagctccagcctagacgacaaataggaaagcgcgctcgtccagtttctgcaagataaccgagacgtattcgcatggcaacctgcggatatgccgggagtcccaagagaactggccgagcacaaactgaaagtctacccccaggcgaggccgattcgacaaaagctacgtcgcttcacgcccgataagagagaggccattcgcgccgaattagctcgcctggtcgcggctggatttattagagaagtgttacaccctgagtggttagccaatcctgttcttgtactaaaaaagaataaagtggattggtgcatgtgcgtcgactataccgacctcaacaaacactgtctgaaggatcccttcgggctcccgaggatagatcaggtggtggattccaccgctggatgttctgtgctgtctttcttagattgttattccgggtatcatcagattagtttggcaaaagaagacgaggaaaaaacggcgttcatcaccccgtttggtgctttctgttatacctccatgtcgttcggcctcaaaaacgttggagcgacttatcagagagccattcaaacatgcttagccgatcactggggcaagcgt

SEQ ID NO: 167510 - DNA, 397 bp, Arabidopsis thaliana landsberg
cgatcaccaaaaagtacaagtggcttcctgttctacattggagatcggctttcacatgatgtcgaagaagtaaccaaattttgttactctctccacttcatgtgtgttccatgttaagtttgccacaagatgaaccaacaaaaatctatgtggagaagaagtgaccaataactttggcaaagaaccccaccttccatgatcaaagtaagcacattgacacatgttattattacattagagagtgtgttaacaagaaagatgtgcaagaaattggagtatgtgaagagacatgatcaagtagcccatattttcactaagcctcttgaacgagaagactatcaagatgaggagtttggttgttgtaataaaataaaatttaagaggacatgttgaaagt

SEQ ID NO: 167511 - DNA, 609 bp, Arabidopsis thaliana landsberg
cgtcatgcagtcagagcgtgctcagacatggattccttcctccgcccgagaatatcacgtcatgcagaagctaaagacatgttgtaaccagttttcaggtttcccaatgaagccagtaactacccaagctctgttccaatgcacgtgggaccatgaagaatacttgcaagcgtatgtccgaaggtttctgcgtctcagggcccaggcaccaatgatgcaaaatgagattattatcgaggctatgatcaaagggctccgaccaggaccgacgacacagtacttcgccaggaagccaccacaaactttggaaaagcttctgtagaagatggacgagtacattagggtcgataatgactttcggtagagaagggaagaggcctacatatactccgagatgactaggggcttcggaggaaggctccaccctaggcatgtcaggacgattcataaccctagctcaaatgatgataggggtaatcatacttaagggcatcaacacagctctcagtcatcaggaacacaacaaagctcctttaggccactagctccaagaggcacaggagaaagaagcttccatggaaggttctgctcccaaccaagaaggttgtt

SEQ ID NO: 167512 - DNA, 256 bp, Arabidopsis thaliana landsberg
gagaatactacataccttatcaaaacatggacatctatttttttagcgcaggactaggttctaggggactggtgaaataaaatatagcacctaacaacgtatcttcacaaaccaataactacaacatcacccctttcattcttgtgtcacttaggtatcgatcccttccacccttttttacatcctatctatctcttaactcctcatgggaacagctctcaaataatatcttagtacgtctacctttactccaata

SEQ ID NO: 167513 - DNA, 561 bp, Arabidopsis thaliana landsberg
  unsure (1)..(561): unsure at all n locations
tattttccccggaaaaatttgccgagatggccctgcgtatttcggaccatgttgaccagttgcacaatacgctcgacaaccttctccgctgnnnnnnnnnnnnnnnnnnnnnnnnnacagcgcatcccgaaaaaaccgaactggcttccatcatcaacgacaggttcagcatactgcagcagaagatggaggagaaaaatatcagccttgttatcaatgatctccagcaaaccgtttgggtagatcccgatcacctgcggctgatcgtgcgtaacctgctttccaatgcgatcaaatacagttaccggaacggaaatatcctggttacttcccggtcagagaacgacctggtaaccctgatcattgaagaccatggcattggtatgagcgagggtatgaggaaagatatcttccatcccgatattatttactccaagcccggtacggagaatgaaaaaggcacgggcctcggtttcccgctctccaaagagtttgtggaaaaaaacagaagcaaaatctcggtagaaagcgaagaaaacatgggcagccgcggctttgctc

SEQ ID NO: 167514 - DNA, 457 bp, Arabidopsis thaliana landsberg
  unsure (1)..(457): unsure at all n locations
ctatgtgcaaaaccaaggaggtttcaataaaggtttcaacaacttcaagcataaccatcncaatctgtcttacagaagtacaaatgttgcaaacacgcaggactaagtctacccctcacagcagcagaatcaacccaagccctttgttttatacaaccaagttcaggggtatgttcctaagtagtagtaccagagcaactatcagcagcaacttccaccatcggggttcacacagcagcaaaatcaacaatcatcaccaactccagattgagacttgaagaacatgttacaacagattctccagggacaagcagcaggagcaatggatctcgccaaaaagatggcagaaatccacaacaaggttgattgcactttcaaccctccaaacatcaaacttgaggcacttacctctaagatctgttacatggaaggacaaacagggtccacctctgctccc

SEQ ID NO: 167515 - DNA, 596 bp, Arabidopsis thaliana landsberg
cccagaaagaaaagagcacctcccaagttacaaaattggctggaccagctttgacccaaacagacaatgtttcctcacagcggtaaaacatatggtctacttggtctgttctttgtatcgtcagtaaacaaatagagttagtgcatgagagattgctctttttgtctgtaggagagagatggagtaccaattccatagaggaaatgctcctgttactcgagtttcatcatatcaggtgtgtgttttatttggtgatcttgacatatgtgtcattaaaaacttggtcatctgttttccactgaatatatcttggccaaaataagtccaactggaattgtgtaggagtattttgcgtcatcttcaatgaatcagatggttaaaactgtgagggagaaactcaataaggtacaaaacttaccgagtttgtattttacaagtgaactctttacaaattttgtagacgcttgaagaaaacctttttctaattgtcacattgtaaacagattgaagaaagtggtaaccaaaagaggttacaaccaagcagccaaacacaacctgacttcaagagaacccgagtcgataaccgaagaagaata

SEQ ID NO: 167516 - DNA, 451 bp, Arabidopsis thaliana landsberg
atgggaaactgtcaagcagtggatacagcgagagtggtgatacaacacccaaatgggaaagaagaaaagctaagttgtccagtttctgctagttatgtgatgaagatgaatcctggccactgtgtttctctcctcatctctaccaccgcaatctcgtcagcatcttccggtcatggagggcctcttaggctcacgaggatcaagctccttcgtcccatggatacgcttgttctcggccacgtctatagactcattaccaccaaaggtatatattagagtaacatgcctaaatctactccaacatttcaactaacaataattctactccaactctatattcttgcatctcgattacatatctcgttaattgaatttgaactatatttattagtcccggtggataaaatatgttaacaatatatttttggaaagattgcaaacccctagggaa

SEQ ID NO: 167517 - DNA, 1049 bp, Arabidopsis thaliana landsberg
atcccatcaataacgtttttagaatggtagccgggaaacgattttataggtgagggcacagagcaagacgaagttgcgcagaagtgagacatctgatggacgagattgtgaccagcgctggcgcgggaatgcagctgactatttaccaatcatgcgttggttcactaattatgagaaacgcgtcaagaacttagcggttcggatcgataagtttttgcagagtcttgtggatgagaaacgtgcggataaagaaatgggtaccactatgatagatcacttgctttctctccaagaaactcagcctgattactatacagatgtcactcttaaaggaattataattgtaagtattaaggaatccatatagatagtctatatgtaagaacaataatcaaactttatgttggcgaattattgattttgattttgaatttacaggtaatgataattgctggatctgaaacaatagcatggactttagaatgggcgatgctgaatgtgttgaacgaccagaagtattagagaaagcgaggaccgaaatcgatacgaaaatcggttttgaccggttaatagatgaagcggatactaaaaatctgccttatctccaatggattgtgttggagaccttacgtctttaccctgtagctccaacaaatattccacacatgacgtcagatgattgcatattggcaggatacgacgttccacgtgggtcgatgttattggtgaacgtatggtccatgcatagagacccgtctatatgggaagccccagaaatgttcaagccagagaggttcaaaaatgaaaagcttaatcagaagttgttgtcgtttgggtttggacgacgagcttgtcccggggttggcctagctcatcggttaatgagcttggctcttggatcgatggttcagtgtttcgaatggcagagaattggtgaagaatatgtagacactagagaagaacctatggccatgatgcgtcctgtgacaccgttgctagccatgtgtaaagctcgtcccattgtccataagtttctcgatgcttttgct

SEQ ID NO: 167518 - DNA, 948 bp, Arabidopsis thaliana landsberg
tgtagaggccagggattttttctggcacatgcaattaactagtatcagtctcatttctagtctcactgatttattttgttttccggtcgtgtgagcatcttggatctctagagcttggcaaatggatccatatgtatgctgggggcagagagaagagggtttctgaaacaaactggtgtttgcaatgctcttattgaaatgtactcgaaatgtggtgtgattagtcaagctatccaattgtttggccaaatggaagggaaagatgttatatcatggagtacgatgatctctgggtatgcatatcacgggaacgctcacggagcaatcgaaacattcaatgaaatgcagagagcgaaggtgaagcctaacgggatcacatttcttggtcttttatcagcttgttcacatgttggtatgtggcaagaagggttgaggtattttgatatgatgagacaagattatcaaatagaacctaagatcgaacactatggctgtttgattgatgttttggcaagagcaggaaaactagaacgagctgttgaaataacaaagacaatgccgatgaaacccgactcgaagatatggggttcattgttgagctcttgcagaacaccaggcaatcttgatgttgctctggttgcaatggatcatcttgtggagctagagccggaggatatgggaaattatgttttgcttgccaatatttacgcagatttgggaaaatgggaggatgtttcgagattgagaaagatgataaggaacgaaaatatgaagaaaacgccaggtggtagtttgatagaagtgaacaacattgttcaggaattcgtttcaggagataacagtaaacctttttggactgagatatctatagtgctgcagttgtttacttcacatcaagatcaggatgtgattacaaacaacaatgctcttgcatttataggcatagtt

SEQ ID NO: 167519 - DNA, 570 bp, Arabidopsis thaliana landsberg
ggaatggaagaagaagaagatccatcgacaaaaccacttggaagattgtctgtgttctactatggagttggacatatgcttaatgacattactgcttcttgttggttcacttaccttctcttgtttttaacccaaattggcctctccccaaggtaaaatcttctcctcagtttttgtaaaaagttcttcacttttaatctgtgggttagtgagattaatcgagatttgttctgaagggatgctgcaattgtcatgctctctggtcaagttgctgatggttttgctacaatcttcatcggtgaattggtaacttcttttggaacttttgagttttcaatcacacaaaatttgtagtcttgtgtaatttaaggtaaatctgagttgatgtaaaatgattttttgttctacttcatatgacagattgatagatttgggcatttcaaaatttggcatgctgcaggatccttattagttgctatctcattttcctctgtttttggcggttgtttgccttgttcactcctccataataactcttcaactatcgaaacattatcgtacagtatgttt

SEQ ID NO: 167520 - DNA, 761 bp, Arabidopsis thaliana landsberg
catagcttcaagggaatttcttcatttaccactaaacccatcatggcaccacttctcctgctggttcactgagattcccacaacagaggaaactggcaaggagatcactggtggtcgcagcagaaacagctggctcgatgagcggagtcatattcgagccgttcgaggaggtaaagagagcttatctagccataccaatcaccgctcttgtctccgtcgctcgccaaagatacgcacaagcttgtgaggcagctgttaacgagcaaatcaagtaagcatcatccaacttattagctatcaagacaaaataaaaaacaacacttctacatacaagttatcatagttagcaaagaaaaagatagttgaatctagtaataattttgtattttgtaagttgtaactagaaaatactcatgtttcactaatttgatggcactaagtcacaccattgttattttcttaatcttacctccaaatattgccatctacctaattcaccttcgattttgtaacatgttggttgtgcagtggttgagtacaatgtctcgtacgtgtaccatgccatgtatgcgtatttcgacagagaagacataactcttaagggtttagccaagtatttatcgttaaaatttcataatcattctaagaaacagaaagttatatatcttctcactaatcctaattgcctttataattgcagatatgtcaaagaatcaagcgacgaagaaagagcgcacacagagaagttcattgagtatcag

SEQ ID NO: 167521 - DNA, 3623 bp, Arabidopsis thaliana landsberg
  unsure (1)..(3623): unsure at all n locations
atcacatcaagcttcagtttggcatcaacaaaactccacaagggtcaacagaagatggaaaaacctctgaagacgatagagtgatcccaggagaaggatctgagactgagagcgtaaaagagcttaaaaagaggtctgataaacaagaaaaatctatagaggagctagcccacattgttgaggaacttaagagtaagctgaatcagatgcaaaaggaagctcagcctaaaggcgggattgacattatcccaagaaaaaagttcacttcaagatggtccgaagagatagattaccctccaggagagaaagaagcctactttgaagaaaggggaattgagtattatgctgcacacctctccagagaggacgctgaatatgatgatgatatcagagaggacaatgcagaccctctgtattacccattttcttcttaatcaagcgagagactttaaacaagctcacttgggaggaagtcccatgactatctctgtaaataaatttttattttcttgttatttttgatttgttttagttgtgtttgtggttcttagtaacaaaggaacaacgtggagatagagtaaaaattcaaaactcttactctacaaaaggcctgaagatcgagtgtatagcccagtggagtgcaaaattttnnnnnnnnnnnnnnnnnnnnnnnnnccttgcattcgagtacatcagtcgagtatgtgtgatgtttaaaacccaaaaaattttaaatcattattatactcgaccaacagaagctacagagtattacagggagtttatcaagtttacagaggattatagaaggttctaatcaacagggaacagtgcttcaggacaaacagaccaagtgcggcccaccttctctcctctttgtcccccccccacgcgtttttagtgataaggaaatcccaaggcttcatcacagccactcgatccaacctcatctcttcccaccgacgccatctctccctcacaactctcacatgaccaaacctcacccgtcatctctctcaccgtctctctttcactcgattgtgacgtcccctccaatcaccgcttactcgaccacctgaccttcaccgtctctccgtcacctccgtacactcgaccttgccgttccagtttcaccattcctcacagcttcgtctccttctcactcgatcacaactcgacctctccgcgcttcatcttcatcttcatttactcgacttcgccggagctccttgccgttccagcttcgcatactctctcaccgtctctccttcactcgaccacttcacacttcgcctcaacatcttcgccggagtttctcgccattgaccgtgcttccgtcatctccgttcactcgacctcgccattcactgcgcctccattcgtctctttactcgactgctcctcaaaccgccaccgtcttctctaaattcgccgtttactcgaccacgttgttacgtctctcattcgtgtacactcgaccgctatacccgaagccacaatatcactgtactcgaccgtttcactcaaccgcgtacttgactggtttagtgtgtgtgtttatttgaactaacatattgatatttggttttgagttacattctttttcagggaatcaatatgagtaactacagtggcgaatcctccatggatgcggattacaacgtcgatgaagctgaaccttggtcaactagaccagagagagagcaacaggcttatgagagcttcagagccgagacccaacgctcagtagctcgacgcaatgaaaggagagctgagattgctagaggaaagagagcgatgacctgtagatatgagttgatcgacgaagatattgacgtcgagtatgagcctgagtcatggcacagagaaacgaagctgttgaacaagcctgatgaagttacaatggaggagtacatcagacttttcgaggtgaacgacttctggggaacgaggtacccttgttatgagactctagcccagctggggctactggaggacgtacagcacttattcgagaggtgccatcttgagacgctgatgtcttacccgtacgtcgcttacaagaaggaaacaatagagtttctctccactctgcaagtggagttgtatcagggacttactgcagatgaactggagagtgaagggttggggttcttgactttttcagttaacgagcagcgttaccagctatctatcaagagcttggaaggattatttggttttcccagtggaaagggaactaaacccaagttcgagagggaagagttgaaggatttgtggttaaccattgggaacgatttggcgctcaactctgcaaggtctaagagcaaccagattcgaagccctgtgatccgttactatcagcgctcagtagcgaatgttctgtaccctagggaatctacaggcaccgtgtctaacacagacatggagatgattgattctgcactcaagggcattctccggagaacaaaggggaagaaggtcctaaagggcaaccttaatgatacaccaccggttatgcttctgttgatccacctgtgtggatacaggaagtgggcgcacaccaacgggaagaagaaggtgcgaggagccctttctgtaggtggcgttgtgacaccgattctgatcgcatgtggtgtacctctcacgtctccagggtatgatccgaggatgatggatgtagatcacttgcgtcgttgtgagtttctggagcacgatatggttggcgatttctatcgctacaaattcgagcactccttgacccgaacagccaacattctacttcccttcaccgaggccacaatcatactccagggcgaaaacattgacttcaagcctacgcgtgattacctctactttgagagcgctccaccgactgatgacaacgtccctacaacagaagctacagaggatgagattgctgagacaaatgaggatagggaggaggagtacgatacgagcatgtatcattttagtgagcatgtacctccagcgagggagagcaagagcttgagcgaagctcacagaaacaacagcaagttgcagaagtggtgcaagaaacaagatagactacccatcaagtgcttcaaggccatcaagtttctgacagacaagctaagctgctcctcttctaccatagctattccgcagggagagcctcctcaggacatgccctcgaggagatatgacgcgccagagccaactcgccttaggccagagccaagttcaacacaggcctgagcctagtgaccgagtagtctcacaagtccctgcgaggcattcatcattcgagcctcgagagcttgggagaaggaagaaggctggcagcaggagtacacgacttctccagtcccgtagcttacgcgaccgcggtgctggccgcagcagaagaagagaggtcgagtatcatcagagcggtgctggccgcgacgaaggagcagaggtcgagtacccctagggggaagctgagacacaatagggagattcttcgatggcctgggagcaatcacaggcggctattgacgaccaactccgctccttcttccactgaggtaagcacctcactccaccattgtaatataccatctcctgtttttattttgtttctgtgatgtgttttgtcc

SEQ ID NO: 167522 - DNA, 512 bp, Arabidopsis thaliana landsberg
acgtcaacgccgcccggttggccggtagcgcgcacggcgtcggcgacccgggtgagtacgacgcctggatgaaggcgatcgagttcgcgatggagcacgacgacggccagagcctgcgggcgatcgatcgcgcggacctgatccttacggcaccgtcgcggtgcggcaagacaccgacgaccatgtatctcgcgctgcagcacggcctgctggtggccaactatccactcgtcgaggaggacttcgacaccaaccagctgcccgcccccatccgggcccacggagacaggtgcttcggcatcctgtccacccctgccagactgagccaggtgcgcaacgaacgccggcccggcacccggtacgcctcgctcgcccagtgccagtacgagctgcggcgcgccgaggcgctcttccacgcacaccgcataccgtccatcaactcggcctcgatgtcggtcgaggagatggcagccgtcattattcagaccaggaagctgaaaacagctcactga

SEQ ID NO: 167523 - DNA, 1173 bp, Arabidopsis thaliana landsberg
ccgccaccccctccgccaaccccaaggtctaaagactctaagaatattattatcataggtgttactgtaacatcaattgcttttctgttgatgttgggaggatttttgtatctttacaaaaaaaagaagtattccgaggtgcttgaacaatgggaaaatgaatatagtccccaaaggtactcctttaggaacctctacaaagcaacaaggggtttcagggagaatcggctacttggggcaggaggttttggaaaagtctataaaggagaacttccttcaggtacacaaattgcggttaagagagtctaccataatgcagaacaagggatgaaacagtatgtcgcagagattgctagtatgggaaggttaaggcacaagaacttagtgcagcttcttggttactgcagaaggaaaggtgaattgcttttggtttatgactacatgccaaatggaagccttgatgactacttgttcaataaaaacaagctgaaagatctcacttggtctcaaagagtcaatataatcaagggagttgcctctgcccttctgtatcttcatgaagaatgggaacaagttgtactacatagagatattaaagctagcaacattcttttagatgctgatctaaatggaaggttgggagatttcgggcttgcaagattccatgatcgtggcgagaatcttcaagcaacgcatgtggtaggaaccattggctacatggcaccagagcttacagcaatgggagtggccactactaaaaccgatatctatgcttttggatctttcatccttgaggtggtttgcgggagaaggccagtagaacctgatagaccacctgagcaaatgcttttacttaagtgggttgccacttgtgggaaaagagatactttgatggatgttgttgacagtaaactaggagactttaaagctaaggaagccaagctgcttctgaagctaggcatgctttgttcacagagtaacccggaaagtagacctagtatgaggcacatcatacaatatttggaaggaaatgccactattccaagcatatcatttgatacagcagggtttggtattcccaatataagcaatgaaacgataacacagatgacagccacctcctcatcagccaatttctcttttgaagatgttacaatcctatttggcggtcgt

SEQ ID NO: 167524 - DNA, 930 bp, Arabidopsis thaliana landsberg
aaatggtattggcgggaaccagaacaagggaagcttaattaccaagacgcagatgatatgctcaacttgtgcagtagcaacaacatagaaacaagaggacattgtatcttttgggaagttcaagcaactgttcagcaatggatccaaaatatgaaccaaaccgacttaaacaacgcggtgcaaaaccgcctaaccgatcttctaaaccggtacaagggaaaattcaaacattacgacgtgaacaatgagatgttacatggatcattctaccaagataagctaggcaaagacattagagtcaacatgttcaaaaccgcgcaccaactagacccatctgcgacattgtttgtgaacgactaccacatagaagacgggtgtgatccaaaatcctgccctgaaaagtacacggaacagattcttgacctgcaagaaaagggtgcgccggtaggaggaatcgggattcaaggccatattgatagtccggtgggtccaatcgtatgttcagccctagacaaactaggaatcctcggtttaccaatatggttcacagaattggatgtctcctcggtcaatgagcacataagggcagatgatttggaagtaatgatgtgggaagctttcggacatcccgcggtggaaggtataatgttatggggattttgggagttgtttatgagcagagacaactctcatttggtgaatgcagaaggagatgttaatgaagctggtaaaaggtttttggctgtgaaaaaagattggctctctcatgctaatggacatattgatcaaaccggtgcgtttccgtttagagggtatagtggaaattatgccattgaagtgattactacttcatctagtaaggttctgaaaacgtttgttgttgataaggaagattcgtctcaggttattactgttgatcttcaaggtttg

SEQ ID NO: 167525 - DNA, 588 bp, Arabidopsis thaliana landsberg
  unsure (1)..(588): unsure at all n locations
atgtcgccaagatgcgcaatcgcaccaagggcaaggtgcatctgcccatggtcattcgcatcccgtatgccgnggggatcggcggcgtggagcaccactgtgactcgtcggagggctactacgcacacacaccgggcctgaaggtcgtcactccgtccgatgccgcagacgcctacagcctgctgcgcgaggcgatcaccgacccggatccggatgatcttcatggagccgaaggcgctctactggtccaagcaggagatcgaactcccctgccggaccgccccgttcggcaccgccgcgatccgccggccgggcaacgacgtcaccctcgtcacctacggcccacaggtgcccacggcgctcaaggcagccgaagcggccaccgaggaaggatgggacgtcgaggtcatcgacctgcgcacgatcacacccttcgacgatgcgaccgtctccgagtcggtgcgacgcaccggccgctgtgtcgtgctggccgaggcgcaaggtttcgccggcgtcgcgggcgaggtgacagcccgcatcagtgagcggtgcttccattcactcgacgcaccggtcgtgcgagtcggc

SEQ ID NO: 167526 - DNA, 1799 bp, Arabidopsis thaliana landsberg
cgactcccgaaaatcaagaaagcgtcaagcaaattcttacatggctctaaaagcagtcatcacaaaagcctacgaccgtttggattgtagcttatgcaaaacagctatgacacatatgggtttcaactcaacatggatcgcttggataatggagtgtatctccacgagtcagcttttcggtactaataaatggttctccgcatggtcacatcaacaccactcgtggaatccggcaaggcggtccattatctccctatatattcatactttgtgctgaagttctctctcacatgatgaaccaagccgagatcaacaagcagcttaaagggataaaactatccacaagaggtccatctatctctcatcttctctttgctgatgattctctattttttactatggcaaatcataggtcatgccatgcaattaaaacagttctacgtagttacgaggaagcttcgggtcaagcagtcaatttgcgaaaatcagctattacctttggcaaaaatgttagcaatgacacaaagcgaagaatgagaaatctcctgggaatacacaatgagggaggtggcggaaaatacttggggctaccagaacagtttgataagaagaaatctgagatgtttcggtatattgttgagaaagtaaaaaaaaaactcaaggttggagcaagaaatatctgtcacaagctggaaaagaggtactactcaaagcagtggctttagctatgccaatctactccatgaatgtgtacaagctaacaaaagagatttgcaatgagattagtggagtactagcaaaattctagtggggttcagacgctgaaaatcacggtatgcactggtttgcttgggatcgtcttgctttgccaaaacaggagggtggtcttggttttagggatcttgaaagttttaatttagtattacttgacaagcaaacgtggcgaatgcttcaatatccagagagtctaatggcaaaacttcttaaagggcgatatttccatgattcaaatatcctaaatgcagtccaagggaagaaggcctcttttatttggaaatccatcctacatggtagagatttagtcaggaaagagcttcgattctgtataggtgatggcacaatcgtcgacgcttggctggacccatggttaccaatgcatccccctagacctccgattaaaacggtcaatgctcctcagcaggtgatggtgagagacttgatgaatcacactcgctcgggctgggatattgacaagttaaacaactggatcgctccacaagatattgattcgattctccaaatcaagctctgttcaacggcaactgaagaccttttaggctggcattacacaagacaaggtttctacactgttaagtcgggctattggttagcaactcatactcatgctgaagaacaagtgactccaccacctggaaacgttctcttgaaacaaagactaagaaaattaaaaactgctccaaaaatcaaacacttcttctcgcggcttctatctacttctcttcctactagtgcaactttgaggtatcgacatattataatgatgctaaatgtgtgagatgttgcagagaggacgaaacggtcaatcatctcttcttccgctgccattacgctcaagtcatatggagaggctcgggaatcccaaatcccatctttcttgaccaaactgctccatgggacgataaaattcgcgccatctttaatatcaacacctcagcacgaacatctcatatgagacagttgcccttatggatcatgtggcgattatggaaagtgaaaca

SEQ ID NO: 167527 - DNA, 754 bp, Arabidopsis thaliana landsberg
gagaaaagaatatgcgtcgaacagcttgcaatagaggatctgataagcaaattaccggaggttttgctatctcagatactctcgtatcttccgacaaaggatattgtcaggacaagtgttttgtccaagaggtggaaaagtgtctggcttttgattcccgggttggatttggactctagtgagttcccacattacgatacctttgtggattttatgaacgaattcctatttttctctagggaagagaatccatgcttgcgcaagctcaagctaagtattcagaagaatgagaatgatccgtcttgtgtcacgctatggacagactgtgtggctaggggtaaacttcagcatcttgatgttgagtttggtggtcgcgtaatggagcgtgagttttgggaaatgatgcccctaagcctctatatctgtaagacgctccttcacttgagactctatcgggtattgttgggtaactttgatcagtctgttgattctttacctagtctcaagagcatgtgtttagaagaaaatgtatattctaatgaggcgagtctggagtcgcttatctcgtcttgccgcgttctcgaagatttgaccattgttaagatagatgataacgtaaggtttttacgagtgcattctcaatcattaaccagtctaagtgtaggatataaatcatattatcctggtgagatatattattattatgatagagatagagggaactcgggacttgtgattgatgcccctagactca

SEQ ID NO: 167528 - DNA, 413 bp, Arabidopsis thaliana landsberg
atggggagcttaaggttgagcacagtcgctattgcagtagtcgtttgtctctccattctcctcatatctcctacaggtacgtaaaaaaaaccaaagtctttgatcccaagatctaaaataaaacatgtttatgaaatgtagtatcttcctattgattggacagaagtagatgggaggcaagtgtgtgactacgataaaggggaatgtaatagttatgagaagagctctacttgtattgaaccatgcaagcaattggacagcaagtttattgcaggccgatgcatacctgttggtggtattactggtatggggttatgtgtttgctgccgtgatgtacagagtggtgctgaaaaggaaagcatgtgatttgcaaatgataaaaaacgacgtcactttgtgtctgtgttttgcga

SEQ ID NO: 167529 - DNA, 546 bp, Arabidopsis thaliana landsberg
tgtctcggagattagtgggcagagaagatagactaatctcatggagtagaccaagtgaaggttggtgcacgctgaatacaaacggagcgtcaagaggcaatcccggattagcggcggcaggaggggtcttacaggagagcaatggggaatggcgcagagggtttgcaattaatatcgggatatgctcaacacctcttgctgagttatggggtgtatactacgggttattcatggcctgggagtgtaaagtatcccgattagagttagaggtggactcggaggttgttgttgggtttcttcggacagggttgttcttagaagtgaatctcacccgctgtccttcctagtacgcatgtgctatggctttatatcaagggactagatagtccggatttctcacaagtatagggaaactaatcgtctagcggatgggttagcgaactatgcattttctttacctcttggttttcagtttttttatgtttgtccggatgctgtttattcggttatgttggaagaccggaacggaatgtcgtttccgcgtca

SEQ ID NO: 167530 - DNA, 964 bp, Arabidopsis thaliana landsberg
gattattctcgttatgatcgaggaatctcgaagtgatactcaaaaaatatctatgtaattatagaagaagtggctaaccttagaattgaaacggtagtatacaagaacttaactttggttctacaatttttaattatggttaacatttctaccacaataccttgtgtaatttatttatacactctttccaatcaaacgtttaatattttgctaaaacaagtagcaatgagattttcttttgtttgggtccaaaatgagtatagtattgtctttatcttaagtagattaataacataataatttggatagtataaagataatatacttataaatatagacatacatacgcttgtcaggttatcagttagattctcttcgtcattataacactcaacaacacacacattctctcctctgtccgacaaagtcacttaaatggcattttcccggcatattcacggcggcaagactaccaccgcaaccgccgtgacaaagaagtccaatgtcccaactccgacgccaaactgctgcgtcacgtgccttgcaagactcatcagaaaactgaagaaaaaagggaggttgttgctggctacgttgacggctcggagacaagggagctctttgcaatgccggtacgatccaatgagctattcactcaacttcgacggaggggcgtgtggtacacttcctgatgatgaggactactacttgcggttttatgctttttcttcaagatacgttacgactactaacaatatcaggaagagaccaccacttcctcgtgaatccttctctagcgcttcacatgaattcatgtaatctaatttgtcattttactcttttgtttttgttatctacaaaaagaaaagactagtttctttattttctgtatttggttatttagttcttagatttaattaaattagtgaagggtaattgttatttaaaagaaaaagatgttcaa

SEQ ID NO: 167531 - DNA, 184 bp, Arabidopsis thaliana landsberg
tcacctaatcaagcccaatgtcaacttaactgagaagcccaacaaatcttcttctatttctcaacggtttagaccacctatgcaagagaacaaagccagagtaacgacagataagaggagcgtctgtcgtacgccttcaatcaacacggagaacaaatttgattgtttgatgatctgctaagca

SEQ ID NO: 167532 - DNA, 256 bp, Arabidopsis thaliana landsberg
cggtattttaacatatgcattgtgcagggttatgaggagtatatgattttgttgctggacgaggccaaggaagcgcgcattatggtgaaaaccagaaaaccactatggtgcgttactcgcgactcggctacaagactcctgacacattaccatatattggttgggcttaaggcgctaactctcgcagcatactggtataacaggtcggattttgcttaaaggagacaacacaactgtcacgatgaacgcagaagtg

SEQ ID NO: 167533 - DNA, 379 bp, Arabidopsis thaliana landsberg
  unsure (1)..(379): unsure at all n locations
nnnnnnnnnnnnnnnnnnnnnnnntacgtggcgacgctgctgaactgcatgatgtgggtgctgtacgggctgccggcgtgcacccgcacagcatgctggtgatcaccatcaacggcaccggcatggcgatccagctgacctacgtggcgctcttcctcctctactccgcgggggtgcgcggcgcaaggtggtcctgctgctggccgccgaggtgggcttcgtcgggccgtcgccgcgctggtgctcagccttggcacacgcacgagcgcaggtccatggtggtcggcatcctctgcgtcctcttcggcaccggcatgtacgccgccccgctctccgtcatggtacgtacgcgtacgtacgtatatatatatatacgaac

SEQ ID NO: 167534 - DNA, 391 bp, Arabidopsis thaliana landsberg
aaagggcccgccttgttgctccagaagaccctcgagatgccgaccatcgactcggccctgcccggccgcccggagccgattccgaccacgagcgcgcacttcatcaacggccatgccctgaaggggccctatcccgacggcctagagaccgcggtcttcgccatgggctgcttctggggcgtcgagcgcgtgttctggcaggtccctggcgttcatgtcaccgccgccggctacgcggcgggcgtcacgcccaatcccacctacgaggaggtctgcacgggccgcaccggccacgccgaggtggtgctggtggcgtacgacccgatggccgtcacctacgaggcgctgctgaagatcttctgggagaaccacgacccgacccagggcatgc

SEQ ID NO: 167535 - DNA, 570 bp, Arabidopsis thaliana landsberg
atggatcatcggcggagcattcagagagtaagaacgtcggcgccttcctctcctgcttctccgactccaacatcaccggattgttcttctccaccaccacctgagtagttagttgacatcgagattatctgccgacatttgggggttccgcttcaccgtgtaatcccccctggagcagtggagccgacggtaccgtggatgaggtctcctttaccaggagatatggggccggattttgttccagccccaagagatttcgtcccaggtgaagttatttggcccggaaagttttttggtcaaacgaatctatccaatgagatgcatgacgcatgtcaaatgttcattcaaaaggtaaatgtaagaatagtgtttcgttgttgctcgtttggttaggtttagggtttaatcaaatttaaggtttagggtttagttgtgttgattgttggttatattaggtgaatcatatagtggtggtatagttgtattgatggatatttagcgagaaattgacatttctattgttggacaggtggataatcaacaccaagcttattgtaggcgtacaccgcc

SEQ ID NO: 167536 - DNA, 2271 bp, Arabidopsis thaliana landsberg
agatttataaatagtccctccttccatcctattctcaagtcacgagttcttcttctcaatctcgagtaattcactgtgcaaagcaagagcttcttcgatttctctctctcagaccaatcgtgcttttcgcatccctgaacgtaagtttccttccatttctgtgttgatttaagcaaagagattgataaaaacctgattcgtcccgtttcattgtagaaactttgtactggcttagtcgggatataatcgcataggttttagaattaggaatcggaattttaacttgatgtttaggaaacggaacctagttttagatttgttgcgccgatgttacatagaaaccctaatcccacggggcttatggagtcgcacaatctccacgtttcccaaatcggctctgcttgcaacagataatgcagaaatggctagtaaggaaactggaatgttttcactagctggggaattagcttctcttgtagaagaatcttcttctcatgttgatgatgatagcaaacctagaagtcgtatggaactaaaacgatctcttgaactccggttgaagaaaagagtcaaagagcagtgcatcaatgggaagtttagtgatctgttgaagaaggtgattgcaaggcctgaaactctccgggatgcttatgattgtattaggcttaactccaatgtttctataacagaaagaaatggtagtgtcgcgtttgattctattgcagaagacctctctagtggggtgtttgatgttgcttcaaatacgttttcgattgtggctagagataaaacaaaagaggtccttgtcttgcctagtgtagctcttaaagttgtccaagaggctatcagaatagttcttgaagttgttttcagtcctcatttttctaagatttcacatagttgtcgaagcggaaggggacgtgcctctgcattgaagtacatcaacaacaatatttctcgttctgattggtgtttcactttgagcctgaacaaaaaacttgatgtttctgttatcgagaacttgctctctgtaatggaggaaaaagtagaagacagcagtttaagcatcttactccgttctatgtttgaagcccgggtgctcaatctcgagttcggaggatttcccaagggccatggtcttccacaagaaggggtgttgtcccgtgttttaatgaacatatatcttgatcggtttgatcatgaattttatagaatctcaatgaggcatgaagcccttggtcttgattcaaagactgatgaagatagcccaggctcaaaacttcgttcctggtttaggaggcaagccggagaacaaggtttgaaaagtactacagagcaggacgttgcgctcacagtttattgctgcagatttatggatgagatatatttctctgtgtctggtcccaagaaagttgcaagtgatatcagatctgaagctataggtttcttacggaactcactgcatttggacatcacagatgaaacagacccgtcaccatgtcaagcgaccagtgggcttcgtgttttgggtaccttggttaggaaaaatgttagggagagtcccactgtcaaagctgttcacaagttaaaggagaaggttaggctctttgcattgcagaaagaagaggcttggaccttaggtacagttagaattggaaagaaatggttaggacatggattgaagaaagtcaaagagtcagaaatcaaaggtttggcggatagtaactctaccttgagtcaaatatcttgccacagaaaggcaggcatggaaacagatcattggtataagatcttgcttagaatatggatggaggacgtgctaagaacctctgaagatagaagcgaggagtttgtcttgtccaagcatgttgtagaacctactgttcctcaagaactaagagatgcgttttacaagttccaaaacgctgctgcggcatatgtttcatcagagacggctaatctggaagcgcttttgccatgtccacgatctcatgatagacctgttttctttggtgatgtcgtcgctccgactaatgccataggaaggcgtctttatcgctacggattaataacagccaagggttatgctcgttcaaattctatgcttattttgcaagatactgcccaaataattgattggtattcaggacttgttcggcgatgggtgatttggtatgaaggctgtagtaattttgatgagataaaggctgttattgataatcagctcagaatgtcacgcatccgtactttgtcagcagcatatcgacatac

SEQ ID NO: 167537 - DNA, 300 bp, Arabidopsis thaliana landsberg
cggcgtggcgctggtgctgccgcggctcgatttccccgaaccgcgcgccaggctgctgggttggctgattttctgcgacggctgggcgaacgtcattttttatctcttcggcaacttcgccccgaatcgcggcctgagcttcggcccgaaccatttcggcgaagcgagcctcgccggcgtgatcgcgcttggaccggcgtatctcttcggtggcatcgccatcgtggtactggcgatgatcgggttccgcgcgctgcggtcaccggcctgaggaaggccgcggccgagtcggcgcctcag

SEQ ID NO: 167538 - DNA, 114 bp, Arabidopsis thaliana landsberg
tgtcctgatacaaagaaacttagagatgaatgcattgtttaattcggtgaatccgcttgcacgaaatggatcgaagctcatattttgtgtcttcgatcagagggtttcaaagtt

SEQ ID NO: 167539 - DNA, 541 bp, Arabidopsis thaliana landsberg; identical to SEQ ID NO: 77619

SEQ ID NO: 167540 - DNA, 342 bp, Arabidopsis thaliana landsberg
ccctatataatggagtacgtctttccgtcagatgaacaaatgcaacgatcatgaatagagaaaaaattatatattccatcccaattgatctcggaggtccatacttggctgtcaagatttcacagagttgttcttgaccaggtcctcgactcttccacgtctcttattcgcccttgaacaaagcaactatgaatggctcttctgctcatcacctcaccccaaaaatccatatgacaagtctagtgtagtttcggtcgattttcatacttttaggctttgaaaggtatgacgcatattgacgttttctaatgcgattatgcaggaaatttccaataaataaat

SEQ ID NO: 167541 - DNA, 787 bp, Arabidopsis thaliana landsberg
acaacaaacgagaagaaaaagcggaagaagaagaagaagagaaagaagttagtcttcgagaaatttggagagaagtacaaggttgcaataattgggaaggacaactagatccaatgaacaatcatcttcgaagagagatcatacgttatggcgaatttgctcaagcttgctatgactcattcgacttcgatcctcactctaaatactgtggctcttgcaaataccatccttctgatttcttctcaaaccttgacctacatctccacaaaggctacaccataacacgttacctctacgctacatccaacataaacctcccaaacttcttccagaaatcaaaactcagctcgatttggagccaacacgcgaactggatgggttttgttgctgtagctacggacgaagaagaggtgagtcggctcgggagacgtgacatagtcattgcttggagaggcacagtcacttatctcgaatggatctatgacttaaaagacattctttgttcagctaacttcggtgacgacccatctatcaagattgaattagggtttcatgacttatacaccaaaaaagaagattcttgcaaattctcttccttctcggctcgggaacaggttttggctgaagtcaaacggcttattgagtactacggtaccgaagaagaaggtcacgagataagcatcagcgtgacagggcatagctcggcgcctctctggctttggtcagtgcttatgatacgcagagctaacttgaatccgtacggagacaactataaagttcaacactg

SEQ ID NO: 167542 - DNA, 214 bp, Arabidopsis thaliana landsberg
atgtttctccttcacctctagtatatattctgcgcattgtccctgacctccagtgctctgcctgttttggcatctttaatttctggagtgtcatctcctgttaggaaggggccgtaggtactttccaggtatgattctggataactaccaatcgggggtgcttggctgccctttagaatccgttggcctatgtttgctctagtgtttgatgtgg

SEQ ID NO: 167543 - DNA, 676 bp, Arabidopsis thaliana landsberg
tttagtactgtctggaaaccggttcacagggagaatacctgaggtctacgggttaaccggattgttgatattggatgtgagcaggaatttcttatctggggcgttgcctttaagcgttggaggattgtattctctgctgaaacttgatcttagtaacaattacttggaaggaaagttacctagagagctagagtccttgaagaatctcactctattggacttgagaaacaacagattatcaggtgggttgagtaaagagatccaagagatgacttctttggtagaactggttctgtccaataatcgcctagccggggacttgacaggaataaagtggagaaatctgaagaatttagtggttcttgatctctccaacacaggcttaaaaggggagattcctggttcaatcttggagctccagaatcttaggtttttgggtttgagcaacaacaatctcggaggcaaacttattcctcaaatggaaaccgaaatgcctagtctcagcgcgctttacgtgaatggaaataacatcaacggagagttggaattctctaggtacttttatgagagaatgggaaggagacttggtgtttgggggaaccctaatctgtgttacaacggagatgagaccaagaaccttagcgatcatgttcctttcggagtgaaccaatgtaag

SEQ ID NO: 167544 - DNA, 704 bp, Arabidopsis thaliana landsberg
gatctggtgaactcaagtggaggagaaaggatagaaacgatattgatggtcctttgtattatcgctgtcaaaggactcaagggatatgcatcaatggggttttgtattacttatctagaacttgtttcgaggaaacactgtctttgattgtttgctttgatgttagctctgaggagttcaagtttattgagtcagaatgcttagatgatcatatagaggaccctagtggattaagtttggtcaactatatgggtaaattagctgtgactaagtgcaactatgttgacgttggtggaagacgttccgttgagttgtgtttgtgggttctagaggatgttgagaaacaggaatgggtcaagtatgtctacactttaccggagaatgaagtccttggttcctgcgagttttcagttgctggagtgactgcaagaggcgatattgttttgtgtatgaagtatacatgtaaaccgtactatgtattctacttcgatcccgaaaagaaaaccctccaaagtgttgaaatccaaggttttggagctaagcttgaagaggttgagcatcgtggtgaagtttatgcctttgttgactatgttgaggatctttgtctaaacgatgcaaagcaattcaagtcaagcatttctcatatcaagagccgctgttactgctgtgaaacgttatgtcctgacaacgtaggggacgaggta

SEQ ID NO: 167545 - DNA, 1187 bp, Arabidopsis thaliana landsberg; identical to SEQ ID NO: 44673

SEQ ID NO: 167546 - DNA, 2455 bp, Arabidopsis thaliana landsberg
ggtgatcctcgagtacgtgacctcaacaagattccctttctcagtttcctacacgcgccctaaggcattgtatggggattctggtggcggagctatgaaacagagaaagatgttatgctcgggcacctgaagaactaattagagattcgctaaactccgagtccggttgataggtactacgactcgcttgccaagaatgagccatatactgaccacttcttatttgtggccctcgacgactcttctcttcatgaggaccttctcgggaaaatcatgtcgagatgggggatacttggtagatggtttgtcaccgagccgcctactcttaatacttaccctattttacttatcttctacagatcgtaccttcaagttccttgaatactgccttgccgacctcattcaagctcaaaagcaattatctgctcggaagtgcaattggcagaagcatttttttcgagaaagggttaagagggctataaagttatcacacggtgtttcctgttcatctaactcagcatcctctgatcatcaatccagattctttgtcgagatgcagaagacaaaattgacgcattgggggctgaaatcccaacagaagaaaaaggaggccgaggcgaagcggcttcttgagacggatgttgggacgtagacagttgctcacgaggcgacaatttaaattcaggaagtcgcacctgaggcgacttctgtagagggaaacaaggttgtgaatcctccttccttggccactcaaccaagtcataccgagacgaatgagaaacgtcaagtttctataactatcgcccttgaagcaggtgtgttgccaatcgtcacccccccgaaggaacgaatgcgtcgatggtgatggccttgccggctgatcgcaggccaaggcttccgggaagcgccaaaggagcaaagatcctgaggcgaagaaaaaaaataaaaagaagaagacctaggaggaaggcctgccaatttacgaggataagatcgcctcagcgaattttatcgccttctttacggggaatcttcttcccctctagagaatcttctagaggttgtgcgatacgacgaaacatcatcatgttttctgaaggtaaaacatgttcttcttgttcctgaaccgaattatactagggtgaatttctgttatgacatacctttgttttagttttcatacgctttttcctcaatgaacacaatggtcctagcataagcctccgtgatttggagttgcttagatacataccagaagttggccaaggaaaagttggccgctgctgagcgcgtctgagctgtggctagagcgaaggcaaccgaggcgagtttgacaaaggagaaggccgacgaggacgtgatcgatcatacgattaaggtaggaaaggtagccgcgcacaaccttaaaaagaaaggataagtaggccgccgaccttgagcaccttaagcatatgctcagagaggagaaatcgctttgagaaaacaaagtagctaagacacacaaggccacaaagcgggaagtctcggtgaagagaagtgatctatatgctaagtctgtgaaagactctcagagaatcagaaggtttcaagtcgagctgaagagatcgcgacacgtggctcaatctcagtcgttcatctctaacggaagaatcttatctttctcagttttttcattctgtttaagttgctttgtaatttctgttccgtatcatcacgattcagagttgttgaatcgagaggttagagagagagagagcagaacaattgtagcgagagagagctcggttttgagctaagaagtttagtggattccggagaaattaaatctccggcgagacgtaggattgcaaatcagaatctgaactcgtaaaatctcggtgttctttgtttgcgttctttctatctctttcaaatccataatctaagtcgcgagttctaatcggaaattttagattaggtttcacacaatcatatgtgatataggccaaattagcgtatagactactctctcaaataagagatcgtttgtagcacttaggatcgaattctacaaagctttcaaatcacacaatagacttatggctatcgaattaagttaaacgaaaagattgtaaattaaaagacaaagaaagcaaataaattaatttcagattcaaaaattaaaacgtcgggtctagagaagttctcaggaaaatagatgaataatagatatatcagttaattaggattattatcgaaccgttctaaaacttaaatcactagcctataatcaaccaactcccatatgtattgattaaatatgcttaataaataggaatcccaactctcgtatgaaaatccttaaacactaagcatgcattataatcaagtttgataagttcacctaagcatctaaaccagacgtatccgtatttagatgtttaagcccatctatgatagtgcgggtaataagcgg

SEQ ID NO: 167547 - DNA, 601 bp, Arabidopsis thaliana landsberg
tagtggtggtgattggggttgtggagtgtagaagatttgagaaggagacgttagcagttggtggtggtggtgaacttgccggtggctttggtggtggaaaaggttttgggggagaaattggtgccgggggaggttttggtggtggtgcaggaggaggtgccggtggtggtttaggagaaggcgccggtgtaggagaaggtattggtggtggtgcaggaggaggtgccggtggtggtttaggagaaggtgctggtggaggactcggaggaggtcatggtgcaggtattggtggtggtgctggaggaggtgctggtggaggactaggagaaggccacggtgggggtattggtggtggtgccggagcaggttctggtggaggacttggagcaggtattggtggtggtgccggtggtggtgccggaggaggtggaggacttggaggaggtcatggtggaggtattggtggtggtgctggaggaggtgctggtggaggactgggaggaggccacggtgggggtattggtggtggtgccggagaggttctggtggaggacttggaggaggtattggtggtggcgcaggaggaggtgccggtggaggt

SEQ ID NO: 167548 - DNA, 573 bp, Arabidopsis thaliana landsberg
ggttgccttcctgatgtctcgacatataaggatgtaattgaaggtatgtgtatggctgaaaaggtagattattcttacaagttcctggatgagatgagtaataaaggttacccgcctgatatagtcacatacaattgctttcttagagtattgtgtgagaatagaaagaccgatgaagcacttaaactttatggaagaatggtagagtcgcgttgtgctcctagcgtccaaacatacaacatgctgatatctatgtttttcgaaatggatgatcctgatggagcattcaatacatggaatgaaatggataaaagagactgtgttcaggacgttgaaacatactgtgctatgatcaatgggcttttcgactgtcacagagctaaagaggcgtgttttctactggaagaggttgtgaacaaaggactcaaactgccatatcgagtgtttgactctttcttgatgcgtctatcggaagttggtaacctcaaggcaattcataaggtttctgaacatatgaaaaagttttacaaccatagtatggctaggcgttttgcactcagtgagaagagaaag

SEQ ID NO: 167549 - DNA, 601 bp, Arabidopsis thaliana landsberg
gcctgaggaaccgcgctcgcggatcgtctggcccagaatggccacaccgtgcggctctgggcctacgaaacggacgtcgtcgactccatcaatcagcagcacacgaaccgatttctcgcgggcgttacgttgcacaccgccatcaccgcatcgcacgagatcggcgatgtcgtgaccggcgccgatctggtcgtgatggccgccccctcgcacgtcacgcgcgcggtcgccgagtctgcgcacccattcctgtcatcgcgcgcggcggtggtggtcgccagcaaagggatcgagcagcactccctctcgctcatgaccgacgtggtggatgacgtcttcgatcgcggtccctcgatcgcgctctccggtcccagcttcgccgcggaagtcgccagcggccagcccaccgccgttgtcgccgcgtgtgcggacgccgaacgtgctcgccttgcacagcaggcattcagcggacagacgttccgagtgtacacgcaagacgacgtcgtcggtgtggaatcacgccggtccactcaaaaacgtgatggccgtcgaaacgggaaatgggaagggctcgggttggcttcaatgcccgtccgcgctc

SEQ ID NO: 167550 - DNA, 941 bp, Arabidopsis thaliana landsberg
acttcagaattgcagagaagagcaagtttcatggattccctgcaggtgtttacccgagcttaggcatcggtgggcatataacaggcggtgcatacggttccttgatgaggaagtatggtcttgctgcagataatgttctagacgcaaagatcgttgatgctaacggtaaattactcgatagagcctcgatgggcgaggatctgttttgggcaattagaggaggcagtggagggagttttgggataattttgtcatggaaaatcaagcttgttcctgttcctgaaaccctaaccgtcttcgcggtcaccaaaacattcgagcaagatagaagtttcaagattctttcaaagtggcaagaaattgcggacaatcttgttgatgagctcttcttacgagtgttcttcactgtatctggaaacaaagcaaacaagacagtgacgatggcctacataggtcagtttcttggcgagaaaggcaccttgatggaggtaatgaagaaggattttccagaacttgggctaactcagaaggattgtatagaaatgagttggatcgattccattatttacaactctggattcccaacaaaccctcctcctcctattgagattctgcttcaagcaaagtctccaatcggaaaagtttacttcaaagggaaatcggatttcgctaaaaaacctattcctgttttagggctcgaagggatgttcaagaagttgcttgaagaagacgcagcgttagtaatttggactccttacggtggaaagatggataaaatccctgaatctgagatcccatttccgcatagaaacggaaccaacttcatgattcaatattacaggagctggtcagatagtgagaaaagaccaaacagacgcatcaaatggatcagagagttgtcggatacatgacgccggacgtgtcaagcacaccaagacaag

SEQ ID NO: 167551 - DNA, 1671 bp, Arabidopsis thaliana landsberg
gaaactcacaaaactacagggagagatccgtaatttcattcattcaattacactgaaggggtcgaagttaaagacttgttgatggatccagatctgatggcgtggacaatcttcgagactttttgcaaagaaaatggagttaatggtgaagcagaagcgaactggtacaagcttccacaagagaacaatagttcaacaagagttatcggcgccgacaaagatgatgggattagggagctaagtcgagaggctgtgataggcggcgaagtcgatatatacattgacaatgacatctctgtacctggacctttcccctctcgaaaacctgatgatgatgatgaagtcaatgaggaagaaggagtagatgatgacgaagagattgatgaggagactacagctgaaacaaatggttataatcaaggattacaagatgatggaaaagatcctataaaagaaagaatgcacgataatcctaggtttgaagctttctatgaagaaattcataatggtacagaagctgcggaagctatggatgaagagagtaacaaagttccagaagatacagttgtcaaagaatctgatgatgaagatgaatttgagacgcaatgttgtgatgcagagcgtccagatcatgcaatgggcacggatgatgaatgggatgcgtatgaccaagcagaaagagtatcatcacgaaagaagttctcgaaggataaatctccttacctttggatgttgcagaactttaatagtggtgaagagttcaaagatcaactcttgaggtatgttataacgataaattatgatgtgaagttgtgtagatggggtgcgacaaagttgacagctatatgtagtcatgacagttgcaattggaagatttactacttcgcacataagcgtacatggaaatggatagtgcaaacttattttgatgagcaccaccattctaagagtgggaaagcaagaatattaaaacatgggatgttcagagatgaagaaagaagacgaccttgtttgcggtggactgacatcaaagatgagataatgatgaggtacacactttctatgtctaagtggatatgtctaaaagcaagaatattggctttagatatggtgatagaaacacaaaaagtgcaatttgctaagttatgggattatgaggctgaactttagagttctaataagcaaacccgcacagagatcgtgacaattcctaaagcgtgtgataaacaacagttcggcaagttttatgtttgttatgaggctttaagaagaacatgggttaattgttgtcggtctatcattgaccttgatggggaatttttgaaatgaaaattaaagggtgagattctagcagctatggggagggatgcatataataggatctatcctatagcttgggctgtagttagggtggtggacaatgagtcatgtgcttggtttgtggagcacctgaagaatgatttgggtttaggtgtaggtaatttgatagtgatttcggataagcagaagggcttgctcaatctagtcgttgacttgcttcctcaagttgaacatatgcattgtgccagccacgtctatgccaattgaaccaagatctacgcgggcatctgtcatgatagaaacttcagcgcaaatgcaagcagttaaacagagggttcctacaagtacttc

SEQ ID NO: 167552 - DNA, 1788 bp, Arabidopsis thaliana landsberg
ctctatcagctcattcaaggacaagccacaggagcaatggaaatcgctaagaagctgtctgaagtaaacaacaaagtcgaccgataaggcatcaaacttaacagcaatttcaaatcaatgagcactaggatgagatatgtggaaggcatcctcgcttcaccatctgttaacaacaacccatgccagcttccaaggaaagcaatccagaatccaaaggagtatgccactgcccatgccatcactatcacacatgatcgcgagctgccaactcgatatgtccctacatcaaacactgaggaaagtgtaattctagagggggaggatttttatcaagatgatgtgttggctgacaacctaatcgaagagcccatactcaccagtcaacccactcgaccacaagctcccctagctactccctttgttgaaaaactggaagctacaaagaccaaagacacagtcttcgtgccactgccttacaaacctctgcttccattccctggtcgtttcaagaaagttctggttgcaaaatacagagccctcctggaaaaacacataaaggatatgcctttagtggactatcttgcgctaatacctgacgagcacaagtacgtgaaagacctgattacagaaaggatcaaagaagtccaaggaatggtggtattaagtcatgagtgcagtgctatcactcagaagaaaattgttccagaaaagttagaagatccaagatcttttactctaccatgctccattaggcaattgactttcagcaattgtctatgtgatctaggagcctcagtcagcataatgccactctctgtggcaaggaagctgggattcgttcagtgcaagccttgtgacctaaccttgattcttgctgataggacttcaaggagaccttttggcctgttagaggatgtgcaagtaatgattaatggagtagaggtccctactgattttgttgtgcttgagatggatgaagaatctaaggatcctctaatcttaggaagacctttcttggcttcagctggagcagtcatagatgttaagcaaggaaacattaatcttaatcttggggaggatttcaaaatgaagtttgaaatcagggacactatgaagaagccaacaatagaaggacaaagcttcttagttgaagaaatgggtcagctagctaatgaactgctagaggagcttactgacaaagataaccttgaaactgctttgaccaaaagtaatgaagctggatttctctcttgtgagaccttgagctatgagatgtcaatagactcacacaacgaagtaccaggatcaaagatctttaaaggtgtcattgcgtcagaaacagaggatgttacattgaacgaggaaggctcaactgatactcgactagaatgctcaaccaaacagctaaagtcaagcatgagggcatcaaatgattggttagaactcaaggagaggtctaaatggcacgacagagctataagagagctaacacacactgtgaaagagctgaaggatcaagtcaaggagctccatgggaaagccaaccaagctccactcgacatcaaggacgtcccaaatgatgaagttattcctatggttagaaaagaaggatgtgaattcacattaaaacagtctagaaaagaccactatccagttgatgaaaaaggagcttaccaagaaagggtcattgagtactcaattacagacttgtcacgagagcatgctgaatttgatgttgtatctacgaaggaaggagaggagacgtcagttctactctatcaccctcct

SEQ ID NO: 167553 - DNA, 2567 bp, Arabidopsis thaliana landsberg
cggctgagttatgttctcttttttttgtcaaatatgttatgtcatggctgagttctgaactgtaatgactgagttatgttctctaatggctaagttatgttctgttttgtgaaatatgttatgtgatggctgagttatgttctgtgacgcctgagttatactatggctgagttaaacatactgatgggttttattatctcttgtgttgtagttgcgtgtgcgtaaaatggttgcgaaggctgagttaagcgagctgtttcatacttggccaaacgaattagaagacccagcactcgatcacttgatcgaagacatacacgaggctaagtttgttaaaggttattgggatgtgaagacgaatgagaagaagaagaaactcgtaaaagataaagatgcggatgtgtctgaatctcccgcaaagaagcagaaagtctctcacagcgagggtgttcattctcctgagaaagatgcccaatagatgaagaagaataagaagaaggaagtggctgtcgaatctgatgagggcaacgaagagcaggatgtcagggagaacagcagtcgctcgtggatgtggtctccaacttgatctctcccttaaactcaaggtttgacaccgttgataatagcatcaaagaaatgtcctcgcgtctggatgtgattggagttcaagtagaatcgaggattgatgcaaagtttgaaacaaggtttggatctaatgagaacgatgtcaaacaaattaaagagcatctgaagggcatatctgactcagaattaaactctactagttatattagagatatgtttttacccaaaacacagcaaggctaccctaagccccaaactcaacagacaccagaaggtccaaagaagcctgacaaataaccaatctgctactagtcctcctccggtaaacttttagttagttatggctgagttatcttcatattatacggctgagttataaattttagttagttatggctgagttatctgcatattatgcggctgagttataaattttagttagttatggctgagttatcttcatattgtacggctgagttataacttttagttagttatgtctgagttatctttatattatacggctgagttataacttttagttagttatggctgagttatatttatacataggtatgagttttcgttatttaacgcctgagttttcgttacgtttatgcagtcgaaacaagctgatgttggggtaagtaggaagcttgaagcagaatttgataaggcctccattgtgtctgattttgatttcgttgagactgtttctcctctcaatcgccttttacgctctaggaagccaccagccccaaatgtgccaaagcagaaaaaggagaaaacattaaatgagctaatccagaaaccgccagcgagaagaggaagaggaagaaagcctttggagcagcctaaaaaggtgcctccttctgcgccaaagattagaataaagaaaccaaaaccatctgaggaaactaaggaaaaagctgaggaagctaaggaaaaagctgaggaagattcggatgtagttgatgtcacggataaggttgtatccgagtataatgaaatgcttcctgagtctgatgaagatgaggaggaaaccgagaggctaaagagtgtaaaagaaattcggctcaaaactgttaagctggccccggatgggagctcattgattaaccccgaagatatgcccactcacacttttccagttattggagacaacgggctgagctgcatgagaaagggttgtctgccttcacgagcaatctatgatcctctggcaccggttgatccggccaaactgcagaagcttaaggcttatttgacaggtcccgaaaggtatgaccctttatacattactaagttgttaaatacgacatgcttacactatttgtttatattaactttctttattatttgttagcaaacattattacaaaacatatgggttcgacgatgtgctgttctactctgttatcatagccgaaagaaaggactggccagacgagaaacatggatggctgggtgatgatgtaagttattgttatgttctgtctgagtttggctaatgttatggctgagttatcgtgtcattatgtctgagttatagtagataatgactgatttacgatgtaagttattgttatattctgtctgagtttgtctaaggttatggctgacccctcccgtcgttctgtctgagttaatttagataatggctgatttatttaggtgttaaggctgagttttacttggttacgcctgaattaatgttgtgttgtgtctgggttggttttatttttgtacagcaaattggtgcgtatatgaaagtcctcgccctgaggctccagcgagatccatgcccataccacaacgaacacgtcatgattcagacctgtggatcacgacctattgggtaacagattacaataagttcaagatcaaactgaagaggttttctttcaaagacaccgcgaatcaacagtggattaacggtatgggaggagaagtcccgacacggaagaagtggataacagata

SEQ ID NO: 167554 - DNA, 361 bp, Arabidopsis thaliana landsberg
tacagacgtcctccaccaaaccaaggtatgggaggtgctccacctccaccgcctcacataggcaacaacccaaacatgcctcctcatatacaaccacctaacatgaaccagaactacagaggtcctcctccaccaccaaacatgaaccagaactatcagggacctccaccaccaaacatgaaccagaactatcagggacccccaccatcaaacatcggtcagaactaccagagaccaccaccgccaaacatgaaccagagctatcagggacctccaccgtcgaacatgggccagaactacaggggaccttcaccgccgccaccaaacatgagtcagaattaccagggaccaccaccaccga

SEQ ID NO: 167555 - DNA, 620 bp, Arabidopsis thaliana landsberg
  unsure (1)..(620): unsure at all n locations
cacacaactcacatctgccatcgcagaggtacaacaatcgctctgccttagacccttgaccctaatcaatgggccaagttttctccagggagcaagaaactagtagaggaatgccatcagcacaaaccgcaagatgaggagcttgatcaagagatcgataacctctgtattctcttgagaagttgttgcagaagatggatgagtacataagggctgacaactacttttgccaaagaatggaggagttacacaagtacaccgaagccactaggtgctttggcggaagatttcatccaaggcatgtnnnnnnnnnnnnnnnnnnnnnnnnnnnnnnnnnnnnnnnnnnnnnnnnnnnnnnnnnnnnnnnnnnnnaacaaacaagctctcaacaacaatcttctcatagcacattctgaccgccagctttgagagggagaaggggaggccaaagctttggagacaagtttaatgcacccccatggaatccattttatttattttgtggtgaggacaaagtccacacagcaagaaccttcctccatacaatcaacaagcaaaaagagcttactttgtcaaccactcaaccttcacagtcgaaggaggtgttatgtacatcttca

SEQ ID NO: 167556 - DNA, 259 bp, Arabidopsis thaliana landsberg
gtggtttgcaagctaaaactcctaaatcttccttcatactcatgcaaaccttgcaaattctacatccacagaaaatgttccgagttacctcaaaaagtcagacaccctttcgacaaaaaccatctcctctctctaatctcttctcccaaataccaagaagggcgattccgctgcgacgcttgcgggaaagacggtgatggattcgcttaccactgtggagattgcggcatcgatcttcacacggtttgtgccaacatgc

SEQ ID NO: 167557 - DNA, 1647 bp, Arabidopsis thaliana landsberg
ttcaacctttctaaaaacactgcaacaattgtgttaagaatcagaaaccattcttcctttattgataactgttggttacattcaagaacacaagaacaaaccctagagagttctcttcactctcaaagcctaaatgctcccaattaaccaaatggtctagacccccttatatctactattctagtgcctatcaaagcgtctcgattcttacacaacgaagtcagtaacagaacatgatcatcattactatttcaagagtcctagtgtgtgttgaggagacaaaggagacttacaatattccaaggcgtccagattctgaggcaaggaataaatggccatggaacaaatcatatctactcaatgaaacattcaatccaacactaggtcccctagattcaattagatgaaacaagaactcgaaatatgagttcacttcctgttcattaacatcatcaatcagatcactacaccataagatcaaacagttcacaaaatagcttctttttttacctctgctataaaatgacgaccataaggagttctagtaagttgacatttatcttttcttgatcgttcaacatcaggaacctataaaaccaaattttaaccaattcaatctaacgaacaataaaccaaatcaaaccattaaattgaagacgaaccgggatcattttcggattgagagttcgctgaattgaaccgggatcaccaccggagtcaacagcgagacgagcaagctctagaaccgattccggtggccaccagattagagaattctcctcttcaaacttgctccgtctctcaacggcgtcaatttttccggaacagagtccagtacgaggcgagcatcgtccaaattcgggtttaggtttatccgatttgaatgggacgaggaatttaagacacgatttgatctctcgagagacgattgggttgaggcacgacgcggcggagggaggtccgagaacggagagtagatcgtcgccggtggctttcggaaatgacgacggagaatgagaagcggagtggagtttgaaggatgaagctgctgcgatggagaaggagatgaaaatggtgaaacgaagaggaacgtacgaattcaccattgtcgtgtccttcctctgaatttttggtgaatccacattatctttgtagaaattggagaatggagaagagagactctagagtcacgtaaactccattggagaattattagaagtgtttaattaacgaagccattaattagcgacaacgacaaacattgtggcacacaatttgtgggcaaccttaaaacccattaagaagcccgttaagaaatagttgggccacttccatcaaacgacgatcttgatcatccatcaattttaacatcccacatcacttatacattgccatttcacaaatcacaatattcaattttgtttccatggactttatggtttatgtggaaagcatggaatgataaagtgtttaagagactctacgaggaacccactaatattataaattatgctcaaagttaacaattataaagggaggagacacaattagaggctcttgaggaaacaaattgactccacaacctcataacttatgttcttgaacattggatgtcagtttgatggatcatggaaggcgtcagaccac

SEQ ID NO: 167558 - DNA, 1182 bp, Arabidopsis thaliana landsberg; identical to SEQ ID NO: 20053

SEQ ID NO: 167559 - DNA, 523 bp, Arabidopsis thaliana landsberg
  unsure (1)..(523): unsure at all n locations
ttgtggcttacaccttaatgagcatacgccagnccattacggctcgttaatcggcgccatngccggngctgntgcaccggtagtgggctactgcgccgtgaccaatcagcttgatctagcggctcttattctgtttttaattttactgttctggcaaatgccgcattttnnnnnnnnnnnnnnnnnnnnnnnnnnnnncttttcagcggcctgtattccggtgctgcccatcattaaagacctgcgctataccaaaatcagcatgctggtttacgtgggcttatttacactggctgctatcatgccggccctcttagggtatgccggttggatttatgggatagcggccttaattttaggcttgtattggctttatattgccatacaaggattcaagaccgccgatgatcaaaaatggtctcgtaagatgtttggatcttcgattttaatcattaccctcttgtcggtaatgatgcttgtttaaacttactgcctcctgaagtttatatatcgataatttcag

SEQ ID NO: 167560 - DNA, 617 bp, Arabidopsis thaliana landsberg
tgaatcacggcgaggagagagactatcatgcgcttgagtctattggtgtgagcgttaaagggtgtgtggttttagcgaggaaaggtgaaaacttgggaagaggagcaattgtgaaaatagcagaagctaaaggtgcgctgggagtgctaatatacgccgagaatgacggtggtggatttggcgggattgagagaggtacggttatgagaggaatcggagatccggttagcccgggttggcccggagttgtcggaggagaaaaactgagcttggatgacgaattggtcactcggagatttcccaaaatcccatctttgcctttgtctcttcgtaatgctgagatcattttggcttctcttggcggtgctagagctccgttggagtggcggaattcgggtcgtgtcggaccgggtcaacgggttggccctggacggatggttattaacatgacgtttcaggttagttaactagaattttgcatttccgttatgttttctttggtttgacttttgtaattttccgttatatttcttaattatgtgattaattttcgttacttcttgtgtgtgttacttctttaaattgtagggggagatgaaaatgaagaaaattctgag

SEQ ID NO: 167561 - DNA, 522 bp, Arabidopsis thaliana landsberg
cgtggacctgtctctgcatgtgcaggaatgattgaggccttgtgtaatatcgctcgttcttctgatgattggcagtatatggcgatagaatgtcttctttggttgcttcaagatcctaatacgtctcacaaggtgattgataaggcggtgccaacgcttgtggatcttgcggagatcacaaacttgggcgatcacaagaaacttggagattccattgtgagtgttcttcaagaatgcagctccatgggtaaccgttcaagggaattgatagaagaaacggtaaattctcgacagagactaaaatgggagaagagtatgcctaaagaggatcttcatatcaaacaagcagcagctttagtggtcaaactcgaaggaaactctctcttttcatcaggagatatcgcgggtgcagcggaaaagtactcggaagctttgtctctatgtccaatgaggtcgaagaaggaaagggtagtgttgtatagcaatcgagctcagtgtcatctcttgctacaacagcctttg

SEQ ID NO: 167562 - DNA, 434 bp, Arabidopsis thaliana landsberg
  unsure (1)..(434): unsure at all n locations
ggtacatcatcatcaacagcatccccatcatcatcatcacataacaacatgatcaatagtcttcttccgtataccacatcaacaaaccaacttctcacacctcatcagggtatcatgatgacaatgatgggccaacaactacacctattttatcaagaagacatgggcaatttggtaaattctccaaacagaaacaatctcataatgagccatcaagaagacaaccaagagcaaagtacaaacaagggaataatgttgttgagtgatgtaagaagtgggtcgagtacaacaagtacagtaacaagagtgaagatnnnnnnnnnnnnnnnnnnnnnnnnnnnnnnnnnnnnnnnnnnnnnnnnnnnnnnnnnnnnnnnnnnnnnnnnnnnnnnnnnnnnaatggaggagatcaagcacctaataagtagtagttg

SEQ ID NO: 167563 - DNA, 445 bp, Arabidopsis thaliana landsberg
tatgtcaagcttcgtgagagatgcggggaaacaaaggaacaattatatggtgcgaccaatgtgtttgaagatttcttccgtgaataccaaggggaggattcgtttcgatagttttttcaatatgaccaacgtgaagaatgtgagcagcaatgcggagcagtttaaaaataaaaggaaggatctcttccacaagctattgttgggagccaccaaggatgtaagcgacagcaatgatgcgtacgcagtgggggagacgaggataggaagaaataagatgtatgcaatgatgcagtgtgcactagacttaacgacgaatggatgctatgtgtgtctagaatggattataggcaggtatgatagcttctactttgaccgtagacaaggagcgagagttttgagtaggagttgtagcttaagatatgagctttacccttttcttaggagg

SEQ ID NO: 167564 - DNA, 923 bp, Arabidopsis thaliana landsberg
tatagacgcaaaatggtagaagtgaccgtgatatcttcaactatggtacgacccgaaaacataaaccaaacgggtcgtcaaaaaatccatctaactccacatgatcttgaccttctttatcttttttatcctcaaagaggtctactcttccacaaacccgacccggaaaacagtatcattcctcgattaatggcttctctttccactgccttagagatttatttcccgtttgctggtcgtctcgtcaaagtaaacaatcacgaagatgatacggtgtcgttttacatcgactgtgatggtttgggtgctaaattcgtccatgcgaaagccgaatctatcaccgtgaatgatgtccttcaatctcatgggtctgttccttatttcatatcgaaatttttccccgcgaacaatgtccaaagccgtgatgcccttgtctcggagcccttgcttgcgttgcaagtcaccgagatgaaagatggagtgttcattagttttggttacaatcacatggtggccgatggtacttgcttctggaagttctttcacacttggtccaagatttgtctgaatggttcggatcctagtattcagtctattgttctcaaagattggttttgtgacgggatcgattacccggtacatgttccggttttagagatggagacgctaccacgttgggaaccttcaactaaagagagagtttttcacttgtcaaagaagaacattttagatctcaaagcgaaagccaacaacgaaattgacaccaatgatctgaaaatctcgtctcttcaagcggttgtggcatatctatggctatcaatcatcagacacagtggtctaaaccgggaagaagaaacacaatgcaatgtagcggcggatatagcaaaggctaaccctcttctcaagaaagagttttgggaatg

SEQ ID NO: 167565 - DNA, 482 bp, Arabidopsis thaliana landsberg
tctgcgatgaatgtgaagatcgacaagttttctgggagaaacagtttcagtctctggcagattaagatgcaagccctgttaaagcaacaaggcttgtgggcgccgctgtctaatgacagtaaagggaagagtgacgttgctgagatggctgtcatggaagagaaggcacactccacaatcatgttgtgtcttgaagatgaagtcatcattgaggtttcaggagaaaccacttctgccaatctgtggaagaagttagagaatttgtatatgacaaagtctctacagaacaagttgcttctaaaacgacgtctgtttgcattaaggatgcaagaaggtacgccactcaatgatcacttagatcagttaaattcagtattactagagctgcgtaatattgatgttaaaggtgaagatgaaaatgctgccttgcttctgttggtatctttaccactatcatttgagaactttgtggatcattcata

SEQ ID NO: 167566 - DNA, 473 bp, Arabidopsis thaliana landsberg
atggtacgttttagtaacagtcttgtaggaatactcaacttcttcgtcttccttctctcggttcccatactctcaaccggaatctggctcagccttaaagccacgacccaatgcgagagattcctcgacaaacccatgatcgctctcggtgttttcctcatgataatcgcaatcgctggagtcgttggatcttgttgcagagtgacgtggcttctctggttctatctctttgtgatgttcttcttaatcctcatcgtcctctgtttcaccatctttgccttcgttgtcactagtaaaggctccggcgaaactatccaaggaaaagcttataaggagtataggctcgaggcttactctgattggttgcagaggcgcgtgaccaacgctaagcattggaccacccttagaagctgtctttatgagagcaagaacagaaatgctgtggagttagtcactgactaatcacaactgtt

SEQ ID NO: 167567 - DNA, 1449 bp, Arabidopsis thaliana landsberg
tacggatgctctaaaggatcggctggtcgatttgcacctattggagtacttatagctttgcttctgattatggtgggtggaactcttggtgctaccggcagctttagaggctcgggcacaggtgctcatggactaaattttgtcatgggagatgtcttagcaccaattgggtttttctcaattccaacagatgcttttaataccgaagttcatgttaatcgatgcaccatggattattatgacagtggataagtgagtcttttgttttgcttccctgttctctcattttgtcttcatgattgcaatgtcttgtgattaaatagagttctggttgatttatctcggttagattaggtggaggcctcacagattcactctgatctttcactacgtggccttaatgggaaagaggttttgagaaaaacaattagcgttaatgatcccttgagatatggtggggtcaccggataccagacagatcggagtgtctcagccttgcaggtgacaaaagatggtgattgaccattcaacttggctatggcaccaattaagatcaatggagacaagaaattatatgggaccttcttacctgttggtgatactaatgctcccaatgtcaaaggaatgtaagaaccctcttacctttgacgaacctttctttttgattaagccaaaggagcgtataacagatgaaacagtttcttagattcttggcatagagatacattttggtgtcttgtattggccttaacgttgctccagttgagtttttttcagatctatgctagctcgggatctacaatccattgttgtgtacgatttggacggaaaattcgctggaataaggagaccaagctcgaagcttcccattgagatcaatggtatgaagattgttattgaagatgcaattggaagcactggccttgagttaaaggtaaaaagactttataaaatgtcacacggcacaagaaaaggaagagttatcctagtttgtaatattatatgacatctttgttcttggccttgtttctcagactgacccaggagtaccagtggtctatgctggttttggtgctctaatgctcacaacctgtatcagttacttatctcattcacaggtaaaagtaactctcaaaatcgatatccgatcaaaaagtcttgttttataccaatgtgtcccattggcattttgctctactagatttttgtctttcatcatctaactcttttcttttgtttgatattcaatctcttatgttctgtatgaagatatgggcactacaaaacggaacaacattggtcgtagggggaaaaacaaacagagccaagaaccaattccctgatgacatgaatcgtttgctcgatcaagttccggagttaatcaagaagaatacttcagttgtctctgagcaatcttgattagctcttcgactctgatacatttcaaac

SEQ ID NO: 167568 - DNA, 667 bp, Arabidopsis thaliana landsberg
taggtttaaattcactaaaatgagtagaaagcagacgaagaagaaggtgccaaaagtgtcattcatcacgaggagtgaggtttttcatttagataatggttataagtggagaaaatacggtcaaaaacctgtcaaagacagcccttttccaaggtaattaacactcatatatttcctttgggatagatttaaaaaattatgaggtttacaaatttttaaggggttgtgtttttttccctttgcaagaaattattaccgttgcacaacaacttggtgtgacgtgaagaagagagtagagagatcattcagtgatccaagcagtgtaatcaccacttacgaaggtcaacatactcatcctcgtccactactcatcatgcccaaagaaggcagctctccatccaatggctcagcttctagggcccacattggcctccctacactccctcctcagcttttagattacaacaaccaacaacaacaagcgccgtcttcttttggaaccgagtacattaacaggcaagaaaaaggaattaatcatgatgatgatgacgatcatgttgtgaagaagagtcgaactcgggatctgctggatggagctggtttactcaaagatcatggccttcttcaggatgttgttccctctcatatcattaaggaagagtattag

SEQ ID NO: 167569 - DNA, 1604 bp, Arabidopsis thaliana landsberg
  unsure (1)..(1604): unsure at all n locations
atgaaggggactcatcggcgaatgatcctttgtgacataatgaggtaagtaatagacatatggatgtttgatttttttagtacaatagagtaccaatatgtacaactatgttgtgggactaaatttttgtgtgttaatattgcaggaaatagagattctgatgaggatttcatgcctcttcagcctgagagtttcttctttactcctgatgagtatagaaagactctgaagatttatacaaggtgtaccattgctaacacgctgcttgtcataggggcgaagctcaacaacagagaaaagagatggtttatagagaaccaacaattcaagcatacatggtgttggggtcggatttcacccagagaccgagccaaacagataagggtcataaacgcctcgagaacaaagcttgttatcgttcccgagcccaaaagattattcatggaaagttatccgctgaatcgcctcggataaccctcactcggcacgggtgtagtccaagaaacacattctgagccggcaataataacatttataagattagaagaaatgcctcgggtaaccctcacatggctcgggtgttattctaggaaacacatccgagccaagtttgagcacgccttggggataactcagatcacctcggaagatgttcgaccacgcgttccgagccaaagtgtcctcgcgccttccaagttcttacgatatcctcagagctcccgaatgataaggaaagtatctttaaaacaaagatcctctataggcgacttaaggataaatggaaatcttcctagactatcactagaagcggtttatgagtcctatataaagcgcctcaaggtcttcgcaaagggggacacaagaaaacgctctcaacttcatactatcaaaaaggctctgactttgaaggcttaaaccctttttcattacttttctaaacacttgtacgaccaaatcatcaccttttactaataatatcaagaacatcatccatggttattcatcgattctgatgttctttgagattctcgcgatgatctgttctttgaaaaaaccgtaagtacaatttcgattgtgtgagttttgactctcacatatggcacatggttaggtcggataaaaataagctgcaaggtatgttgatgctccttatgcggactgctttgacagagaagaagagagtctgctggtttgtggttaatggcgnnnnnnnnnnnnnnnnnnnnnnnnnncatgctctaataactggtttcgattgtcatcactatttatttagattataaagcaaggagctttggtatttatgactttgtggagagggtgtttggaacaaaggttgttaacatgaaggatgtggaagacatgtttgattcaattgaagatgagtgtggtggagatcggttgcaggtggcagtctagctctttttatgcaagataggaagaggaaggagaatgtttaatagcatccattcatccattcactacttttgaagacactatggacgagatccgtcacttgatgaagaagcggttagagggcacaatggaagtggactatttatttccaggcttcattgtttttcttgaggtacggttctatatat

SEQ ID NO: 167570 - DNA, 530 bp, Arabidopsis thaliana landsberg
gcaccgtcaaatgaggttcaagaagaaatcaattcattgaggtggaaacgttggacactttcagaggatttgaaactaaaagagcttgtggctgtgtatggtcctaaaaattggccgcacattggaaagcaaatgcaaggcagatcaggttagaaatgtgcttttgtttttgcttgtgtttttttttttccaaagattaatctttttcttcgtttttgtgtgttgaaggtaagtcttgtagatcaaggtggtataaccatttggatccaaggattaggaaagatgcttttagtgacgaggaagaaaaattgctaatcaaagcttacaacgaatggggttgccaatggtctaagattgctaggcttttccctggaagaacggacagacaaatgcagagactatggcgatgggtcatgaaaacaaaattggagaggccatcaacttatactcatgaactaactgcaaatgacaaaatagaaggtgagagaaacattcaatgttttttttctttttttttgggtctctttaac

SEQ ID NO: 167571 - DNA, 1121 bp, Arabidopsis thaliana landsberg
gcatctatgaatccagtgggtggatttcgtgagaggggaaatcgatggaaaaccatttcacatatacactttatcatctcaaacagacaccaaaatcccttcttcttccggtgaaacagccattgatggcgacgaccacctctctcttcaacaacctcttttcctctgtccctctttacgtcttagggttcaccagttaaaacataagaaggaagcttcatctgataacttattcccgctcaatacttccccacacttccccagcagtgatcaacaagtccaatatctgcttgattccgaaagccatggtgttatatgtaagcttcctgttgtccctctcttttggtgcaacaataaagaatctgataatgatgatggggaattttattgtggcgcatgttatggctcaaaacatggtacaaactattatttttgtctcacatgtggtaaacaattccacaaagaatgtgtggagtctccatttgagatcaatcacccttcctatccttttcaatctctccagctttattgtcctcccttgagcttattgttttgcaactgttgcgaaacaaatatccttcaaatgttttatcaatgtcctacctacaacttaactatgcatccggcttgtgccatgaaaccataccctatgttatcgaccacctgaaaaggcatcaacactctctcacctttttccctacacaagattctttagtttgccatatttgttccctgattcggaattttgatcccacatacatatgtatccaatgtgtcttcgtaatccatagagattgtatcgggtttccacttgtcataagaatatctcgtcacccccaccgtatatcttttaccttttctcctcaatctggactgctaacttgtggagtgtgccgtcaatctgttgacgatagatatggtgcatacgtttgcaataaatgtgatgcctattttgttcattcaaaatgtgcattacatttaatgatgtgggatggaaaagatcttgacggagtaccagacgaagatgatatgatagatgatggtgagccgttccagagaatagctgatggaataatactacatccttttcacagtcatcatttgcgacatgagatcttcag

SEQ ID NO: 167572 - DNA, 473 bp, Arabidopsis thaliana landsberg
acatgcccgacgcggcgggcaccttcgatcagcttttgcacttgctcaggtcactgtttgcgcggcctgattcccgctatctgaaactgatccggcagttcagggtgaaagatcacgaccaactgatgacgcgtcttgacgaggtggtccgtggcggtggcgaggggttgatgttgcacctgggtcgggcggcataccacggctaccgtagcgaccatctgctgaaactgaagccggttcaggatgcggaagccaaggtgctggcctggctgcccggcggcggcaaatatcaggggatgatggggtccttgctggtggttacgccggcaggccagcggtttcgtgtgggaaccggtttcagcgaccagcagcgtgcccatccgcccgccatcggtagtgtcatcacctaccagtatcgcggctacaccagcagcggcctgccgcgctttcccagcttactgcgggtgcgcttt

SEQ ID NO: 167573 - DNA, 1185 bp, Arabidopsis thaliana landsberg
tcacagtgcctgaggatagtgacgacatattcttgggagctcgtttagaaaaagagtttatcgtggaagccactcttttatctcgactaagccatccaaatgtcgttaaggtgagtttatatcatgttatattatgttggttaggttgtatcaaatatgaatgatgcctttgaaaattaacattacatctttcaactctgtttgaaaattatgattatggtttgtttgacttttttcctctgattgatgtgtcctgaaacagtttgttggagtgaatactggaaactgtatcatcacagagtatgtacctcgagggtctttaagatcatatctgcacaagctcgagcagaaatcccttcctttggaacagctaatcgattttggtctggatattgctaaaggaatggaatatattcactcaagagagatagttcatcaggatctgaagccagaaaacgtgttgatcgacaatgactttcacttgaagattgctgactttggcatagcgtgcgaggaggagtactgtgatgttttgggggataacataggaacttataggtggatggcacctgaagttttaaaacggataccacatggacggaagtgcgatgtttatagttttggacttcttttatgggaaatggtagctggagcacttccatatgaggagatgaaatttgctgaacaaattgcctacgcagttatatacaaggtaaatcattctgcatctcctccttatttcatgattgtgatctagttatatacaaggtaaatcattctgcatctcctccttatttcatgattgtgatcttgcatagatctgactgagttagatcattattgttcagttgttattaaacatttcattgtttcgatattggccagaaaattaggccagttataccgacggattgtccagcggccatgaaagagctgatcgagcgatgttggtcatcgcaaacagacaagagaccggaattctggcagattgtcaaagtgttggaacatttcaagaagtctctaacaagcgaaggaaaacttaatcttttacctagccagatctgtccagaactaaagaaatgtcctaaattctggattcatatattcggatcattccaccaccacagcagcggtggcggcagcagcagcaacaactcagccttacctaagcctaaattcgcttga

SEQ ID NO: 167574 - DNA, 1026 bp, Arabidopsis thaliana landsberg
atgagtgacgcgttttgttcggactgtaagaggcacacggaggttgtgtttgaccattccgccggagatacagtttgttcagagtgtggtctcgtgcttgaatctcactcaatcgatgaaacttctgagtggcgtactttcgctaatgagtccggtgataatgatcctgttcgtgtcggtggtccgacgaatcctcttttagcagatggtggtctcactactgtcatttctaaacctaatggatcctctggcgatttcctctcttcttctcttggtcgatggcagaatcgtggatctaatcctgatcgtggccttattgttgctttcaagactatcgctaccatggctgataggttcgtttttcgattctagggtttgttttttaagcccaatttctacaattcagtgttttcttgaagctcaatttcagcaattttgagaattttagtatgtagaagaattggtaatacctagaattctagatgaatcttatgatgggtataagcaaatgtatgtcactgaaaatagaaactatctatttttagatatctgggaaatgagaaaacttgattcttgctcattatccgtggtataataattggttcaatgcgttatgaaatgttattgtgagctgtttttactctaagttaggttgtttgacaaatgccatttactaattctatgaaccttgttgttgctccaggttgggacttgttgcgaccatcaaggtacttactctctttctctttgcaatcttatggcttctacttgtaaagctttctgttttgttaagttgctgatggtttcttggaatctagcttaccaaatttttttgcttttctattgaaggaccgagcgaatgagatttataaaagggtagaggatcagaagtcaagtagaggaagaaatcaggatgctcttttggctgcttgtttatacattgcttgccggcaagaagacaaaccacggacggtcaagggttcagaacagttatagagtcttttgtatttctgtttcttaatcgtt

SEQ ID NO: 167575 - DNA, 1809 bp, Arabidopsis thaliana landsberg
ccgtgttcttctaggaaatgttgattgcacggaagaacctgcgctatgtaagaggtactacgaagttgatgttttcctccattttcttgtttttcttatttgattaatgagtcgtttccaagaagaaaagaatttgtgtttccacctttttaattcctgctgttcaaggatgcaattccacggggagcagtgaatgtcgtttgacttaacataaatcgtggaatgtattttcaggaatcacatacaaggctatccatctattcgtattttccgcaaaggcagtgaccttaggtgagaaaacatctgatatgatgtttcttagttatacacaattcgtcgtttcttctacttaaccttatgtatccatgtggcgacaaattcgagtttatgtctcctaattgtgttctcggtacagtcaaatgttgacacatgtgcagtcatcaccgtaaatttgttcaaaatcttaaatgttttgcttttcgtcttttcctctctaacttcctttaggttaatagaccatatatctgttgctgtaaataattttatgaaagtgtacctgtttcaatgtttccagagaggaccatggacaccacgaacatgaatcttactatggagatcgggacacagacagtatagttaaggtagacaaatccaaatttcgtttcagtatcaggaataaatgagccaacattcacatctatgtgtatgtggtgtattggtcacttagttattgaaaaacgtctagtttgtctatggattaaatattatatacatgcacagcatatctttgtgctacgttttgagtcaacagaaagcagtctaaaagttcatataagattttctttcttccagatggtggagggactggtcgcgcctatccacccggagactcacaaggtggctttggatggaaaatccaatgatactgtaaaacatcttaaaaaggcaccagttacaggaggttgtagagttgaaggttatgtacgtgtaaagaaggtaacctcggactgaaaagtgaacactgaatgaatgtcctgtaattgatttgtcgcatgtactgaaatttgtcttctgtatgtttcaggttccaggaaatctcgtgatctcagctcattcaggagctcattcattcgattcttctcaaatgaacatgtcgcatgttgtttctcatttttcgtttgggaggatgatttctcctaggctgctgaccgatatgaagcgattgttgccatatcttggcctaagccatgacaggctggatggaaaggcattcataaatcaacatgagtttggtgccaatgtcactgtaagtcccagaaaccttcatagaaatttagagtcttgaaccatcgtcaaattttcttttactggctctcatctaactgttttctacatgctttctacagatcgaacactaccttcaaacagtcaaaacagaggtcattacaagaagatccggtcaagaacattcactgatagaggaatatgaatacaccgctcacagcagcgtggctcagacttactacttacccgttgcgaagtttcactttgagctctctcctatgcaggttcagtcctcatttacacaaacaagagattatctctcgcaaaagtcacaatatatatactttcctcttttaaattactccttggttggtctgtttttgcagatcttaataaccgaaaacccgaagtccttctcacacttcatcacaaatctgtgtgccattattggtggtgttttcacggttagtaatttaacagaaaccttgcgtcttcatacccgcatggattcaatggtcatttctg

SEQ ID NO: 167576 - DNA, 1791 bp, Arabidopsis thaliana landsberg
aggtactgtgacaatacagatttgtccttttacatactaggaaaggtttattaatagctgattggttcatccattcacaggctgagttagctgctttgatgtacaataagagcagactggttcgagtgcgtggtactgatgaacgccatacttttgggcagtttggagaagctgaagttgtcagtgcccgagggtgagtgattaatctatactactttgtgtattctctttactcttttgatttttgagacaatgatgaaactgttgttaaattgttgtgcaggagagcaggaagcaagggaaccggtggcggttttgtaggtggtgcaggagaaactgagcttcagcttcaacgccgaaggtcttgtctaattgttggttaaccgaaagacttagtgcatggctctcttttctaatattaaatctatgcgttaaacaaaatcttgatgtaccagaatatcagaccggaggattcgcttgttatcccaaattaaagaagcccagcgaacacggctattgcagcgtgctggacgtaagaaaagagtggggttagagggtgagagttcaggaaccattgctgttgttggttacacaaatgctgtaagtgtttgaattttgctccgaagaagtttcagctagaaaccaagtgttttagtctactttctgagtatcaattatctgcttttgttagggaaaatcgactctgataagtgcactaacaaagactgctctctactgcaatgagcggtataattcaatggtttcataactatcttaaaactgttaaatttgaaactgaagtcataacttttgaatggttggtctggcctctgcagattgtttgccacattagatcctacactcaagagtgcccatcttccttctgggtaagttaatttgtacgttgagaatcatgtttataactttctggtacacatgaacttgtactgaatcgcaagagtcaatttcttttcagaaactttgtgcttcttagtgacactgtcggattcatatcagatctgcctatacaggtaatgtatacctactttaattccacttatcctttatcaagtgatatttcacttacttttcttttcttggctcatgcctttttgcagctggtgaaagcttttcaatcgactctggaagaagttgttgaagctgatctacttctggtaagagctaaataaataaataaaataatattccatagttacatttagaagagaaaactgcagaaagacttggcgttgatatgattaaacccctgcagcatgtagttgattcaacagctccaaatatcgaggagcatcgttcaacagtgcttcatgtcctaaatcaaattggagtacctgaagagaagcttcaaaatatgattgaagtctggaataaggtaggattgatatataaaccatctatacaagtagaagaagcaaccaccttttttcacactgggaattttgttgtagattgattatgaagaagacgaagtggaggaagagaaatatctagatgatggcgaaggagtaggagaagaagacgaagacgaagctgatttaaaagctgaagaaactgttgatgcatctgaagcaacagtagatgaagaccaaatccaaaacggagacggtgacgacgctgatgggtggctattgtctgaagatgaaaatgctgacgaccctgagttctggaaagttccggaagttgctaaagtagatcctgcaaataagaaaggaccagatgttagagtaaatgcattaaccggagttggtttcaaggagttgctgtatctta

SEQ ID NO: 167577 - DNA, 1300 bp, Arabidopsis thaliana landsberg
tatgattgggtttcataatttctttaacgttaaagtgttttattttatgcattagcgttatgtctaagttgtatgatgaatacctatataagggttctctattgattaataaaaaaactaagctccaacaattaacctaattctctaagagagacttgggtaaaaggaagcttttgctttaaaacttttgggccataatattttttttgtgtttctgatcagattgggaatccacttctgaagcttgacagggactttgcagctgcatacgagtacttctggtcacatgggatgatctctgatgaagtaagactcacaatcatgaaccaatgtgactttgccaatccaaagaacatgagcaatgcttgtatatatgcagtcgttgaatccagcgtcctcactgagtatatcaacagctatcacattctcctcgatgtatgttacccttctattgtccagcaagagctaaggctcaagaaaatggttagcacttatccacctttttctttccaacagaaaaacatttgtgtaaatttgtgaaaatggttttaggttaccaagattagcatgggagttgatgtttgtataacatatgaaagaagtttctatttcaatctccccgaggtacagaatgcgcttcacgctaaccgcactcacctaccttatgaatggactatgtgcagcaagtaagttgtttgacccacttttcattttgttgatcaccaaaaaatgaagctgactgattgatattggcttttcacttttcactatgtcacagccggttaaactacagtggcatagacgggtacattgacatgcttccgagtcttaagagaattattcagaaccaaactcctgtttggatcttcaggtaagatttctattaaagatcttcttttcttgtactatgcagcttaactctcagcttgttaaaattgtagtggagatcaagattctgtaattccacttcaaagttcaagaacactagtacgagaacttgctgaggatctcaacttcaagaccactattccctatggagcttggttccacaaagaacaggtagtttccctacaccatcaaaacaattctaactaagttaattgtgattgctaacttgtggatgttgggattgtaactaaggttggtggctgggtcacagagtatgggaatcaactgacctttgcaacggtgagaggagcggctcatatggtgccgtatgcccagccctcacgagctctgcacatgttcagataactttgaaaatggccggagaatgcccaacaaaccagatttaaagtct

SEQ ID NO: 167578 - DNA, 901 bp, Arabidopsis thaliana landsberg
ctttgtaaaagtaacgaagagagtcaattagagaatctgtgatgaaaaagagtcaatttaaagaataaaagaatatatactaacaattccattacaatttctcttggttcttgaaagtcttgaaccataaattcggtcaacaactcgtataactataacccatataggtcgagttggttgaaccagcatctacacataactcgttggctgctgcatgctgccaacatataacaaccaaaaatgcaaaaaacattaagttttataaaaagccaagtcagatttgtcagtgtctgtagtagttagagatgttgtggtgggtaaaaaagctcagcccgacctgaacccaaaataaacccgtccaccaaaaatccaactttaaaaaacccagatgggtttttgaataagtgggtaaaacccgaaaaaacctgattattccgagactactcgtgggtacccaacttggtttttatcgttttcttagagtttatttttaactgttaatatactattatatgtatgttgtatctatattttgtttataaatatattttaaattatatttattttctatattacatatatatttgatgggaaaaaggttgaattgcgtttttggcgggaaaatgttaaattgcgtttttttggagaaaaaatgttaaattgcgttttttggcgggaaaaatgtcaaatctttttcttggccagaaatgttgaatgtcgtttttggcgggaaaatgttaaattgtgtttttggcggaaaaatgttgaatatcatttttggcgggaaaatgttaaattgcgtttttggcggaaaaatgttgaattgcgttttggcgggaaaatattgaatgtcgtttttgctgggaaaatgttaaatcgcagttttggtggaaaaatgtga

SEQ ID NO: 167579 - DNA, 2144 bp, Arabidopsis thaliana landsberg
ccgcctattccaccaagaatcacttccatgtaagatcattacactactcaagtttttttgtttaaatcaattctttttttctttctttggaatggggatttaaatgtgccctggtctatatgcatagacttttctaactttggattaaatgggaccataacaagtgatatacaatatcttaaccagctacagaaattgtaagtctcatatacatatctccctatataattatagagggaacatctatttgactattttgatatctttgtttgacaatcatgatttatttatgttatagggacctgtcaaataacaacttgacgggaaaggtgcctgaatttctcgccaaaatgaagttgttgacattcatgtaagttcccctagaagtaaaacgaatagtttggttttaaatctttaaatggatgcatctaataacgttttatatacattgcacagaaacttgagtgggaacaatcttagcggctcaattcctcaaagccttctcaacatggaaaagaatgggctaataacgttgctgtataatggaaataacctctgtttggatccatcatgcgaaagtgaaactggtcctgggaataacaaaaagaaattgctagtacctattcttgcatcagctgcttctgtgggaattattatagctgtgcttcttctcgtcaacattctcttacttagaaagaagaagccatccaaaggtaagctcaggactaattaaaactcattaacttcaaacttgtacttaagtatataatgtatggtatataatagcttcacgctcatcaatggtggcgaacaagagaagctatacttatgaagaggttgcggtaattacaaacaattttgagagacctggtggcgaaggaggatttggagtcgtgtaccacggtaatgtaaatgataacgaacaagtagctgtaaaggtgctctctgaatcctcagctcaaggatataagcaatttaaagctgaggtaccttcactatcattaagtttaattattcatatattcaaataaaatgtatatatatgatttaccaacttttgggttacttgtggtttgctaggtagaccttcttctcagagtacaccacataaatttagtaactcttgttggttattgtgacgaaggacaacacttggtcctcatctacgagtacatgtccaatggaaacttaaaacaacatctatctggtaaccttgattacctaatttgtttataaacacaatgatcgtgtgtcatctaataacatacacacatctttatgagtacaggagaaaattctaggccccctttgagttgggaaaataggctaagaattgctgcagagacagcacaaggttcgtttgaagtttctgaaaaaaagataacattgcaatttttttgagatgttcacttctcttgttgagttttgaaataaaaattttataagttgtattatataggactggagtacttacacatcggctgcaaaccaccaatgattcatagagatatcaaatctatgaatatacttcttgataataatttccaggccaagcttggtgatttcgggctttcaagatcttttccggtgggaagtgaaactcatgtgtcaacaaatgttgctggatctccaggttatcttgaccctgagtaagtggtctataacaatacttaatgaacttaagttgtgtctttctctttccatctggtaaattttttattcattcgtattatagatattaccgaacaaactggttgacagagaagagtgatgtcttcagttttggagtcgtattactggaaatcatcacaagtcagccagtgattgaccaaactcgtgagaagtctcacataggagaatgggtgggatttaagttaaccaatggagatatcaaaaatattgtggatccaagtatgaacggtgattatgactctagttcattgtggaaggctcttgagttagcaatgtcatgcgtcagtccatcttcatccggaagaccaaatatgtcccaggttgctaatgaactacaagagtgtctcttaactgagaactcaaggaaaggagggagacatgacgtggactccaagagttctcttgaacagagcacaagctttggtcctgaacatattcctgatgcacgctag

SEQ ID NO: 167580 - DNA, 2824 bp, Arabidopsis thaliana landsberg
aaccctttcttccaatcttcgccatcggagacttcgatctggtcaacctcgtcaacttcggctcggggaattggatcccgcgggtcggcttctttcccttaatccatcatattctctcccgaggctactggttctgctcgggtttcgctgagccctggaggagtttgccgaaatggcctcgttgtgttaccgggtgtgttgaacacaagtcttgttggattgagatctaccgctgctcgccgatcaggaaagtgtcgtgcgccaaagcgattggtcctgacctgtccttgagaagtagccgctttgagctgttgggccaagaatcggtttgcttgctcttggtcgttccccttcttctggagttgtgccatcatgcttctcagtcctgctaggactgcgggagcggcgacttcgggagcatttgtctggattggaggaacagggtttccctccatgtcaacggtggtagcggggatctggttgttggtcatcgttgcttgatcgatcggttctgtgttcttggagtaagagaaatctctttcccctccttctagcgccgaattgtgcgagtcgaaactcacatagtcaaattgtatttagggtttcttcaaagaacagatctttgtgagactctcaaagaacaacagaattatttgattaccgtggacggtgctcttgatcttattactgaaaagatgatgattcgatcgtacaagtgtttagaaaagtaaaaaataggtgttttgccttcaaagtcagagcgttttgatagcctgaagttgagagcgtctttatgcgtgtcccctttgttcgttcctcgaggcgctttatataggaccttggtaacccgcctctcgcgatattccttggaagatttccagttatctccgggtcggcgataggggatattttctatatggaaatcttccttattctttgggagtttcggaaaacttccatattcgataatatcccgaagattttttgatatccttcaccggatttttcggaaatgatatcttgacccttcactgaatttgtataagtatcctcctcgggtggatattctaccttgggctcgaaccgaagcgatccccgagatatagttgagctcggctcaggtgtgttttctggaataacacccgagccaagtatcgtttatctaaggtgttcccctgggtcacaatgtttcatcgcacccggcttagggtgtgtttccttgagtaacacccgaaccggaacaacaccaagcctagctcccgaagtgctgatggtatccatttgaccggctcaggtacttgggtgaaatccgaccccaacaaaacataaaaacatttagcgcttacaaacattttacgactgttagagtttagagcaatctctagttactttagttcttgtgatttgtcatgtgttctagagtttaaaaagttagcattaaaggtaaactagttactgctagagatggatgaattcttgtctttatagagactagttatcttctatgtttttgctagagatgcatctttttcttgtctttatagagactagttctcttctctgtttttgctagagatgcatctttttcttgtctttacagagattagttctcttctctgtttttttacaggtttaacaggcataaaggtaaactatctagggcgattggtggagtatttaggaggaaatttgatggtccatacttcatttggaaggtcactcctttgaacatccgagagagatatttcaggagtttcctggtaaaattttcagttttatctttcaaatatatattgttactcatttactaagtatatgtgctaacttatctcttttatttgtactatgtagcggatgttctattgggatcatgggcttactgaggctgttagagcggggttcgaagtgatagcccagaagcggatgaagggcattgttagtcaagctaagaggagtggttcacaacctcttttgattcgtgataaactttggaatcagatgtgggttcattggaacaccagtcaggcaatggtgaggagtgaaagtgcttcacagtgtagaaactccggtcgtggcggtcttggtccccacaaacatgtatccggtcagaaatcatttgtgcaagttcaccaagaattggtaacattcctctaatagtcatccaaacaattcactattttcttatattagttacatgattttaatgtgtttcaatttcattgtaggaggaactatatgggcgccctgtagcatttggggaagtgtttatgaaaacacacactcgagctgacgggtcatatgttgatgcaaaagctgaaaaagtacctgagatttataagaagacatgtgaagagcgactgatagaaatagatgatgatggtccagaaaattcagtgaattcctctgaacagtgggctcatggggacctctttctccaggtatagtttctatgacacccttaatttgtatgtgaatcattcactttatatcgcatcataggattatctaattttaatactttgttgttagcctgttatgttgattgactttgcattggtttctctttgttttagtgtactgaaaaagatcaaaagggcaaccattttggtcttggatcacttgtgcagacacttagcaaagggaaaatgaaagaaagttatgcaagctcttcttcatcaacagctttgaaactttaagaacaactacgccgcaagatagctgagcacgacactgagaatgcaagacgggatgaggaccaacgataatctcataagcggatctcatgcttcgagatgcttgttctgtacatgaaagataaagatcc

SEQ ID NO: 167581 - DNA, 2288 bp, Arabidopsis thaliana landsberg
atgaggactttagcatggaattgtcaaggggcgggagcaaaaaaactcatcgttgactggttgagatgaaccggatgtactcaccaggttttttatttttatcggaaactaagaatcaaaaaatgtatctacaagatgtgcaagttgagttaggttttgataacctccaaactggggaaccagagggttctagtggtggtttagctttattgtattcgaatgaatttccggttaagtttttgttgttagatgaccggctaattgatatcgaaactattattaatggaaatcgggtctttatgacatttatctatggagatcacgttgtctcaaaccgtgaatatgtatgtgaaaggttgatgcgtatcggagtttctagatctgaggcatggtttattattggagattttaatgagataacaggaaaccatgagaaaagaggaggaaaaaaacgttccgaagcttcctttctaccattccgtgctatgatccattcgtgtggacttattgattttccctttcatggaaatcgattctcatggattggaaaacgggaaaatgctaagattagatgtcgtttggacatagccatgggaaatgaagaatggtataatattttttcccacactaatgtggagtacttaaaaatgtggggatcggatcataggccactacttgcatctatacaatcaactccgagaaagatctcgagaaaatttatgtttaacaaaagatggattggcaaacccgggctcaaagaagcagttgtagaaggatggaacggaattggtggtcaggtaaatcgacccattatgaaaaaatccaaaactgtaaacgagtaatctctatatggaagaaatcaacccgaacaaattcggagatacttattaagaaactccatgataagattgagaaaaattatgctgacgataatgcttccttggaagatcttcaggaccttaaaaaaatattggaagacgcctatacagaagaagagatatttttgtaccaaaaaagtagccaaaattggctagcacttggagataaaaatacaaaatattttcatgccttaacgaaacaaagaagagcaaaaaacaagattctaggcatcctagataatcacgggacttgggttgataatgaagaaggcatcgaaagaattacggtagattatttcaaaaatttgttttcatcctcgaactcggaagatcccgcctttgcccttagaaatatctctccatcggttactttagccatgaatgagagtttagtaagaaaagtcaccgaagcggaagttaagcgcgctttattctctctaaatccgacaaaggtcgggaccagatgggatgactgctcttttctttcaacggttttgggaagtaataaatggcgatcttaccaacatggtgaagaatttttttagcttcggtatttttgatgggaagctgaatgaaaccaatatttatcttatccctaaaggcgaaagaccgagagaaatgtctggctttcgtcctattagcttatgcaatgtaagttataaggttatttcaaaaatcttgagcttgcgcctcaagaggtttcttccggacttaatctccgagacacaatctgccttcgttgcaggaagattaattacatataatattttgatagctcaggagaacttccatgcacttcgatccaacccggcaaatcggaagaagtttatggcactaaaaacggatatgagcaaggcttaagacataatagaatgggggttcctccgagctttgatgaaaaagatgggtttcaaccatcgatgggtaaattggataatgtaatgcattacctcagttacataccgcatccttattaatggcgatcgaaaaggccgcattaaaccatatcgaggcattcgtcaaggggatccaatttctctgtacctatttattatgtgtaggaaagcgcttatagctcacattagaaaggctgaggggtaagaaaaaattcagggtcttcgaatttcatgtgcaagcccacatgtctctcatcttctatttgctgatgatagtttttttttctgtcaggccaatgtccaaaagagtaaagaagttattacattatccgctcttatggtagggcatctggacaagaagttaatttatctaaatcatccattatgtttggtaatgaggtcccaccccctgttcggcaagaaatcaaaacaattcttggaattacacgtgaaggaaaggggggggaatttggggggcggacatatttagggcttctagagaaaaatcatgggt

SEQ ID NO: 167582 - DNA, 2035 bp, Arabidopsis thaliana landsberg
ggttctcttccagaatcaatctccaaatgcaccaacatgctttggatctccctttctagtaacctgcttaccggtgaaatccctgtaggaatcggaaagcttgagaagttagcgattctgcaactcgggaacaattctttaactgggaacattccaagtgagcttggaaactgcaagaaccttatctggcttgatcttaacagcaataatctaactgggaatctcccaggtgaacttgcaagtcaggccggactggtcttgcccggaagcgtctctggtaaacagtttgcgtttgtgaggaatgaaggtgggacggattgcagaggtgcagggggtttggttgagtttgaaggaattcgtgctgagcggttagagcattttccaatggttcattcatgtcccaagactcggatatactcaggcatgaccatgtacatgttctccagtaacgggagcatgatctacttggacctttcctacaatgcggtttcaggttctattcctttgggttatggtgcaatgggatatcttcaggtcttgaatttgggacataacttgttaactggaaccataccggatagcttcggaggattgaaagcaattggagtccttgatctatctcacaatgatctccaaggattcttacctggatcactaggaggactctcttttctaagcgacttagacgtctctaacaacaatctaaccggaccaatcccattcggaggccaacttacgacgttcccactcacaagatacgccaacaactctggcctctgcggggttcctctaccaccttgtagctctggttcccggcccacgagatctcatgctcaccctaaaaaacagagcattgcgactgggatgagtgcggggattgtgttttctttcatgtgtattgtgatgcttattatggcgctttatagagcaaggaaggttcagaagaaggaaaaacagagagagaagtacattgagagccttccgacatctggtagcagcagctggaagctctctagtgttcatgaaccgttgagcatcaacgttgctacatttgagaagccgctgagaaaaacttacttttgcacgccttcttgaagccacaaacgggtttagtgctgatagtatgatcggatcaggtgggtttggagaagtatacaaggcccaactggctgatggatctgttgtagcgatcaagaagttgattcgaatcacgggacaaggtgatagagagttcatggctgagatggatacaatcggaaaaatcaaacacagaaaccttgttccacttttgggatattgcaaggttggtgaagagaggcttcttgtctacgaatacatgaaatggggaagcttagagacagttcttcacgagtaatcatcgaagaaaggcggaatatatctgaattgggccgcaaggaagaagatcgcgattggagctgcgcgtgggctagcgtttttgcaccatagctgcattcaacacattatccacagagacatgaaatcaagcaatgttcttctggacgaagatttcgcagcacgtgtctcggatttcggaatggcgaggctggtcagcgctctagacacacatctgagcgtgagcacgctcgcgggttctccaggatacgttccacccgaatattaccaaagtttccggtgtacagctaaaggggatgtttacagttacggagttatacttcttgagcttctgtctggtaagaaaccaattgatccaggggagtttggtgaagacaacaaccttgtgggatgggctaaacagctctacagagagaagagaggagctgagatacttgacccagagttagtaacagacaaatctggcgatgttgagctacttcattacttgaagattgcgtctcaatgtttggacgatcggccattcaaaagaccaactatgattcaagtcatgacgatgttcaaagagctcgttcaggttgatacagagaacgacagtcttgatgagtttttgctaaaggaaacgccgttggtcgaagaatcacgagataaggagccttaa

SEQ ID NO: 167583 - DNA, 743 bp, Arabidopsis thaliana landsberg; identical to SEQ ID NO: 18059

SEQ ID NO: 167584 - DNA, 576 bp, Arabidopsis thaliana landsberg
  unsure (1)..(576): unsure at all n locations
gttctttttattgatggttatcatcaaacgttttgttcattttctaatgtatattttcttctgttgtttaagattgtggagcttttggtagacatggattgtcaaggatgtgaaaagaaggttcgaagagccatttctaaactcgatggtaagaaaaattcagaaaaacaaaatcaaacatcgattttagtcgtatcatttagttttcataaatatatgtttggtcttaaggcaaatcttgattaacagtataataataaatatgtgtaggagtggacacggtagagatagacgtggatcgacaaaaagtgacagtcacgggatacgttgatcgagaagaggttctaaagatggtgaaacgaannnnnnnnnnnnnnnnnnnnnnnnnnnnnnnttacaatggatattatggtgattactatacatatccttctcaacatttggaacaatcggatcagaagatatatcagacaatctcatatagtggaaagtatgatttctatgacgttgacgactttcaaaatacaaacaactcttctatcaacggttattatcttagtccatcacaaaaagttc

SEQ ID NO: 167585 - DNA, 786 bp, Arabidopsis thaliana landsberg
atgacggcaattccaaacgtcgtcgatattgaatcttcttcctcttcgctttgtcaagagacggcaacggagaccgtcaccgttgaaagaggctcgtctgattcatcttcaaagccagacgacgtcgttttactaatcaagaaaaaggaggatgacgccgttaacttgtcacttggtttttggaaattgcacgagataggtttaataacaccgttcttgagaaagacgtttgagatcgttgatgacaaagtaacagacccggttgtatcatggagcccgacccgtaaaagctttatcatttgggattcttacgagttctcagagaatctacttcccaaatacttcaagcacaagaacttctccagttttattcgtcagcttaactcttacgtaagcacagaacaagtttttactctttagctatgtttcttgctttacaagctttgtaaaaactagagtttttttgtagggttttaaaaaggtcgattcagataggtgggaatttgctaacgaagggtttcaaggagggaagaaacatttgcttaagaacatcaagaggagaagcaaaaacactaaatgttgtaacaaggaagcgagtaccaccacgacagagactgaggttgagtcattgaaggaggaacagagtccaatgagattggagatgttgaagctgaaccaacagcaagaagaatctcaacatcagatggtcgctgtgcaggagaagatccacggagttgattccgaaccacagcatatgcttagtttctttgccaacctggcccaaga

SEQ ID NO: 167586 - DNA, 1852 bp, Arabidopsis thaliana landsberg; identical to SEQ ID NO: 30797

SEQ ID NO: 167587 - DNA, 698 bp, Arabidopsis thaliana landsberg
atggggaatcatcaagctgttaagaagttgtgggtgattaacaatttctcttttttggattccgatagagtttattctgatatattcgtggtcggtggctgcaaatggtaagaacatttcttgtttgcaagtgatatatatttgtgttcgatagctacaagcaaatgagtttctgtggtttttgcttgtaggtgtctactcgcccttcccgagggaaacaataactatatctatgattatttctctctgtatctatgtgttcctgattctgagtatttgccttccggatggagaagacgcgctaaagtttcttttactatggtaaatcaagttacgggagaactctcccaacaacaaggtgattgtttctactctctccactttatgataaggcggacaacataaagaacacaacctctatgttgcagtatagctcttgtcatactttctttggaattgtagttgatgataatatcaagtttgtttttgtggttttgttttcagaagcagtatacgggtttgatgaaaaggacacaacccatggttttgaatctatgtttctcctttcggagattcaaagcagtgataaagggtttctcgtaaacggagaagtcaagattgttacaaaagaagatgttcttgaagttattggtgaattagatgaccagaggaaccagaaagaattatatcaatgggtt

SEQ ID NO: 167588 - DNA, 544 bp, Arabidopsis thaliana landsberg
  unsure (1)..(544): unsure at all n locations
cacgttcgggcgtggtgnacatgcccggcccgtccttgaccgcttggggccgtagggccggttgctggtcatggatcgcgaccccgcggccatcgccaccgcgcaggcgggttttgcgcgcgacgagcgggtcgacgtgcggcatgacacgttcgcgcatctggcgcaatgggatgcgacggatgccgggttggacggcgtgctgctcgacatcggtgtgtcctcgcctcaattggacgaggcggcgcgcggtttcagtttcatgcaggacgcgccgctggacatgcgcatggatccgacggccggcgaaagcgccgcggattttctggccacggccagcgagaaggacatcgccgacgtgttgtggcgatatggcgaggagcgtttttccaggcgcatcgcgcgcgccatcgtggcgcggcgtgcgcagcaacccattcagcgcaccggcgaactggcggcgctgctggtggagcttttgggacatcgtgaggccggcaagcatccggccacgcgcacttttcaggcactgcgcattcgcgtc

SEQ ID NO: 167589 - DNA, 395 bp, Arabidopsis thaliana landsberg
gccaaccgctgattgttgttcagacagaggaaggaaggaaggaaggaggagatcagaagcatcagccatggtgagcacatctgatctatttctgtctcacacacagtatgttgttcattcaagacatgttccctgatgcggcgggttctgtcctcattgtaagtcgaactcggcgtcgggaatggccgtttgtgacgaatgcaaactcaagttcctggaactcaaggcgaagaggagcttccgtttcatcgtgttcaagatcaacgagaacgtgcagcaggtggtggtggacaggcttgggggacaggtgaaactacgatgcgttcagggctgcgtttccgcaacgagtgctgctaccgtgtttgatttgctttgtactgatgagactgcagaag

SEQ ID NO: 167590 - DNA, 493 bp, Arabidopsis thaliana landsberg
aagatgagcagtgaaacgtcgtcgttgacgaagaagatgaagaagaagaaggaaggtttgggatggatagagtcaatcagaggatggagttgtgtgttccacgagtttctcttccagagattcatggcttctcatctacagaatccacttcctctaccttcactgaatcacctcacctgcattgtcactggctccactagtggcattggtcgcgaaaccgctaggtttgattgaattcgtgttggtttgatttaaggattgggaacaagaggaatgtaagattttacttgttattgtgtgaatttgtaggcagcttgcagaagctggtgctcgtgttgttatggcggtgaggaatactaaagcagctcatgagctgattcagcaatggcagaaggagtggtctggtaaaggcatccctcttaatctcgaggtaaagtcttatatgatcatcacatagtagtatgacatctatatttagcatgtgtttgcttgg

SEQ ID NO: 167591 - DNA, 525 bp, Arabidopsis thaliana landsberg
gcccgccatcagtgccgccctttcgcgcttgcgcaacctgttcgacgacccgttgttcgtgcgcaccggccgcagcatggagccctcggcccgggcccacgaaatcttcgccctgctgtccccggcgctggactcgatttccaccgcggtcagccgcgccgccgaattcgacccggccaccagcaatgcggtgttccgcatcggcctgtcggacgacgccgagttcgccctgctaccgcagttgctcaaacgcattcgcgccgaagcgccaggtatcgtgctggtggtgcgccgggtcaattacctgctgatgccgacgctgctggcctcgggcgaaatctcggtgggggtcagctataccagcgaactgccagccaacgccaagcgcaaggtgctgcgccgcagcatgccgaaactgctgcgcgccgacagtgtgcccggcgccatcaccctggacgacttctgcgcccgcccgcaaacgcaagtgtcgtttgccggggacctgtcggggttcatcgacgaggc

SEQ ID NO: 167592 - DNA, 1676 bp, Arabidopsis thaliana landsberg
atgaaagagtccgaccagctcgcgacttcttttatcacacccttcggcatgtactgctacgtcaccatgtcgttcggcttgaggaatgtgagcgcgacgtaccagcggtgcatgaaccatgtgttcggcgaacacattggccgcacggtcgaggcctacgtcgatgacatcgtagtcaagacgaggaaagcttccgacctcctttccgaccttgaagcgacattccgatgtctcaaggcgaaaggcatcaagctcaatcccgagaagtgtgtcttcggggtgccccgaggcatgctcctggggttcattgtctccgagcggggcatcgaagccaaccctgagaagatcacggccatcaccagcatgggacccatcaaggacttaaaaggcgtacagagggtcatgggatgcctcgcggccctgagccgcttcatctcacgcctcggcgaaagaggtctgcctctgtaccgcctcttaaggaagaccgagtgtttcgcttagacccctgaggccgaggaagccctcgagaacctgaaggcgctccttacaaaggcgcctgtcttggtgcccccggcggatggagaagccctcttggtctacgtcgccgcgaccactcaggtggttagcgccgcgattgtggtcgagaggcaagaggaagggcatgcattgcccgttcagaggccggtctacttcgtcagcgaagtgctgtccgagaccaagatccgctacccacaagttcaaaagctgctgtatgctgtgatcctgacaaggcggaagttacgacactacttcgagtctcatccggtaactgtggtgtcatccttccccctgggggagatcatccagtgccgagagcgctcgggcaggatcgcaaagtgggcggtggaaatcatgggcgaaacgatctcgttcgcccctcggaaggccatcaagtcccaggtgttggcggatttcgtggccgaatgggtcgacacccagctgccaacgactccgattcaaccggagctctggaccatgtttttcgacgggtcgctgatgaagacgggggccggcgcgggcccgctcttcatctcgcccctcggaaagcacatgcgctacgtgctgcgcctccatttcccggcgtccaacaatgtggccgaatacgaagctctggtcaacggattgcggatcgccatcgagctaggggtcagacgcctcgacgcccgcggtgattcgcagctcgtcatcgaccaagtcatgaagaactcccactgccgcgacccgaagatggaggcctactgcgacgaggttcggcgcctggaagacaagttctacgggctcgagctcaaccacatcgctcggcgctacaacgaaaccgcagacgagctggctaaaatagcctcagggcgaacgacagtcccccggacgtcttctcccgagacctgcatcaacccaccgtcaagaccgacgacacgcccgagcccgagaaggcctcggccgagcctgaggcacccttggctcagtccgaggtaccctcggctcggcccgaggcaccctcggcccaacctgaggcaccctcggctcagtctgaggtaccctcggctcggtccaaggcaccctcggttcggcccgaggtaccctcggcccccgagggtgaggcactacgcatcgaggaggagcgaagcggggtcggagca

SEQ ID NO: 167593 - DNA, 4045 bp, Arabidopsis thaliana landsberg
  unsure (1)..(4045): unsure at all n locations
atgaagcacatggatgtaccaaatatctatggggagaagcagtgaggcatgctacctatcttattaatagagtcgcaacaagatcagtggttaaacaaactccatatgaggtattcaagggaagaaggccaaatattgaacatttatgtgtgttcgggtgtatcggatatgcatagaatgagagttcacatttaaagaagctagataacaggttgagaaggttagttcatctgggaacagaacctggctctaaagcttatcgcttgttggatccatataggcggagaattattgtgagtagggatgtcgtttttgatgagagtaaaaactggtcttggaatgagacagaaaacgatatatgtgagagtccatgaacgtttaaagtcagctttggaaacaatggtattgagaatgaagactcagtacaagaaacagaggagaacggagccgatgagaataacgagggttcagttgaagaggaagaagacattccaaatgataatgatcaagatgaacagactaatgaggtcatcttaaggagatcagagagacaacgtcatagacctgctcatcaagatgacaatattttgtttcctcaacttgaagtcgaaaaactcttgatgacaatcagtgaagaaccatgggattacaatgaagcaaaagagctaaaggtatggagagacgcgtgtaaagatgaaatcatgtctattaccaagaataaaacatgggacctagtgtagtgacccgcgtaaggacatcgggcataggcaagagtccgaatttccgaaagttgcttgaatgcatggccaattaaccttacgtgcccacaacaccatataatatcaaagggcaattttgggaaagaatgggcactaatgggcatgttggggcataaacggacgtgccacgggcgaaagtatgccccgtcgggcgtttgccaaccgttgaccgcgccaaggacgcgtggctcggctgacttggggcccaagcanagttttttggagccgaattttagatgcgtggagccgatgttttggtggccacgtatcgctcatccgctagagcaacgagcgtgtcatcacgggcggatgacacgtgggttggtgactcgcccatacgcttgacacgtggacatgctgactcactatttccttgcctatataagctcaactaaaccccaattgttttgtgaagagaaagtgagcagaagtgaagggctgccgagtttaaaccgttcgtccgattcaagttaaggtcccgaagctgaaaactctgcccgaatcattgcacgcattttgttggttactgagtgagttctggataatggtttaagtttcatccccatattctcatgcatccttgattgatttcgaaagttatatgaatcttgtgaatggttatatttgattgcatatgtgatctatagattcttctgctattgtttatggctgagaggttgtgttgaggtattgatgattctatgagtgatttaacaatatgtttcataatatcttaaactttggggtcttggtacgtggtgcttgtggtaggaggcaaagaccataagcgtgccaagattgtgatatgtctgaccttcttagtgaactgtgctatcgtggggtcttgtaacgatgtcacttgatcgccatgaagtgcgaaaaactcggagacacggggctagctaccctggccgagtgtctacaagacggtgtagcattttgttgtgatgctcggttgcatacctttggagtgtgtgtgtttggtgttgggtttgaaggcagcatatcgggccctttaaaacttaataaaactagagtcttaatgcatttgcatgttttgtagttgcttcgacaagctacctttcgttgccattctctgttgcgtgtttcatgttatgattatgggttggggtaaactaatatctcttgcaggtagaccgagctcactaagtaatcttagattaattatgactccatttgttttgcaggaaaccttagtgggaaccattagagagatgctcaggacgtaggaaagccgatacagagtttgttgctttttgcaaaacttaatggttttgattcttgatttgattgagcgtatgtgctcgtggcgccattgttaaaacgttttggatacttggtgtacgaaagttatatgttataaaagattattttcatataaagagtgtgtttcatgcgatattagtcttgtccaaactgacataactcacgatcatggcaagggctaaaaagcctaaccgcattcgtgagggatggttcatgtgggtaattcggctaagggtctaaatccgtttggaacctaagttgggttgtccgtgtgagctatcaatgtggcgtttccgggttgcccttggcttgtctggccatatagcgattcggtggcgttatagtcactgaggacagtgtagatcatgatggggaggatttcagtctcactaaagatcaagctgacaaggaactcgagcagccacttgacctgtcactcgagcaaccactcgaccatttcactcgaccacccttcccaataacagcaccaactgctctgaaaccagttgttgtcaaaaacaaagaaaaggtctttgttcctcctcctcacaaaccacacccttcatttcctggccgtcacaagaaagcattggcacataagtatagagttatgtttgccaagaacatcaagaaggtagagttgcagatacctcttgttgacgctctagcactaatcatggattcccacaagtttctgaaagacttgatcgtggagagaattcaagaagtgcaaggcatggtagtattgggtgacgaatgcagtgctattatacaaaagaagatcattcacaagaagcttagtgatcctggctcattcactctatcatgctctttaggtccattggctttcaacaaatgcctatgtgatttaggagcatcagccagtctcatgccactctttgttaccaaaagattggggttcactcaatacaaatcctgcaatatatcccttatcctagctgacagatcagtaaggatccctcatgattttctcgaaaacataccaatcagaattagagctgtagagatacctactgactttgtagtcctggagatggataaagagcccaaagaccatttgattttgggaagaccattcttaacaactgcaggagctatgatatatatcaagaaagggaaaatcaatctagaccttggcaaagattttaggatgacctttgacgtcaaagattgaatgaagaagcctactatagaaggacaacccttgctgatgagttactggaagagcttgcagaagaagatcaccttaacagttatttaaccaaaagtggtgaagatgggtttctgcatttggagactttgggacaccaaaagctgttagactcacatagagcgatggaagaatccgaactctttgggaattgaatggaccaacaacagaggtgatggtaatgagtgaagaaaggtcaacacaagttcaacgcactcactcgagtacatactcgaccagccactcgaccttgtctgccatcgactctggggagccgatcattctgacttcagatgactggtctgaactcaaggcaccgaaggttgatctcaaaccacttcctagaggtctaaggtacgcagtccttggtccaaactctacttacctgtgatcattaatgctgagttaaataatgatgaagtgaacctgctattatctgagcttagaaagtataggagagcgattgggtattcattatccgacattaagggaatttcacctagtttatacaaccataggatccatcttgaaaacgaatcatattctagcattgaaccacagaggaggttaaatcccaatttgaaagaagtagtgaaaaaagaaattttgaaactgcttgatgctggtgtcatctaccctatctctgatagtacttgggtttctcaagtgcattgcgtccctaataagggtggaatgacaattgtcaaaaatgagaaggatgaactgatccctactagaactataactg

SEQ ID NO: 167594 - DNA, 700 bp, Arabidopsis thaliana landsberg
ttcagcgacatggacgaagaatctgtttctaatggttctcttttcagcaaattcgaaggagaagagacgatgggaaaagttcttctattctcaatcgtatcgattttcacagggattctattcctcctcttgcttcatctctacgcaagactcttttggtggcgtgtggaacaacatttcaacctaaacctaatccaatccgacgatcctggctccacagtcatcggacgtaatcctcgacgacgtcgttttgtcttcgctcaaagtcaagaagatcctcttcacaacgctggacttgattctaaaattctccaatctatccatgttgttgttttcaagtgtacggacttcaaagacgggttagaatgcgccgtttgtctctctgatctcgttgatggcgacaaagctagggttttgccaaggtgtaatcatgggtttcatgtggattgcatcgatatgtggtttcagtctcattccacttgtcctctctgtagaaacaccgttggttccgtggaagataccacacatggagcaagtgagggtttacctcaaaatcaaaactttgaatcagggcactcgactaatcagcataatccatctcaagatcagagctctgttcatgagttttcgacagaaccactgagttttccgacaaatgtactggtttggggagatcagaatcaagttagaagtgcaggcc

SEQ ID NO: 167595 - DNA, 1574 bp, Arabidopsis thaliana landsberg; identical to SEQ ID NO: 66101

SEQ ID NO: 167596 - DNA, 560 bp, Arabidopsis thaliana landsberg
atggtaagcgacggcggcggcgagaataacagagcggaggcagatcagttgcttgctacatcggagaagctcttggcttcaagtgactttcatggagcaaagacatttgcgatccgtgcatgcgaagctgacccatcccgaacagacgcagctgactatatcctcgccatcgccgacactctcctcgccggagaaactacaatcggagattccaaagtaccagactggtacgcggtacttcgaatcagccgcctaacccaaagccctgaacacgtcgcgactcagtaccgtagactcactcttctcctcaaactcaatatcaatcgtcttcctttcgccgatcaagcgcttaaactcgtctccgatgcttggtatgtcctctctgatcctccaaggaaatcaatttacgatcgagagttgcagctgagtcaaactggtcaatcggagaaatttcaagattcgccattgcagagccaagctgagaccttggagaatccttcagctacaagcttttggacagcttgtccatactgcttttcaccttttgaggtccccaaagg

SEQ ID NO: 167597 - DNA, 4042 bp, Arabidopsis thaliana landsberg
tttgaacgtggaaaggctctagataacattggaaaagatgtaagaaaggtatttgaagaagagggtgatcaagaaagcttgagcatccttccaaaggctgttgatacagtgagaaagaaggtaagctttgtaaatcaatattttgaaatatattttgtacctctttgcttttgttttgggcgatcctgttctgataaacttgacagaaaaactagtgcttgaatcagataattaaaaatattcataattgaatagcaatatcaactttttttttgtctaatacatagaggcccagactctacgatgtttgtaaaaatagttggttcgttctttgtttctgagatagttgagatgctcttttcatgttgagacacattaagatgtatggttcttaagagctttcagagattgcatagacagtcactagtaaagtgttataggcttttgtatttgtcctattcttccatgtcttactactttgtccctttaactaaattatcaggtagtccgttcaaggatgatatcagatggatttcgagtcgacgggagacatcttgatgaagttaggcccatctactgcgaatcgcattacttacctgcgctgcatggatcagcacttttctcacgtggagatacgcaggttcgtcctgaaactttttcccagtaacgcctatcaaattaaaccttttgaaccaaacaaaaaaaagaataatctcagggtattaggtagcagaaggttaaaagaaaacccgaatttctatattgtaagaaatgacattactctgtactttgtatcacttctgagggttgctttcctagcttagtttcattttttgtcgcttcaaaagttgttggcctgaagtgttaaagacaagcttaatctgttcactgcatttaatgagaatcttgctttaagatgttttgtatgtgttaaaaggtgctctgtactgtaacacttggagccccagcagaagcacaaagcttggattctcttgttggccccccgaagaagagattcatgcttcactacagctttcctccatattgtacaaatgaagtcggaaaacgaggaggccttaacaggcgtgaagttggtcatggtaaagtctttggtttcctttctctatttgcatgtaaagtccttattcacatttttcaaacaaaatattgctggtaaagttaatcctcaattttccttatctggtcgttcatatcatctttctctctagctaataatagaacaaggatggctattttgtcttaactttctttgaagtgtttttttgttatctaagggaatgcttttgtgctttatgcttgactgtgatttacattttctgtaggaacacttgctgagaaagcattgcttgctgtattgccccctgaagaggcttttccttataccattcgtataaattcagaagtaatgtcctcagatggatccacgtcgatggcaagcgtttgtggaggtatttattgtcactcacagacgagattgtattatgtttttgcaagccagtgcaaactatcatatgtttctattttaccttcataatgaaaggtgttccgcttctcaggtagtatggcattgatggatgctggaattcctctgcgagctcatgttgcgggtgtatctgttggtcttatcaccgatgtagatccatcaagtggtgaaataaaggactaccgtattgtaaccgatattctcgtgagttctcttattctaatttgttgtctttatttttatatggttagttatgtgaataatcatgaaactgaaatgtgtggcagtgcagtagttaatttaactgttgttgtctaaaccatgagtagagttaagttgctaaaatggattttatagaactgcatacaatgacttctcagggtttggaagatcatcttggagatatggatttcaagattgctggcacacgagatggtgtgacagcaattcagctggatataaagccagctggaataccgttggatatagtttgtgaatccttagaaaatgcacgtgaagcccgtcttcagattcttgaccacatggagagaaacataaattccccacgaggccaggatggggcttactctcctcggctaggtttttttcccacttgtcttttcgttaaccttagctaatagaatttcccctgctcaaactccaaaattatgtccgtcttgcagcaacgctcaagtactccaatgactcacttcgtaccttgatcggacctatgggtgtactcaaaagaaagattgaagtggaaacaggtgatttcttgacttcaactttaattgttaacagcttagttcttgtgacctttaaagactaaggaattgaataactcgtttgaattgaaaaatttaagtgcttttaagaaagtagtttcaagatgaaattcataaacttatgaataatatccacttgctttcttatagtttgctttgaagattttttatgataaataagtttttttgtttaggtgcaagattgtctattgataatggaacattaactattgttgccaagaatcaggatgtgatggaaaaggcccaagaacaagtatctttcagtcaattcagcttttaattgatcaatgattttccatgaattctgatattatgcatgtcatcaggttgacttcatcattggtcgtgaactagttgttggtggtgtgtacaaaggcacagtgtcatctataaaagagtatggtgcatttgttgagttcgctggtggtcagcgaggtctactacatatgtttgagctatcccatgatccagtaagctttcttagttacaacctgtgacagtatgtttccccctgagtattgttttctcatgtgaacctgaatgttttcattggccaaatcttagaaccctaatccgagagctttattttcttggccattactctagttgagattggttaatacttaccttgtctttatgcaggtctccaaggtttcagatgtattagatattggccagtgcatcactacgatgtgcattgaaaccgatgtccgtggtaacattaaattatcccgcaaagcactgttgcccaaacccaaacgcaaacccgcatctgatgctggaaaagatccggtgatgaaagagtcgtcaacagtctacatagaaaattctagtgttggagagattgttgcaagcatgcccagtatcgtaacgccacttcagaaatctagattatcagttcctgcagttgtcatccgtactgctgtggagtgtaatgaggcagagaaatcttcccctgtgaacgacaacgacaaacccagacgcgctgctacatcaaagccagaccggaaacccaaatccacagcctctaaactgattgcgacacagaaggaagaggaggcactcgaatccattgctccagaagaaacttcagctgaatgtggtgagatactgaagcaggacgggaagctaaaatccgtttctcccaaaaacaatagcactgcttctaacctagtatcattttcaaaagctaagaaatcaactatgaaggagaatctatcagagaacaaggctgaagagagtgcatcggttagtacccgaaaactgaaaataggaacggagatgacagccacggtcgaccatgttcgagcccttggattggttcttgatttaggtggtgaaatccgcggtatgtacatattccaggtatgtttcagtaaattctcctttgacttgttctcccattttcttgagttaacttttgaggcgatatacttaattcttgctttgtattgatattgtgtactatgaatgagtacagggagataaagataagttcaaaaaaggagacacattgcgagtgaaatgtacaagttttaacaccaaaggagtccctgtgatggctttggttgacgaagagggagaagaatagtggtaaactctctttcctttctacaaggttttttcaacccaagggatcatgtggagtcgatcatatggatcatacgagagttttgcttgaaatgtttttatcatacggatcgaatcaagagatgctcgttagctgcttttg

SEQ ID NO: 167598 - DNA, 582 bp, Arabidopsis thaliana landsberg
atggcaactccaaccaacaaagagcatttctcgggtggacttgcaaaggttttggcagaaaaatggcaagttgacgtaatgctcaaggcaaagaatagtgatgaaggtttagttatctctgcccacaaagttattcaggtctcttcttttttcatcttctctttattgatatcatcatcttattcaagaatcaattaaatttagaaatgctaatgtttagtgagtgttccttttatgtgaagtttttttttttttgggttggtgtggttattgtaatgattctcttaacaagtatgtttggaatttgaataggcatcaagatcggcggttttgaagaagatgctagaatcagacgagttcaagacttcggctaagcaggtgggaacaatcactctcttagagatgaaacaagaagagctagaagcttttgttgagtttctatatagtgatggttctatgctttcttcgaaagtgaagcaacatgctcgggcactctatcgtgcggctgacaaatactagattctccgactactagagctatgcagatctgagcttatatcttctctgaattcgacgaattct

SEQ ID NO: 167599 - DNA, 429 bp, Arabidopsis thaliana landsberg
gcagttaatgtgaacatgcgcgaatttttggaagctggcgttcattatggacaccagacccgccgctggaacccgaagatgaaacagtacatctttggatctcgtaacggcatccacatcatcgatttgcaaaagacagttaagctttttaaacgtgcgtgcgatttcttagagcaaacaaccgctcgcggcggtcacgttctatttatcggcactaaacgtctggcacgcgacctcgtcgcagaagaagcgcgacgcgcgggaatgtactacatcaactatcgttggttaggcggaactttgactaactttccaaccatccgccaaagcattcaccgtttaaagcggtatgagaaaatgcgtctcgacggaaccctgaacaagcttacaaaaaaagaagctcttggtttcgatcgtgaaattaaaagc

SEQ ID NO: 167600 - DNA, 932 bp, Arabidopsis thaliana landsberg; identical to SEQ ID NO: 62935
  unsure (1)..(932): unsure at all n locations

SEQ ID NO: 167601 - DNA, 1871 bp, Arabidopsis thaliana landsberg
atggagaagctgaggaaggtggtgaacgaaatcgcctacacgcgagtccatacgaattcccctgctcttcaccgttctctcgttcccttcctaacaatcgcttcgtctctatacggagtcgctctccaaatccgccgctctctctaccgctactcactcttacagaaacaccggtgcgttttctctcgagagagagatcaattgaataatgcttttatcgattcctggaacttaatttgatctgtgggaatgaagattacccgttccggtgatcagcgttgggaatctgagctggggaggtaatgggaagacgccaatggtggaatacatttctcaattcctcgttgattctggacttacacctcttattctcactcgtgtaattcccattcttctaactagtatgtatagttaccattgaatttttggagtgtttgcttgtgtgtgtacttagactctaacatattgtcagggttatgctggtggagatgaagtcaaaatgcttgaaagacatcttcgtggtggaccggtaaagattggcgttggggctaaccgggcagctactgctgctttgtttttggataagtatggttgtgtagattcttctagtttaaggtcattctttgatcttcatgaaagagcacaagtttggaccatttctgaaaaaattggttgtatcatattagatgatgggatgcaggtatattctctagtttatattcacaaaattctagctttatgagattattttcaccttctttgtgtttattgctgttttgaagacttgtgctctcttgtttggtacatagcattggagtttgtctcgtgatctcgagattgtgatgcttaacgggctgaatccatggggaaatggtcatttgatgcctcatggtcctttacgagaacctcttctggcgcttgaacgggcagatgttgctgtagtacaccatgtggacttggtgtgtttacaagtttatacttgtttttttcctttctttttggtgatgactattgaggttagtggttttggatcatgcagattactaaacaaagcctcagagatattgagaacatgatacaaggattcaaaaagtcgataccgattttctactccaagatggtgcccaaatacttgttcgatgttaaaaatgctaggtcacatgtagctttagaagcgttgcgctgtgcctctgtgctatgtgtttccgcaattggatccgctgatgcatttgtcaagagcatcgagatggtaagttgttattatcctagttccatgctcacttgattttgtaacaaatattcagtttctgctatgctgactagtgggttatatatgtttgacagactggagcacattatgttgatagacttgatttcagtgatcatcatttatttgaagcagaggttactaattccatagctattcttcatgtgttattcccaatttgtttcactgccaaaaaattatttttactaaatcaaattggctttcatcaatatcataatgataagtgcaggatgttgaaactatgagtaggagagcaaagggactagaacacaaatctaattgcaagcctatcattgtggtaactgaaaaggtgaggacgttattaagtttcttgtttttgttacttgcaaacgttattaagttcaaaaagtccagcgacatgaatctaacttcttttttttttttttttttgggaaattaggattatgatagagacccggagatcctcaaatgtctggactcatacacagtcttggttctatgctctgagttgcaaataactcctattttggaaactgatgtagatagctttaattatacacttatgaaagctctagctgctaagttctatgtttccagttag

SEQ ID NO: 167602 - DNA, 530 bp, Arabidopsis thaliana landsberg
attgtcatcagcttcaagatgcaatgggctaagtacctggcgcctgcttatggaatttgtgaaggcttgttcctgggcgctatttccgccatggtcagcaccatgtcgcggagaaagcccctttcatcgtgatgcaggcagtgctgctgacttttggcgtagtactggctatgtgggcgttgtaccgttttcgtatcatcaaagtgactaaaaagctgacgatggtaatcgtgggcgccaccatgggtatcttcatcttttatattctgacctggatcctgggctttttcagcataaatattcctttcatgagccttacaaacggttcaaccttcagcatcattttttcgctgatcgtggtgggtgtggcggccctgaacctgctgctggattttgatatgattgacaagggcgttatgggtggcgcccccaaatacatggaatggtacggcgccttcgcgctgacagttaccatcgcatggctctacattgaaattctgcggctgctctcaaaaatgaacagcaggtaa

SEQ ID NO: 167603 - DNA, 422 bp, Arabidopsis thaliana landsberg
cagccccttattcccaccgagctcgccaccctcgtcgcccaggtcctaagcccttacggcatttcctgtctccgccactcagtcgcacggaaatatgtccagtggcgcaaaaccgattctgcctcttcctcgtcatccaggcccccctccctcacacgcaatcagaccctcccggggagcagcagtctctcgtccttcacccaccacgaccaccaccactccctatcccagccactacccccgagccagaaccaacaaatcctcacctcctccatgggcgccacctccagctacgccctggcccgcctcgccgaccacacccagcgcgaggagcgcctggcccaggtgcgcctggccaactgggccgccgacctgcagaagagtctggcgcgggagcgcgagcaatatgccgcgctggcgag

SEQ ID NO: 167604 - DNA, 352 bp, Arabidopsis thaliana landsberg
atgtacacgctctactacgctcccggctcggccaacctggtcgtgcatctggccttgctcgaaatcggcgcgccatacacgctggaacggatcgatttcgccatcgaccagcaacacggcgcggcgtatctggcaatcaatccgcacggcgtggtgccgaccctggtggtcgacggcgtgccgcacggcgaagcgccggcgctggcgatgctggtggtcgaacggcatcccgaggccgcgctggcaccggcgccgggcagtgcgcaacgcgccgattacctgcagtggatgttctatctcgccaacaatctgcagccgctgttccggcagaatgttctttcccagggatcac

SEQ ID NO: 167605 - DNA, 874 bp, Arabidopsis thaliana landsberg
atgaaccccaaaatcagaaaacccaataattcatcttcgaagaaggtcacagtttccgttctctctgttttcttagtgttcgtcttcgttaatactttcttctacccaagtttttactctgactctggctcaattcgacgcaatctcgttgattctcgagaaagtttccattttccgggaaattttcgtaaaacgaaggtttacatgtacgaattgccgacgaattttacttacggagttatcgagcaacacggcggagaaaaatctgatgacgtcaccgggttgaaatatccgggtcatcagcatatgcatgagtggtatctttactcggatcttacccgacccgaagttaaacgagtcgggtctccgattgtaagggtttttgacccggctaaggcggatttgttttacgtctctgctttctcttcgttaagcttgattgtggattcgggtcggcccgggtttgggtacagtgatgagcagatgcaggagagtttggtgagttggttacatagtctagaatggtggaggaggaacaatgggagggatcatgtgattgttgccggtgatccaaatgcgttgaaacgggtcatggatcgggttaagaatgcggttttgcttgtgacggattttgaccggttaatagcagaccaagggtcgcttgtgaaagacgtaatcataccttattctcataggattgatgcttatgaaggcgagcttggagttaagcagaggaccaacttgttgttcttcatgggaaatcgatatcgcaaagatgtaagatttattggtctccattgttcgtgatcttgaatttggaaaagggtttattaacaatatatgtgctttgttgcttgtgtgtgtgtgtttgata

SEQ ID NO: 167606 - DNA, 1775 bp, Arabidopsis thaliana landsberg; identical to SEQ ID NO: 29248

SEQ ID NO: 167607 - DNA, 1681 bp, Arabidopsis thaliana landsberg; identical to SEQ ID NO: 62632

SEQ ID NO: 167608 - DNA, 1051 bp, Arabidopsis thaliana landsberg
  unsure (1)..(1051): unsure at all n locations
gttgccagacgagatcaaactggtgggaacagtgaatatggaccgtgcttataacatttggattagggcgcttattaaagctggattcttgaataaccctgcggatttcttgcagaagattagtcctttggaaggttgtgaactcgaagttttcaggtataactctatggtctttcaacttttgaaggagaacaatcttgatagtgtgtatgatattcttacggagatgatggtacgtggagtttcgccgaataagaaaacgatgaatgctgctttatgcttcttttgcaaagctggatttgtagatgaagccctcgagttataccggtcgaggtcagaaattgggtttgctcctaccgccatgtcttacaactatctgattcataccctttgtgccaatgaaagtgttgaacaagcttatgatgtcttgaaaggggcaattgaccgagggcattttcttggtggaaagacatttagtacactaaccaatgccttgtgctggaaggggaagcctgacatggcaagggagctggttattgctgccgctgaacgggacttattgcctaaacgtatagctggttgcaagattatatcagctctttgcgatgttgggaaagtggaggacgctcttatgattaatgagctattcaataaaagtggtgtagacacctcctttaaaatgttcaccagtttgatatatggctcaatcacactaatgaggggagacatagctgctaaacttatcatcaggatgcaggaaaagggctacaccccgacccgtagtctctatcgaaatgttattcaatgtgtttgtgagatggaaagtggtgaaaaaaannnnnnnnnnnnnnnnnnnnnnnnnnagttgtctctttgggaacacaaggttcaggcctacaacttattcattgaaggagctgggtttgcaggaaaaccaaaacttgcaagactagtgtatgatatgatggatagagatggtatcacgcccacagtagctaaaaacattctaaagcttcagagttatctaaaaaatgagaaaatcgccgatgct

SEQ ID NO: 167609 - DNA, 1580 bp, Arabidopsis thaliana landsberg
atgaggaggatccgaagacgctttgatagatcaacaagtcttgtagagtaggtcgcccttggtcgagtaaatgggtcgagtagaggatcgagtaggagggacgagtagatcaatctactgcttcttctgaggctgctttgatcgagtaagtgggtcgagtgaattgatgcctcctctatggctgtcttgatcgagtgaactggtcgagtagaatgctctactgcttccctcctggttggatagagtagagggtcgagtagagtccttttaagctccttctgcacctgaaaacacaccatgcaatgcgtatgcaagattatcctaaatgcctaagtgtgcaaaataagacaaaatggtgcaaaatgatatgatacaatgagcaaatgcaaagctaaatgatgataaacacacacctaaaatgagtaaaatacagtgttatcactaccttgaaactccacttccatgccgatgaaagagagaaagaagttggagggttggggtatatcaccttcttggtactctgaaatcactactcccttaccattaggcagctagatgctatattaaagtcctctaccaagcacggaatccgccaaaactttaacaaggaagaactccatgatttgtggttaacaatagtcggtccgcttccctacaaatcagctagggctaagagttcagcaataaggaatcccatgcttagctatctccacctttgtattgcaaatactttcttcccgaagaagacaaccggccatgttaatgagggagagcttaggatgctcgatcttaccttatgcttcattttggggcacacaaggaagcaaatagagatggaaggggataggtctgatacatctctttcggtggtgtttatagatcattttatgagctagcgggaatatgcaacaggcattcaccaatccggttatggaggcagcttgtgtgctggagaagtcatcacaccgatccttgtagctgctggagttcctcttcatgctcccgatgtcagacctaactacattgatatggagtacttgaagagaaaatgctacttggatagatctgcctcagctgatcaactccatttcaagttcaagcaccccacgctaggtctctctaggttagcacttccttgcaaggagtacaccacagttagaattgggaacaacattgactttgatcctccaccatcaatcttagtcaatgtccttgcgcctttacaagcagagtggagcatggggagtgagtcacaagaagaaggagcagagttcaaccaagaagaagctgagcaggaagcttatactcggccgagtatggccaggtcgagtatgaacaagctgagttcagtcgagctgaacagtttgatgagcaagaagactcgtgtgaagctgcagtggagcagtatttctttgaagattatgatgagtccgatcaagagagagatcccggtcaagtccacaagaagctgggaatgcacaagggcctagggaagtttcagagaaaaatgatcagtgggttgaagaagaaggtgagaaagatgaagagggcaatgaacggcatggcggttcagattccga

SEQ ID NO: 167610 - DNA, 2842 bp, Arabidopsis thaliana landsberg
gcttccttgactcgcgcctggtcgggagttccacgtcattttcttttcatacactaattacacacatcaagcatacatactaagaatataaaaattgagctaaacagtaaacacacgcatatatccacacgaccacacatcaacgtcatatagaatatacatgcatagccatttatccatgtaatatcacatacacacacatgaatacgtttaacgtttgatctcatacttctcggatttaactcggtttgacgaaagtaaaacaaagtattagaccttggtccaaaatgtagacatcacccctctaataataatgaaaactcatgttatttgggaggagttgtttagagtgattagatccaagaaaagatgtgaacttaattagaaatttcttagatcaaaaaagagggaaaaaagaagaattgcactctaaactcatacaatacaatccaaagtcttttcggttatagattttggtgtacggaacttatctaaaaataaataaataacaagtttgttcgagctacctaaaattagttgattccaattcaagtcattttaaaacattatacgcgattttaaaatcgcaaataattaagttgactgaccaaatgtataggtaaatcatgtatgagtcaaataactgtgcctaaaattgtaattttatgctaaaatgttgattttcatatggactattaaatgaaaaattaacggtggatccaacaagcaataggtgaataagctaaagcaaacccaagaagacataaaacgaagcacaagaagcatattttcttaagtttgaagcaaacaataatttactctatacatttaaatttcaactcgggattcgaattagaagactcgaagatccgacatggaaatatttaaaacttacctcggtttcatagatctcaatttaggactatagtttaacacattactacgtctacatgttatatttaatcatctaattaatttgtctcgatttttgttttttttcgattctacagacatacgttaatgtttgcttattccactccccgataataatcaaaatttaaataacaatcaaacacttacccgctgttttggtctgtttctaaccaaacaatgataatcattttgtcatgctcatccaacattagcacaagtctaaacaggccttacacatcagctcaataaagccttaataggcccaattaaaacagtacgggcccacattcttccttctcttaaagcctaaacagttggcgcgtcaaaatcacgtggaggagcactgaagccagtaggtgtctcttcacaggatcatttccttaaagctcattatcacaaaaacaaatccttttgattattattcctgaaataaaaagcaaagtgaacaaggttttaaaaacttttattttcgctcttctccagaaacattccgtttcagatatttttaatttttgaatttgttttcgctctctctctctctctctctgcttagattagatctgttcctgtgaattgattctctgtttcatcgtttgctcacgcccccgttttcgccgaaggaggaagctctcatcgtcgtttcgaaaatgccggcgaatgatgctgaatacgatctcaaagtaagattactgttttccgatttgttctcctcatcgaatttcaatttcaagctcccttgactgattctatggtttcttcttcacaggttttatctcaatctgcgtcggcagggttagttttctccttaatccccctagggtttactttaaaatctccaatgagtactgattggaattttttgttttttgattgagaagggattacacatttgcgaatgaggataacttggagcattgtacgaagtatttgaatcagacgatggttacatttggatttcccgcctcactcgatctcttttcgaatgatcctgtaggttttaattattgattctgaaattgtttggatattttggggttttaattaggggttttgtttgatttaggtttctatatcaaggacctgcaattgtatgtactcgttactccagcaacgacagcgtgatatagagtttagagaatctgctaatgagctgagacagaggtgaattttgtttttcttccttcttgaattttgctttgcatttcattgtgattattgaaattgttctttgaggattagtattggtctggagattgtagcagttttatctactttgattttgcggaagaatgtttccttgtggtttatgtgcatttcccttactgtgtgtagacagcaatcggatatagctagacttgaagctaaagttgagaggcttgaagcgctactccaacagaaggacagagaaattgcaacaattaccagaaccgtgagtcctataaagtttcagctgaaattgttttcgcttaggctcttgtttgattatgaattcaatgtgttgacaggaagccaaaaatactgcagctttgaagtctcagattgaaaagttacagcaggagagggatgaattccaaaggatggtgattggtaaccaggtctgattgtgtttgctcttggattaactactttatcttagaggaaattgtactgatgatggattctctgcatttcttcttttatttctgaatagcaagtgaaggctcaacagatacacgaaatgaagaaaaaggagaaggattacattaagttgcaggttgtgtatctttttctcgtgaaactagcttttctgcatcctgtttaattctgcattttgaacgctttgtttctcttgtaggaacggctgaatcaagtgttaatggagaaaaagaaagaatcaagatctggaatggagattatgaatttgctacag

SEQ ID NO: 167611 - DNA, 1500 bp, Arabidopsis thaliana landsberg
atggggtcggcgataaaacgaaggcgtatccgctcactcgtacggtgatttgcaactgaagttttgaaaactaaaaaagaagttttgatttttgaacaaagagagaaaaaaaaaacggcagaggaagagccgtttacgttgtgcttgcttccccaagatttctcaacttcttcttcttcgtgtgagtttcaattctctaatttactaaacttattcaaatcgcaaggagtttctctgtgctatcgattgtcgattgattcatcggtgagttttctctgtggtaacgattgggtttatatataatttgattgattgattaacttaccaaattagtcttagatttggatatatgcttgtaattgattcaaataacaatctggttctctaatcaatttctcaaattttgagtaatttctgtagattattgtatacttgcaggtgtaaaatgcgttgccaggaggtaaaatcatggacatttaaaggcttagtggctgcgtttatcgatctttccgttgcgttttcgctactttgcgcatcgtttatcgtttatgtaacatcgaagttcctcggtttatttggtttagacctcccatgtccttgtgatggtctatacagtgagtgttttcaagagagtttaaggaatcttccggttaaaaagatctcttctgttcaaagatctgttaaaaacagaacaccttttgattcaattctgtataaagaaggtaatggtggaaagaagagaaaaggagagcgtaagcgcgttgagttggaagatgaggtgtctagtactactccttctgttggaaagtttgagaataaggcttcagggttcgatcttttaactgcgcaaagtttgaaaaaaggaagctttaaagttaagagtaagcggcttagcttccataaatcgccgtatggtttcaagaaccattaccaaagttgtttaggccttaagagctttgagggatcatatgatgaaaatgatcctcttcttgtgaactccaatggtaagtttttttgttgtctttattcaattatattggatagtgaatgttggttttgatacaagttataacaatgtagatagtggacatccattggaggatgtgtcgttgcggaaaagtgtttcactaagttctgttgggtgtggagtaggagagggtacatgcagttcccctggtatgatacagaaggcggttgagattttagaacagatgcttggggaagaacgagctgcacgtgcttcattagctcttgaactagagaaagagagaaatgctgctgcatctgctgcagatgaggctttgaatatgatattacggttacaagaggagaaagcgtcgatagagatggaagctaggcaatatcagcggatgatagaagaaaagtctgcttttgatgcggaagagatgagtattctcaaagaaattttgcttaggagggagagggagaaacattttcttgagaaggaagttgatacctacaggcaaatgtttctgagac

SEQ ID NO: 167612 - DNA, 1477 bp, Arabidopsis thaliana landsberg
tttgggacaagtcttccgcaccggtatctaaagtaacgccagagcagccatcaaaaagaattatgtaaccaatgaacaaaaggcttatgaatacagattaagttcagaaacaggatcaacaaggaacagctaaagagaaaaaaacaattgttagtctactaagtaaaaccattttgtggtaagtggttttaacatttaagggggaaaaaacacaagttttcacttggatgactccaaaaagcaaagctataaggaaggataaactcatagtacatgcttgtatgcatatctgtatccatagaagaatctacgaagctttgtacaagtttctgagttaacaaaactgataaaaattatttggttatgatcctagagctgataacaatgcaagtatatgattttgtaaagctatgaagatccaaagatttttataaagaagaaatcgtgacccatttatcatttggactttgggctaagagaaaataccaaatacaagacttaagcataacaaattcagactattttcaaagattccattaatccaatgatcccagaagctcgaattggagaacataaacggtactgtgaagattaaaacagagtatgaatgctcaaatctgatattcccatcggcgatgaacaaaattaacccaagacaacttaccggagaggaaagacggtggtggtggtgataacgagctcagagattggattgaagaagatgcagatgcgatttcaatgaaaacgaaatggaaatcgatagtcgattttgatagtcctggctccgacaagcttaacgctgtctagtaagaagggcggccccaaaatctctgcaatcactcccctttgatccctccttaaaggatctgttggagaaattttttaaggctacttttgctcaactttattataatgttttaagaatattttaggattttgagatatttgttaaacataaggcttgtagttttataataatcctctctgacatggtttttggttgtgttttgaaggctgtacaagtgcgtcaagagctgcataagtgtgctcccgatcacaccaatggtctcatcatagaccttcttcctcgtggatccgttaaaagcgaaaccgttcaggtttatggaaacgcactgtagcatggaaaaacaaatttgacaagtcttcaaccaaagacaacgagtttcaccaaggcaaagaagtacatgtgcctttcatgagaagctatgaaagtcaatatataatggcttgcgatggtttcaaggtccttggactaccataccaacaaggccttgatgataccaaacgaaaattctcaatctatttctatcttcccgactagaatgatggattggatagtcttgtcaatgattatgatagatagtcacattccgagatatgaagttgaagttgctgatttcagaattccaaagtttaacatctcttggaattttgagttttcggaacttgagtcatc

SEQ ID NO: 167613 - DNA, 948 bp, Arabidopsis thaliana landsberg
atttcactacttttatcaatggaaattatcctagacgaatcagtgaatctctatacatcaatcaagtcaaaccttgtcctaaatagatttattgagaaaacatcttatggtggtagttttcgtgttctctcgttgtgttgcagatacagcaagtcatcagtagaatgtttcctttcgggagaggattgtgtcatgcatactgggcacctaatttttgggttttctacataatactcgacaaagggcttgcggttttgctgcggaagctaggatatgaaattcaaattccttccgcatctttcactggaggattagttggagattcttcgccttttgcagttcttcctcaggtactactcttcatgagtatctgtcatatctcatgaattgtttcactcaatcttattctgttggactggtgcaatgacagatcacgccattgacaacatttgcaatggtattactagctatatctccatgtctcatcaaagcctggaaaaaaccacaatcggggctcgttgctagatgggtagcttatgcatatacatgcggttttctgtttggatggcacgtccatgagaaagcatcgcttcactttaccatcccacttgcaatcgttgcagttcagagtctagaagatgctaaacattactttctggtttccataggtatatactattctctaaccagaatcaacttttacgcataatcattcattccttgtacttaatctctgtatttttcctgcagtctcttgctattcgctctatccactcttatatgaaccgcaggagtacccgatcaaggttctgttgctgttattgcattccgtggtaatgtggctcggctttgcagctcaatacacagattataaggcgcagaagaaggagactagtgaaatcaagagcaagtttaggattggatgttttgagaagagctatctaatgg

SEQ ID NO: 167614 - DNA, 1619 bp, Arabidopsis thaliana landsberg
  unsure (1)..(1619): unsure at all n locations
tgaatgcttaactggattcagttcacagtgcacaatccatcaagagacaagagggctttattcctggtaatcctgatgctaacccaaggaagagctgtaatgccatcttgatcagagaaggagatgatgtgtgggaagaattagacactgaagacgagttggagctcgaagttgcagagatggtgtggaccgacaccctcctgtgtcgatcgacaccatacgtgacccttttcccacagacgactcaatacgacggtgtcgatcgaacaccatccattgtcgctcaacactgagtccggactgcaccgtgtaaggtgcaggtacctatgcagcccgagtctgtctatactcctcttgtcccttatccaaggaagcgtcgttctaagcaggagattcatgctgctaagtgcacggccataatggagaagatcctccatactcttcctaaggatgcttctgagacatctatgtttcattcaataggtatgtcaagcgacttgttgacaatagaattagctcggatgaagctaagcttcttaccagagacatcagtgcaatcatgctgcctaaggccaagaaggagaaggcacaaagagtagacatagctgagtacatccgcaccattactcctggacagcccactgagaaggttccagatctgggtagctttgttcttgattgctctatctccacaagcaggttcagccgctctttgtgtgccctgggatccagcatcaacgtcatgcctaagtctgttgctgagagtctaggcatgcctaactacagtcagactagactcactcttttcttcgcggatcgttccaaacgcatccctgaaggaatccttgaagaatgttcctgttaagtttgataactccctactcccggctgatttcgtggtcctagcctccgatcaaggcccccaaggatcctcttatccttggcagagcattcatagctccagctggtgctaggattgatgtgaaggnaggtaggatctctcttaaagtttgtgatttggagacagagtttggcatggatggttcagagtttacttagactattagtagtattgcctctagcacagacacatctcctcagactgcttagaatccccaaactgctcctctcgccaatgagagctgaagagaatcggtgttgatcgacaccacccctcctgttaatcgacaccctcgagattcatagaccaagatttctgcacattctcttcaacccacaccaatttcagacctctgtgctaagttctcttctatcttttctccttctttaccttagattaattctttagattcttcgaagtctgcttcataagttaacaagcctagagttcttcgaaagcttgtttctcctcttgatattgaaggaaacgatgatagtgtcgatcgacacaatcatgagtgtcgatcgaaactacagttgtccagaccggattagtttacacaccgccttggaaggcgcggaggcagcagcaatcctccaccactccacccacatactgaactccgccaagtcaagctattaacttaaaacaagcgcttagttggaggcaacccactggtttgatttttcttttcctttcttttattttcttttatttt

SEQ ID NO: 167615 - DNA, 1137 bp, Arabidopsis thaliana landsberg
ttcttgatttattatgtctcaaatcacatcggcttggttaatcaagtaatgaatgattaaagcctgtctctttaacttgctgtcaactctttaaaggtatagtagcctactgattcttctcgctaccctgttggctatgcaggttttgattgctggatttcttagatgcatatgcatgtgtcttccttttgtcgcatttcaagcatacggatactataacatttgccatggacatacgcttgatgaaatgaggccttggtgcaaaggaaggataccgttgctgtataatttcattcaaagtcattattggtaagtactttgaacacaaaccttttcttgttctcgtaaattttctttcttatatttgattttgagattcttgtttctgacaggggagtaggtttccttaaatactttcagtttaagcagctcccaaattttctgctcgcatccccaattctctctttagttgtgtgttcgattataagttacatgaagtctcggcctgagctcttcatatcgctggggtttcaagtcaccgagaaagaaaagagatctgctgccagactttattctctgaaggatgcagttgaaccaagtgttaaaacttcaacaaatgaaggtatcattttcttcgttgttatataatagttccaaaattaaacgttgatttattctctctgttttcctgaataggaaaccgtgacattaggcagcggaaacctagcagtaagaaggatgtgactgtgaccaaagtggctgcggaatccaactctccagaaaaatcaggatacctttcagctgatgttttcccatttatcgtacacttgagttttatggcaaccatggcgttcttcatcatgcatgtccaggttacaatcctcaatggcataaacagaatataatatacataattttagatgagattaaggttttagtgagactgtcctcacgtttgtgttgtggtaattacaggttgcaacaaggttcttgtcagcaagccctccactttactggtttgcatcgtctttgattggatctccaaaacatagtaaatggggatacttgatatgttcatattgtgcagcctatatccttcttggtactttgctcttgtcaaacttttatcccttcact

SEQ ID NO: 167616 - DNA, 598 bp, Arabidopsis thaliana landsberg
aagaaagatatgggcgtgaatgtctctggagccgttgtaatcgcgaggtacggtcagatatacagaggagacattgtgaagaacgcttacgaggcaggagctgtaggggttgtgatatatactgataagagagattacggcggagatgagtggtttccggcgagtaaatggatgccaccgagtggggttcaagttggtactgtttataatgggttaggtgatccaacgactcctggatgggcaagtgttgatgggtgtgagagattatcggacgaggcggttgaattgagcggtgatgttccgcttataccgtcgttgcctgtctcagctgctgatgctgaagtgattctgaagacagttgttggagatgtttctgatggagatgtttatccagtggggcctggacctggggtcttgaacctcagctacattgtgagtgagtgagtttctgtttgagatgtgtgttacttacttggatttgagttttgttgggtcttggtttcagggggaaactgttattgccaagattgagaatgttattggagtgattgaaggagaagaagagcctgacaggtacattttcaatagtgagtgggaa

SEQ ID NO: 167617 - DNA, 1806 bp, Arabidopsis thaliana landsberg
gaaaagagaattatgttaagcagggagaagtcttggagtataaaggggcaacgatgaaagaatacaattgccaacgccttccaaggcatgaagagaagcttgaccatcacaccctgttatatcgagggcctaaagcctcacgtcaagcaaaatcgatacacaagatctttcacacaaatccccgagtagtacaggaagtgcttcaagaagtgacgcagagaacatcaatgtggggtaaaccatatccccgtgatagacgtgattacctagctgagagagattcaaggatcagtaatctaaggggaggcgagctgagtaaaaattttgatccacatggaacgaaatgacactgcagttgaagcgtgactatagatactaaaaactttattttaatttatgataactgtttgtacttaaaaacatggtttgacaaagacatgtcaatggaaattaatctcgggtaaatcctttagcatggagtttgtgaatattaattatcgaatacatccaaccaaagtggtgtagttgtatacaccctgttgaaacgttttatccgcgttttctcataaccttttatttgtttgaagctttcacttaaagttgttcattaatcttatcgttttctctgtgtgcagctgtcgataggagtgcatttatggctcaagatttgtgcattctaaacatagcagggccagagaagcggcaggccgtggctctccgtattagcgctgatgcgacggtcgtttatcgttgcagaatcaatgcctatcaagacaccctttgttgctctgtttcgtgaagttataagattaatatgttttttaaaaattttaagagtcataagttactgtttgattataaaaatatcgtgatgtggcatagcatattggaatatacagctctattaaaaccatatattgaataacactttggttatagtccatcgttctacacaacttaggaaattacagtagaagaacatatttttataaaaaggtttttaagtcttttatgtttttttttaaaacaattatagccattttctatatatttatatttggtaagctttttatttactatctttctttaatctctttaaatcaataaaatgtcttgttaatgaatttagtttagtaaaattttagatttaagaaaaataaaaatttaaactctaagactttgattacaaaataaaaaatcaaaaactttctaatgtaaggtgcttgaactttgattacaaaataaaaaactttgttttgattaatcaaataaatgagttggttttgctatccattaagacaactatgtttgaaaaattcgattatgtgaatttgatgaatggttttgcaggcaaaaatctaaatagatgtatatttaaagaatataattgtgatttttcctccattttttgcttacaaaatgcttataaaatttttaaaaaaactgttctataaagttttagtagaacttttgtatattattattatttgtgattatataaaaacaataaagggcataaatgttttatttgcgtacaaaattcctacatggcggaccggtcctggttcttctagtcatctcttgactctttttttttttccgtcgtctcttgactcttatcatcctccatttcttgaaattaatgagatcacgtgtgacagtttaatttgtatgattgatttatttatgatcagtctcttagttgcagagttgcagtgatatgtgtgcaatgtgtgactcaacattccatgatacaataatgtggttttagaagagggctaaacatcgttgaaagaacgtgttttt

SEQ ID NO: 167618 - DNA, 446 bp, Arabidopsis thaliana landsberg
atgacgatcacccatgcgctgctgatcatcgctatcggactcgtcgcgggaacgctcaataccgtcgtcggctccggcacctcgatctcgttcccggccctcgtgctgctcggctactcgcccctggtgtcgaacatctcgaacaaggccggactgctgccgggagcactggccggcatcgtgggctaccggcgcgagttgagcgcgcagcggcgcaacatcgcactggtcgtggtgctcgggctcgtcggcggcctcggcggcggcgcgctgctggtggtcctgccccgggagacgttcagcgccgccgccccgatgttcatcctgctggccacgttgctgttcatggcccagccagcgctgtcccggcggatgcgggccactccggagcgaggccggcgctcacggcgggcgtcgctgtgcgcggcggtggccggcgcgctcta

SEQ ID NO: 167619 - DNA, 2680 bp, Arabidopsis thaliana landsberg; identical to SEQ ID NO: 29600

SEQ ID NO: 167620 - DNA, 1496 bp, Arabidopsis thaliana landsberg; identical to SEQ ID NO: 16229

SEQ ID NO: 167621 - DNA, 1404 bp, Arabidopsis thaliana landsberg
ggttagcgaatgtccaatctccggcaaactagttcatgctttgttatgtagacagttagtgaccaagcagaaatacgaaatgtggactgtttttggtggacagcctcttagattctctttagttgagtttggttctgtaactggtttgccgtgtggtgaatttccggaggagtatgaacctgacttcttccctagacgtgagaatgggacgaatgattactgggatgttttgattggggaagataagaatgcaacattagctgatgtttcctctaagttccaagctttaaaagggattgagaaccctttaaaactccccctgtctctgcttttgattgttgatggagttcttattgctaataaccagactcatcgtccaactttcaagtatgttaagatgttagaggacattgactcattccttgctttcccatgggggagagaatctattttgaagactattcagatcatgaggcatgttagaaacaaaccttcaatggctgattctaagagatagaggtctcgtcttggaattcaagctagaagatcccatccaacaattcacaaatcagatgcaacagcaaagtatagctatttatggctttcccttagccctgcaccttcttgcttataggaacatttctggtctactggacaaaattcctggttatgcagatgagagaacgtttttgtaatggcagtcaattgggataccgaaaaacaatcttactatcagcgatgttcatatccttgaacgtgttcctgatgtaattaagtgtaatcattgttgtggtatcttttctttcatgtgcgttcatgactttttttatttggtataattttttgagtctgtttcttcagatgactgttatccataagctgtctgtaaacactaatgaggatggttggggtgagtgggatgatgaagagagagacaagaaggttctttatttgattgaacagataagcaaatgccataatttcaccaaaaaggagtggtctggtggttatgttgatctaccgctcatttctgtcaatgaaaaggagcttgtagttgaacacaagaagcatatagttattaggaaaaggaatcttttgctaacttcttcttctaaaggaactcatcaaaaactaaagttagtacatccacgcgaggcatgaaacgtaagtttgaattggttgatgatgatgaagcagaagataatgatgatgaagtagcagataatgatgatgaagcagaagacattaaattgtggatgaagtctcagttgtcttctattagacatgaatttgcggagagtgttaagaagttaagatctgagaatctaaatcttctgaaaaagatcagggtcgtgcaatctgtcaagtcttataggtccagaccgtctacatcgtcatccatcg

SEQ ID NO: 167622 - DNA, 582 bp, Arabidopsis thaliana landsberg
cacaaccggattcctcgtgtggggcgacccctcgctctacgactcgacgatccggatcgtcgagcagctaagcgatgatttcgaggtgctcgccggcgtcgccgcgccacaactgctcgccgccgcgcaccggatggtgctgcacgaggtcggccggccggtgctgatcaccaccgagcgccgcatgcgcgaggacatcgcggccggtgcggacaacctggtcgtgatgctcaccagcggcttcgacgccgccgggctggaggactggtcgatctggtggggcgccaacctcggcgcgccgtcgcaggagctggtcgcagggcgggtcggtgaggtggccggcgagatcgctgccgcgcgcgcccgggccaagtcgaacgccggctgggtgatggacctctatctgctgcgccgggcgcgctgacatgggcgggctgctggtcgccgggacgacctcggacgccggcaagagtgtggtcaccacgggcttgtgccgggcgttcgcgcgccgtggggtcgcggtggcgccctacaaggcgcagaacatgtcgaacaactcgatggtctgcgtcggccccgacg

SEQ ID NO: 167623 - DNA, 1272 bp, Arabidopsis thaliana landsberg
tccccttacctaaagtttattttcggtggtttctctcaccgacgtttatctttgttttcaaccgatgaagttttttcaaatctatggtttggagaagtcatttgggtatttgatccaggaatcaatagacaaattcttttgagtgaaggaattggcatcgacaataatttcctcttcccaaacacatggtccgatgatggtgatgtgctcgcagtccaaggatccgtttattcatgttcatggtctaatgatggtgatgtactcactgtccaacgatctatttattcgggttctatgggaaaaataatcatggtcactaaccagcgacgatgggtagagtgttataaaagacatgatcgagattcatttcaagcaacatatccgtgtgttcgtttaaccaaagtaatgcagaaagcatttgggagtttcatctataagatgttagccttttacgagtatatgacgaggggacttaacagatttatctgttgcctgtaaggcttccgtttggaaagaaaggtcacttccaccttttcatcgaaattgtgtacaatttcctttatttaattcaatgaaatgtatttgagtggtttcatgtatcatgtattatgtaatactcttataatttaatatatttgatttggtgttaaaaaaaaaaaaatgttagtgttatataatgttgaaactcaaactataaagaaaatttaataatgggcttgtataagcttatttcaaacatgtgcttataattcattagttaattaaagaaacaaaatagacacttacgatttattatttaacaattagggttataatttttttcgttggtttgcactttcatcttcttcgtcgcctcgtcggcaagcttttgtttttgactctttggtcaagcttttgatcaaggtaatacaaaggcaaatattttctttaaacattttgtcaccaaatcatgtttattaaatctaattactcgtgctccattctattttttctaaaattaaaaaattacaattaatcattgtaactttatttttcctattacagaaaaatgtcatcaacgaagaaagatcaatcgtctggatgtaaaaacagaaaaagagaaaactgaaagatgaacaagcaaaatctcaagagaacgctttgttcaggttcttcaaaaaacctgaaatttttgatgaatctgtggaaaataaaggagatgaaactcttggagataatagagtggatgaggatataaatgagtgtgaaagagaagaagcgggtgttgaatga

SEQ ID NO: 167624 - DNA, 1598 bp, Arabidopsis thaliana landsberg; identical to SEQ ID NO: 34613

SEQ ID NO: 167625 - DNA, 1064 bp, Arabidopsis thaliana landsberg
aggttcttgtgtttaatgagcctattgttaacgcgtttgctttgcctcctgggaaaactgtggtgttcactgggctgcttaatcatttcaagtcagatgctgaagttgccactgtgattgggcatgaggtatatagaaagttttgattgttttgatttgtgaatgtactatctttctgttaggctgcttgttaatgtggaaatgattagcagagttgctattggaacgaaagcatggttttttttctgattgttctgtatattggtttaggttggtcatgcggtggcccggcatgtagctgagggaataacaaagaacttatggtttgctatccttcaactggtgctatatcagtttgtcatgcctgatcttgtgaacactatgtccgcccttttcttgaggcttcctttctccagaaagtaattcttcttcctctcttactatcaacaccatctaatctcttttactgtgaatctgcaatagttctttcgttctcgaataactcatgaggtttgcaaaattacaggaacaaaaattcatttagtttaaataaatttgtaaaaaaattaatcaccttgcgaaccattagaaggcgttggtatagttaggcatgataagagaagttaacaagaaagctttgtaggtttatgtttcacatcttttaatcatctagtgaaccatttggctacaaaacgttgcaaaccagtagaagctgttgttgtggttagggtattggtaggagaaatgaaatatgtatgtgtgtataagaagaagttctgatgcattcaaactccccttgtgtatgtgtttggtgttgcatcacaggatggagatagaagcagactacatcggtttgctgttacttgcatctgcgggctatgacccacgagtagctcccacagtgtatgagaagctgggaaagctcggtggagacgcactcggagattatctatcgacccatccgtcgggaaaaaagagatcaaaacttttggctcaagccaatgtgatggaagaagcactaatgatatatagagaagtccaagcaggtcgtactggcgttaagg

SEQ ID NO: 167626 - DNA, 1354 bp, Arabidopsis thaliana landsberg; identical to SEQ ID NO: 25962

SEQ ID NO: 167627 - DNA, 212 bp, Arabidopsis thaliana landsberg
gtgtaggagagactgttgaggtatgagtgacttagatccttaaatacctaagtacagaggttcttcagttggccgaaaacactagcaaagatttaaaagtgaagaggataactccaaggcatttgcagttggcgatcagaggagatgaagagcttgacacactcatcaaaggaacaattattggaggaagtgtgatccctcacatccactag

SEQ ID NO: 167628 - DNA, 1134 bp, Arabidopsis thaliana landsberg
tgatgagtaaacacatccactaattctcattgctcataacatcatcttaagctcctctgtttcatttcagagcagttcttggaattgagacaaagtttagtcgagacatcttggttatattcaagcttgtactctatgtggtacaacatacaagaagcttttggatagatgcatagaaattatcgtgaagtctgatatagaactagttagtcttgagaagtctttacctcaacacattttcaagcaaatcatagacatccgcgaagcgctctgtctagagccacctaaactagaaaggcatgtcaagaacatatacaaggcgctagactcagatgatgttgagcttgtcaagatgcttttgctagaaggacacaccaatctcgatgaggcgtatgctcttcattttgctatcgctcactgcgctgtgaagaccgcgtatgatctcctcgagcttgagcttgcggatgttaaccttagaaatccgaggggatacactgtgcttcatgttgctgcgatgcggaaggagccgaagttgataatatctttgttaatgaaaggggcaaatattttagacacaacattggatggtagaaccgctttagtgattgtaaaacgactcactaaagcggatgactacaaaactagtacggaggacggtacgccttctctgaaaggcggattatgcatagaggtacttgagcatgaacaaaaactagaatatttgtcgcctatagaggcttcactttctcttccagtaactccagaggagttgaggatgaggttgctctattatgaaaaccgaggtatgctttcttccttcacttgaatatcgaatttcgggtaggaaaatgagtggaactaatgataacgatggtctatacttttcagttgcacttgctcgacttctctttccagtggaaactgaaactgtacaggggattgccaaattggaggaaacatgcgagtttacagcttctagtctcgagcctgatcatcacattggtgaaaagcggacattactagacctaaatatggcgccgttccaaatccatgaaaagcatttgagtagactaagaacactttgtaaaaacggttggattgaatcctatatgtcaactcttttctagcccacaa

SEQ ID NO: 167629 - DNA, 522 bp, Arabidopsis thaliana landsberg
gattccatcaatgtcatttggcgtgtaaaagccaaacttagaataggctggcttaaactgctgctcaacagactactcagcttttccatcgtcatcggtctgggttttatcttgctggtttccctgctcgtaaacgctataattgcggcaattatgactcggtttacggatattttcccccagacagaagtattcacctcctatatcatcaatatagcgcttacctttttaaccattaccagtttatttgccattatctttaaagtcctgccagatgccaaagtcaaatggaaggacgtctggaacggcgcctttaccacggcacttttatttatggtcggtaaattcctgataggctattacctgcagcatagtagtattggcaataccttcggggccgctggttccatcataatcatcctttcctgggtgtattattctgccattatcctgtattttggggcagcctatacaagggccaatgcatgaataaaaggtcggatgatctatcccaatgattat

SEQ ID NO: 167630 - DNA, 3731 bp, Arabidopsis thaliana landsberg; identical to SEQ ID NO: 33011

SEQ ID NO: 167631 - DNA, 701 bp, Arabidopsis thaliana landsberg; identical to SEQ ID NO: 70178

SEQ ID NO: 167632 - DNA, 2522 bp, Arabidopsis thaliana landsberg
cacattctgattagtaccgtcttgatgatagttatcatcaaaccccaccttataacgaaatgcatcgttcaccatatccacatatggatcttctacaacattacccacatccacatatggatcttctacaacattacccacactttcataattctctcttagatacgtactatcaattacataattactcgttcctacattcatgttgaaatcttccccatgcatataccaaacataataatctggcataaatccttgactaaacaaatgactactaacttttccacccgagacgatatgttttttattcttgcacacagcacaaggacaatggaatttacctcgacaactttgtactataggctggctattagcaaatgtcaagaactcctccactcctgcgacgtattctgctgacaaattccccgtcatttcatcgaacctcttgtacatccaatctcgattaaaaccaccgctactcggataattatagtttcccgccattataagactaataataaaactaaatatatttttaaacgtttttttcttcaaaaatgtttattttttttaaaggtaatattagtattgtgtttgtgttgtgaatgaatattttgtacgagaaattttcattatataggcaatttttgagtgactaaaacacgactaaatagtgtagtcgtttaaagtaggtacaacaacttacaaaacgaattgcatgtttttttaatcgaaaattacgtctattttgcgactatatttaatgacacgcccctgtagtcatccaatagtcgctatttagaggactattacgagctgtcgtatattagtcggcaaattacgtctattttgcgactatatttaatgacacgccgcagttgtcatataatagtcgctatttaacgactattacaacgtgtcgtatattaatcgcaaaatagcgactaatttacgactacatttggcgactcattaagatgtgtcatataatagtcgccctttagcgactaccaaggcgtctcgcctctacagtggtaatttggcgactaactaacgtctatatttttgttagttgtaaattagtcgtagaattgtagccaaatagtcaccaaatatagcgactatgtatgtagtcgccgggtgtagtgggtatttaactgttttcttgtagtgtcggatgggaaaagagtcaggtttagggtattctcaggaaatagatgatagtagatctagaaatagttaggttgttatcgcaccgttctcgcacttaaactatgattttagagtaaccagtggtgttccgtgaaactctctatacttagagttaagatcaccgaagaagccgagaaatcctatacttaaacatgcattattatcaagtttgattagtgatacgtctataattcatcatcgttttgagtctagtttcatatcatttctcatcattactacatactttgcatgattaggatagttttgcatacatattgcatttctgagttgttttcaggtaatttggagctgtttgcgagcaatttggcagaaccgagcctgaaccaaaagacatactcgaccaccaggtcgcgtgcatccagcaccatactcgaccccctggtcgagtgactttggagccattcttcccacctactcgaccccctggtcgagtatcctcagcgcaggccactcgatgacgccactcgaccccctggtcgagtatcacttcgtcacaccacctaaccacacttggccattcactctaccaagttactcgaccccctggtcgagtataatcactcaccaccaacaccatcactcgaccggacactcgaatacatcttcacagtctactcaaattcgcactcaaccagacaagctgagcacaaggaagagaagaggagaagacgaagtgtttggaagcggcctggacctccatcggatcacgaagcccatctcggcccattatcactctatgggtcgggcgattaggttattggcccgtctactatcattttgtttcgttttgtataaatagatgtcttagggttctgtcctgagacatccagtcgacattgagtttttgcttcagttttattttctattttactctgctgcgccgcttttgcttctgcaacctgtaattcgagattttttcaagttatttagattccgcatttgatttcatctgtcatcttgtttctctactctttatctctttacttatgcaatattatcatttatctgcgtttatgtctttgagcatgttgtctgagtagtgacatagagttcttaaggatgggatagagtaagttgtgggaatccgtagtctgtagaatggttcaagttttagaattcattgaacccctttaggactaggttgggtttaactgcttattatctttctgatcaactggaatttggatcccaagcattcccgcacccagaaggtgttcgaaggaatgcttgatccactagttcctgagatatgcgtctctatcccaagggattggccgtttagagcgttt

SEQ ID NO: 167633 - DNA, 5440 bp, Arabidopsis thaliana landsberg
  unsure (1)..(5440): unsure at all n locations
atgagtagcaacgacgatcagagctccggcgaccgagcccccaccctcgacggcattaagcagctgcttcagcagctatccgagaagactgaccgacagcagcttgccgtgacgtctctctccgacaagttcgtgacctttcaagagcaatgcaacggccaactcgcagcactagcggctaatcattccgaaatcagatcggctcacaacgcatacgcagaacgagtcgattcactttctgcaggaactgcgcggattactggagctcgaacgcgactcaacttccagggcaccgtcagtccgagcgtccaaaattcccaggaagcgtctggccagcagactccgccaccaccggttgaagtcggggcgacgtcgactcagaatcctgtcacctcatcttcaccagcaggacttgccgcaatttcagatggaggaatagctcgaactccgtttccgcttgattcctccatcagaatcccaatctccgatcctcgacaagagccaaacgcagtcaattcggagctccaaagccttcaagaccaaatctgggccatgaatgcaagagtccatcaagccactacttcggctcccgaagtggataaggtcatcgaagcaacaaggagaacacctttcaccccaagaatctctaagttgcgcatccgcgaattccgagatttcaagcttcccgtttacagtggaaaaggagatccgaaggagcacttgacttccttccaagtcatcgccggacgggtccccctagaaccgcacgaagaagatgccgggctttgcaaattgttttctgaaaatttgtccggacctgctctcacctggttcacacaactggaagaaggctcgattgataattttaagcaactatcaaccgccttcattaagcagtacggatacttcatcaagagtgacatcactgaagcccatctttggaatctttctcaattcgctgacgaaccacttcggacgtatattactgcgttcaaagaaatcatggttcaaattcctagcttgtccgactcagcagctcagtccgcgctcaagaatggcctttggcacgagtcacgtttccgcgagtccttgacggtaaatcgacctgagacaatccaagatgcacttcatcgagcaacgaactggataaatgcagaagaagaacgagcttttctagctaaaaaaatcagtgctccaaatgctgcaccaaaggtatctcagcccgcaactaccaagaaacctgccgaactccgaaagcccgcagcaggaactttttccgttgagaaagagtcaccgaagtcttctcctaaagcttcgccgtccaaaccccctttctctcctaagggcaaaaacggtgcattaccgagcaacaaatgggtccgagatccgaatgcatattgtgatattcataagatgaacggtcacgcaaccaaggattgcaaagctttaggcaggcttttggcagcgaagtatgcttcgggagaaatttccgaagtggacattacaacaatcgatttggctcagaccgcgaacgaagtttcagagtcaggagacgcttcacctccgagcaaaaagcagaaaagtgatccagctcccgtagttcctaaaggtccgaagaaaatggtcaaggtgattatgggaggttcaaaactttttcgtgattctattagcgcgatcaagccacacgagagaagatctgtcactccggttgcaaagaaaccaaagacgggtcgaactgattgcccagaaatatccttttccgaggaagagaccagcgatctggacaaaccgcacgacgatgctctagtaataactcttgacattgcgaattgcgaagtacagaggattcttatcgacactgggagctcggtcgatttgatttttctcgacactttgctgcggatgggattctcaaaacaggatgtaaaaggaaccccgagtccactcgtgtctttcaccagcgaaacttcgatgtctcttggccctataatgcttcctgttaccgcgcaaggagttgtcaagatggttgagttcacagtttttgaccgacctgccgcatacaacgtgattctcggaactccctggctgtacgagatgaaggcagtaccgtcgacttatcaccaatgtgttaagtttccaactccgtccggagtcggacaagtcctgggaagtcagcacacatctagaatgtgctacatgaccggacataaactcaaaatcaaatagcaaccacagctcgaggcgtccccgaatccgatcaaaaaagtgggcgacgacctcgtagagcgggtagttataaacgacgatcacccggatcaacttgttggcatcggggctaatctgggcgaggatttccgaagcaaattaattctttttctcagaacaaatagagcaacgttcgcttggacagtcggtgagatgactgggatcagtacggagggattaacacagaaactatagaaaaataaacacacttttttccgattgatcattgttcatctaacaagtcttaagatcctcgaagcatccacaagattttaattgcggattctgacatccacaatttggcggtagaaggagggtaattaaatcttttacttcagagctcaggttgaatcaccatgagcaccggcgacagtcaaagttccggcgaccaagcctccacccttgacgatatcaagaatctacttcaagaactctccgaaaagaccaagcgacaacagaccgcagtaacctctttatctgataagttcgtttcttttcaggagtagtgcgacggacagctcgcagcgctcaccaccagtcattgtgaaattaggacagctcttaatgcatacgaggatcgagttgactttctgtatgtcagagcatcgcgcaccgctggagtccgagcactcctcgattttcaaggagacatcaatcctagcatccaaacttcgcaggcgggagcaaatcagcagactgcgccccctcaattaccttgtgtctctccaatcaaaattggaaccacctcgaaccaaaacccggctgttctgactatcccggcaaatcctgacattcctgtggatggagtagcggcccagactccatcattgtttctagtagagccttcagtcagactcccgagctcatagtcacccaggagtcagatgttttcaatacagagcttcagactctcaaagatcaaatttgggctatgaacgccaaagttcaccgagctaccacatcagctcccaaagtcgatagggtgaccgaagcaactcgacgaacaccttttactccaaggatctcgagatttcgaattcgagacttccgagactttaagctcccctgctacaatggaaagggagatctaaaggagcatttaacatcttttcaagtaatcgcgggtcgggtccactcgaaccgcatgaggaagatgccggaacttgtcagggccagctctcacctggttcacccagcttgaagaaggttcaatcgataacttcaagcagctctccaccgctttcattaagcagtacggatacttcatcaaaaacgaggtcacaaaagcccagctttggaatctctctcagtccgcggatgagcctcttcggacttatatcatcgcttttaaggaaataatggtgcagttacctggtctatctgactcggcagctcagtccgctctcaagaatggattgtggtatgagtcacgtttctgcgagtcattaactgtcaaccaaccataaacaattcaagatgctctccaaagtcttctcctccccctgttccgaaaaacccggccgaactccaaaagcccgcagcaggaactttctcggtagataaagaatcgccaaaggcttctccaaaagcttctccatctaaaccgcctttctctccgaagggcaaaaacggcttttccgagtaataaatggatcagagacccaaacgcttattgtgatattcacaaaatgaatggtcacgccaccaaggattgcaaagctctgggaagacttttggctgccaagtacgcatcaggggaaattcccgaagtcaatgtcacaacaatcgagcaggcacaagcagcatatgaagcagaagagtgaatccacttccgaaacctccaaaggccctaagaaaatggtcaaagtgattatgggaggatcgaaactttctcgttactctattagttcgagtaagcagcacgagtggaaaggtagcgaaaaatacaaaagcaagccaagctgacaggcccgaaattatcttttccgaggaagagaccagtgacttgaacaaagctcacgatgatgtccttgtaattatgttggatatagcgaactgcgaagcacaaagggtactcatcgataccggaagttcagtggacctgatttttctcgataccctcgtgcgaatggggattttgaagaatgatataagaggtgccccaagcccacttgtctccttcacaagcaagacttcgatgtgacttggcacaataacgctccccgtcactgcacaaggagttgttaagatgatcaaattcaccgttttcgaccatccaattgcatacaacatgattctcaggactccgtggctctacgaaatgaaggcagtcccatcaacttatcatcaatgcgtcaaattcccaaatccaattggagttaagcaaattcttgggagtcagcgcacttcgaggatgtgctacatgattgggcacaagctcaaaatcaaatagcaaccacagcttgaggcagctctgaacccgatcaaaatagtcggagataccctcgtggaaaaagtggttatcaacattcagcatccagatcaacctgttagcatcggggccaacctaggcgaaaatttccgaagtaaactaatccaatttctcgagaaaaataaaagcactttcgcctagactgtcggggaaatgaccaaaatagtacaaaggtgatctcgcacgagctgaacgtagatccaacctttaaactagtcaaacaaaaacgtcgaaaggttggcccagatcgcgaagaagcagtaaatgccgaagttattagacttttcgaggcaggtttaattcgcgaagtcaaataccccgactggctctcaaattccgtagtggttaagaaaaagaatggcaaatggcgtgtttgtgttcaattcactgacctcaacaaagcatgcccaaaggactgcttcccacttctccacatcgaactactcgtannnnnnnnnnnnnnnnnnnnnnnnnnnnnnnnnnnnnnnncattttctgggtataatcaaattatgatgaatccggatgaccaggaaaaaacatctattatcaccaaacgagggacgtatagctacaaagtaatgcctttcgggttaaaaaatgcgggtgcaacttaccaacgcttagtgaacaggatgttcaaagatctcatcggcaagtccatggaagtatagatcaacgata

SEQ ID NO: 167634 - DNA, 1577 bp, Arabidopsis thaliana landsberg
  unsure (1)..(1577): unsure at all n locations
aattgcctgttgctaggcttctgttagaggatggaggaccgtgagtggatgtacacgggccgtagaggaaggatcgatgctaccactgaatggattagacagaccgatgatctcgtggaacgagcatatagcgaagctgctaaaggggcgaagctagtcccatgcccgtgcggcaaatgtgacaatcggataagataaccaatgaaggtcatggtagaacatatttggnnnnnnnnnnnnnnnnnnnnntatatctcggtggatatttcatggtgaagcgcatcgtacgagagaggaggtgttgagacaacgtgtcgaggactatgacgcggatgtggggtagcagatatgttgaacgactatcaggaggtacagtacacgggaggatgtattgatgacgagtcagagccgactgcaaaggcgttctacgacatgttcgacgcggcacagaagctccttcacggccagacaaaggtttctcaactggatgccattgggcgtataatggcgttcaagtcgcagtatagcatgagtcgagacgccttcgttggtttgttgacagttattggcagtctgcttccggagatcacgttctgccaaagagcatgtacgaggcaaagaaactccttcgtgcactcaagatgacgtatgagcagatacatgcttgtccgaaggctgcgtcctatttaggaaataatacgcggaggcaaagtattgtccgaagtgtaaatcgtttaggttcatggaggtagactctggtgatggacagaagaggcagctcgacatccccttgacaatcctacaccaccttccgttcataccgaggatctagcgtctatagatgaccgaggaatccgcgaaacagatgacatggcacaaaaatagaaaacgatacaatcctgataagatggtacacacatctgattgtgaggcatggaaacactttgatgtcattcaccgtgagaaagccgaagaggctcgcaatgtacgtgttgcgctggccaaagatggattcaattcctatggaatgagcgttgctcgtacacatgttggcccgtgtttgttatcccaatcaatctcccccccgacatgtgctttcaaaggcagaatatattcgtgtcgttgataattcccggacactcggggaataaaatgggcgtgtacatggagcctttgattgatgaattggtacgtgcctgggaggaaggggtatggacgtatgaccaagctatgaagacaaacttcagaatgcatgtttggtaccagtactccatgcatgacttaccggcgtatgggctattctgcgcctggtgtgttcacggtaagttctcatgcccagtttgcaaggaagctctcaggttcatttggttgaagaagggtggcaaatattcatccttcgataaacatcgacaatttctccctcctgaccatccattccgcctagacatcaagaactttacaaaaggtgtcgtagtgacagaccacccacctgcaacgatgactggtgccgaaattcgtcaaaagatagatgggctcgtggccaatacagaaggtggttttgtgggatatgctgagca

SEQ ID NO: 167635 - DNA, 2291 bp, Arabidopsis thaliana landsberg; identical to SEQ ID NO: 30449
  unsure (1)..(2291): unsure at all n locations

SEQ ID NO: 167636 - DNA, 1010 bp, Arabidopsis thaliana landsberg; identical to SEQ ID NO: 22676

SEQ ID NO: 167637 - DNA, 817 bp, Arabidopsis thaliana landsberg
ataaaattagtgtgatggtcacggtcacaaactgcaaaatcggttcagggtgtcggggaacctaacaatcgtcaacgagccacccggcatctagataagggaagagtggtaatatttggtggcatcggtgccacgcttggaaatccacttttatcatctgatgcatctgcagcccttcgagctatagacagtacaactctcttacttcctcttagtgttgttctctttccattagtaactggtcctaagtggtaacctaagatctcttgttatcagtcaatgcggaggcagtggtgaaaggaacaaacgttgatggtgtttatgactgtcattcacaagatagtaacgtgacatttgagcacatatcatttcaagatttggcttctagaggtcttacgtcaatggatacaatggcccttaacttttgtgaagagaacagcattccaggtcgagattcttcttctctctcttatcatgtttagctaatccgttttagattacttagatctggctgtgagataaatggttaaacttagtgacctagacagaattatacaaatggtttactcgagatgggacctctagaatcctgatttccatcagtggataatagatcaatacccttatacttgtcccgcaatgagtgcttagcacctgatgatagaatcgaacgttgaatgtaaatgacctgattccttgtcctctggattaaaaaaaaacagttgtggtatttaactttctggaagctgggaacatcacaaaagctttgtgcggagaacaagtgggtactttgatcgatagaagcggaaggggcgtg

SEQ ID NO: 167638 - DNA, 1260 bp, Arabidopsis thaliana landsberg; identical to SEQ ID NO: 17711

SEQ ID NO: 167639 - DNA, 785 bp, Arabidopsis thaliana landsberg
  unsure (1)..(785): unsure at all n locations
cctaatgggcccatttgatcccgaatgatccagagattatctcatccttctttgctctcactcgaaaccctcttcaagctctgcaaatccgagattcatcnnnnnnnnnnnnnnnnnnnnnnnnnnnnnnnnnnnnnnnnacaagaccagaatctcatctcaatcttcatctcttcgtcttcttcgtctctctcttactcttcctctgtttttgaacgtgttccttctcctggaacttatctctggaatcatttgattaaagggtactcgaataagtttctcttctttgagactgtttcgattctaatgcggatgatgagaacaggtttagctagacctgatgagtatacttttcctttggttatgaaagtttgttctaacaatgcacaggttcgtgttggttcaacggttcatgggttagttttgagaattgggtttgataaagacgttgttgtgggtacaagttttgttgatttttatggtaaatgtaaggatttgtttagtgcacgtaaggtgtttggggaaatgcctgagagaaatgctgtttcttggacagctttggttgttgcgtatgtgaaatctggggagttagaggaagcgaagagcatgtttgatcttattcctgagcgtaatttgggatcttggaatgctttggttgatgggttggttaaatctggtgatttggttaatgctaggaagttgtttgatgacatgcctaagagagatataatttcgtttncatctatgattgatggatatgctaaaggtggtgatatggtttctgc

SEQ ID NO: 167640 - DNA, 674 bp, Arabidopsis thaliana landsberg
  unsure (1)..(674): unsure at all n locations
aggaccaccaactgttcgatgaattgcctcaaagagcttttttttaatctaagcttgcctttatgagtatgatttggagaacaggatagtcttttggttataagggcttgaaccattgttacctttatatatatttgatgcttagcttatatgctttctgtttctcatgttgcttcttttttccaaaatttgctcagatcttcctcattgggatatgtctgcctttatatgtcatccattccattgatgcgccactaaacatctgggacttcatttcctcggctatctgttagaccggaatcgtcatggcgtacttcgcagacacacatcttcacgagtttgtaaccggaaaccaaaagctcaaggagcaaggaaagcccaaaatccccaatctggactcgggtttgtggcgttactcaagacatcctaattacttgggagagcaattgtggtggtggggattggtcatatttgcttgcaaccttggtcaagggtggactttgattggtgcattggtcaatactctgtgtctggtctatgtaacgatccttgtcgagcgtcggatggtgaaacaacaatacagagctgannnnnnnnnnnnnnnnnngaagacaacttcggtgtggattccatggttcaaatctcatgctgctgctactaaagacaagaacact

SEQ ID NO: 167641 - DNA, 486 bp, Arabidopsis thaliana landsberg
ctgaccgacgtgcataccgaggaacaggtgcccgaagtcgcggccgtggtcgatgtactgcagacgccggccttcttctgccgccagaccgatttcattaccgcatgcgccgcctcgggcaagccggtcaacatcaagaagggccagttcctggcgcccggcgacatgaagaatgtggtgcagaaagcgaaggaagccagcggcggcgcggacaccatcatggtctgcgaacgcggcgcctcgttcggctacaataccctggtttccgacatgcgcggcctcgccatcatgcgcgaaaccaattgcccggtggtgttcgacgccacgcactcggtgcagcagcccggcgggcagggcgacaagagcggcggccagcgcgagcacgtgccggtactggcgcgcgcagcggtcgccagcggcatcgccggaattttcatggagacccatcccgatccggccaaggccttgtcggacggccccaactgt

SEQ ID NO: 167642 - DNA, 1186 bp, Arabidopsis thaliana landsberg
agccaacgccggggcgatgttccttgcgaggcacgtcttatcttctttgtctgaatctaacgtcatcttctcgccggggtcaatgaactctgcgatcaccatgcacgccgctggcccggaggtggcttagtcgccggtgaaatcctctccttcctcagatcttcttcaatcgatgagctcaaatccgtcttccgagaactatcatccatcgtctacgccgacagcagcgctagtggcggcccaaagatgaaggcggtgaatggcctctggattgagaaatcactaccgattgatcccaaatacaaggatctcttcgagaacttcttcaaggctgtttacgttccagtagatttccgatcaaaggtaatcctccacttttaatcagcaaaaaaaaacactagggtttcgaagaaatataattagggtttcgcagaaacgttaggtggtgtatctagatgaagtgtgtgatagctgtttgaattaaaaaacatactcaactagtcaaattggaaacctaatagttcgtaatttatattgattcccaaatcataattcgaattaggagactgttttcaaaaatcatccaatatgtgtttttttttttgtttgaaggctgaagaagtgcgtatggaggtgaatgcgtgggcatcacgtcacacaaatggactcatcaaaaatcttcttcctcttggatcagttacatgtctaaccaaacggatttatggaaacgcattgtacttcaaaggaacctgggaggaaaaattctcaaagtcaatgacgaaacgcaaacctttttaccttctcaatggaacatcagtgtctgtgcaattcatgagtagctttgagaaacaatacattgcggcttatgatggttttaaggtactcagacttccttatcgacaaggccgtgacaataccaaccgcaacttcgcaatgtatttctatctcccggacaagaaaggtgaattggatgatcttttggaaagaatgacatctactcttggattcttggatagtgacaatccagaaagaagagttaaagttggtaaattcagaattccaaagtttaagatcgaattcgggtttgaagcttcaagtgctttcagtgacttcgagctcgatgtgtcattgtaccaaaaaacaaagattaaaatcgatgaaaaaggtaccgaaccatgttactttt

SEQ ID NO: 167643 - DNA, 548 bp, Arabidopsis thaliana landsberg
tggcacaatgactgtcgccgcgcggtatcgagctggcgcgcgcgggcgagaccgatctgcgtgactacctgaccgcccgcggccaggcgcacgcggccagcgacgggaaaaagaacggcgtcgaccggcgcttctcggccgggtcgcaggcgcggctgctctccgccctgcgccgctactaccggttcctggtccgcgacggcgtgcgcgccaacgatcccaccgcgcggctgcgttcgcccaagctgccgcgcgcgctgcccaagtacctcgacggtgcgcaggtcgagcgcctgctcggggcgcccgacgccgggaccacgctcggcctgcgcgaccgcgcgatgctcgagctgatgtacgccagcggccttcgcgtgagcgagctggtgaacctgcggcatcaccaggtgcagctcgagcgcggcctggtacagctcgtgggcaaaggcggaaaggagcgcatcgtccccatccgcgagccggcacgggactggatcgacagctaaatgcgccaggcgcggccggagctcgccggcaacgtgcgg

SEQ ID NO: 167644 - DNA, 484 bp, Arabidopsis thaliana landsberg; identical to SEQ ID NO: 44532
  unsure (1)..(484): unsure at all n locations

SEQ ID NO: 167645 - DNA, 873 bp, Arabidopsis thaliana landsberg
atgtctatgttcctaggtttgctcttcctcttccctctctttttcatcctatttaaaaaccttttacctccgagaaagaagcttcctccgggaccaacgggtcttccgctaataggaaacttgcaccagcttggaagattgcttcacagttctcttcacaagctctctttagaacatggaccagtgatgcttgtccgttggggggtcgtccctatggccgtgttctcttccaacgaagcagctaaagaagttctcaagactcatgacttagagacttgtaaccgtcctaagctggtcgccaacgggttgtttactcacggctataaagacattggtttcactcagtatggtgaggaatggcgagagatgaaaaagttcgtggggcttgagctctttagtccaaaaaaacataagtctttcaggtatatcagagaggaagaaggtgacttgttggtcaagaaaatatcaaattatgctcaaacacaaaccttggtggatttgagaaaatccttgttctcctacaccgccagtatcatatttagagaagcctttggacagaacttccgcgagtgcgattacatcaatatggacaaacttgaagagctggtgcaagagacagaaaccaacgtatgcagcttggcattcactgacttcttccccagaggtctcgggtggcttgtagaccggatctccggtcagcattcgaggatgaacatagccttttccaaactcaccactttctttgaagatgtgatcgatgagcttttgaagactaaacaacttgatgatcactcagacctcgtcactgccatgttggatgtgatcaatagacccagaaaattcggttctttaaagatcacttacgatcatctc

SEQ ID NO: 167646 - DNA, 488 bp, Arabidopsis thaliana landsberg
acattttgagcgtgtatggaagctcttcaaatggcaacacatgttccctgagtgcatacatgaagagacacaaacggaggttcctacatgtcctgagacacctatgtccaatttcgacagctaagagaagttgaattcggtagcagttgagttcccttgatcttaccctaatatagggtgaaaaagagagcttttgaggttgcaagtgatcctagatgcggctaacttgccagccaagaaaggtaaggcggattggacatgtaaaagcaaagtgttgttttgaagcagatgtcagccgcatgattgagtttatccggtgtgatgtcttggagaatagaaagacagattggagattgcatccccctaaggtggttaggtaacaacagaacctcagttcgccagtcggttcttgcaatcatgctcttccgctgtgggcgccacaagataaaataagtttcatgcatgttcatcttcccgctaaatattct

SEQ ID NO: 167647 - DNA, 709 bp, Arabidopsis thaliana landsberg
aattataacaaaaaacaaagataaattctaaaaaaaactgataattatcagaaagttattggattcatggagcttatgtcaatagatatgtttaagccggacccaatgactctcattacatttcatcctaagttgcgatcagataggcgttattggccacacttcaaagggtttattggcggaatggatgggacacatgttcctgctaaggtttctggaagagaccaacaacgatactggaacagaaaaaataaatgcagcatgaacattctgggtatatgcaacttagacatgttgtttacatatatatatgttggtgtgcctggttctgcacataatgcaaaagttctcgcattggctatgcaaggcgatacacattttccacatccacctataggtaaatattatcttgttgattcaggatatggtttacgtcgtggatatcttggaccatataggcaatctagatatcatcccagccactttcaaaatcaagcaccacccaacaattacaaagaaaaatttaatcgccttcattcttcacttcgatcagtcattgaaagaacatttggagtatgaaaaggaaaatggaggataatgcaagtcgagcaaggtatgatgtcggaataacaagaaaacttgtggtaaaactatgacacacataactttgtaaaatcaaatataccaaatcctatttgaagcaattgcg

SEQ ID NO: 167648 - DNA, 2985 bp, Arabidopsis thaliana landsberg
aagaacattagacaggctttcaagtgggtccttaggtatattcagggatcattgaagagaaagccgtgttacactaataagggagatttcataattcaaggctactgtgattcaaatcatggtgcagatcatgacggtggaaggtcaacttcaggagttgtattcactataggaggtaacgtggttagttggaagtctagcttatagaaagtagtagctttgtcatcaacagaagctgagtatatggcattgacagaagcatcaaaggaagcagtttggttactaggactcatgaatgaactcggttttgaacaggaaacaattgacatttacagtgactcacagagtgccattgcattggctaagaatgcaattcatcatgacaggactaagcatatagagatcaagtaccatttcattagggaattgatctacagtggtttaataagagtgaagaagattgccacagagaccaatcctgcagatatattcacaaaggttgtaccagtgggaaaacttgaggaagctttggagtttctcagagttacagagaaataagaagagcgggttaagcctcaaaatatgaagctgagtgggtttactcaggagatatgaagctcggtgggattactcaggagataagaagttgagtgagtttactcaattggtaaaagctggttgggtttaaccaggtccggaggtggagtccagaaagctaagtcatggcattagggtcaaggtggagaattgtgaataagtgacccaaatgcatattatccttaagtataggaaagcctctattcaagaaagaaggtcttcggttttgggttagtcaaagcttaacacgtgagagcacacgtgcaaatgactccaactcagaatcagctttataatccaagtctctattttaatctgttgtagagtttgttttgtaacagaaagagagagagagagagaagagagagattctttttatcgatcaatattctttgtggcttagtggattccggagagagcctccggcgagacgtagggttccgttttggagcctgaactcgtaaaactctggtgtcttttctttctttgaaatcaaaggagagtcgtgagtgaagtgagctagattcttcttcgattcaagtcagaatcgtacaacaaccctcttctgtctcctgtccaagttaagaggagaaaagtctcacaaaaagagttgtcctccaatcagaaggaagaacaggcggcagccttaaagagagggataacattgtctgaaatatatggctttgaagacgttgaaccaatgttcattgacagtgactcacccgatttcagaggtcataacattgatctttctaaagaagacgatgttctgtttaaaggaagggtttttgaaaccaaggacgagttcaaagtggcactgtctatttatgcaatcaatcaaattttccggtttaggtttgtgagatacgccaagtgttatcttgtagcacaatgtgttgacaagaaatgcgactggcgggtgtacgcgcataagattggtgatagcgatgagtacgaggttagaaaagtgaagcttcaacatgtgtgtgatgtggaaacccgaggtcaatttaccaagcacgccacttctaagataatcgctgctttattacggtcgaagtatgtcaatgtcacaactggtcctagagcgagagatctaccctaagctgttttagacgagcataatgtgacaacttcttattggaaatgctggaaagccaaggaattggcaatatcttctgctcaagggacagaggagacttcttacttacttttgcccctatatttgcatttattgcaacatgcaaatccagggacatattaccatttagagatagaggatgatgatgtcggagatgaaaggtttaagtatgcctttgtctcactgggtgcaagtatacagggtctgaaattcattcggcgtgtagttgttgtggatgggactcatcttcaagggaaataccatgggtgcttattaactccaagtggacaagatgcaaatttccaagtatttccaatagctttcactatagtggacagcgagaatcataattcttggacgtggttcatggagaaacttagggatattgtactggatgggtttgatctaactatcatatctgaccagtcaatataccatgctaagtcactagtgtacactcaggcgcaccacgtctgttgtcttgtacacctgaggcgcaatgtgagaagcttgtagaaaggaatgtccggacttgtatggaaagctggggatgttcagagttaaggatttttagtaaggcctatgcatgtattaaacgaaggaagcctgaatgttgggagtaccttgaggtgattggtgttgaacattggacccgtgcacacttcaaaggggagcggtataacctaatgtctagcaacattgcagttaaacaatgccttactaccggctagagacagcccagttgttgctcttattaaaaattttcagaagatacttagtaggtggtttgaagcccggaggaagaaagtgtctaacactcttggattgatcccgtagaagttgagaaaatcttattgaacagctgccagactcaataggtgtaagtattcgaactgcatcggcttgggattatgaaataacagcaaaagatggaggaaaattccatgtatcattagagaaacgtacctgcacttgtcgctcatttcagctgctacaaattccttgcccacacgcaatggctgctgcccatagcagggggatggaataccgatcacttgttggatacatgcataagaatgacatatgggctccaacgtttgacggtgttatcctaccggttcaagacccatcagaggtgggagtacctgatagcgtcaggatccgctgcattcttccacctaagactaaacgtccttccgggaggccccctaaagtcaggataccatcaactggagagtttgaggtga

SEQ ID NO: 167649 - DNA, 5324 bp, Arabidopsis thaliana landsberg
  unsure (1)..(5324): unsure at all n locations
ttgaccgaggaatggctatcgagaaaaccttgatcgggagcgatgagaaataattttggagcggtgatgttttgtaaacttaatacgaagacaatgaagacgaagaaaagagttatgaagggtgtgaaccaaaaggaacggttacactatgttaagcatggaagttgtatgattagtcaaatgggaggagcaataccaagacaaactttagagatttaggtgatacccttttagtctttcagtggtagagttgtctcttaatccttagaattcgaggacgaattcttttaaggagggaagaatgtaatgcccctgaccaagacgagggcttggccgaggaatggctatcgaggaaaacttgatcaggagcgatgagaaataattttggagctgatccaaggtattctaggacaaataccaaagttttgatcaaggaaaattaaagatggacggagaaaatcagttttggtacgaaagtacagtagacggccgacggagcagttatcggcagttcacgggtnnnnnnnnnnnnnnnnnnnnnnnnaacgagtggataaggacgtttaagcctatccgttatggataagcacgttcatgcctatccattaggataaaatcattcaagcctatctgttgctgacagataagtacgtctgatcctatatgcatgaggataagactgatcgtgtctatccgtgcgtttggataacgttccggataagaacgatcatgcctatctcgccacctctagcttccaaaccgacctacccaccctataaataccccatttcgtttcatttgcttcctcacacacaaaaatcaccaaaacgctctaaaacctgagagttgtccgtgagagttcccgagtgagtcgttgagcgagtagtctagagtctaggcgttcgatagtccttagtcgcttagccaaggtaagtttcctatgattaggaactaggtttggttaattactatttaagtaattaattatgacgttaagtcggactagtaatagttaattagggttagctaaaccatgattagcgggactaatcataattagagtagtgattaattatgcttaatgtaattaatcagtaggtagttttgcccttagttttagaatatttcttaagaggttgattcagtccaatgcttagatccattccatcggagaaagcttggtcggatcaaagtccgtatagggagtcgaaagtagtcgtttcctgagagctaagccaaggtgagttcaggttatgcgtgttgcatgtagttgcatgttcttcgatgaacgcatgtaaaccaacttgtttgtttaattgtttgatgagaactagaatggattaggtgttaattatgcattgattgcttggatcctcggttatacgttaagtcgtataatctggttatcgttgtgatgaaatcttgcttgtatgattgcataattttttgtggttgattgttgataaaccatgtgaggttaagtccccatggtttatatttgcttatgcatgattgtttgttgcatgagttagtttcattcatattagtatagtttgcgtgtgtgatgcttccctaaggttgtatcctagtagtgtgtgcatagtggctagttccttacacacgaatggtacaaagactcggagatgacgggctcgtaacctatggccgagtgctgcattacgatgtagcctgagtttccaccacaatatgatactcagaacttaatcatgttctatactcgtttagcctttgcggctacgtatataggtgttcacgactaagggaagggaagatcaatacgaggggcgctaggtttagtggttgagtagttagttgcatgcatatttaatttcgttgcgcattgttgtgtatactccgcagagtatatacaatttgattgttgcattgcttggttgcttgttgcttgttattttgggtttggttggggagttattgcatgtttaggggaacccgaattcacttaacgattagcgctcatcccttactctcttttgcaggcaaccattagtagggagaccttaggggtacaaaggacgttaggccaaccggtgtagatttccttgcctttgtaagagattataatttatatatatgttatgtaagactcgatttaccgataagtaataaagctctgattttataaaacctcgtgtctcccatggtataattagtcctgtccggactatcacaactcacgtatcgcagtatgggttgcaaatccttaggccgcgttcgtgaggaacgacactcgcggtcagacgacttgggcgaacggattcgtttcgggagcctagggtggctgactacgggcgtccacgtgacgctctcattctatcctaggcctaggacggggtaggagtgttacagttactagctgcaaagtatgcttcaagagaaattcctaaagtggacgtctcaaagatcgagctagctcagcctcaatttgaggcagtagagtccaaagagacgtcacgcccgaacaagaaataaaagagcgactcagctcccgtgactactaaagggctaaagaaaatggtcaaggtaattatgggatgatactatcaatgcaatcaagcaacacgagagaaaagtcgttactccgatggaaaagagcctaaaacgagccgtgctaactggcccgaggaagaaaccagcaaccttgataagcctcatgatgatgccctcgtagttactcttgacattgcgaactgtgaagtctaaaggatactcattgacaccaggagttcggttgatctgatttttctcgacacactcgtgagaatgggaatttccaagaaggatattaagggagctccaagcccacttgtatcttttaccagcaaaaccttgatgtcagttttcacaataatgcttcatgttaccgcacaagaggtcgttaagatgatcgagttctctgtttttgaccgaccggcggcttataatgtaagatgaaggcagtcccatcaacttaccatcagtgcgttaagttcccatcccctactggagtcaggcaaatcatgggaaatcagtgcacctcgagaatgtgctatttgctagggccaagctcaaaatccaatagcaaccacaactcaaggcatctttgaatgcgatcaaaaaagtaggggataacctcgtaaaaaaggtggtcataaacgtggagcacctggatcaacttgtcagcattggggctagtctaagtgagagcttccccagcgaagtgattcaatttctcaaaaataataagggcacctttgcatggactatcaaagagatgactggaattagtatgaaggtcatttcacacgagctgaacgtagacccaacattcaaactggtcaagcaaaagcgtcgaaagcttggtttggatagcgcaaaaccggtgaacaccgaagtcgtctgacttctcaaagcaggctcgatccgtgaagtcaagtatccaaaatggcttgctaaccccgtagtggttaagaagaaaaatggcaagtagcgtgtatgtgtggattttaccaacctcaacaaagcttgtccaaaggattgttttccacttccccacatcgatcgtcttgtagagtccactacgggacatgaaatgttatccttcatggatgctttttcatgtaataatcaaatcttgatgaaatcggaagatcaagaaaaaacgtctttcatcacggagcgcggaacctactgttataaggtgatgccattcgggctgaaaaatgttgatgccacatatcatcgtctagtgaacacaatgttcaaggatctcctcggtaaaacaatggaggtttacatcatggacatgtttgtgaagtcagccgtctctacttcgcatctcgagcatcttcaggaatgtttcacttttttgaatgagttcggaatgaagctaaacactttgaagtgcagcttcgctgtcccttcgggagagtttctcaggtacattgtcaccgagcgtggaatcgaagcaaacccaatgcagataaatgtgttcatgtcgatgactttgcctcgcagtataagagaagttcagcgtctaacacgtcgagtttccgcactgaacaagttcatatccctatctattgacaagtgcctacctttctacacattactgtggaaatcgaaagcggggtttgtttgggttgaacactgtgaggaggcattaagcagctgaaaagctatctgtccaaaccaccaattcttgccaagcccgagtttggtgaacagctctttctatatatttctgtcttggaaagcgtagtgactggcgttctggtgcgagttgaacggagtgacaagcgtccaatcgtttacgttagcaagtcattctccgacgcagaaaccagatatccaatgatggaaaagctagctctagttgttgtaacgtcagctttgaagctgaggccatattttcagtcgcacccgatcatcgtcttgacatcgttgccacttcggaccatcctccacagtccaactcagttcggaagatcagcaaactgggcaatcaagttaagtgaatttgacctagagtttcacgcgtgaacaagcttaaaatctcaacttctcgtagatttcctgaacgagctgcccttggctactcccgaacctgacattccggaccaacctaggattcttcatctggatggagcttcttctaaacaagggtccaatgtcatagtttgcttgaagtcttagagaaattcttgaacaatcattttggctcgctttcaaaggctaaaacaacgaagctaaatacgagtcacttttggtcggactttgcctcgccatcagggtaggagttcgtaatctgcaagctcattgtgattcactgcttgttgccaatcagtatttcggggactacaaagcgaaggatattcgcatggaagcatacccggattgagccctggaactgacaaagaaatttgaaaagttcgagctatctagagttcctcgtgtagagaattctgctgtcaatgcactannnnnnnnnnnnnnnnnnnnnnnnnnnnnnnnnnnnnnnatgattcttgttgaaacaattagccaaccgagcgtacgtctgaaaacggtgagtttcgtcaccactcaggccatgcgcagacggctcgaagctcaaatggatgattctggaccttagcagtttgacaaaaatggggcgattcccgacataacgtagcttgaggagaaccaagagagtccagattctctaattccccatagccccaaagtccctgatgctggtcaaccacatcataactggggggggggggcagactagagagagcctattcggaatgacattgtct

SEQ ID NO: 167650 - DNA, 480 bp, Arabidopsis thaliana landsberg
cttcgtggaagatgtccgaaaaacaaggggagaataatatggtacgataattgtcttctagagatatctccaattaattctttaggcaagattgattacgagtataatttctatatgtacaacgagaaagatgtgaacggcgatacaaatttgttcaacaagaatacgagggctctcctctataggctgaaagagaaagccacaagtaaagaaaacaataacggcaagcaggacttacccgagattgggggaaaaaggctcggaatgaagatgttgtatgcgacaggagagaaaagtctcaggacgatgaagttgtacggaatggtgcagtgtacaaaggacttatcgattaaagattgcattgtgtgtttgaactggattatagcgaaacttccgacatgctgcagtaataaacaagggggtagagttttaagtacatgctgtaattttaggtacgagctttaccgttttgtaaagact

SEQ ID NO: 167651 - DNA, 906 bp, Arabidopsis thaliana landsberg
gccttacgaggcggtggagccgctagcttctgtgttgtcttagcttggaagatcaagctagttcctgtcccggagaaagttacagtctttaacgttgaaacaatcggaaacagaggagtaatccctaccgatcttgcagcgaaatggcaagagatcgccgacaagatcgataacgatttgttcgtaagattaacgttgagctcaagtaacaagacggtcaaggcttctttcatgggaatgtacttaggaaactccgagaagcttctagagattatgaacgccaaattcccggaactcggtctgaacaaaacagagtgcatagaaatgaaatggatcgattcggttctgttctggcttagtatctcaccgggtacatcaccaacatcggtcatgctaaaccgaatcccacaaaagcaaatctaccttaaaagaaaatccgattacgtgcagaaaccgatctcaaaacccggtctagaatcgatattcaagattctttcagagaacgagaacgtgtcgatggcttggaacccatacggcgggagaatgagcgagattccggcgacagagacggcgtttcctcaccgagcagggaacatgtttaagattcagtactcatctaactggttcgtgccaggtgaagaagcggctagcgattgcttgagccaaacggaaagagtgttcgaggcaatgagcccttacgtgtctaagaatccaagagaagcgtttttgaactacagagatattgacattgggaagaacttgaactcaacgtacgaggaaggtaaagtgtatggagttaagtattttaagaataacttcgagaggttggttcaggttaagactagagttgatccggacaactttttccggtacgagcagagcattccagtgcacgttagccgttag

SEQ ID NO: 167652 - DNA, 1904 bp, Arabidopsis thaliana landsberg
ggtttgcagctcagcatctagctccatggaaattgctaagaagttatccgaattgcaccacaagctggactgcaacttcaatgacttgaatgcaaaagtggaggcgttgaattccaaagtcagatacttagaaggacaatctgcatctatctctgctcccaaagttacgggacttccagggaagtcaattcaaaatcccaaggagtatgctaatgttcatgctatcaacataaggagtggaagtgagttatccactagagagagacccaagtcagtcactgaggatagtgcataccaagatggggaggatttcagtctcaataaagatcaagctgacaaacaactcgagctgccactcgaccagccactcgaccagtcactcgacctgtcactcgagctgccactcgaccacttcactcgacctgtcactcgagcttccactcgaccacttcactcgaccgaccttcccagagacatcaccaactgctccgaaacatgttgctgtcaaaaacaaagaaaaagtcttcattcctcatccttacaagcccccacttccatttcctggtcgacataagaaagagttagaagataagtacagagctatgtttgccaagaacatcaaggaagtcgaattaaggatacctcttgctgatgctctaacgcgtatcccggattcccaaaagttcctcaaagactttatcatgaagagaatgcaagaggttcaaaaaacaacagttctaagccatgccatcatacaggagaacgatgtcccagaaaatctaggagaccctggttcattcactctaccatgctccctaggttcattgactttcagtaaatgcctttgtaacctaggagcatcagtaaatctcatgccactctcagtagctaagaggttaggtttcaacaagtataaatattgcaatatctccttgatcttggctgatgggtctgttagacaacctcatgggttattagaagatttccctatcaagattggaaatgtggaggtgcctatagacttcatagtgttgaacatggatgaagaacgaaaagatcccttgatcttaggaaggccctttttggctacagctggagcaatcatagatgttaagcaaggaaagattgatcttaatatggggaaggaatttaaaatgaagtttgacatcaatgatgctatgaagaagctgacaatagaaggacagaccttcttagttgaggaaatggatcggctagttgattaactgctcgtggaacttgaagaagcaaataactcaaaaactattttgaccaagagtggtaaagctgggtatctccctagtgaaactttgagttctgagaagtcattagactcacacaagtcagtagttggctcaaaggtttacaagggcttgctggggtctgacacaaaggttatgaaagctaatgaagtaagttcaacacatgctcgaccaactgattccaccaacaactcgaagaagcctccaacttgccttgaaagctcatgctcgaccaaacaactcaaggcaaacactcagacgtcagatgattggttagaactcaaggagagatctaaatggcaggacaaagccatacaagagctaacacatattgtgaaagagctgaaggatcaaatcaaggagctcaatggaaaagccaaccaagtaccacttaacatcaaggacgcccctgacgatggagctactattcttgtcagcaaagaaggatgtgaattcacatcgaaatggtctagaggagaaggttatcttgataaaaaagaagcttactgtgaggacatggccactgagtacccaattgtagacctatcaagaaaccttaatgagtatgatgatcactctactcaagaaggagaggagacctcatttcctctcttcaacccaccc

SEQ ID NO: 167653 - DNA, 500 bp, Arabidopsis thaliana landsberg
  unsure (1)..(500): unsure at all n locations
tacggtcatttcgnattcgtggtgaagctttcgggttaaccaacgcacccgccgcgttcatgaaaatgatgaatgggatattctttgagtggttggacgagttcatnnnnnnnnnnnnnnnnnncatacttgtttattccaaggatcgggaaacccacgaggaacacctaagggcagtgctaacaaggctaagagagcagaagctctacgccaagttgagcaagtgcagtttttggcaaaggagcataggcttcctagggcacattgtgtccaggttgagtttgttgagttgaggtggagagatgaggttcttgagtttgggaattgcaatggggggaccaaagtgattggggggggacaagaagacaaagggacagtagtgtttcaatggaggcgggtcacgaggcgtcggtctctacgaagagggtctattttttttttcactcgaccaaacagaccaaaatgaatctcaagaagtcactcgatcaaacggtggtgat

SEQ ID NO: 167654 - DNA, 1996 bp, Arabidopsis thaliana landsberg
tgctttttcctgtgaaatatgtgattttctaggccacattgaatgcatcctacgcaaggtaattaacatttcattactggtttcatttttgtaacgatgccggtcgtgaagacgatgacaatctactctttattatataatccacaggaagcgccttccccattatacttgaaagatctttacgcttgcagaaaagacaacacaaattcaacaaatcaagatgaccatgatatcgataagatagaaaccaaacttatggtatgaattttcattacaatcattacactacactcttttcatttattggttgtaacttcccttcccttgactattcaggttaataatatgaacgggcatattcatatcatgagactcattgatttcagtgaacttgatgataatgcaaattgcgacatatgcacaacaaaaatacttggtagcccatgtaaatgtgagacatgcagcttccaggcacataatttttgcgcagagctggggcgacgaccattacagcatcgagttcacaaccatcctttgacactcttgccaaaggcccctgcaggtgcaggggttactatgatttgtgacatttgcacaaatgatataaaagggttcaatctcttttgtcggctatgcaattttgtcatccataccaattgcatatttagaggtaaacatttatttacagagtctcaaaggggacaaaaaatcattggaagctgggaaaggagtagttgcattcaagaaaagcatgagttggatcaaattatggtctccaagtcgtattccatggcttgcgccatttgtgaagataaggtgtgtggaaaagacaagaccatacacatgtcatcgcttgatctttcaacatttgtgcagcggctgatcagacaaagctcacttgtttcatgtatggtgtgtgaagatgtataccatcctctgtgtttggaagttgaaaggcaaacaacattctaccatctaattcatcctgatcacgaccttggagtttcatttgtaagaggatccaagtgcagagcatgcaagctggaaattaaaaagtatggctatcattgttcgacctgcgaaattagtttccatattaaatgcagcaaagcggtaagtttgatcaagcctcacatccactatttctatcacttttggattgctgtctcgacgatcactcgaacttgcggtgtgtgcgctaaaccgtgcggtgtgtcgttctatggatgtattgtttgtgacttcaacgcccatgcagagtgtattgggtttccaacaaatgtgaagaaccaaaaacatcagcacactctcgtggaagataataatcgtgtttttcctagttgctgctctctctgtggagaaagtattgggtataggaaaaaattcggaagcagatgctccaatgtgttttattcatgcgaacactgtggtgacgattttcacctcaaatgcataatgtctacggtaaaaaatccaatcagtcatctagcagaactttaaccattgactttatccgttttgttttcgattttcataaactttaaatgttttttttccgtgtcatacaaggatgaccgtgaagctgcaacagaggaagatcaatatggagacatatatcttatgtacattgagcgtcatctcttggagctgttaaaaagtgagtcttagtttcgtaccgcaacttctgttgttctgaagttacgtcaacttcttctcattttattcttatctttgtttcaacagatgatcaacgaagacagtatacatcttagttttgtctttacacctcactgtatgaactaaggaagcctacttcccttatctgaggttttgtctctttgcttgatttgtgttactttttcagagtgccaagtttgatgctggtgtgcttgtaccactctgtttttctctaagttgtttttaccgtgtactacttttcaaaatcgtacatttaactatcttttgtgtcattgggttaactcaatattggattaaa

SEQ ID NO: 167655 - DNA, 1840 bp, Arabidopsis thaliana landsberg
atggcatcacaaaccaacaaagagctttttgtgggtggacttgcaaggattttgaaagaacagcgacaagtcgatgtccggctgaaggcaggggacagcgatcagaagggtgtatctatatctgctcataagcttgtgctggtctcttcctctttacttattattttttcatcatcatatgattcttaaaaaaacatttacgaaacgttctttactcgtactgaatttcattgtgaatgttatggaatgttttatagtctgcaagatttgaggtgtttaagatgatattggaaacagaagagatcaaggctacaactacgctagacacaatcactctctcagagctaaaacacacagagttagtggctttggttgagtgataagtaccaaaatggcttatcaagatatgtaacagaaagagatgagataatagaagaaataggttgagatgcagaagaatttcagagaaggagaaggaagatgaagaagataaacattcttaagattataatcaataagtgtttttcaatgactaaagaagagtttaaataaaagacattactaaagtaaacatgccaaacactaagccttataaaaatccataaggcccaactcctgaacctatcaatactccctcctttgagagtcaccttgtcctcaaggtggaagaaagtgaattccttggacgagtgtcctaacttcggttgagcctacagctgcaaccttctttttgacacttgattcccacttatcaaccatctcctcaacatgcatttgtgtaacctctttaccgaattcaatcattagccttgaaaccacagttttaagaggatgatacaatcccacaacttcaaacggttctgcagtccttacctcctttgatatgaccgcctctttagtctgttctgtgtgcacctttaacacacacggagcggtttggtctttttcactcttggttgacatgttccgcgtacttccagctacaacttcactgtgtttcaccccgggttgcccaaaaaatgatttctcatcgtcattctctttagtatccttccaaggttccaaccatgaaacttgtcctcaaggtagcaaacaacaagcatttccccatcgttatttctctgttcttcaatatcctcttgctcattttcactcttcatctttacttttgtagtaacttgctcaagttcttcgtcctcagcacaaagagtgatccattgttggttgtggctgaaagagaaatcttgattctgccaattaaccattgtctctcccagttttgagagccactcataaccaagaatcacatccacatcagtcttggccaagtctagcagaaggaaattctcagtgatttcaacttcttgaacccataatctgattccgagacaagttcctacgctttgtatgcaccgcctttgtcccaataaaactgaagcttggtttgtaatactcgtgggtagtttgagactgaaggctaactcaactaagataaaattgtcggttgctccagaatctatagctgcaacgaccttatgatctaatatgaagccatagaatctcatacctttgttcctggttaaatctatcactagttgctccattccctgtctcaaggtataactatcctgctctaattcttccagctcatttataactccttttttcttctttaccacatccagcttagcttgtaccagggtaaggctcatcagctccgcctgtcttgattggtagctgttctcaatgacgacacaattccagaatttatgagattattactttcttctaaccattgtgttgtatccatcatatgtacaatcccattcggtttcaattc

SEQ ID NO: 167656 - DNA, 391 bp, Arabidopsis thaliana landsberg
atgcaatacctcacggccatccgaagtctcgagagacaattcaagggattcactttgcagcatgtggaccgggccaagaatgaagaggccgacgcattggccaagctgccgccagaggcgagcccctgccctccgacgtgttctaccacgtcatcggcacaccaaccgtccggagcctcgaagggctccaaataaccaatgacagcgaaggccaccgaatagcacaccttattcatgaccgaagactggcgggcaccaataactctgttcctataggggtattatcacccaaccgacatcaacgaggccaagcgcctcaaacattgaagccgggacttcgcactgattgagggccaactctacaagatgggggtcagtcagccaatgctca

SEQ ID NO: 167657 - DNA, 1413 bp, Arabidopsis thaliana landsberg
tgtataagagatttgataaagtaacgggaattttgtctgccgaatatgtcagaggagtagaggagttcatgacattcgctagtagtcagcctatagtacagagtagtcgaggtaaatttcattgtccttgtagtgtatgcaagaatgaaaaacacaccatctcatgtaaaagagttagtagtcatttgtttagtcaaggatttatgctggattattatgcttggtataagcatggagaagaactgaatatggatagaggaactagttacaaggataggacatattttagtgagaatcatgaagaagtgggtaatgttgtagaagatccatatgtggatatggtgaacgatgcatttaattttaacgtggggtttgatgataactatcatcaggatagttatcatcaggatggtagttatcagaatgtggaagaactggtccgtaaccattcaaagaaattctacgacttgttagaaggtgcaaatactccattgtacgatggttgtcgtgatggccagtcgcatttatccttagcatctcgactcatgcagaacaaggtggagtataatatgagtgaaaagttggtggataccgtttgcgaaatgtttacagattttttaccagaaggaaaccaggctactagttcacattaccaaaccgaaaagttgatgcacaatttaggacttccatatcatacgattgatgtttgctcgaacaattgtatgcttttctggaaagaagccgaaaaagaagatcattgtcgattttgtggcgcacaaagatggaagcctaaagatgaccgtcgaagaaccaaagtaccatatagtcgtatgtggtatctacctattggagaccggttaaaaagaatgtatcagagccacaagacagctgcagcaatgcgatggcatgctgagcaccaatcaaaggagggagaaatgaatcatctttcagatgcgatagagtggagatatttccaagagttacatccccggtttgctgaagaaccttgtaacgtttatctcgggttgtgtactgatgggttcaatccgtttggcatgtctcgtaatcattcgttgtggcctgtgatcctgactccatataatttaccccctggtatgtgcatgaatacaaagtacttatttcttacaattttgaattttgggccaaatcatcctcgagctagtcttgatgtcttcctccaacctcttattgaggagctaaaagagttgtggtctactggagtcaatgcgtacgatgtatcattgagtcagaattttaatctaaaagcagtgcgactgtggacgataagcgactttccggcgtagcatgttatcaggatggactactcatggtaaattgtcttttccaatttgcatggaaagttcaaagttcttttatctacccaatggacgg

SEQ ID NO: 167658 - DNA, 1033 bp, Arabidopsis thaliana landsberg
atggcaacttcttctgctcacctctcgtttctcgccggacgtatatcgccgttctcctccgaacggatcggattattttctctcagaggagaatttcgtccacgaatgacccggttccggtgctcggccggaccgagcggattcttcacgcggctgggtcggttgattaaggagaaggccaaaagcgacgtggagaaagttttctccggattctctaagactagggaaaatctagcagtcatcgacgagctcttactcttctggaatcttgctgaaacagaccgagttcttgatgaattggaagaggttttttaattttaaagccgacttaattcgaattattgttgattccatgggtttcagatgcaaatggagtttcctgaaacctaatagtgggaataattcaatgtaggcgcttttggtttctgattttggaccgaagattactgttagaattgtggagaggctaagagaggatatcatgtcaggaaaactcaaatcaggaagcgagattaaggttgatttgaacgaaattgtggttatgttagggattagggtttatagctagttgattgtacttctgaatggtgtaggatgcattgaaggaaagtgtgttggagatgctggctaagaaaaacagcaagacagagcttcaattgggttttaggttctcttcatttagctgtgttacttgttattctttcacgcctctgctctgttgaagtggagttatgaaagattgtggttctaagtctggttatatgttatggtgtatcaggaaaccagctgttataatgattgttggagtgaacggaggtgggaagacgacatctcttggtaaggaaattggcattaatgctttagagtgggaattcaaatgactagctggtttgctttggcttagccacagaaagatttatgtgaaagattctggcttttgtttttcaggaaagctggctcatagattgaaaaatgaaggaactaaggtacacctttcatgtttgatatcatgtaaactagatcctttttgttc

SEQ ID NO: 167659 - DNA, 823 bp, Arabidopsis thaliana landsberg
  unsure (1)..(823): unsure at all n locations
cgtaagtttgttagcgcttcaagcttaccagttaatcgtgcagctatcaacgagcctattgatcctaccaaagcagtgccaaggtatgtatccattccagtcgttagcttgaaataagggatctgaaacaatgaagtcttattgttgttttgctcatcagatcgactagtagcatgagcatcaacacgcattatcatgacaccgagtcagcagcggaacagctacagaattagccaaacaggcagttgcagcagcacaagtagcctccttattagctaccagaagagacagcagcaacaaggagttctctgtatcttctgatcattcaacacaccagaaggattcacagtacatggatcatcatcatcatcatccaggttcaagaagacaatcacgagactccgaaacaagttcctattacgcaaaacctggtgcagaaaacagaggaatgggtaggagacacagctacaacaatccgggtattaatgaatctgactacgaggaagagtataccaataccgaagcagaagcaaaagaaacaatgaggaggagacacagctacaactctnnnnnnnnnnnnnnnnnnnnnnnnnnnnnnnnnnnnnnnnnnnnnnnnnnctactacgaggaagagacagagccagatgaaccatcacagggtcgtgtttcttctctcccgccaaaccgagcaccgcctcaggctcctcagtccggtgagtccagacgggactcgagcggtcaccaggttcacccaaaactgcctgactatgatattttggctgcacgttttgaagcaatcagacacagtaaagggccattgatc

SEQ ID NO: 167660 - DNA, 3413 bp, Arabidopsis thaliana landsberg
gagtcgcagaaagagttcatatccaaggcgtcgttagcatatcattgttgaaaagaaggaatgatcctcataactgtgagtcccaaaaggatgacgttgattcatcatgatatatcatacatatgcagttgagtttgtatactaccccagaaccgcaagatggggtgagtgtaccgctattaatagaagacgtcccaaggactgagcgttatgtggagagacagaggcaatctccaaagaaagaagaaatggaacagtatttgtctagagatatgtcagagcaagtaacgaagtcactccctgaagaagagcaatgtgtacaagaatatggagcctatgataaacttgaagctcaagatgtgctaactataaacaagttagaagaatcccaacagactgagcaatctgtggagaaggaagacacaaaaaagaatttgtcttcaaagaaagaagacttaaaacagaatttatctatggatcagtcagagcaattatataaatcacctccagaggatgagaaatgtgtagaggtgtatgaagggtctgataaagacgataatacatatgaggctctgaagaaaaaggtcaaggaaatgcagaagacaattgagtactttatgagtattcaatcagcagaagagaaacaatctccttcgtttaatattatagatgatactttgagtccaggagagtatttcaagatgagaagaagccgaagttgcagagaaaatctcttgtttacaaaggcggcggctgctgctgctagtagaggtttcatattcgagaccactaacacatcctttgattcagatatcactgtctccatggacgcacagagcatcaaagattctgatacagagactagcagtagcagcttccatgaatttatggcaggacttagagaaagaacaatgcagcaccattccacgcatagcgccgatactgatacaaagacgatgaagccagaaatcgcagatgatggcggcgagacaacagagtttgagagccaacaaagccaaataattgagctttggcaagtatgtaatgtacctttggttcacagaacatactttttcttgctcttcaaaggcgatccatccgactttgtttacatggaagtcgaactccgaagactatcttttctaaaagactcgaccgagacatcgaggaaacaaactaccaaagcagtaacacgcgagagggaatggttagctaaacaaataccaaacaagtttggaaagaaggaaaaagaagaagtttacaagaaatggggtgttgaattgagctcaaaacggagaagcctgcaagtaacacacaaactatggaacaacaacaccaaagacatagagcattgcaaagagagtgcttctctaatagctacattggttggattcgttgactcaactctaacaccaaaggaaatgtttggcctcagcttaacacctacaacattcaacatcaaaccctcctctggctggaaattttcaaactctttctctcgtattagcttcactggatgataaataatgaaagcagaaatattcagtctttgtgtgtattgtgaaagatgagtatgtattgattggaatcaaactcaatgaacagagccaaaaaaaaaaagtcgtatatataaagaaaaaaaactgactttgataaaagagaaaactttatagtttatagagtgtagattagataaagctctgaccttggaacgattttgccggagcttgcaatggcgcaactaatacgaccaataaggcaattgtcgccgcaatgtaatcaccattttcgtaatctccggtatttgttttcgaaaaagctaccgaacccaccttcttctatccccactcttcttctcttctcgtctttctccactgaaaggtctccacctcgtcggcgaattcgtcccgcgccaccggaagctttaaagcctactgttattgttgccgaagaagatggtgataacgatggttacgagtctgattcgttgaggagtcgtaaccagcggaagcgtgatgctcgccgtgccgttaaatggggtatggaacttgcttccttctccggtgatcaggttaagcagattctgaagtaagcttctcaaaacttggaaacatcatcttttcaaaatcttcacttttatatttgtgttgaagtttctggttttaaagtaattgactttctcatcttagagctgcgtcgcttggtgaagaggtttatgatgcattgatgcttgcgaaggtaagtcacaatgagtacattttggacgttatagttacgttaatcgtaaatttggcacaatgcacataaggtgttcgttgttttgccgcagagactaggctcggatgttcgagaaggaaagcgtagacatttcaactatattggtgagcaaaaacatcatttttatgtagatgaactattatctgggatgttatctttgtattttaccatgtttgtaaattctttagctaatgtggtataacatgctctcagggaaattgttgcgtgaagttgaaccctgatttgatggacactctgattaatgctacaaagcagggtgatcactcaacgctgcagacgctgattagttcagcaaaggatgtcgcagatgatgttggagacagttatgatgatgatacagaaacagagtcacaagattaagaggaggtaagtgtaaacttgtatctcaatataagtataccattcatgttaagtgatttacacaagaaagttgtctcctggatcgcttagttaaattccatctttaggatagtttcagtaactgcatgggagatatgattttatggtgaggggaagattttgtggttaattgccgaggatttaatgaatatagtggccaatagagtccgggagaggacattccaggttcttacgaggaaaaaagagcatccgcaacctccttaggggaagaggagaggatctctgaaccacaacattcccacttctgtgcacactcatgaatagccttttaacaagctactgattacatgtcgagatggatgaagagaactgtgtctgttgttttcgtagagtacgtttaacttgtttggtgtctaaactcaactacttttcaggggtctgacgaatatacggctatggctgcgagatggtttgatggcctaatcagtcaaaatgtggaacttacaaaggaggtttattctcttcagagcgttgatttcgatagacaggttagtcaactaaaaattgaataagtcaaggagatgtgtatgacttgcttatcatgtgcatggatctttgcacctacaggtctgattcaagaagcctcatatggctcatcggctctaaaatttatcccattgcttgataataggaattgctccaacttggtctgcaagaacagacggttcattagctaaataaaggctcaacatacg

SEQ ID NO: 167661 - DNA, 434 bp, Arabidopsis thaliana landsberg
ggttatttcaaaaaaaaaattcggtttcgtgaatcgtaattcgtgacaatcagcgacggagatcgcgacggagagactggggatttggtttccgataccggtggtggaggactgctttgccgtaagattagagatggtgtcgtttgggctcaggactaaggtgcaattcttcaaagcccaacaatatcaatttcagcccgccataaaggtcaattcttagccctattttttttttagcccttaaattacttagatttacaaactgagatagaagttatgaatattttttttataaggttttaaaattttgattttttcccatctaacggttttcaaatttaatttggatattaaatttataaaatgatatgaaagctgaccggattttgaatcctgtcatttgacctagtcatttgatcgttagccgatttcac

SEQ ID NO: 167662 - DNA, 1726 bp, Arabidopsis thaliana landsberg
  unsure (1)..(1726): unsure at all n locations
aatatttttctttatttggcaggcgaaagtgtttcactatggatcaataagtttgattacagagccatgtagatcagctcacatgaaggcgatggaggtggcgaaagaagctggagctcttctttcctacgatccaaacctcagggaacctctgtggccatcccctgaagaagctaggaaacagatcatgagtatctgggacaaggctgacattattaaggtcagtgacgtctagcttgagttcttgacaggaaacaaaacgattgatgatgagacagctatgtctctgtggcatcctaatttgaagctcttgcttgttacacttggcgaaaatggatgtcgttactacactaaggtaatgtacaacaaacattcatgtggattcatcatcatcatgatgatcttggtgtgtgattttgattgatgttctcttgactcttgtgtaggatttccatggatctgttgaaactttccatgttgacgctgtggatactactggagctggtgattcttttgtnnnnnnnnnnnnnnnnnnnnnnnnnnnnnnnnnnnnnnnnnnngaggttaactcccattgatattgtgtgtctattcaatcaactgaatattgttgatgatatttactgatttttctcgtttcttaggaggaagagagtccattgcccatcgcataaaggggtacggtgcgactccggcttgtagcagttccgtgggttgatgaatggtaggcgcgtgtctttgacactgttcacacttggccgtgaaggtcttgcagtcagaaatcattgttggccagtaaaatcctaactttttgagcttaagtgcgagagctcgtcctccggagtggtttccggctgctccctcgtgagtttccttcattatttcattgatctcggttccgtggatgcaattcagcattgctccagacgcgctgaccttaaggagatgctccttcatgagggtatacttggccgctttgattcgtagacgccgcgctgtccacttatcgcttggcaatgttccatcggagaggtaatcgcgaatttctactcgtcaatcggtcggatccgctgggtcgggggcattcgagcttcggatggtatttacgatttccacggcgtcggtcgaatcgatacttgggttatcaatactttccaccgggatgattcgtcgcaaatcgggttcggaagttgacgctaaggcggcgagcgcatctgccggcgcgttgtcacctcggggaatttttgagagtttgaagttttcgaaatctttcgtcatcagttggacgatcttgagataggcgtctattttctcgttctttgcttcgtactccccactgagctgcccaacgataagttgcgagtcggtgaatgcgtggatcgtggttatctgcatccccgcggcgaggcggagcccggcaattagggcctcgtactcggccatgttgtttgttgcgacgaatcggagacgaaaggactgttctagcacctcgccggttggggagacgaggcgaattcctatccccgatccgcgagctgaagatgaaccgtccacgtacagactccattcttcaccgcggtttccactgaccgcacgttctgctgattgtaacggtagttcgatgaggaagtcagccaggaccagtgatttcattgctgggcgcggtcgaaaatcgatgtcgtattcgcttaactccacagcccactttgtcatccgtcccgactga

SEQ ID NO: 167663 - DNA, 353 bp, Arabidopsis thaliana landsberg
gaaacaccacccacgcccagtacaagaaagaggatctgcagcttattcttgatcgtttgtgtcattgcatgtattattggtttggtcgtttttatactcatcaacgaatgcaaacgtccggcgccaaaagtagaattagcttatatggacttcatggtgcttaatatcacatagactcgtcttagtgcaaagtgggatttgtccataaggatccctgcagatcttcctggtgactatatatgtcttcaaggagactttcaagtttcatttctttacaagaatgttactctctttacctcacctccacaaaagtaagctgtttactattaacaacctccgataccgctgtcctc

SEQ ID NO: 167664 - DNA, 1237 bp, Arabidopsis thaliana landsberg
acaatgacataatactatgtggagaaggaagaaaccaaccaggagaggtgtttcaatgagagttatgaaaaactatggcatgaatagtactctaaatcagattttgaggatgaatcttgccatgaagtaccggaaccagaaccgcctgactcatataataccaataaaggctattgtaaaccatgcaataaatttaatgatgatttttgcagccatagtttgaaatatcaattgactcgagatatttcttttcaggaaaagcgaattatattaagcagagagaagtcatggctgccaacgtcctccaaggagtgaagagaaggtcgaccatcacactttgttgcctcacgtcaagcaaaaccgagacacaagttctttcacacatatccacgagtagtaccggaagtgactaaagaagtgactcagagaacatcaatgtggcgtaaaccatatccatggtagacgtgattacctagctaagagagactcaaggattagtaatttattaggaggtgagctgaaacatggcactcgacaagacccactactatccaaccccacccgaacctaccaaacaaaactaaggttatttctagaaaatggttataagtattttggacctgaatcttttgattttgcaagacatgagaaggggaagaattagtctacaatgggaactcaaaatggataagtactttaagtactattccattcctaaagaatagaagctccactattctcttgaacaactcatgggaagggcaaaacgttggtggagtctagaagaaaaaggtagactgtggtataaggaaccatctctcaaaacgtggggcattaaacgcaccacacagtcttccccaacctagtcaacacacttactatccaaaggaaccaagccgagaaaactgtacaaatctatgtgttagttccaatcaaattgcgaatcaagatcccactaagaagaatgagatcgttacatgtgcaaaagaaaacacaagccccgtaccggtacttgaactatatgttgaaccgcatgctggactaaagaaaggtgagtcctatgattctttaaaataaaatgaaccaacatgttatagatgtcataagaagggaaaatttgctgcaacttgctctaaaagacaagtagtagattccatatcactagaggtgaaattgaatgcatctagctccaatgattgtctcgtaattcaagtttagaaatttcaattctagatta

SEQ ID NO: 167665 - DNA, 255 bp, Arabidopsis thaliana landsberg
tcatcaggtggtgacgcggagaaggttaatgattcgccggcggcgaaaacccaggtggtggggtggccgccggtttgttcttaccggaagaaaaacagctgtaaggaagcttcgaccacgaaagtggggttagggtatgtgaaagtgagcatggatggtgtgccttatttgaggaagatggatcttggttcgagccaccgctatgatgatctagccttttctcttgataagctcttcggtttccgtggcatcggt

SEQ ID NO: 167666 - DNA, 1110 bp, Arabidopsis thaliana landsberg
ttagtatgtctcaaatcacatctgcttggttaatcatgtaatgattaaagcctgtctctttaacttgctgtcaactctttaaaggtatggtagcctaatgattcttctcgctacccagttagctatgcaggtttttattgctggatttcttagatgcatatgcatttgtcttccttttgtcgcatttcaagcatacggatactataacatctgccatggacatacgcgtgatgaagtgaggccttggtgcaaaggaaggattccgttgctgtataacttcattcaaagtcattattggttaatactttgaacacaaaccttttcttgttcttgtaaattttctttcttatatttgatttagagattcttgtttctgacaggggagtaggtttccttaaatactttcagtttaagcagctcccaaactttctgctcgcatccccaattctctctttagctgtgtgttcgattatgagttacatgaagtctcggcctgagctcttcatatcgctggggtttcaagccaccgagaaagaaaagagatctgctgccagactttattctctgaaggatgcagttgaaccaagtgttaaaacttcaacaaatgaaggtatcagtttcatcgttgttatataatagttccaaaattaaacgttgagtgattctctctgttttcctgagtaggaaaccatgacattaggcagcggaaacctagcagtaagaaggatgtgactgggaccaaagtggctccagaaaaatcaggatacctttcagctgatgttttcccatttatcgtacacttgagttttatggtaaccacggcgttcttcatcatgcatgtccaggttacaatcctcaatggcataaacagaatataatatacataattttagatgagattaaggttttagtgagactgtcctcacgtttgtgttgtggtaattacaggttgcaacaaggttcttgtcagcaagccctccactttactggtttgcatcgtctttgattggatctccaaaacatagtaaatgggggtacttgatatgttcatattgtgcagcctatatccttcttggtactttgctcttgtcaaacttttatcccttcact

SEQ ID NO: 167667 - DNA, 1000 bp, Arabidopsis thaliana landsberg
  unsure (1)..(1000): unsure at all n locations
aaataatgaccatgcatgacaggtggctagtgtttagaggagggagtacggaggaggttgatctgctatacacggtgaaaagatcaaacatggttcagataaccaccaaacttgatgtgtttttggctgataacatagagcagaagaaatgtgattacagactcgaaggggtttggctcgacacttcttgttttnnnnnnnnnnnnnnnnnnnnnnnnnntcttgcccaagtaaacaaactctatttccttttcttagtacaagtctaactgtatattgaaaaggagtttttttgacgtaatttaaataaaatatgaaaagaaaacatacgatatatataaaaggaaaatataaaaaaatgaaaaaattgtaacattatgttaagattgagacattaaaagaaaatagatgattatcagttaccagttataccaaaactataacgttacaaaatgttagaaaataaacatttttatttatgatgatagactgggtttaagtgatgagtaggaaattcgtgccacggcttctttctatattgaacatatgtatatttttttttttgacattcatattgaacatatatatatatatatatatatatatatatatatatatatatgtatttgtataattttatgttttggtatggtttagtttatttaaaataaacttttttctttttttcacatctggaataaacatgtttatactatatacccatctatatatattattatgaactgggagttgctaatgttttattaattgttaaaacttgagaaataaaaacatttatttatgataaaataaaaatggtatggtttgaatggcagatgcgcgagaagaaaacgatgcagagcgttctctttgaaaggacaatttctgcctcactgttaatccaaatgttgattatgccttcattgcctctctcattgtcatccttgtagaaatacaaataagtcttagaaaattaacaaaacaactcttgcttttagaa

SEQ ID NO: 167668 - DNA, 554 bp, Arabidopsis thaliana landsberg; identical to SEQ ID NO: 61659
  unsure (1)..(554): unsure at all n locations

SEQ ID NO: 167669 - DNA, 621 bp, Arabidopsis thaliana landsberg
  unsure (1)..(621): unsure at all n locations
tcattagcagcctgtaatccaatcttgaatatttcgttattcggtcggtaatattagtgatctnntcatgacccagactgctacttttttagctacatctcatgtttcctcttaaacgtggacttaaaaatgtgttctttgttttttccaggtctgtcctgtatgcactaagagggtgggattggatatcgttggccatattacgacgcaaccatgcgaatttctttaagatatcctttcacatttcgacatcttgatatttgttatttccaatatttgatgcttagtctgtgaatagcttggttctttatttagtacacaatcatgttggtagaacttgtgtttattccttgatgagaggttttacgtacagcgaaggagaaggttgcgaagaggaggatatagctctacctatctcgccttgaaaaaggaactccgggaagcaaacctacagtctcttcttggtggatcttcaagtttcacttcttcaaccaatatcgattctgatccgttgctgtcatcctttatgcttaattctccttcagtgaaccagtctgcaaacaaatctgctacacctgtgactgtaggaaacgcggctacaaaagtctcgattaaggactc

SEQ ID NO: 167670 - DNA, 386 bp, Arabidopsis thaliana landsberg
ccctatcagcggcagaatcaacccaagccctttattccatacaaccaaggtcaggggtatgttccaaagcagcagtacgaaggcaacgatcagcgggaacaacaaccagcttcaacaactccagattcagacttgaagaacatgatacagcagattctgcaaggacaagcagctggagcaatggatctagccaaaaagatgtccgaaattcataacaaggttgattccagttacaatgatatcaatatcaaggtagaggcactaacatgtaagatcagatacatagaaggccagactagctccacctctgctcccaaatttactagaccttcaggaaagtcaatacaaacttcaaaggaatacgctcatgctatcacgctcagaag

SEQ ID NO: 167671 - DNA, 1284 bp, Arabidopsis thaliana landsberg
caattgtaattgatgcaacataagctacattgaagtatgggatctgtatcgctaaagattggcgatggaaccgcgagattcaagcgatcaacgcttttttcttccgtcatcaacctccttatgcttttctctatagtcactacgaatctctttgcactatacgccttctcgtctcggtcccaatctcacacgccacatcctcttcattccaacaatgtctctttggtttctcaacatctctcactcatcctcagagaaatcgattcctcccaccacacactcactcagatggagaaacagattattggttatgaatctctcgatctctcgcaacaagaagtcccacaagagcttaaactgtttcttcaacaacatcagcttcctcttggtaaagattctcgtactggtatcacacaaatggttgcatctgttggacattcctgtgaaatgtctatagatttgttatctcagtatatggcgtataatgtattcgacaaatgtcctgatgattggagcctagctcagaagttgattctccgtgcttgtgaaccgttgccacgccgtcgatgtttggctaaaacagtacataaaccaggtctcgctttgtttcctgattctttgtggagaccagttggtaacagtagtgttaactggagcggtcttggctgcaaaagttttgaatgcttgaaaggtaagaaactgagccgggattgtgttggttgctttgatctagctactagtcatgagaaagataggtttgttaagattaaagggaagactgatttcctgatagatgatgttttgggtttaggcgatgggaaaatccgaattggattcgatattagcagcggatcaggcacttttgctgctagaatggctgaaaagaatgtgaatataatcagtaatacattgaatatagatgctcctttcagcgaattcatagctgcgagagggatttttccgttgttcatgagtttggatcagagattaccgttctacgacaatgttttcgatctcatacatgcttctaacggattggatttagcggttagtaataaacccgagaagctggagttcttgatgtttgatcttgatcggatcttgaaacccggtgggttgttctggttagacaatttctattgcggtaacgatgagaagaagagagttcttacgcgtttgatagagaggtttgggtataagaagttgaaatgggttgttggagagaaaactgatgctgaggtttttctctcggctgttctgcaaaagcctgcccggatttgattg

SEQ ID NO: 167672 - DNA, 724 bp, Arabidopsis thaliana landsberg
acttgtctcatcctgttccctctcggaagagttaaagattgttgcatgtttgaagcataatgcgaaagtctttcgggtgctctctaggtcattgataaggcgcattataagaatacgcttttctcggcatgattcgggttcaagaattgtgattgatgctcctcagctatgctttttgagcatttatgattacttgccagaaagctttagattaatcaatatggatttcaatgccaagttagatatttctcttgccttcccatcaatgagaaaaaacatgcgccgttttttttctcggaatttcgaaggtcggagatatgacgatatggtcaaagactataaagctcatccacgaatatgtgagatttgaaccccggcctcgatttggttgtgtgtctcgcctgtgtgttactctctgtgatttgaaattgttgccatcttttctcgagagctgtccgaatctgaagtcccttgtcttgaaatgggaagctagcttaaagcatttggagttgatgaattcattcggattttcatctgcgcccaagtgtttgttatcgtctctcgagtttgttgatttcgaaacgaccatcttgggatattattcttcagagatggagctggtaaggtactttcttgagaattcggcaatccccaaaaacctctctctacgtttgcgctattataaaaaaaacaatatgacatatatctacaaactcatcaaaat

SEQ ID NO: 167673 - DNA, 300 bp, Arabidopsis thaliana landsberg
atgacagcccgttttaatcagcaaatcctgaaacaacgtcatttcagcgagagcaccagactcgtgaagaagagaaaaagaagaagcaggagaaaagtttgcttgctgtgcctgtgttggtcagtctttgaagaaatggtgaaatcgactagtaaggatgctcaggatctcttccattctcttcactctgcttataccgctacaccaacgaatctcaaggtccaccattatcattttgttctgatcttttatgaatcatcattgaaattgaaaaatccgctgaatgttcttgtttaactc

SEQ ID NO: 167674 - DNA, 345 bp, Arabidopsis thaliana landsberg
tatccaatgatttcatccataaaaagtattttatcggcatcggtaaaaaccaaagagcagattttgtccgacgaggctttgattaatactatcggtacggtaaccagcttaatggtttctgcttttcaaaacgggcataaggttttgttttgcggtaatggcggcagtgctgccgacgcgcaacatttggccgccgaattttccggccgtttttataaggaccgtcagccgctgccttcggaggcgcttcatgccaacacctcctatttaaccgccgtggccaacgactacggctacgagcatgtgtatagccgtctgcttcgcggcatggggcaaaaaggcaac

SEQ ID NO: 167675 - DNA, 1202 bp, Arabidopsis thaliana landsberg
caaacatacactgatacacacgcgagaaactacaaggttccagcaaggttccagttaccagatcctttgttaactcagattcttaatcatcttcccacagaggaagctgtgaagacaagcgttttatccaccagatggagaactctctggctttgggttcataatttggaattgtcattttcgaagttctcaagtttcaatgcctttttgagttttggtaactggtttttcgattccgatagagtttcatgcatagagagcctcaagttatctttagatggaaatgatgcatcctatctcaaaccatggattgatgcctttgttaagcgtaagatccaacgtctacatgttcgtcttactcaagggtgtgagatgccactaagcctttacgtttgtgagacattggtatctctcaaactctataggctgaacttggttgatcctgagtttgtttcattaccttgtctaaagatcttgctgttggatatgggcttcgccccaccaacatgattaaaggcccaacatatcacgactagcaacgttggacgagagaagagaggatcggcccgtctgaagaagtaatggcccagcaccaaacgaagcccaccttcagggagttattgatcaggaaagagtcccacatcgggaagaaaactgtactatgtactgtccttgcagtactataaatacggacatgagaatgtcagaaaaagacacctgaaatctgcagaaaaaagcaatagaaacttctcattcggattcagaaacataagtccaactttgacttgtgaagttcatattttcgttgtaccaccttaatcgaggctcggctgtagagataatcctgtagacagccggacatcgagttatattaataaagatcttcctttaggctcatttttcccttctttaatttggaggttcggttttgtacaccaacaacttttgagagacttgtctcgtcctgccctgtcctggaggagttaaagattgatgtagtatggatggatggacgagtctatcgggtgcactctcggtcactgaagaggttctgtttccgacgaacttgttttctccagtttgaatctgttcctggagttgtgattgatgctcctctactgatgattgtgaatcaaaaagctttatactaactgatttggagtccgatgccaagtgggttcgatatttctccaccgttttca

SEQ ID NO: 167676 - DNA, 291 bp, Arabidopsis thaliana landsberg
gtaaaaacagaagtggtgtttgtaaaaggtgacgagaagggtccgaccatagtgaaagaggcaagagaacgagaagcatcattactagttctaggccagaagaaacaacatcccacatggcggctactaatggtatgggcgtcgcaggcccgacccgtgaccaaacacgacttcgtcgagtattgcatcaacaactctccttgcatggctattgcggttcgtaagagaggcaagaagcttggtggatacactcttacaactaaacgtcacaaagatttctggcttcttgcc

SEQ ID NO: 167677 - DNA, 122 bp, Arabidopsis thaliana landsberg
atgaagaatgcgatgatgcgaaagtatgtgaagaagatcatgaccggtgccgtagtgactgaggtcaatcagcaaaaacttaataaccagattgtgaagaagaatgacgtcattctgaggtt

SEQ ID NO: 167678 - DNA, 273 bp, Arabidopsis thaliana landsberg
ggagaaatgatgaacataaagttcgattccaaaaccgctaagttgtctgagtcgttctacaagcttgaggaagagtatgagagaagtcaggcattgtaagctcttcttgcgaagctttttgctacggtttcttcgatcaaagcggcttatgcgcagttacagcattctcagtctccgtatgactctatcaggatgcaaaaagcagattacttggtagtcgccgagcttaagactgtgtctgagctgaaacaatgtttcatgaatgaacaagtg

SEQ ID NO: 167679 - DNA, 332 bp, Arabidopsis thaliana landsberg
tgctggcgcacgtgcgccagatctggcccgggccgtacacctggatcttcccacgcacggcagaagtgcctgattgggttgccggcggacatgccggcatcgcgctgcggatcaccgcgcatgagccttccgccgcactgtgtcgtgcgtttggtggcgcgctggtgtcgaccagtgcgaatccgcatggcgaaccctcggcgcgctcggcgcagaccgtggtcgactatttcggtgacgcgctggatggcgtgctggatgcgcctttgggcgaacagacccggccctccacgattcgcgatgcgttgacgggcgctgtcattcgcgcctga

SEQ ID NO: 167680 - DNA, 1723 bp, Arabidopsis thaliana landsberg
caacaatgattaagccatcaattcatttaatcccctacttagaaccctaaaacaaaattaagagacttctcactcatattgaaaaggacaacacaaagagatgaaataaaaacacatttaaaaataaatctacatatacagttttgcaacacttttatgaaataaatcctcaagttgggatttatttacaacacagtgccattgacattttatattttaacaaatttattctcaaattctaaataaaaatcatttttgtttctaaaagttaggaaactaaaagaaaaaatcactaaactcattgaaaactttccaaatctaaactaacatatataacacactcatagaggatcaattagcattaatcaccctgattttttttgttttaaattagttattaataaaaagaatcaaatctcatattactttaatattttcataaataaaaattacgccatatttttaaaatttgaaaccctaattctacccaacccctataaattaaaatccattccttaagcttttcttcattacgagaaatcgactctctgcagtcctaattcttcattaaagaaaaaatatgttttagttttcaaatttcttatattttcatatctttgattatgtttctttgaacggttcgttttaaatcatccattagaagccattcatcacaattaaaaacaaaacgtacacacttccttaatatttttccaattttgtagaagccatccatcataatgttttttttctatatacttttttccaatttgcaattgtaagaataattatcacaccctaaaactttcttttctgatttttgttaaattttatctttttctaacaaaaataatttgtatatatattaattttatatagctaaaaatatcatcacattaaagtcaaaaaaacaatttttattgacatattttaacattataaaacattattaatattatacttataaaaaattaaaataacatgagacgagttatatagcgggacgggtttggattgatataatacgggttcaatctctatttgttattttatcatcacaaatttttatttacaacattaacttaaaattatttaactttaacactaaattttaaaaaccgtaaaatttaatattattatatatgtgaaaaaaacatttgcccttaggtgtaccacgggttaaatcctagtaaaacataaaagagaagggataagaaatcttctccaaagtgtcaaagaggatgaatctccaaatccctaagttgtggcttacaagagagctctcaaaaagttgcagtctccaaaagaaaagaaaaacatggttttctgaaggaaaaaaacgaaccgagtccccacgggtcaaaccagattgaatccgtttactaataatcaaaatcgcagaagctggtggtcgagcaccaaatggaggttcaccgctaggatcatcggtaaggttggcggtcgagcaacaaatggaggtagaccgatggaagtagaccgccagaatcttcggtaacactacaagaaaacaggtaaacgacgactacaatcagcgacaacaaacgtagtcgtaacattatacgactatttgacgacggatttacgactcgcatgcgacaacacaaaaaattgtagttacatagtcgttgttttacgactatcgtatgcagtcggcaaagagtcggcaagtaacgactatttgacgattatattattgaaggga

SEQ ID NO: 167681 - DNA, 532 bp, Arabidopsis thaliana landsberg
gtacgcgagaagccagagccgctgtcgaagccaacgacactcaaccaggtatggtcaatggatttcatgcacgaccagttatccgatggtcgcagcatccggctgttcaacgtgatcgacgacttcaaccgggaaggcttggacattgaagtggatttctcccttccgtccgagcgcgtgatccgttcgctcgaacgcatcatcgaatggcgcggcaggccggatcggatacgttgtgacaatggcccggaatacgtcagtgcagctctaatggcgtgggcaaatcggcgtggcattcacgtcgagttcattcaacctggcaagccgcagcagaatgcctacatcgagcgctacaaccggacggtgcgttacgactggctggcacactacctgttcgacagcatcgaagaagtgcaggactacgcaacccgttggctatggacctataatcacgagcgccccaacatggccatcggcggcatcacgccaaaacagaaacaggccctggccgcatagcctctactctcaggcc

SEQ ID NO: 167682 - DNA, 733 bp, Arabidopsis thaliana landsberg
tccacaataattgtgagcagatgggaaaggtatggtgcaataaataagaagaatttcaacattggtcgtataactattatgacggtttcccaaattataactataagtctataatcataaccacacccttttttataatagaagtattttaaagccttttttcgttttgaattttttatatgtttgattttttattttttaataaatttttaagtaaatcaatcaacgtgttttcttttttgtgcctcgtgtacttgctttctcatcaatgccctttgactcataattcattgggcagttcatgcgtttttaattccatgattttttatatttgcatcgtcacctagcatttgatcattgcttgcatgttataatttacaagttgtacaaaaacatctatgagtttaatgtgtttacgcgcgtacatgtcaaaaaataacgtatcgtactgtacgtttttggatttgtttggattaggagcaaattgaagcaaaccgagatggaatgcgagtatctcaaaaggtggtttggttcattaacggagcaaaaccacaggctccatagagaagtagaagagcttagagccatgaaggttggcccaacaacggtgaactctgcctcgagccttactatgtgtcctcgctgcgagcgagttacccctgccgcgagcccttcgagggcggtggtgccggttccggctaagaaaacgtttccgccgcaagagcgtgatcgt

SEQ ID NO: 167683 - DNA, 411 bp, Arabidopsis thaliana landsberg
  unsure (1)..(411): unsure at all n locations
gacctgcatcttttcatccgcactnnnnnnnnnnnnnnnnnnnnnnnnnnnnnnggatgatgaacgtgcgcgccgatgtggtcgaaagcctgatcgccgcgctctatctcgacggtggtctggagaccgcccgccgcttcatcctgaagttctgggaaaagcgggcggtgcgtgccgatggcgcccgccgtgacgcgaagaccgaattgcaggaatgggcccacgcgaaatttggcgtgacgcccctatatcgtgttgaagaacgcaccgggccggatcatgatccacgcttcacggtgacggtggaagtggccggtgtctccccggaaaagggtatcggccgctccaagcgcgcagccgagcaggccattaacctagaataccgaacgcgaagcttttgacagcagtcct

SEQ ID NO: 167684 - DNA, 210 bp, Arabidopsis thaliana landsberg
ggcactgaatctgtgatgtcgaatgaaacgttgagtcgagtcaggcttgataaatctgaaaatttcatatggtggaccgtgccccattcttcttaccacaagtttttcttgaaatgccatgctcagaataatccatcagccatgttcgcttatatgagtaaatcttgggcttatcaaacgttggttaatgctcactaccgttttgggcgt

SEQ ID NO: 167685 - DNA, 474 bp, Arabidopsis thaliana landsberg; identical to SEQ ID NO: 66578

SEQ ID NO: 167686 - DNA, 1597 bp, Arabidopsis thaliana landsberg
catcgaaacatgaagaggagtgagtttggtcagtaaaactcacacatacatatgactatgtgacccaatgagttttgtaaaaccatacgtaatggccatagctaaccatcctccaaccaaaaccctaagcgacgacttaaccactggtgctttccccaaaaccgcccctaaccatccaaacatcaccaacgccaacgtaaccgctgccactttatactctttcacaaacgcagccgccaataacggcaccatcgccccaagagaaaacgctaacgcagatgctgcagccgcttgtgttggacttggaagcttctctttctcaatctctcctccggtctctctcttcatctgagctacctctatgtcatattgagagtaaacagagacaaactctccaatcgccatgctacaagctccggccactaaaccggcaaaaccagttaagatcatgatcttgacgttttgcttgaccgcaccaacacccatcataagtgaagccgtcgagacaagaccgtcgttggcaccaagcacagcggctcttagccattgagctcgtttggagtagtcaaaagccttttcttgatctttctccatgtctaggttcaaggtgttgtgagattccatggttaaacttaaatagtttggttttgctttgttttgttaaatgagaaagactgaaaatgaaagtggagaatatcagtgaagtgtggagaacacacgccaaggttgagttctatttattgagaaatttggtatgagtatttaattttagagaaaataataataattttatgagaatttggagactttactcaagggttcgaggtgtaataataataattagagctctttcacaagaaagatttcagtttctttttaaatcggaagatgatttacttgaaattttaaaaactggagtttggactcaagatgaatggtgtgtgataatggatcgatgggtggagaaaccaaaagaggattatctgatgtttcttcctgtttggattcgattgcggaatattcctgtcaactattacacatctgatacgattaaggagattgcgtcttgtgttggtaaggttttaaaagtggaattagacttagaaaagtctcaagctcaggattatgtcagagttcaggtactgtttgatgttcgaaatcctttacgaaattgtaaagaggttctgattccaactggtgaggttgtctcagttacttttgattatgaaagaatcaggaagaggtgttttctttgccaacgtctgactcatgagaaaggtgattgtccgttttctcagcaaagaaataaatcaaattttgaaaaaattatcagagatgcaggtttaaagacaggagatttagtttcagaaactagacccaagattctatctcttccgtctccctctatggttcctgttggaagtaatgaaaatagggatttgtttaactggcagagagagaaggatgctcaggattcttctccttatccagcctctcctgctcctttgaatgagttatctaaggaataacagaaaggatatttttccattcaaagctaaactaaggaagagtcatgaatctgaagcgttgtcggatt

SEQ ID NO: 167687 - DNA, 485 bp, Arabidopsis thaliana landsberg
accctgaccaacttcaagaccatcaagggctcgatcaagcgcctccacgagatggagaaggcgatcgaggacggcaccatcaaccgtctgaccaagaaggaacagctcaaccacacccgcgagctggacaagctgcgcaagtcgctgggcggcatcaagaacatgccgagcctgccggactgcctgttcgtcatcgacaccggctacgaaaagaacgcgattgccgaagccaagaagctgggcatcccggtcatcgccgtggtcgacaccaacaacgatcccgcgctggtggactgcgtgatcccgggcaacgacgacgccacccgcgccatcaaggtctacgcccagtgcctggccgacgcgattgtcgaaggccgtggctccaaccccaacctcaagcccgacgaatacgtgccggagccggaagtgaaggccgaagcgccgcgcaagccgcgtccccgcaagccgggtgagaaggaaggcgg

SEQ ID NO: 167688 - DNA, 275 bp, Arabidopsis thaliana landsberg
taaacggtggtggaagcatcaaatgcgcgcttgttggagaaaacctcggacagttagctcagaacaacgggtggtcgggaattgttgtcaatgaatgcgttagagatgtggatgaattcaatgactgcgatgttggggtcagggcattgggatctaacccgttgaagtctactaagaaaggtcatggtgagaagaatgtgccggttcatattggaggaactttgattacacatggagagtggctatatgctgatagtgatggtatcttgatctcc

SEQ ID NO: 167689 - DNA, 545 bp, Arabidopsis thaliana landsberg
atgcgatcagggaagaagtcatcggagaagaagacattggaaaagacggaaatacccttatggatccgttgttggaattcgaggaacggtgtcctccgggaggagaggaatccgttgttttctacacaacgactcttcgaggaatcagaaaaacgttcgacgattgcaacatgatccgatttctgctggatagttttaaggttaagtactacgagagagatgtgtcgatgcatagagagtatagagaagagctccgacgaatctcagcggcggaaacagaggtgttgcctccggttctgttcgtaaaaggaaggtgtatcggtggagctcagagagtgttgggactgcacgagcaagggaagtttaagattctctttgagggcattccaatcaccggagatgaacgttgccggcggtgcgatggttttaggtttttgatgtgtgatggatgcagaggtagtcgccggattatctctggtgatggatcaagaattcagtgtttgatatgtaatgagaatgggttaattgtgtgcgttggttgctcc

SEQ ID NO: 167690 - DNA, 219 bp, Arabidopsis thaliana landsberg
atgccgagaaggttaaggatattgagtcttacggcctcgcatgcacatacagacacaagaggagtattattaagaccagctaagatagaacaacatcgggccacgttgctggtggtgagggagatgagaccaagtacgttgacgcaaatccccaagtcagatcggttaagagaacacacaggttgggctgaggtgaaacccaagaagacgagtttgaag

SEQ ID NO: 167691 - DNA, 755 bp, Arabidopsis thaliana landsberg; identical to SEQ ID NO: 10913

SEQ ID NO: 167692 - DNA, 558 bp, Arabidopsis thaliana landsberg
ttcctctcatgtagaggacgaatatgtccttgaaggtgttgaaatgatatccaagatggtggaagatgtgtaagctcagagttgtggcaaggccctttattgtttgtgaggttggttccggggtcaccgctaagttttggcatgataattggattggccttggcccccttatagaggtaatcggtcctctaggccctcgtacagttggtttgcctattgatgttgtggttagggatgcgttaaggggcaggtcttggtggattgcatcaagccgtagcaggaatccaatcattgttcagcttaaaaatcttctcccggaggctcagggtttgcttgactgtcagcatgacgactcctttctttggaaaacggaccttcatgcaccatcaaacagattctccgctccaagaacttggtctgctctgcatccgcaatctcacaccatcccctggcataaggcggtctggtttaagaaccatgttcctaagcacgccttcatttgttgggttgtggcgtggaatagattgcacacaagggataggcttcagaattggggtc

SEQ ID NO: 167693 - DNA, 1140 bp, Arabidopsis thaliana landsberg; identical to SEQ ID NO: 12955

SEQ ID NO: 167694 - DNA, 475 bp, Arabidopsis thaliana landsberg
  unsure (1)..(475): unsure at all n locations
ctcatttgcgtgtctactggcacgacatttgatgcggctcaaaccctagttcggtcgtgatcaaccctcctatctccaactcttccttcttnnnnnnnnnnnnnnnnnnnnnnnnnnnnntaactacggaggtcgcggtgaattcgactttagtgggacaagcgcaagggatctacgctgctactggtcaacgtgatgcatctgcgcttatggtgatgaactttgcgttcaagacagggaagtataacggaagttcgatcgcgattcttggccggaacgctgtgttgaccaaggttagggagatgccggtgattggaggaagttgactcttccggtttgctagaggttatgtcgaggctcggaccatgtggtttgatcaaaagtcaggagatgctactgttgagtacagctgttatgtcttgcattattgatgatagtgatgaattattatgcctctcttttttaatgtttgata

SEQ ID NO: 167695 - DNA, 141 bp, Arabidopsis thaliana landsberg
  unsure (1)..(141): unsure at all n locations
cccatgacgcgcctgatcctgttcctgctggcttgctacaagtggctgctgagccccctgctgggcaaacagtgccgtttcgagcccacctgttccagntacgcacgcattgtcgtgtcccgtttcgggccgtggcgcgga

SEQ ID NO: 167696 - DNA, 1154 bp, Arabidopsis thaliana landsberg; identical to SEQ ID NO: 61507
  unsure (1)..(1154): unsure at all n locations

SEQ ID NO: 167697 - DNA, 849 bp, Arabidopsis thaliana landsberg
  unsure (1)..(849): unsure at all n locations
gaatattgtaaggacaatagtatgacgatggcaatgctttttttttttgcgaatggtcgagagaagttttggggttggggcttgtatttttaacactttgattcatgccttcatgaagttgggtatgcttgataaaggaagggtaatgtttagtcaaatgataaaaaagggtgtgcagtcgaatgnnnnnnnnnnnnnnnnnnnnnnnnnnnnnnnnnnnnnnnnnnnnnnnnnagattatgctttgaggcttttcgagaacaacacagggagtgaagatatatcccgcaacgtgcattgtatacaaatcttatattcgggttttacaagaagggaggaatggataaagctgttgacttgttaatgaggatgttagacaatggaattgtcccagaccatattacttactttgttctcttgaagatgctcccaaaatgccacgagcttaagtatgctatggtgatcttacaatcaattttagataacggatgtggattaatccaccagttattgatgatcttggaaatattgaggtaaaggttgagtctttgcttggggagattgctagaaaagatgcgaacctagctgctgtgggacttgctgttgtcacaactgcgttgtgttcgcaaagaaattatatcgcagctttatctcgtatagaaaaaatggtcaatctgggatgcacacccttacccttttcatacaattcagtgatcaaatgtctatttcaggaaaatatcattgaagatttggcgtctttagtcaatattatccaagagttagactttgttccggatgttgatacttatttgatagtggtgaatgagttatgcaagaagaatgacagag

SEQ ID NO: 167698 - DNA, 1190 bp, Arabidopsis thaliana landsberg
cctagtctttcaatgatttcaagttctggttcatctcgcgacaaaggagtagaagcaattcccggaggagtcgtcgctgtcgtcgatcctccagaccctaggtggccttatttacataggtggacgcaggagagctcttccccaccggttaagcctcccccaaatacaccgttgattctctcagctgctagaatagggttgagtaactctcgatctattcgagattattttcttccggcggtttcaattgattcagctactaccaagtctcagttagcaccgttagtgaagagtttgattgagattgcaactccgacaattgaacttgttgtccagagaagtcccctgcctctccggtgtcgactctcaaaggagcttggcaggttccttgcaacgtcagttctacctctcatcatcttgcagcaggtcaagctagcagacacatcatctacgcagagatggccttcacttgtggtctctagtggtaagaagcggatgactactgttggtattgatcatagtaaggattcaaaggttattgataggtctcgaacagttgaggatgagtctctgaaagttttttcaaaggattatccttgggctgcaaagatggatcaatcgaagcgtaatttgcatcgagttactacgccggattacttagagcatggaacccctttggtaaatctccctagtcatgttttgttagaagggattgagaatcaaaaggagtttattgtaggacaattctatcaatgcgttgctccttctggaggattggttcatgctgttatgaataagatttggggaagaaattgtagaatatttagtaagaaactgagtgagtcttcttatctctttcacattccagatgaggcaactcgctgttggattcttcagagagcattgtggcacgtggatgattgtttgatgttcgtctcaacttggtcacccgttgccaatttcgaagttccggagatcacaacgattcctgcttggttacgctcaagaacatccctaaccagttatactcttttaaagggattaaatggattgcttcggggattggggagactatgttaactagcagaccttggctggatccaacccaaatgggagaagctaagatcttggtcgaggtaaaacttgataaaccctttcctcaaagggttgctttaaaagaagaatgtggc

SEQ ID NO: 167699 - DNA, 576 bp, Arabidopsis thaliana landsberg
  unsure (1)..(576): unsure at all n locations
nnnnnnnnnnnnnnnnnnnntgaaaaattanaaggtttcacttacaccaccgtgattttcgcggcggtaactaccgcattatactaccctcagcatttcctcactgtaggcgactttaaactttcaacgctgatcacgccgctcatccagatcatcatgttcggaatgggtacttccatgagtttcggggattttgtaggggnnnnnnnnnnnnnnnnnnnnnnnnnnnnnggcgtggtgagccactttatcatcatgccaacgatcggttatacactcgcgaacatcagcggctttccgcccgaaatcgcggcaggaattatcctcatcggctgctcaccgaatggcatggcgtccaatgtgatctcttacctggcgaaggcaaacctggcattgtccattaccattaccgccatttccaccatgctcgccccgatcgtaactccagtactcatgagcatgcttgcgggcgcattcctaaaaatcgacacgctgcacatgatgtaggatattatcaaaatggtgattattccaatcggcgctgggttgatcttcaataagctattcagcgggaaa

SEQ ID NO: 167700 - DNA, 308 bp, Arabidopsis thaliana landsberg; identical to SEQ ID NO: 70902

SEQ ID NO: 167701 - DNA, 1299 bp, Arabidopsis thaliana landsberg
aacggatttacatttatagtagaaaaattacgggtgtacttttttgcggaaaaattacgggcttacgttttttgcgtaaaaattacgggtttacgttttttttgcgggaaaattatgggtttacttttttggcaggaaaattacggatttacgtgttttggcgggaaaattacaggtttactttttgggacaaaaattaagagtttatgtttttaacagaaaaattacgactttatgaaaatgttattatcatgatgatagctattatgactatgatatatttatatgatgatgatgatggtgatagtagtatgatattatgagagggttataatgattaagggtctggctgatttaaacacatcgtttgcggttatgaatgcatgagtttacggaagcggacggttgcgatttcaagcttaatgaaacattttgaaccactggtttaatggttaaaagttaaagcgtttgcaagagttttatgactggttaaccaacacgtggtattacggttaaataaaaaataactcaaaaatataatatataattatacaaagtataaaaataccaaaacaatattatactattatgataaattatgaaattgaaatataacttataataaaataaaattcttcctaattattcaaactaattaaattttatactcaaatatgcatttagttcataaaaacaaattatcaagtaatatgcaaattacaaacaaaaaaaaaaagaatatgacaaactaaaaaaaatattttcaatttttggatcttccggattaataatattactacaatacagtatcttatcatttttcagtttggtttgatgctatggttttgatagagaaaaacctagcgttttcacgataaaaatcaccaacatatttggaagttttggagaagaagcttacgctgaaaaatattacagatgacattgttgatgtattgtgtaaacaagcaaaaaattattacaactaagatgtcatttttgttctttaaggcctaatgaaatttatctctaaggtacggttactctcaaatctccaatgatcaattcgatttttgtccctattttttttgttcttcaatgtgcatctattctctattttttggttcaaaagcttatttccaaactgaatgaagtcttagccgaaggaaacatcgaggaagaagatcaatggaagaagaatcttaaagaagagacattaaagattttgagtttcttcctcaaaatattcaggatcttatcagatttactaagcgtaattgtgatcttaatcaataacgaata

SEQ ID NO: 167702 - DNA, 1151 bp, Arabidopsis thaliana landsberg
cattttgattctgtctgacagattagcccggagctatccggagacactaacccaagattcttcacctattggacggtatacatttccatccaacttcaaaacttgcactatcttttgactaaaacctttttgtttttctgtttttcaagagtttattgatgaaaagctactattttgtgttgttgcagtcggatgcttaccaagcaacaggatgctataacctactatgttctggttttgttcaaacaaacaatcgaatcgcaattggagcggcaatttcgcccatttcatcgtataaaggtggacaattcgatataagcttattgatatggaaggtatatttccttatcagtatatcaaaactattttacatatcataatatgcattggtataattgagatttctctattttataatcacaattaagtttaaattcatactaaatattatttcattccttgtatatttagattctgattgcattggtagggcgtaaataaggcctttaactcgagttttgagtactcaagtgtctaccaaataattattgcacgtcatattttatttaatagaattgtctcctaacaatttaaacccaattaatttagcactaatttagtgtctcccgtgtaaggcttatccatcatattcatatgacttacacggtcaatacagctcactcaacttttatatgtgtttatatgaatttcatctttgataatgtagaattattccaatacgtaacacaacaaactaatcaaaatcccacgtgtaggacccaaagcatggacattggtggctccaattcgggtcgggtacactagtcggatattggcccgtatctctgttcacacacctgagggagcatggaaacatggtccagtttggtggcgagatcgtgaacacacgacctggtggttcacatacttcgactcaaatgggcagtggccattttgccggtgaaggttttggaaaagcgtcttactttaggaatcttcaaatggtagattgggacaatactcttattccgatatctaatcttaaagttcttgcagatcatccgaattgttatgatataagaggaggagtaaaccgtgtttggggtaactttttttattacggaggaccgggtaaaaactcaaaatgtcca

SEQ ID NO: 167703 - DNA, 574 bp, Arabidopsis thaliana landsberg
  unsure (1)..(574): unsure at all n locations
cggggcaattatcgcaccctttcttgttgcctggttagctatcagttatggctggcatgccgcttttattgtgatggggattgtgggtctccttattgccatcgcctggaaactggtatacagagatccacggcttancatccaaaaagaagcattgcaaactacagtagcggatgaaacaacaggctttacgtggaaccaattatggaagagaaaaagcttatgggctattattgcaatacggtttgttagcgaccctgtatggtatttttgcttgttttggctgcccggatatttgcaggaagagtctggcctatcccttgctcagatagggatgttcggctggattccatttttaattgccgatttaggtgcggtaggcgtttccgttttgtccgacaaattggtaaggaaaggccatgcccctttgcgcgccagaaagaagatgttgttgcgaatcacatttttaacttccctgtgtgctattaccccctatctaaatagagccgcagctaccatagcggttttcagtatcgttgcgttagtatgtgtgagttggctatatcgagctagc

SEQ ID NO: 167704 - DNA, 501 bp, Arabidopsis thaliana landsberg
aatgtagacacagacttcaaatgtttcaatcgggacatcaggacctcgggagttcagcaatagatgatcatacagtcatctttctggaggtaaagtttacattttcacttgcatattgtctgcattttctcaaactctttattaatggtatggctatttttttcataggccacagagacaaattcaagagggaactattatgcagttggaagcctcaaagataatcttccggatctagtcactggaaagggcaaacatgcagcagactctacctcctttgtgtcattgcaagagcaactgaaagaagctcaacagaagatcgaagagcaggctgctcatcatgctagacgtgaggcagagcaagtccgagctgtggctgaacagaaagacaagctggatcacttggccttggtggaaaagtatttgcgccaaactgatccagactttctcacctttatggctactcattcatctgaagcaaccacaaccgatcctatctaa

SEQ ID NO: 167705 - DNA, 426 bp, Arabidopsis thaliana landsberg
gaggaccccgacgcgttgttgaacgtcaatgtccgcgcgccggtgctttcggcccatttggcgatcccgcacctgaaggggggcgggggcatcgtctcgatcggctcgtgcctggccgaacgcgtgcccttcgccggaccgacggtctattcgatgaccaagtcggcgctgctggccttcacgcgcggtctctcgcgcgagctcggggcgcgggacatcaccgtcaacctggtgcagccgggggcagtcgacaccgacatgaacccggccgatggcgaacactccgatggcctgcgggcgatgacggcgctcgggcgctatggcgaaacccgcgacatcgctgaggcggtggcgttcctcgccagtcccgccgcgaagtaccttaccggatcgatcgttacggtggatggcggcttcaacgcctga

SEQ ID NO: 167706 - DNA, 842 bp, Arabidopsis thaliana landsberg
aaggagtcggacctattccaaagctcgtctccctgattgtaacggtcttggtcctcacatccacttctctaggccaaagtcttatcaagaaatccaagacgaattggttagtgtttctgttacctctttcaattaccctcacatgtatgtttttgagattttgatatgtgtttaattggttacattgcaggaagagaaattgggaagagcagtcagtcttggtgaggtgttcatccagacacatactaagtcggatggtacttatgttgatcggaaggcggagaagattgctctaatttatgagcaaaatgtgaaagataggttgtccgaactagaggcagctgcttctgctgtctctgatggcttttcacgatctcgggatctcacaatagaggagtatacagtcatctctctcgaggtaagatgttgcagtctaagtcctagtctttgagtttatatattctatcactaatatcttcttctctatttcttttcagtccatagaaagtgattcaagaggcaatcattatggacttggaagtctgaaagacactttaggcagtgccaaccgcaagcaccctggagactcacccatcctttcaagctgtagaacggctgcaggaagcgcaatgcaaaattgaagagcaggctgcatataatgagaagcgagatgctgagattgctgctcgtgaagctgagtaagcccgagttgcggctgagcaaaaggactagctcgagcacttgtctttagtcgagagatatctgcgagaaacagatccgcaattcctaaacttcatgaccactcactcttctacatcgacaaagcctctagcagagactcc

SEQ ID NO: 167707 - DNA, 530 bp, Arabidopsis thaliana landsberg; identical to SEQ ID NO: 42946

SEQ ID NO: 167708 - DNA, 1419 bp, Arabidopsis thaliana landsberg
ttagtgatccccaccacaaactccatcattgacgcagctaactccggcacaactccctctataatccaacggtccaaatactctttcacttttctccaaataaagttatatttctaatcacatttctatttctagattagaagacaattgagaaaacgactacaagttcacacttttttattgaatccaacggtccaaagattctttcacaaatactttgaatttacttgaatcaattaatctcacttgctataatgataagatattcacctccctcttataagataacaaaattagattttataaaaagtgcttaaactataaataaagacaaaactagtaactgagaaggcaacggacacttgtagcttttattcaactttaattattccctacatgagaaaaagaccgttgcgataatataaagtcttcgttcacacacagtctcgaagaaaacaacaacagttttgatcactctgtctctcttactctatcttcttcccaagttcttgtcttttgatggccgaaaccctagaaccctccctcgtcggggaaatcgacacttctgcgcctttcgagtccgtgagagaagccgccactcgctttggtggatttggtttctggaaaccttcttcccttaacatctccgaagcttctcaggtcttatttctctccttctccctcaaagtctctgtctttctcactgatttttgtccatttctttgcttttggggttttagttgaaatgggtttttagattcatcaatttctagatagatcttgtctttagttgtttcttgtgattatgatgcgaaatttcgaatctttggttgcagaacgaagttggtatggttttgaaagcgagtgagttagagaaggaactgattgagaaagaaggagaaactttgaaggtgttgaagtcacttgagtcgaccaaagccattgttgaagagctcaaatcaaagatacagaacaaggaggataaagaaaattgtgacatgaatgttttcaaggaattgaaccaagcaaagatgaatctgtgcaagacgacaaaagatttggctgctattcgcgtgtctgttgggttactaaacaagagattggaagaggaaagagctgcacttgagaagacacgagagagactaaactctgagaatgcagctgaaatgtccatggagattcagagactaagttatgaagctaaggaatttagtagaacaggagagaatgttcggtatgcggttaataaagctgtggctgagattgaacaaacgagaaacaagattgaagctgctgagatgcgtttgatcgctgctagaaagatgaaggaagctgctagagcggctgaagcagttccaatcgctgaaatcaagccggttacaagcagaggaagaaggagaagaagagaaggaaatggtg

SEQ ID NO: 167709 - DNA, 1669 bp, Arabidopsis thaliana landsberg
ggaagggaggtgacgggtgaagatgggtataggagaggatcagatgcaaggatcgagtggtagggaagagaagatttttgtttctgttcgtctgaggccattaaatgtgagagaaagggcaaggaatgatgtggcagattgggagtgtatcaatgatgaaacggtcatatacaggagtcatctctctatatcagagcgttccatgtaccccactgcatacacatttggtaagacttgctcacttttgaaacttcttgatcaaagttaatccttaaatttatcttgctgagctttcctatgcctctagacagagtgtttggccctgagtgttctaccagggaggtgtatgatcaaggcgcgaaggaagtggctctctctgatgtcagtggggttcatgggaaggcatgtctcctactgcttttaatttttttttcctctgtggctcatgttttaaacaattttcatctgttttcagctagggtcttggcatatgggcaaacaagcagtggaaagccatacactatgattggttttacggattatgcctgggctgatatatatgattactttgagaaggtaaagttaacaatatcagagtcttcatagtaatcttaccgcattatttccaattcattcagtaactgtcgccttttaaaaaaattatttgttttttgcagcacaatgaaagagaattcattctgaagttctcagccatggagatctataatgagtctgtaagagacctcttgagtacagacattagtccactcagagttctagatgatcctgaggtaaaagttggggctggcatcttatggaattggtatgcataatctcactttactggtcatttactttgggacagaaaggaacagttgtcgagaaactcacggaggaaactctgcgggactggaatcattttaaggagcttttatcaatctgtataggtacttattttcctaacatgtactcaattaatacttttagtgttttggtcacaagtttcactaagtatcatcccatcattgcagctcaacggcaaattggagagacagctttaaatgaagttagttcccgctctcatcagattctgagattggtaaggcattctgctgatttagtttaatgatacgacactgcagtcttcaggctgcgttttctacttatttctgactgatatgtttaacagacagttgaaagcacagcacgtgaaatatttggcgaaggataaatttagtacactcacagcgacagtggtatatacttttaaatcttccattgtgtactatcctaaaacaaaacatgaaatatattcatagattaactaattatcctgcagaatttcattgatcttgctggaagtgaacgtgcatctcaatcattatcagctggcacaaggttgaaagaaggtggtcatataaaccgaagtttactaacactaggaactgtcattcgaaagctaaggttagcctgtgacctatagcgtcaatgaaattctgtgatctgtgccaccttaggctgctctttattctttccctatattcaaagatggttaagcagctaatcattgtctttgagagttgagttccaagctgaaacataggactttcgcccagtaacgccagtttaccaagttattagcagattgctgttattaacatctaagtgt

SEQ ID NO: 167710 - DNA, 448 bp, Arabidopsis thaliana landsberg; identical to SEQ ID NO: 76125

SEQ ID NO: 167711 - DNA, 1719 bp, Arabidopsis thaliana landsberg; identical to SEQ ID NO: 65740
  unsure (1)..(1719): unsure at all n locations

SEQ ID NO: 167712 - DNA, 1313 bp, Arabidopsis thaliana landsberg
ctaaccaagcttcttcttgcttctcaaagctttgatggtgttgcccaagtccgtatgagtggacttttctgtttggtggactttctagctgaatctgatgatgacatatcaactatagtctctgctgctgtaacagattgttcttgtttctcgtcctctgtgacaagaaagctccctctggtctttgatttggttcttggaatctttcccatagccttgcctgaacccatttgtggtctacaacgtcttctctttcctgtatttttccaacttctaccagatttcatctcaggcagagaacttaaactccttttcttcggatacttttgattatggtcagattcagggatgtacgaggaagtactcagtgaatggttatcatcctcatcaacaccaaagttcgagtcaagatttgagcctttccgggacttgctgcgaggagattttccacagtggcggattttgctccacgatttgctttcttccttggacgagagtaacgtttgtggaagagtgatatggttttcgaagatggaagagcttgaactattgatcgtgatggttctgatccatgttttctgtgaaatggagtaggggtttcaacttgcccgcatctcatgtgattcacacggccggaccagtttacaatgccgagaagaatcataagaaactactggaaagtgcttacaagtaagcaagaaaacatatttctgtatagagtcaaatgttaaagtgttttagacaaccaaatcttttgcgatctgattggatcttcatgtttcttgctggtggatatgaagagtgaggaaagtacatgacattctctagtctctcatatatacctctctctgtgcattgtaatagttaatcagatcctgattttgtgtgttttggtttttcagcaaggagcaaacagaccattgtggtttgcatcctctcagagtctcacttacttacatggcaggtaatctttaaaacaagttttggatctttgattgctttacgaacttaatgatgttcagtagtgaagatgttgtgattcttgcagcttacctggagactatggattcgacccacttggtctttcagacccagaaggtactggaggattcattgagccgagatggctagcatacggagagatcatcaacggacggttcgccatgttgggtgcagctggagctattgctccagagattctaggaaaggccggtcttattccagcagagactgctcttccttggttccaaacctggtgtgattccacctacagggacatacagctactgggggatcctctagagtcgacctgc

SEQ ID NO: 167713 - DNA, 298 bp, Arabidopsis thaliana landsberg
aagatcgcgaggtatgtactaatgatgtttttggttcagtctatttcgccatccttcttaacatgttgatttttatgcaggttctgatttgtaggttacttttctttgccttcctgcagcctcctacatcaccggacagcaagagctaaaagcatgcttaaatgattggaaatccaatggttcagtggtgtctggtttggttacagatcagagggagaagttgattcagtaagtgtcttccacgttcagtggcaagctcaacattcttgtaagttcccttctcctgcaaaatgcttgt

SEQ ID NO: 167714 - DNA, 465 bp, Arabidopsis thaliana landsberg
acccgccgttccttctgttgccgacctgaatgccgccgccggcggcgttgccacgctggaccgcgcgctggccgtgctggccgtgttctcgggcgaattgccccaccccacgctggccgacatcgcggcgcgcacgcgcatccacaaaagtacggtgctgcgcatgctgtcgtcgctggaacatgcgcatttcgtggccaagctgcccgacggccgctatgccctggggccggaaatcgcgcggctgcacctggtgtatgccgactcgttctcgctcgagcccctggtgatgcccgtgctgcgcgacctggtggtgcaaacacaggaaagcgccgcgttctatattcgcgagggcggcaagcgcctgtgcctgcaccgcgtcgatttgccgcgccccgtgcgcgaccacatacgggtcggcgacctgctgccgctggaacacggcgccggcggccggtcatgctg

SEQ ID NO: 167715 - DNA, 1448 bp, Arabidopsis thaliana landsberg
tgttcagattctgtattgtgggactaaatttgtgagcagtggagaaactgaatggatcaaaacagtccctgagcttcttaagagcaattgttctgctaaagcagatgattcaaagtttaactatgggatatacggtcaggctatatcttcaggcattgtatcatcaacaacatttttctccaagttctgttattgtctatggtggggtcttcaaaatctcaggtaaggcgggggcaactcattgtcattggttcaaccgatagcttgtgcagagtactcttgacatctttggtgttttcatgaacagcacgttaggtcaagggctgcagacaagtacatttccaggagaggttttgttttccattgcgattgctatagctgggcttcttcttttcgcgcttctcatcgggaatatgcagacttatcttcagtcacttactgttcgtctcgaggaaatgaggatcaaaagacgtgactcagaacagtggatgcatcacaggtcacttccacaaaatttgagggaaagagtcagacgctatgatcaatacaaatggttagagacaagaggtgtagacgaagaaaacatagttcagagtttacctaaggatctcagaagagacatcaaacgccatctctgtctgaatttagttaggagggtaagttttcacaatcagaatgctaaaattgcttgagatactaactaactatgtgttttgtttctacaggttcctctgtttgctaatatggatgaaagattacttgacgcaatctgtgagagattaaagccgagtctttacacggaaagcacttacattgtgcgtgaaggagaccccgttaacgaaatgatgttcataatccgaggccggttagaaagtgtaacaacagatgggggaagaagcggtttcttcaacagagggttgttaaaagaaggagacttttgtggtgaagagcttctgacatgggctcttgaccctaaagcaggctcaaacttaccttcttccacaagaacagtgaaggctctgactgaagtagaggctttcgctcttgaagctgaagagctgaagtttgtagcaagtcagtttaggagacttcatagtcgacaggttcaacaaacatttaggttttactctcagcaatggagaacttgggcttcttgcttcatccaagctgcttggcgtcgctattcaagaaggaaaaacgctgaattgagacggattgaagaaaaagaagaagaattgggttatgaagatgaatatgatgatgagagtgacaagaggcctatggttatcacaagaagtgagtcttcttctagactgcgttcaacgatatttgcatcaagatttgctgctaatgcattgaaagggcacagacttaggagctcagagagttcaaagaccttgatttatctgcaaaagcctccggaacgggattttggtgctgaataatcc

SEQ ID NO: 167716 - DNA, 624 bp, Arabidopsis thaliana landsberg
gattgagagccttactgtgatagtgattatggaaattgcatagactcacgaagatccattggaggttactgtaccttccttggtacaaatatcatctcatggtcctcacaaaagcaagattcagtctccaaaagctcaaccgaagctgaatatcgaactctgtctgacattgcctcggaggtaacctggttaggatcttttctcaaggaattgggcattcctctacttgacactccagaaatctattgtgacaatctctcctccgtgtatctctctacgaatccagctttccacaaaagaagtaaacactttcagctacactatcattatgttcgagagagagtagcacttggagctctaattgtgaagcacatacctggtcatcaacagatcgcggacatcttcaccaaatctctccccatcaagccgttctgcgatcttcgttacaaactaggcgtcgatgttccacctacgccgagtttgcgggggggggggctattagagagaatgcatcttgtgttgagacaacagttcggattggtgaagagaagaaccagatcagagctgtgatcgaacacgaagctgaggaagctgtaaaggtaaactcttcagatgacattatca

SEQ ID NO: 167717 - DNA, 575 bp, Arabidopsis thaliana landsberg
aaatttggtttataagttccgttctcggcgcggtgcatcgcttaaaaaaaataggaaggcgataacgtatttaccaaacaatctcgtatgatctatacatttatttcctggccttcaaaaataaaatcgttcgtcaagacctttctcttcaggaagatcactacctgtggaagcaatgtttctttcggcaacgatgcgcgtgttgtcaatatcagccgaaaaaaaaatgcgatacggatagacagtaacagtttcatccgtggcgagttgctcgtggtgtcctacgggggcgagatccacattggttcatattcttttgtgggcgaaggatcaaggatctggtcgggcgaacgtgttcaggtaggcagcaatgtgctgatcagtcataatgtgagcgttatcgattttgcacacgaaccggtttctacagatagggccgaaggataccagaacctaatcgcacacggacatccgaaggagaagggcaatatccccacacgcagaatcgagatcggtgacaatgtgatcgtatatgccggcgccacactggtaatgggcgtcactatcggcaaagg

SEQ ID NO: 167718 - DNA, 1224 bp, Arabidopsis thaliana landsberg
gaaaaaccaacggctgtgtccttcaatccaggtaaagaatctcgtatttcttccaggaaaattcaaaagaaaaaagtttcagcaattaaaatgattatcatttagaaagaaaaaaattcatgtgttttctaaaaagattttgttatcgtttgagaaattttatgaagtaacctattgaggaaaaaaaacatcctcataggattgaataagataacgaatgtggaagaattttgaatttatttgcagagtttggagataaataatgtccaaatctcaattggaatcacttgggtcatctcttttacaagaacttgaggtttgtgacgattgtttcaactccaagaaaacgcttttttttttcaattacaaaaaggcatttccattttgatgtggattctgttttctgatgcagattatatggaaagaggttggagaaactgaaacagaaagggagaagattttgattgagatcgaagaagaatgcagagaagtctacaatcgaaaaatcgaaaaggttaaagaagaaaagattcggataaaacaagagattgctgattctgaagcaagagttattgatatatgttctgtaatggaagagccaccaattcttggaagacaccatcaatctgatcaacaaagtggtaatgggagaagcttgaaagatgagttagtaaagattcttcagaaacttgaagaaatggaaaagagaaaatcagagaggaagattcagtttattcaagtaattgatgatataagatgtgtaagagaagagattaatggagaatctgatgatgagacttgttcatctgatttttctgctgatgaatctgatttatctcttagaaagcttgaagagttacatagagagctttacacacttcaagaacaaaaggttttttctaaactttaccttaaatttgatttcatttcttgatcaaaaagttaactaatactttactgtttattttggctcagaggaaccgggtgaaacagattcaagataatataagaactcttgaatcgctttgttcggttcttggtttgaattttcgagaaactgttaccaagattcacccaagtttagtagatactgaagggtcaagaagtataagtaatgaaacacttgacaagttagcttcatcagtacaacaatggcatgagacaaagattcaaagaatgcaagaagtgagttagaatgtttttaaacattttaccatcttaaaa

SEQ ID NO: 167719 - DNA, 949 bp, Arabidopsis thaliana landsberg
atgacgattgacggatatgaagtggtgaagattcacccacttgatctcatggatcattctcataatctcatctacactatagatatgctttcaatgacaataaaaatccggcattttacaagtaccgtagattatagttttgattcccaattgaaattccttatactatatttcttaaagtttttatttttttcccctaatattttcctatatgaaagtatcttagataaatatatatacaaacttctctatataaagaagttcaatgaatctctcatctcactcaatccaaactcaatccacaacgctacacattaaaaaataaaaaaaacctatggcaaccatttccttctctcacaaccaccaatcctccgacaaccgccgtgtggatcccatcaccaccgtcacggccccgtcgtggaagagatcgaaggactcatcaaagttttcaacgacggctgcgtcgaaagacctcccatagttcccatcgtctcaccaaccattcacccatcttctaaagccacagcctttgacatcaaactatccaacgacacatggacacgtgtctacatccccgatgccgcagcagcctcgccgtccgttactctccctctcctcgtgtacttccacggcggtggtttctgcgttggctccgccgcttggagttgctaccatgacttcttgaccagccttgccgttaaagcccgttgcgtcatcgtttccgtaaactaccgtttagcccctgaacaccgtctcccggcggcgtacgacgacggcgttaacgtcgtctcgtggctaatcaagcaacacatatctaccggtggtggatatccttcttgggtgagtaaatgtaacctctcaaacgttttcttggccggagatagcgccggagccaacatagcttaccaagtcgccgtaagaatcatggccagtgggaaatacgcaaaca

SEQ ID NO: 167720 - DNA, 1575 bp, Arabidopsis thaliana landsberg
  unsure (1)..(1575): unsure at all n locations
atctgaatggagccatacctgataacattcaaaatctggaggatttgatagaacttcagctgggacaaaaccagctacgagggaggatcccagtaatgccacgaaagttgcaaatttccttaaatctcagctacaacttgtttgaaggatctatccctactacattgtctgaacttgaccgcttggaagttcttgatctgtcaaataacaacttctccggcgaaatacctaatttcctgagcagattaatgtcccttacacagctcatactctccaacaatcagcttaccggaaatattccaaggttcacccataatgtttcagtcgatgtcagaggaaaccctggggttaagttgaaaactgagaacgaagtctctatccagagaaatccatcagggaaaagcaaactagttatgattgaaatatttgtctcccttggagttcttgctctgcttacagggatcataactgtcaccgtgctgaaattttcaaggcgctgcaaggggattaacannnnnnnnnnnnnnnnnnnngaagaagggtcaactgttctccctgaggtaattcatggaaagcttctcacttcaaacgctctacatagatcaaacatcaacttcgccaaagctgtggaagctgttgcgcatccagaacatggtctgcatcagacaatgttctggagttactacagagttgtcatgccctctggttcgagttacttcatcaaaaaacttaacacaagagacagggttttccagcaagcgagtagtgagcaactagaggtagagctagagatgttgggcaagctacatcacacaaacgtaatggttccactagcttatgtcctctattcagaaggatgcttactcatctatgacttttctcacacatgtacactttacgagattctacacaaccatagcagtggtgtggttgattggacaagcaggtatagtattgcggttggcatagctcagggaatctcttacttgcatggatccgaatccagcggtcgtgatccaatccttctaccagatctgtctagtaaaaaaatactactcaagtcgctcactgagcctctagtaggggacattgaactgttcaaggtaatcgatccttccaaaagcaacagcagcctctcagcagttgcaggcaccatcggctacattccaccaggtgaacacattatacaaaacttatatgggcttgtctgagaaacaacagctctcttaatctttcacttttgatcacttcatcagagtatgcttacacgatgagggtgacaatggctgggaacgtctacagctttggggtgattcttttagagttgataactggaaggccagctgtaagtgaaggaagacatttggctaagtgggtgcagagccattcgagccatcaagagcagcagaacaacattcttgatctcagagtgagcaaaacatctactgtagcaacaaagcagatgctccgtgccctcggtgttgctcttgcctgcataaacatctctcctggggcaagaccaaagatgaagactgttctacggatgctcacaagactctaattaaaagtgtcaga

SEQ ID NO: 167721 - DNA, 424 bp, Arabidopsis thaliana landsberg
atgcgcccaagtgccctcttcagcgtcgcttttgcgacctcggtgctcgcccacggcggtgccaattctcagaagccagtggtggctgcaaatgcagactggatgacgaggcacatggcgggtatgctactatttattccatacgcttagaggaacccaaactaacatgctacagaggagcatcacgtacagggttgggaccctgactccttcttcaccctccacgactacaacagcgacggctggtggcaagccgccgagctcatgcgcacatacggtctctttgacgactcgaacaagggcatggagcaaaaacagaaagatgaggtcctcgacatccttatgggccccctccccaccgatgccgacttctcggtcagacagcaaagagtggatggactatgtcggcgccggaaagacgctg

SEQ ID NO: 167722 - DNA, 1502 bp, Arabidopsis thaliana landsberg; identical to SEQ ID NO: 27402

SEQ ID NO: 167723 - DNA, 1095 bp, Arabidopsis thaliana landsberg
tacgcgttccttgttttttttcttttctgtgtttcaggtgtatgcctaggctcgcaagaagcactaaatagatggaccacatcaacttatttgtgcttgatttgggaatactagaacgcactaaccgcaaaactcacaaaatagcaatgcctgacagagtcattatagctgatgagcaaggagttttgagggatgaagatgggcaatcctacaatttggctggtcagagattggatgatcatggactcatccaccctgaagacgtcaatgaagaacaagcgcgcctcatcgcgtaggtggctgctagaaacattgtagggctcggtgtcgagcgaaaccaactgggtgtcgatcgacaaccacgggatcagatcgaagaagagttcggtgtcgagcgacaccacctaggtgtcgatcaacaccacgtgggtgtcgatcaacaccaatcacagatcctaccgcacctaatccaccagctgttgaaccatgtcgtactcttagggattttaacaggccagacctgttctatgccaacgagttagcgatcgtacccccaccctttaagatgaacgactattagctgaagcctggctacttcgcactagtaggccagcaccctttccaaggcttatctcacgaacagctaatggaccacatcgagcgttttgaagaccttgttctgagcattaaggctaatggaaaatctctgaggacgacttactatgcaagcttttcccctagtcacttgttggggaagatacttcttggttgaagcaattgaaggctggttcacttaaaacttggaggagcatcaagatagccttccttaacagctcctatgatgatgcgaagtctgaggagctgtgaaacaagctgtctaccttcactcaaggtcggacagaagctttcaaagcagcttaggttcgcttcaaggaatatcaacaggactgcccgcatcatggcttcattgacgtacaacttctcagtaccttcttaagatgagttgattagagatatcagatggctcttgatttcagcgagcaatgggaacttcaacacacgctaccggacatatgatacaactttgattgagaa

SEQ ID NO: 167724 - DNA, 816 bp, Arabidopsis thaliana landsberg
tgggtcatccttaattaatgcttagtcacaaaatgtgtgtgcctagtcgtttctgaagttaaagcaacctcctattcgtgctccttatcagttaatccacaaccaccagcagatagctaattccagaagtaatagcggtgtgaaccttaagtttgatggatctggtagtagttgatatactcagagtgtatcaaaaggatcaagatcatttgtgtcatctctaagcatgaatgctagtgtaacagactacgataggaactcgttccatttgaccggattgtcccgtgggtctgaccaacagcatacccggaagatgtgctctggtagtttgaaatgcggaagtcgaagcaaatgtcactgttccaagaaaaggtttgtcattgttctttgtgacaatcttgacccataaattgtttttttttgtatctctttgtaaaggtttgatcttatacaggaaactgagggtaaaacgatcaatcaaggtgcctgcaatcagtaacaagattgcggacattcctccagatgagtattcttggaggaagtatggacagaaaccgataaagggttcaccgcatccacggtatatatataaacatcttctggtagaagatttctttaactttatgtcgattttgatataagtttccttttgttgttttcggttgcaggggatactataaatgcagcagtgtgagaggttgtccagcaaggaagcatgtggagcgatgtattgatgaaacttcaatgttaattgtaacttacgaaggcgagcataaccattcaagaatattgtcttcacaatcagctcacacttga

SEQ ID NO: 167725 - DNA, 983 bp, Arabidopsis thaliana landsberg; identical to SEQ ID NO: 15287

SEQ ID NO: 167726 - DNA, 2361 bp, Arabidopsis thaliana landsberg
tggttgtctcgatttacttgggaaatacaggtcttgctgatttgattcaaatcatatacactatgctcatgtgcttgaagaagtatatttattgaaaattatttgtaaaatttgattaatgttgattgcagtggtgagaattgtgatgtcatgactgcagaaaagattcttgacgaggatcattatggcttatctaatgtgaaagaaagaataatagaacacattgctgttgaaaaacttagaggcactccacaaggtcgtatttttgcctttctagttcaatcttctgtgctaaaactttttgtcctcatcattttataatttctgaaggtgaaaatttgtcaacagggaagatcatttgtctctctggcccacctggagtaggtaaaactagcattgggcgttcaattgcacgtgctcttgaccgcaagttcttccggttctctgttggaggactatccgatgttgctgagattaaggtatacacatgacaaaactatgattgaaatctgtagaaataataacatatcatcttatacattgtttaggggcatcgtcgaacgtatattggtgccatgcctggaaagatggtgcagtgtctaaagaatgtgggaacagaaaatcctcttgttctgatcgatgagattgataaggtagctagcttgttagtatttgaattggctttttggagtttgtagtcaaaatgaattagtttcgtttctttgttaaagcttgaaattctttgcaataagtgtctatggttccttggcagcttggagttaggggccaccatggcgacccagccagtgcaatgttggagcttttggatccagagcagaatgcaaattttctagaccactatctcgatgttcctattgacttatccaaggttttcattgccattttttcttctctttacatttttcatttgcaattttctttctttgtgatccaccaaattgaaggaaaaccggaagccattgatccgatctgagtattggtttcataataggaagtttgtgttggaacttaggtctaattaaatttcttgcaggttttatttgtatgcacagcaaacgtgacagataccattccgggtcctctgctagacagaatggaggtgatcactctctcagggtacattactgatgagaaaatgcatatcgctagagactatttggagaaaaccgcacgcagagattgtggcattaagcctgaacatgttgatttgagtgaagcagcttttctttccttgattagaaaattatggtaaaaaaccagaagtaaaaattctccaaagcagatttgagaagatttaccgtaaggtaagttgctacaaagtcgcaatgtcgcatgtttcttgaatctcaaactatttactagaatcagcagaatctaaaatcatttgacctttttggcaggttgctcttgaactagtacgccaaggagcagtttcttttgatgttactgacactaaagatactaaatctttggccaagcccgattcagaggttaagagaatgaaagtgaaaaatattatgaagatactcgaatcagcaactggggactcaacagaatcaaagactaagcagagcggattggtagctaaaacctttaaaaggttatgattgatgaatcaaaccttgcagattacgtaggcaaaccagtattccaggaagagaagatctatgaacagacacctgtcggggttgtgatgggtctagcttggacatccatgggtggctcaacgttgtacatcgagacaacctttgtagaagaaggagagggaaaaggtggtcttcatataacgggtcagcttggggatgtgatgaaagaaagcgcacagattgctcacacagtcgctagaagaataatgtttgagaaagaaccggagaacctcttttttgcgaattccaagcttcatttacatgttcctgaaggagccacaccaaaagatggcccaagtgcaggctgcaccatgatcacttcgttcctatcacttgccatgaagaagcttgtaaggaaggatcttgcaatgactggagaagtcactctaactggtagaattcttccaattggtggcgtaagtaacacactacaatgactctgttttagctttcgggttactgatttcttctattgacttcattttaatacacaaaatatctctctctctctcaggttaaggagaagactatagctgcaagacggagtcagatcaagacaataatattcccggaagcaaatcggagagactttgaggagcttgcggaaaacatgaaagaagggcttgatgttcacttcgtggctgaatatgagaagatattcgatctagcattcaattatgaccattagaagaaa

SEQ ID NO: 167727 - DNA, 3248 bp, Arabidopsis thaliana landsberg
ggagaaaaagtcagctcctttgtggtcattctgagacaaatgggatttggagtaggtggtggaggtggtagaatgttggatttgaggattgtccaaaatcacaagcgttcaaataggtaaaatgtccacttcttaacaactacttcttaacttgtagaaatgtgtctctcttttctgttaatggattcccttgctgccatgggtttggtagaaactggaattttgagagttatggttgcaaagttattcagatcttctgttgttacagttttttgtggtcctgaacaagataatgagtctgttataacttttaaatattgctagtgtaatgggtgaagaactaacgatttaaaattttgtctgatacacattggatttaagagtgattctttctttgcaaatgctctctctgaacagtgccagctttccagaaaagaaaagagttgaaggagataaaacctcaaatagttctcatgaagcctctcaacgaatgaagctggtgagtactatcatctctttttgcttttttacttgttaaagttgagataaagtgtattggtatttgttaaagaacagcctaagacgctgagacatgattctcttgccttcttggatttatctttctgttttttttactaattagtatctttttttccccaagctgcttttttatttgcattttttttgtgaaaagccttttacacatatgtttcgctatacatctttgtatgcttcttatttgtcttacatttttttaaaagaatttcctttctggtatcacattattagaaactaatctctcttataaatgaaatgaagtgagtccaaagctgtttctattttcttactaaacctcttgtgagacagattatttgtttacggattttttctgacttggtttaggacatgggacgttcaaatgaatcaaagcataatcaatatcattcaaacacggagacttcattgaagcaagaggtatgtgtactgttcgttggttaggctcaataatctgacttgtttggttggttaggctcaataatcttgtcctgtgattggaatcacagattactcacctcgagacaagattacaagatcagtttaaggttcgttgtgcattagagaaagccttaggttatcgaacagcatcttcttacgtactgactgaaacaaacgacattgccatgcctaaggtcagttacttacatttcccaaaactgagttgtttagaaatgagctttgtgcattataaggaattgccatcttggttttgatttcatcttcagccagctactgatttaatcaaagacgttgcggtgctcgaaatggaagttatacatttggaacagtatcttctttcattatacagaaaagcctttgagcagcaaatctcttctgtatctccaaatttagagaacaagaagccaaaatctcctcctgttacaacccctagaaggcgtctagacttttctgaagatgatgataccccctcgaaaacagatcaacacacagttcctctgcttgatgataatcaaaatcaatcaaagaaaacagagattcctgcggttgaccgagaccagatggaccccagttttcgccgtagtcactctcaacgttcggcatttgggagtagaaaagcttctcccgaagattcttggggtaaagccagccgctcttgtcactcacaaccactgtatgtgcagaatggagataacctaatcagtctagctgaacatcttggcacccgaatctcggatcatgttccagaaacacccaacaagttatctgaaggaatggtcaagtgcatgtcagaaatatactgcaagcttgcagagccaccttctgtgctacatcgtgggctttcatctccaaactcgtctttatcatcaagtgcattttcgccctctgaccaatacgatacatcgagccctggattcggaaacagctcctcttttgatgttcggctagataactctttccatgtagaaggagaaaaggacttcagtggaccttacagcagcattgttgaagtgctttgcatttacagagacgccaaaaaggccagtgaggtggaagatcttctgcaaaacttcaagtgagtcgccttgagactaaagctcgtccttttagacatttgagttgttacatatgagggtggaatttgataggaagtgaattgggatataatgatgcataatcttgaaatttaaaactcttgcaggtcacttattagtagattggaggaagtcgatccaaggaagttgaaacatgaagagaagctagcgttttggataaatgtgcacaatgcacttgtgatgcatgtaaaacctctttctttcaagaacttatctcagtttttctatacgcctacattttggtttcttatcaaaatttctttgaatatattttaggcgtttttagcttatgggattccacagaacaatgtgaagagagtcttacttctactcaaggtaacaaacatatcttgcaaggagaatgattacagttgaaccatcatttctagattctgaaattatcgttctttcacattttttcaggctgcatataacattggtggacacacaattagcgccgaagcgatacaaagttcgattcttgggtgcaaaatgtctcatcctggacaggtacacaagataaatcataaaacttcgaaacacttgtcttcaaagaacaaaagcatgataataatgattcgttcttttcatttttcttagtggcttagactactatttgcttcgaggaaattcaaagcaggggatgaaagattagcttatgcaatcgatcatcctgagcctctcctgcattttgcacttacttcaggcagccactccgatcccgcggtacttaccattgatctgtgaaacacttcaaaaaatcctttaatgctattaaaactcaagtctctgcgtctttgtttcaaccaggttcgtgtatatacaccgaaaagaatccagcaagagcttgaaacgtcgaaagaagagtacataagaatgaacttaagcatacgcaagcagagaatcctattgccaaagcttgtggagacgtttgcaaaagactccggtttatgtccggcgggtttgacagagatggttaaccggagtataccggagtcttcaaggaaatgtgtaaagagatgtcaatctagtactagtaaaccacgaaagacaattgattggatccctcacagctttacatttagatatcttattcttagagaagctgccaaatga

SEQ ID NO: 167728 - DNA, 919 bp, Arabidopsis thaliana landsberg
  unsure (1)..(919): unsure at all n locations
atggatcaccgggaaaagagtgaccggcgactactgctatggttcttcgccgtagccaccgccgtaaaactccttctcattccgtcgtccagaagcaccgatttcgaggtccaccgtaactggctcgctatcacaaactctcttcctcttaccaaatggtacttcgacgagactagccaatggacactcgactatcctcctttcttcgcctacttcgaacgcttcctctcaattttcgcgcgtctcgtcgatcccaggatcgtagatcttcaatcaggnnnnnnnnnnnnnnnnnnatctgtaatttacttccacgaatcagcgtaatcgtctcagatctatgtcttctctacggtgtttatcgattgactcgaaaattagaaccgttgaaacgaaatctgatctgcgcattggtgatttggtctccggggctattgatcgtagatcacattcattttcagtataatggatttctactgggttggttattgctttcgatttcgtttcttcaagaagggagagatcttttgggtgggtttttattcgcagttcttctatgctttaagcatttgttcagccgtcactgctccggtttactttgtttatctacttaggcattattgctggtctggtttagttactggtttccgacggcttgtaactattggtgcggtggttgtggcggtttttgctgctgcctatggaccttttatctatcatggacaggttagtgtagttctttcctatacaatgttgaagaatatagccaaattctttagagttcaagttgaagattataatgttgttgatgtgttaagaagattgtgaatcatttttgttgttgtaaaatttaacaaagagttagaatttgttagaaattttggtgctagagagcaatttcacaacttttatcaatgaa

SEQ ID NO: 167729 - DNA, 1145 bp, Arabidopsis thaliana landsberg
tcaaagcatacttagggttattgtgattactgttcatgatttgatcacgttaatgatagattggttgattatgaacaagagttgtggcaaattgctttatagccaatgcttctttggtgtttagttatgagatcaagttattgaaccgatttgagatagatgtatatttaggcgattgctttttgccatgccttgatactgcttcaagaaagttgagctttttatgtgtaaatgtatacacaatgagaaatttcttagccactattagtttctgtttgtgtctatagaaacagagaccagccacctacctatacatagctgaacttagctcaggctctgactctgataatgcaagttgctattgatgattagaaaaaggcaattagtgcttactttaatatagtgcagtcaaagtcaaagtcatttactttatttgagttacttgctttaagtaaatgtagttggatcagtcttgtggtcttcaattgcttaagttggtccatttactaaagattttgagtttcttttttctcaggagcctggagagatcgaagaggactttgctcaagttgatacaaaaaagttaataaccagatttttcacttcgcgtaacccacgtccaccttgcattccaaagtcagttggtttcagaggtttacctgatccaccttctttgcccgcttggctcaccgaacaagatgtcaggttctacggagacaagtttagccaaaaaggcttcaccggtgggctaaactactatcgcgccctgaacctgtaagtcttatgaattctagccacctattctacatcatacaatcatcttttcatggttaatcttggacttgaatcaatctggtcttatcctaacctgcagaagctgggaactaacagctccatggaccggtctacaaatcaaagtccctgtgaaattcatagtgggtgatctagacataacatacaatatccccggaacaaaggaatacatacatgaaggtggtttgaagaagcacgtaccgtttctacaagaagtggtggtaatggaaggtgtaggtcacttcctccatcaagagaagcctgacgaggtcactgaccatatctatggcttcttcaagaaattcagaacccgcgaaaccgcatccttgtag

SEQ ID NO: 167730 - DNA, 457 bp, Arabidopsis thaliana landsberg
cttcttgtttgtagtttgtcttatacattgtcccgttgttgattttttgttttgtgatttcactctaaagggtggtaagcatggtataatcattgagtttactgaacctgagactaatacaaagcgaagcgccacatatttgcctgaggtgccagctcatgaaggtaccatttcaatacaataattcaagtacgtgttgttgctattggtattgttgatacaacgattactttttttatccccaggctggacaaagatagaggcaatcgattcgctggtgcgtaaagcaggatacaatggtgtaataacagaagcagtgcgtaggcgaatcaatctaacgcgttaccagagtacattattcagcatgcattatagcgaatacctttcatatgtgaaggcgaccaggggcgttgttggcccggttattaatgggatcaacaagcacgcctttgcctga

SEQ ID NO: 167731 - DNA, 1160 bp, Arabidopsis thaliana landsberg
atggttgtccgggcaagtgggtggtgtttaagttaaagtattggatcgaatgattgtaatagcctatagtgcaaacactcatgtcgttcgaaaccttatatgaataaagctggcttgtttctttgtgtgaatctgtctcttttttacttatgaatctcataatttccggtgagaattacacttagagcgaattcggataggacctaaggacacttgagttatcctcggatgggaacaacctcaccgggcggacagcccgggatgggacgttttacattcttcccatccactcgaccaccaggtcgagtaacctcagctcaggccactcgatgacattactcgaccacctggtcgagtatcacttcgccacaccacctgaccacactcgaccattcactctaccactttactcgaccccctggtcgagtatcacttcgccacaccacctgaccacactcgaccggacactcgatcacgtcttcacaatctactcaaatccgcactcaaccagacaagctgagcacaaggaagagaagaggagaagacaaacggtttggaagcggccttgacctccatcggatcacgaagcccatcttagcccattatcactctatgggccgggcgattaggttattggcccgtctactatcattttatttcgttttgtataaatagatgtcttagggttctgtcctgagacatctagtcgacattgagtttttgctttagttttatttttctgttttactctggctgcgccgcttttgcttctgcaacctgtaattcgagatttttccaagttattcagattccgcatttgatttcatctgtcatcttgtttctctactctttatctctttacttatgcaatattatcatttatctgcgtttatgtttttgagcatgttgtttgagtagtgacttagaattcttaaggatgagatagagtagttgtggaatccgtagtctgtagaatggttaagttttagaattgattgaatccctttaggactagttgcgtttactgcttatttctttctgattaattggaattcgatcccaagcattcccgcacccagaaggtgttcgatggaatgcttgatccactagttcctgagatatgcgtctctatcccaagggattggccgtttagagcgttt

SEQ ID NO: 167732 - DNA, 1363 bp, Arabidopsis thaliana landsberg
accttcatctacagggtcagggaatgagaagaataacactgcaaaagctatctttatggtcatcttgtttctattgatattcttgtttgtggtagctattattacaagatggaagaagaagaggcaacccgagttccggatgctcggtaaagaccacctaagcgaccaagagagcgtggaagttcgtgtaccggactcaataaagaagcctatcgactcgagcaagaagcgtagtaacgcagaaggttcctcaaagaaaggttcatcgcataacggaaaaggtgcaggaggtggtccaggaagcggaatgggagacattataatggtaaacagcgagaaaggctcctttggtttacctgatctcatgaaggctgcagctgaggtgctaggcaatggtagccttggatcggcctacaaggcggtgatggccaacggattatccgtggttgtgaaaaggattagggatatgaacaaacttgcacgtgaagcattcgatactgagatgcaacggttcggaaaactccgacaccctaacgttcttacccctttagcttatcactatcgtcgagaagagaagcttgttgtctctgaatacatgcctaaaagcagtctactctacgttttgcacggtactacaacgcttttgcttttcttgattgatgtagaagcatattttacgatcttttttaatatatatatatatatatttttaatttgcaggagatcgtggggtttatcattcggagctaacttgggcaacaagattgaagatcatacaaggagtggcacgaggaatggacttcttgcatgaggagtttgcgtcctacgatcttccacatggaaatctcaaatctagcaacgttctactaagtgaaacctatgagccattgattagcgattacgcgttcctcccgcttcttcagcctaacaacgcctcacaagctttattcgcgttcaaatcccccgagtttgtacaaaaccagcaggtttcaccaaaatcagacgtctattgccttggaataatcgttctcgaggtcatgacggggaagttcccgtctcagtacctaaatactggtaaaggagggacggatatagtcgaatgggtgcaatcttcaatcgcacaacataaagaagaagagcttatagatcccgagattgcgagtaatactgattcgataaaacaaatggttgaattgttgcggatcggggctgcttgtatcgcaagtaaccctaacgagagacaaaacatgaaggagattgttagaaggatagaacgagtaacactttgaggagatttgaaaatgtaaacgcatggaaaacgttagagagaaagaagcttttggaatctgtagattaaaaccaa

SEQ ID NO: 167733 - DNA, 2023 bp, Arabidopsis thaliana landsberg
atggcttctgctgaagcatgtggtgtagctgttcaatctatcttgacagttggtgagtaacctagttctcaacaatgtgagatattagcttattatgatttgagagagaatgactacttcttgttatatatagaattctttgttttgtgcttctatatctctctgctatatttgacattcctcgctacaagtttaatgcaagtgttacagattcttgagttttcttgagcaacaagtaaccttcaacttcttcttaatgaattacagtatgatataggtagtgaggaaataccacaagaaaccttcattttatcttcttcttgatcagaacccgttttcatgtacgctaactacggtaatttagcgaaagcactcgactttgatctttatcttcaaaactccattcctgtccaagtatggagtgaagaagagctggcttggggacccttgtgctccagtaaaatacccttggaaggatattaactgcagctatgtcgataatgagtctccgagaatcatttctttgtaagatcctcttcaaatgctcgtatatgtctttgatctgtatgtcttgttctcacaagagtttgttgatcttcagaaatttatcctcgagtggcttgactggagagattgatgcagcgttctcaaaccttacattgttacatattttgttcgtatttttcgatttcatatggaattcttttgtatacagatttgtgaaactgatgcaaccaaaatttcattacaggggcttatcaaacaacatttcaacaggaaatgtagattacatagacactgacttcactataacttgaggaatttatattcatatcacatatatgtctgcagaaacttggaaggaaacaagttatcgggtgctatgtctgcgtgtctgcttcatgtcaaattccggatgagaagacaaaaaagagtgtgtacatcattctattagcagcatctgtcacgggagtgcttggtcttgtagtagcaatagctttgttcttgcagtacaagaagagacatcgaaatggtaaaaacatcaagaaacgatcctacattgcttcttctttgatttctaagtttacttggaagaaatattcttatgagatctttacaggtggttctggtgatggcgtcaggactgggccaatggacacaactaagagatactacaaatactcagaagttgtgaaagttacaaacaactttgagagagttcttggacaaggaggttttggaaaagtatatcatggtgtcttaaatgatgaccaagtagctgtcaagattctttctgaatcatcggctcaagggtacgaagagttcagagcagaggtaactctcttatacactaagaggtttagtctctattaagtgagttctgtagtaatcgggatatccaccaacttgtgtatgatcaggtcgaacttctcctgagagttcatcacaagaacctaaccgctcttatcggatactgccacgaaggcaagaagatggcgcttatctatgagtttatggctaatggaaccttaggagattacttgtcaggtcagtctatttgctactttgttttggtcactggtcttttgctgctgtagacattgttttacaaaatgaaggtaccatttgaccgcaagaattaagcgagaaaagtgatgtttagaacttcggggttgttcttttagaggttgtcacaggccaaccggtgattgcacgttcaagaacaacagcagagaacatacacataactgagtcgactttaatgctgtcgacaggagatatcagaggcattgtggatccaaagctaggggagaggtttgatgctggttcggcatggaagatcactgaagtagcaatggcttgtgcatcttctagttctaagaatagaccgaggatgagtcatgtagttgctgagctaaaggagagtgtaagcagagcaagagccggtggtggttctggcgccagtagtgtcacggatccagctatgacgaattttgattcgggaatgtttcctcaagcaagg

SEQ ID NO: 167734 - DNA, 1958 bp, Arabidopsis thaliana landsberg
  unsure (1)..(1958): unsure at all n locations
aatgtgtgtccactggagttcaatgagtatataccttgtcacaatgtcacctnnnnnnnnnnnnnnnnnnnaagcttgaatctttctagaagagaagacctcgaaaggcattgcccaccactcgagcaccgccttttttgtttggtacctccgccaaatgattataagatacctattagatggccaactagtagagactatgtatggagaagtaatgtgaaccatacacatcttgctcaagttaaaggtggccaaaattgggtccatgagcaaggtcagttttggtggttccctggtggtggtactcattttaagcatggagctgcagaatacatccagaggtaatttatttatactgtgtgaagatgtttgtctaatgtattgcactgagtttttgtatgttatctttcaggttggggaatatgatgactaatgaaacaggtgacttgcgttcagctggggtggtacaagttcttgatgttggctgtggagttgcgagctttgcggcttatcttcttcccttaggtatacagacaatgtcatttgctcccaaagatggtcatgaaaaccagattcagtttgcattggagagaggcattggtgcaatgatatccgcggttgccaccaaacaattgccatatcctgcagcctcgttcgagatggttcattgttcgagatgtcgtgttgattggcatgcaaatggtatgtatgtattcttgtgttgaatttggttataagaagttggttgataatacttccgcttggttcctcagatggcatcttacttaaagaagttcatcgtcttctccgaccaaatggattctttgtgtattcatcaccaccagcatatagaaaggataaagagtatcctatgatttgggataagttggtcaatctaactagtgcaatgtgctggaagcttatttcccggaaggtacagactgcaatatggattaaagaagagaaggaggtttgtcttaagcagaaagcagagctaaagctaataagtttatgtgatgtggaagatgttttgaaaccatcatggaaagttcctcttaaagattgtgtgcaaatcagtggacaaacagaagagagaccctcttctttagctgcacgtctttctgcatatccagcaactctaagaaaaataggtatatctttcttcttcggtggcattactatgtttctgttagattccttaactaaccactttagcaaaactttcattcagggatcagtgaagatgaatatacatcagatacagtgttctggagagaacaagttaatcattactggcggttaatgaatgtcaatgagactgaagtccggaatgtgatggacatgaacgcattcattggtggttttgctgcagctatgaattcgtatcctgtttgggtaatgaacgtagtacctgcaaccatgaatgataccttgtctggaattttcgagagaggcttaaatggcgctttccatgattggtaagctgataagagagttcttctagtctatcaaacacttgttttgttttgtttttgatattttccaagcatcaggaccacttcactaaaaacaaatgtgtcttaggtgtgaggcgttctcaacatatccgcgcacgtatgatttggtgcattccgatcatgtcttctctcactacaacaaaagctacggagatggttgtttgctagaggatatcatccttgagatggaccgcatagtacgccctcaggtacctttgcgataactaactaatggtgacattaaactgttgaataaaaaaaaacagttgtggtctggtcttttattaattccgggtggttgggcaggggtttgtcataataagggacgaggaatgtatcgtctcaaggatccgagacttggctccaaaattcttgtgggaagtggaaactcatgagcttgaaagcaaagacaagaagatgacagagactgttttgttttgc

SEQ ID NO: 167735 - DNA, 354 bp, Arabidopsis thaliana landsberg
agacaacatctgttttttgattgtgagtttgcaagggaggtttggatctatttcacttctcgggcccatgtttttcctcctcttttgtttgaagatggaattagatggctaaagaatccttgtcaggacaagaatgtgacgacgattcttaggcttgcccatcatgcatcggtgtacacgatctggaaagaacgaaatgctcgacttcacgcttcggcttcaagacctgcagctgctctgattttggagattaagtcagttattcggtgtcacttggatccgctttcaagagctcaaagattaggtcctaatggaactttcttcctcgccacttggtttggtctctttgattga

SEQ ID NO: 167736 - DNA, 3226 bp, Arabidopsis thaliana landsberg
  unsure (1)..(3226): unsure at all n locations
aaggcgtgcaagattcaagctttcacatgcacaacaacgaaagctttttattgatgtgcgactagaaatatttaactttgttaaatctgctcgtgaagaccatgatgtaatgatgtaaagcattttttctaatatcttcactgtatatatgcttagggtattgtggttgggcttgacaatgtggacgaagtaatcgaactcatcacgaaggcctcaagtcattcctctgctactgctgctttacaaagtggtgagctatattttactttgacaatataatcaatgtaacaatcttgaactgcacattataggttgatgtataaacagaattcggaaaagtgagcgagaattaggagtcaaaaagtagactagagccaatttttcttaggtggactgatagatgtagtctaggatgtacactattaaaagaatacatcttgtggtgaactcttccatattacatttgaacattatatatttcttgtctttttatctggaactgctggagtctcattcgttgtaagatttgatcttaattgcaaagatttcttagggatttatgctttgtaagtctctattgtaagggacgataccatatattaaaattaacacttgtcaaacatttacttatgtagaatatggtctttctgagaaacaagctgaggctatactggagataactcttcgaaggctaactgctcttgaggtgctttcttattctcgctaagttcaatttatgaaacttgtaggcttgacaatgttctaactagattctcccttcataaatgcagcggaaaaagtttactgatgaaagtagttcactaacagagcaaattacaaagttggagcagctattatcaacccgaacaaacatcctaaaggtgacacactcactttttagttatctgttcttttggctattgatattagaaatttagaacacctagatgctagtagaatgatagatgcatcaatatatgtactccaaatttgtaagcttgactgtttgagtccactgaggttcaaaatctagtccatgcattatgatgtggtataaggattcaaatgcttcttccatttcttgtttggtacttatttttatatctgtaaagctgcttactatatgttgctgttctgggccaatgttaggaagataactgatacatgatgattttcttgtagaccaaaattgaactatttgcttcgtttacttcattgtatattacttactactttattctcttcgttgtttttcttgtatttttctttagttaatcgaacaagaagcaatagagctgaaggacagattctcaagtcccaggcgttcaatgttggaggattctgacagtggtgatctagaagatatagatgttattccaaatgaagagatgctgatggtatgttgcatacttaaacctagaaagtttctcaacgttgaaatttttgttgtttgttttgtaacttttgatatggatgactataggcagtcagcgaaaagggctatgtgaagagaatgaaggccgatacattcaatcttcagcatcgtggaacaattggcaaatctgttgggaaactaagagttgatgatgcaatgtctgactctcttgtttgtcatgcacatgaccatgtcctcttttttcaggtatgtataccctcaaaatttcctttgtgtntgctacgcacatggatttaattttctgccttgttgtaattcattgcttatacttgttgacattcagtgaccggggtatagtttactcaacccgtgcatataaaattccagaatgctctcgcaatgcagctggtacacctttggttcaggtaattacatatctgtgtatctatgttttccttctgctatgtcaaaaattattcaattttatgaaaggctaatgttttgctgtgttcatgtgacttgtggaagcagatattatccatgtcggaaggtgaaagagtaacctccattgttcctgttagcgagtttgctgaagatcgctacctcctgatgcttacagtgaatggctgcatcaagaaagtatctttgaaattattttcaggaatacgctcaactggaatcatagcaattcagttggtttgtcccctttttcttcttagtcatataggaagtcttcttaacaaggttactctaacaaaattatttgtcttcagaattctggtgatgaactgaaatgggttcgttgttgctcaagcgacgatcttgtagccatggcatcccaaaatggaatggtcgccttgagtacatgtgatggtgtaagttgtggctctcattttttctaaatgattcatctttcatgtaaaccttttaatacttgagcaaactctgatggcttttgtttgtttaggttcgcacactgagcagaaatacaaagggagtgactgccatgagactcaagaatgaggataagatagcgagcatggacatcatacctgcatctctgcggaaagatatggaagagaagtcggaagatgcttcacttgtgtatgtttttcttaacttatatctgctgatgtttgctctagaaacttacttatgtcttactgtcttcttttgttaacacaatcacaaaagcaggaaacaatccacgggtccatggctattattcgtgtgtgagaatggctatggaaagcgtgttcctctgagtagcttccggcgttcgcgtctgaacagagttggtttatctggatacaaggtaggatctggattttcaccatttttggttgtgtttgtgttgatttttcccttacatctaaatctcaatttgtcagtttgctgaggatgatcgtttggctgctgttttcgttgttggttactccttggctggtaagtatacactgccacaaatacggatttaaatgttctttgattgctgtttatatataatctcaccattgggttttcttgcagaggatggggagagtgatgagcaagtagttctggtgagccaaagcggaactgtgaaccggatcaaagtcagggatatctcaatccaatctcgcagagcacggtactcccttcatgtgacagtcttttcaaatgtatattttatatggtttctcatttgattgctaatttctcaggggagtgattcttatgcggctagatcatgccggcaaaatccaatctgcatctctgatctctgcagcagatgaagaagaaacagaaggaactctaagtaatgaagccgtagaagccgttagcctgtaa

SEQ ID NO: 167737 - DNA, 2671 bp, Arabidopsis thaliana landsberg
aggtaaagttggtaccttttccaggtgggtatttgaatttgggtgaattgagttttatctccataaagctacgaaatggctatagttatgaagcgattcttcaagcccatagagaaggagaattctccggcggctaagaaaccctgcctttcgccggaaaagcgtgacggagacggagatggagttgaagaagagaagaaccagaacgagccgtccaagtttatgacgtggaacgctaatagcttcctccttcgggtgaaaaatgactggtctcagttctctaagttcgtctccgattttgaccccgatgtcatcgccatacaggtgatttcttttgcttcgtctttggaatccctgggttaatttcgagcaatgtgggtaaatgtgcttaggtgtttatgtgtggaactttaaaaccctccaagtcttctagggttgtattgaagtggtttgagttcaacttgttgatgcaaattcagtcacttatgacatttaaatggttaatggtgcaaaagatcagactttaatccaatttgtttgtgactacgatgggggagggggctgttgattcttttagtgtcagcgtgttctgagcttagcggttgactgtgttcttaatgttaggaagtaaggatgcctgctgctggtggaaagggaaaacctaaaaaccatgaagagttgagtgatgacacgaaagttttgcgtgaggaaaaacaggtaccatggttctgtattgacttgcttgttctatctgttaaaatagttgtattatagtaccaacggaacaagaattttcaaagctctgtatcttgatgcatttgcaattagtaggagattttggtgtatgagttagaatcaacattgcagtggcatggttatagacagattttaaaagaatgcgggagccacttatggagtaacaaactctcttgttgtttggataacattcaagcttgatattagttctgggaaacttaacttgcagattttgacacgggctctctcaagtccaccatttggaaattatggggtttggtggtctctcgcggactcgaagtatgcagggacagctttgttagtgaaaaaatgtttcaagcctcgaaaagtttactttaacttggacaaattaggtatttttatagccttgttgcttgttccttatcatcacataaatctcttgcacactagcaatttgaagccatgtttcttttatctgacttgttatggctctgccatttccttgatctcaaagttgatgtacttgggagaaatatatcatagctagatcattgatgactaacttatatacttgtcgctctcatgcagcatctaaacatgaacctgatggtcgtgttatcttagctgaatttgagacatttcgtcttttgaatacgtattcgcctaacaatggttggaaagatgaagagaatgcgtttcagaggagaagaaaatgggacaagaggattgttgaattcctcaacaaaacatctgataaaccgctaatatggtgtggcgacttaaatgtcaggtaatgaggaagttttttctatatcttctcttgctatactcttttccttaagcccttacagaataaaagttgatgttatttcctcgattcgatttttgtaatacgcagtcatgaggagatagatgttagccacccagaattttttgctacagcaaagcttaatggttatgttcctccaaacaaagaggtaaggaataccatattttgtacgatttattcattatcattatagcttttatctaaaaacagagctggctctcaataatgttattttccgtcggccttttataactcttcctatcttgtctcttcatctgcattgtgaccctgctattgttgatgactttactacgcctgtatttctcttcctatcttgtctcttcatctgcattgtgaccctgctattgttgatgactttactacgcctgaaccgaaaggttctccgtgagatggacctttaaatcatacaatgactacagtggttttgagttttttgattatgcaggactgcggacagcctggatttacaccatctgagagaggacgcttcggggcaactataaaagagtatgcgtaatatgtctttgcactgcgaagtcttagtagtagtactttctagaatacagattagagttactaaacatgtgattataaattatatttatgggaactgttacagaggaaggcttgttgatgcataccggtatctacacaaggagcaagaaatggaaagtggcttctcatggtcggggaatcccattggaaagtgagtggatactacacattttagttttatggcttggagtccagaacctccgcatgtttctaaagctatatattgattttttgttttggttgccataggtaccggggaaagaggatgaggatcgactattttctggtctctgaacaactcaaagaccgtatagtttcttgtaagatgcacggtcgtgggatagaacttgaaggtgccatagataaacctgttcatcacacagattcatagaagattattattagctctttttgcaacaatttggttcttgatttgtttcaggtttccatgggagtgatcattgtccggttacactcgagctttcgaagccatcttcagaaatggaacagaaccaggtgtcaaactaa

SEQ ID NO: 167738 - DNA, 544 bp, Arabidopsis thaliana landsberg
agctatctgccgatgacgctagagaccaagcgggggctgccgatcacgctgagcctgatttataagatcgtggcggagcggctggggctgcgggtgtggggcgtcgggctgccggggcattttttgtgcggcgtggacatcgacgggtcgatcatgctgatcgatccgttcaaccaggggcggatgttgacccaggacgaggcgatggaccggatgcgggatgtgctggggcaggaggtggagtggacggatgatgcgttggcgccgatctcgaacaagcattggctgacgcggatgttgcagaacctgctgaacatcttcggggcggccgggcattatgccgacgtggcggcgatgctggagatggagatggtgctgtggccggaccaggatcggttgcagcgggatttggcgctggtgctggcgcggatcgggatgagtcagccggcgagcgcctggctgaaccggtatctgcggaataatccggatgacccgcagcggacggatttgcggcagttgctgcaggtacttggcgcttaagacg

SEQ ID NO: 167739 - DNA, 845 bp, Arabidopsis thaliana landsberg
gccagtatgttgcctcattggcgagggctctcatctattgccatggcaagcatgtgatacacagagatattaaaccagagaatctgctaattggtgctcaggtgatgatataagctttaccttttcctttacatctatccatttgattatgaaactagctaatattattattcatggatccttaactattcagggtgagctcaagattgcagactttggttggtcggtacacacatttaaccgaagaaggaccatgtgtggcacactagattaccttcctcctgagatgggtaaagttgaaggcttgctaaaaagttagttctggtgggatctaaattctttttaacagtgaccttttggattgttttacagtcgaaagcgtagaacatgatgctagtgtagatatctggagccttgggattctctgttacgagtttctttatggtgtacctccttttgaagccatggagcactcagacacatacagaaggtaaacagcatttgaaatctacaattatagtctgtttcttgtggggtttgtttgatgatatttgttaccaccaatgatctatatcaggattgtgcaagtagatctcaagttccctcccaaaccaataatctctgcatctgcaaaggatcttattagccaggttatattctataccttcaatctaacagatacactttgatgcaagtgctagttattgaatctgaagtctcacatattttctcaattgtatgtatagatgcttgtcaaggagtcttcgcaacgtctgccattgcacaagcttctggagcatccgtggatcgtgcaaaacgctgatccttctggaatctacagagtt

SEQ ID NO: 167740 - DNA, 605 bp, Arabidopsis thaliana landsberg
gaggaagcctacaggtattttgagatgattaggggctttggaaggaagactccacccgaggcatgtcagaacgatccacaatcccaacacaaatgatgacaggtccaatcatacccagagcagccagcaaagctcacaatcttcgggaatgcagcaaacttcctataggtcaccagccccgagaggcagaggagggaggaacttcggaggaaggtttggtactctacccaggagattgttctgcttattctatggggaggataagggacacacgactaggacgtgccgagtcacgatccaaaagaaggaaatcgcttaagctgaagcacgatagaaccagccgaagcaggtctcgcatactgcttcatgctattccccatatatccatgaatatgtgggcaatcagcaacctacggcgtttgttgcttcgacgagtcagtcccaagcttcttgggctcagttgccaccatcaccaccattggcacctaccttagcccataatcaacagccagaagggcatcgtcatgcgcagtaacagcgcgacactagggaggagccgaagctcgcacactcaacacactgtgcccgagtcaaggcatatctac

SEQ ID NO: 167741 - DNA, 635 bp, Arabidopsis thaliana landsberg
  unsure (1)..(635): unsure at all n locations
atgaaaagcaaaatcttgaaaagatactacttggctctcggtgtcacaaaggacggctgctttattatttccctgcacaagagaggtaaaattagatgccggcccttcacaagctcttactctgcttttttactttgcagttcagtccctagcggctaatacttgttgaacacatgttagatatgcttctttaatagtagnnnnnnnnnnnnnnnnnnnnnnnnnnnnnnacatattgtcttccatcagctctacgcatgacaacgattccatctcatcttggtgtggatggcatacagaccatggttcactcacaggtgtccagttttcttctctcttgctttcctgagttgttgttgttcacttaaagtttagttggctccttttgttttgatggtatgcaaatacatttagcgtctgtgatatgctgattaagtttatctttgtatgtatatccacaggtcttactcgagcatattttctagagattcagttgaagtaccttgcccagatcctgcttctggcttatacatacaaacacgatcaggtcagatcgttaaggtactgcactgatccttcctgatgactgggcatagtatgtataaacggatcctatttgatatctaacagtgaaa

SEQ ID NO: 167742 - DNA, 545 bp, Arabidopsis thaliana landsberg
gtacatctccatgcccgagctgatcgagccggcgcacatcgcggtcgcaggcgccgacctcaccgacctgcaggcgtacatcttcgtgctcgcctgcggcgtgatggatgcgctactgtggttcatcaagggcacgcggctggaccagcatatgcgcgcgtccgagcagaaccccgaggtgaccggcctcatgggcatagacatcaaccgcgtcatcgcattcactttcttcctcggctcggggataggcgcgctcgccggcctgatggtcgtgctctactgcgggctgggccattaattcatgggcttcatgctcgggctcaaggccttcacgccggccgtgctcggcggcatcggcaacgtcgcgggcgcgatgctgggcggcatagctgctcggggtgatcgagagcatggcttccggatacataggcgacctcaccggcggcgtgctgcccagcaaccctcgcgacatcttcgctttcctggaaatgatcggagtgctggtgctgaagccttcggggctcatgggccagcgcgcgtcgggt

SEQ ID NO: 167743 - DNA, 1777 bp, Arabidopsis thaliana landsberg; identical to SEQ ID NO: 63148

SEQ ID NO: 167744 - DNA, 962 bp, Arabidopsis thaliana landsberg
ccccagagtttccgctcaacagccacttcacgaagcagtctgttttacgcaattctggcaacccgatggttgcatatcgacatgtagttcgtaattccagtgaccaacaaaagcttttcttttgtgaggatagtcaagttttgttggagcacaccccctggttgatcttaaaagcggatagtttctttctcccatctctcttctcagtctcgtcattcaagcaggagcttcaaatgctcttcccggaaaaagatactgcttttcacttcttaagtcagtatctctttcacccaactaatgttgtctggggtctcattacacgatactataacgcatatcttgctaaggctgatcaaagaataggaatctatattggggtctctgagtctggaaatgatcagttccagcatttgatagatcagattttagcttgtggaactagacataagctgcttcctgaagttgacaaacaaagaaatctcccttcaagccaagttctgaaccgaaaatcaaaggcagtgtttatctcatcttcttctccagggtattttaagagtatcagggacgtatattgggaaaacccaacagtgatgggagagataatcagcgttcacaagccgagctacaaggactaccaaaaaaccccgaggaacatggaaagtaagagagcatgggctgagatataccttctgagttgttctgatgcgctggtggtcacaggtttatggtcctcactcgtggaggttgctcatggccttggagggttgaagccatgggtgttgaacaaagctgagaatgggactgcccatgagccttactgtgtgaaagcaagatcaatagagccctgttcccaagcgacattgttccatggctgtaaagattgaaacatgaatagagtctcgagggctttttttgcctttaatagatgttgtacggtcaagaatttcagagttgcccaatag

SEQ ID NO: 167745 - DNA, 715 bp, Arabidopsis thaliana landsberg
atggagtttgttacagaaacgttaggcaagagaatccatgatccgtacgtggaggaaactaggtgcttaatgattcccggaccaatcattgtcggttccgggccgtcgggactggccacagcggcatgtttaaagtcgagagacatccctagtttgattctagaacgttccacttgcatagcgtcactatggcagcacaaaacatatgatcgtcttcgacttcatctccctaaacatttctgtgagcttccattgatgccttttccttcaagctaccctacttaccctacaaagcaacagttcgtccaataccttgagtcttacgccgaacattttgacctaaagcccgtttttaaccagaccgtggaggaagccaagttcgataggcggtgtgggttatggagggtgaggacaaccggagggaagaaggatgagacaatggagtatgtatcacggtggcttgttgtggcgaccggggagaatgccgaggaggtgatgccggagattgatggaatcccggattttggtggacctatcctccacacaagctcctataagagcggtgaaatatttagtgagaagaagattttggttgtaggatgtggaaactccgggatggaagtttgtttagacctttgcaacttcaatgctcttccttctcttgtggttcgtgactcggtgaggatgaacaaaactcttctcgttaatatatgca

SEQ ID NO: 167746 - DNA, 1183 bp, Arabidopsis thaliana landsberg
accaaaaaacaaagtaattgcattattattttgtcactcgatgagtccaacacaagtatttgttagatcaaatattcttccaaaatttgataacttgcaagttatttaatcttctttattacttgctaaagttaaatatttgttacttgaatccaaaagacttacacagtgaaacttcatactctattcataagtagaagcttactatagagtatttgaaagaccatacttactttcgtgcaagaaccaccactattgcagcatttacaagaatccgacataagattggtcttgcgacccacattttctgtgttaaacatgatatttgtcacattcagaatcctatcatcacaaaaagtgattgaaatgttccaagtgaataccttgctcaaataaactgaattacctaaaaaaagatggagaaactgattattcaaaagattcttttgcacgtcaagcttacctgacagtttctggttagttacatgcagaaacctatgcttgtagtatgggagatgtgtatacatttgccccgacttttccgggcagagaagtctcacacttcaaggcatcttgctgagttttggatggttgagcctgagattagcttttgcagatctagaggtaataaacatacgatattctttggttttcttctttatcgttaatgtagactcagtatcttaaaaaccttcttttaaatttgtgcaggacgacatgaactgtgcagaggcgtatgtgaaatacatgtgcaactggttgcttgagaaatgttacgctgacatggaacttatggctaagaatttcgactcaggatgcattgacaggctaaaattggttgcctctactccgtttgggcgtataacatacactaaagcaatagagctacttgaggaagctgtggctaaaggaaaggaatttgataacaatgtggagtggggaatcgacttagcctcggagcatgaaaggtttgtgataacccttaagaaccattcctcagctttaaacagttttaagaaatggttgctaatgaaacatgtcttgcaattacagatacttgacagaggttctgtttcaaaagccacttattgtctataactacccgaaaggaatcaaagctttttacatgagacttaacgatgatgagaagacagttgctgccatggatgtcctcgttccaaag

SEQ ID NO: 167747 - DNA, 3511 bp, Arabidopsis thaliana landsberg; identical to SEQ ID NO: 4802
  unsure (1)..(3511): unsure at all n locations

SEQ ID NO: 167748 - DNA, 509 bp, Arabidopsis thaliana landsberg
ccaggccgcggtcagttggcagatcagggctctggagggccgcctgggccagagcctgttccggcgcctgccgcgcgaggtcgcccccaccgaggccggcgaacgcctgtccagcgccgccaccgaggccatgaccctgttgcgccgggccatcaacgacgtgctcgaggccgacgagggcgtgctgtcgatcaccaccctggccaccctggcgacccagtggctggccccgcggctgggcgccttccagctggccaacccggacctggcggtgcggctggacaccgcccccaacctcgtcgacctcgcgcgcgagaatttcgacgtcggcctgcgctccggctccggcgactggcccggcctcgacagcgtccgactgatgcccgccctgttcacccccctgtgcagcccggcgatggccccccggctgcgcctgcgggagccgtgcgatctgaacgacgccccccgcatcggcatgcagaaggaatgggcggcctgggtcccttccc

SEQ ID NO: 167749 - DNA, 561 bp, Arabidopsis thaliana landsberg
gtggtggttcccacgctcgatgcgcagttctggacaatatacgtcaccttcatgaagaagggcgccgacgaattgggcgtccacctggtcgtgctcaatgccgacaccaagccggaccagatggtcaagtcgctcgaggacctggtcgctcagcatgtcgacggcatcatcttcacgccctactgggcgaccgcgccaagaggcctgtcgctcgccaaggacgccggcattccagtggtcctgaccgacagctacccgagcttccagccgcagtcggaccggttcccgaactatatcgccttcatcggaccgagcgacgaggacgccggctaccagatggctaaggcgctgttcgatgccatcaagcccgggccggacggcaagaaggtgatcggcgtcgtcaacggcaccgccggcacgtcagtggcgatcgatcgccgcaagggcctggaggacgcgctcaaggaagtgtccgacgtgcgcgtcgccggcgaggtcgacgggaatttcgttcgcgacacgtcgcagacggtgtttgaatcgctttaccagggcaatccc

SEQ ID NO: 167750 - DNA, 3133 bp, Arabidopsis thaliana landsberg; identical to SEQ ID NO: 6386

SEQ ID NO: 167751 - DNA, 716 bp, Arabidopsis thaliana landsberg
tgcatcgtagcagacctagagtagctcttggcctagacgaggagctaagagctcgtctcccagcatgtggattgcccgtttctacaagtcggtcagtaagtgtgatagttggagaatggtatccccctgtaatgtttgtgcagcagaattgtagtgtaagtcaacaaatgagctagtcaatgttccataggatcgcgctatccctatgctgggggcgaatttaccattctgtcaccaatgatcatgatgaggccaatgatgaaaacgaagaacaagttgtgagagtagaggctaacgtcgttagataggccacctatgtgaagggtatggaggcggctaagggagacaaatgagggcatggagggttttattggtataggcaggttcaaggtccgcggggtccgggggagaggaggagcaagacgggtttaaggtctccggtgggactgagttttgtggtggtagaaaggatgagaagggtaatggagtaagcagggtgggtgggaggaggaaggaaagtggtgagggtggagagagatgaaccaatcagggtttgtagaagagatggtaggaatatgaatggtaacaatgatagaaattggaggagatttgggtgttatgtgttggtggagagttttgggctgagaagagcagatggagttttgttggttaaatgtgtatttagacatactaatagattgagatgtaactgggag

SEQ ID NO: 167752 - DNA, 1502 bp, Arabidopsis thaliana landsberg; identical to SEQ ID NO: 30419

SEQ ID NO: 167753 - DNA, 1154 bp, Arabidopsis thaliana landsberg
aaaacttgtgcgatatgtttgacggcgatgaaagctgggcaaggccacgccatcttcacagcggaatgctctcattcgtttcatttccaatgcatcactacgaatgttaaacacgggaaccagatttgtcctgtttgtcgcgcgaaatggaacgagattcctattcagagccctaatgctaagcctaaatctggtgtcaaccgatagtcgaccaagggatgatgcctggatgtctatacgccaaggaggtcgcccctattcaatatacttcacggcctgactgtctaagggtctcctcgatctttaacaccgagcctgcggtttttaatgatgatgaggctctggaacatcaagaccgttctgctgaatctggtttggataaacctggtgttactgggacattggaagttaaaacataccctgagatttcggaagtagtgagagcggtttcattcaaggattttgctgtactgatcaatctaaaagctcctacttcttcaaagtcctcttcaaatccatcttcgtcttctcgggctcctgtcgatctagtcacagttcttgatgtgagtggaagcatggctggaacaaaactggcgttgctaaagcgagcaatgggttttgtgattcagaatcttggtccatttgaccgtctctcagttatatccttctcctccacagcacgtcgtaacttccctcttcgtctcatgaccgagactggtaaacaagaggcgcttcaggcggttaattcattggtctcaaacggagggactaacattgcagagggattgaagaagggcgcaagagttttgatcgatcgtagattcaagaacccggtatctagcatcgtactcttatccgatggccaagatacatataccatgactagccccaacggttccagagggacggattacaaagcccttcttcctaaagagatcaacggaaaccggattccagttcacgcatttgggtttggtgcggaccacgatgcttccttaatgcattccattgcagaaaactccggaggtacattttctttctgacagtctcatgcggttatgcgggaaacattagaacagtgctttagaggtcttcttagcgttgtggttctagagctgtgagtaaggattgagtgcaagaatcatctgttgagg

SEQ ID NO: 167754 - DNA, 1792 bp, Arabidopsis thaliana landsberg
  unsure (1)..(1792): unsure at all n locations
attgggtatggcggaattatcgcaatagttgtggtgtttaccttcattaatctcttggtgtttattggctttatcacagtctatgcacggaggggaaaattaaataatggtaagtgtagcttgcttcaatcaagcttatgatgtacagagtaaggcttatggattttttgtttttttagttggtannnnnnnnnnnnnnnnnnnnnnnnnnnnnnnnnngttacggtttgatcttggtatgatcgtaatggcaactgatgacttctcctctgaaaatacgcttggccaaggtggatttggtacggtttataaggtaataataaattttttccctaatgatgagttcttgatcaacattggtcttttatgagtaaatagatatcttgagaatgggtttcaggggacattcccaaacgggcaagaggtagcggtcaagagactaacaaaaggttcaggacaaggagatatggagtttaagaatgaggtttcactcttgacaagactccaacataagaatcttgttaagcttcttgggttctgtaatgagggagatgaagagattcttgtctacgagtttgtccccaactcaagtcttgatcactttatctttggtgagccttcgaaagacagctgctaaattggatagttgtagaacttttagcaaactaaaatgtttctttgaactctgcagatgaagataagcgttctcttcttacatgggaggtgaggttcagaattatagaaggcattgctcgaggtcttctctatctccatgaagattctcagctgaagattattcacagagacttgaaggcaagcaacatacttttagacgctgagatgaaccctaaagttgcggatttcgggactgcgaggttgttcgactccgacgagactcgagctgaaacaaaaagaatagctggaacccggtaagaaatatatcaatcaaatttgatgacacatttcaaatgctctgttttgaaaacagagtccatgaattaatgctattggtttgcatatatgcagtggatatatggctcctgagtacttgaatcatggacaaatctcagctaaatctgacgtttatagcttcggtgttatgcttttggagatgataagtggtgaaaaaaataagaactttgaaacagaaggacttccagcttttgtaagcttcttgaatcttgatcacattttatttatcttctcacttttatgctttgattggtaatacgcataatggcataatggcattttctaaagcgattatgtaagaaatttgtcaatcaagaaagtttgcataattgtattagaaaacgcaaaaacgcaagatttgcatttttgcataaaattacaagtaaataattcattatgcaaaaaagtgggtatatagttgcttattttgcataataatttgttattattttaaacatactaaagaaaaaaaaataattgtttacacgaaatttatatcacttgacttataaagaatgttttcttttgatataaggcatggaagagatggatagaaggagagcttgagagtataatcgatccttacttaaacgagaatccaagaaaattgatcataaagttgattcagattggtttgttgtgtgttcaagagaatccaacaaagagaccaaccatgagctctgtaataatttggcttggcagtgagactatcatcattcctttacctaaagctcctgctttcacttggagtcgatcccaatctgaaagtggtgcaatgtcattgagcgacgatgtcttcacggagttgagttgtcgttga

SEQ ID NO: 167755 - DNA, 928 bp, Arabidopsis thaliana landsberg
atgaaggtaacgtataggatattcttttcattgtctagtctcttataatcttgactcttgagtggatgaattttagagttttgtgttatcttcaagtatatttggggtttgagttttgtttctattatgaatcacaggtcatacagatgaatatacaagaagaaatccgtaagcaaattgttcaggagcttaaaataaaccaagcatcatcacaatgtccacatgtagttgtttgctaccattctttctatcacaatggagccttttcccttgtgcttgaatacatggaccgtggatctcttgcggatgtgattagacaagtcaagactattcttgaaccttaccttgctgttgtctgtaaacaggtcaaatacaccaccaacttatttaaagcattctcatgacttatcatcactcttacttatatttccccttgtgacaaggttatgatgggtcttgtgtacctgcgcaacgaaagacatgtcatacacagagacattaagccatcaaaccttcttgtaaaccataaaggggaagtgaaaatctcagattttggtgtaagtgcaagtcttgctagctccatgggacagaggaatacatttgttggaacctacaactatatgtcggtacgaaagcattccaaaaattttatacattacaaatttcttgatgtttatgtattgtaaacatacattatcatgacttgtctctttttcatttcttcacttcacagcctgagaggatcagtgggagtacatatgactacagcagtgacatttgaagtttgggaatgtcagtgttagaatgtgcaatagtaagattcccttacttagaatctgaagatcagcaaaacccgccaagcttttatgaactcttggcagcaatcgtagagaacccaccaccacctgctccttctgatcaattctca

SEQ ID NO: 167756 - DNA, 1292 bp, Arabidopsis thaliana landsberg; identical to SEQ ID NO: 24342

SEQ ID NO: 167757 - DNA, 2721 bp, Arabidopsis thaliana landsberg; identical to SEQ ID NO: 25420
  unsure (1)..(2721): unsure at all n locations

SEQ ID NO: 167758 - DNA, 1368 bp, Arabidopsis thaliana landsberg; identical to SEQ ID NO: 4579
  unsure (1)..(1368): unsure at all n locations

SEQ ID NO: 167759 - DNA, 1556 bp, Arabidopsis thaliana landsberg; identical to SEQ ID NO: 30039

SEQ ID NO: 167760 - DNA, 515 bp, Arabidopsis thaliana landsberg; identical to SEQ ID NO: 74826
  unsure (1)..(515): unsure at all n locations

SEQ ID NO: 167761 - DNA, 1480 bp, Arabidopsis thaliana landsberg
agtctggtttgttgtctgatgtttacgttagtactgctatcttgcatctctatggggttaatggattggtttcgtgttcaaggaaggtttttgaggagatgcctgaccgaaacgtggtgtcttggacttcactgatggttggttactcggataagggtgagccagaggaagtaattgatatctataaaggtatgagaggagaaggagttgggtgtaacgaaaattccatgtctttggtaatcagttcctgcggattgcttaaagatgaatctttgggtcgtcaaattatcggacaggttgtcaaatcgggactggagagtaagctggcagtggagaattcgctcatatccatgttaggtagtatgggaaatgtagactatgcaaattatatttttgatcaaatgtctgaacgtgacacaatttcatggaattcgattgctgcggcatatgcacaaaatggtcatatcgaggaatcatttaggattttcagtttgatgcgtcgttttcatgatgaagtgaactccaccactgtgtctactctgttatcagttttgggtcatgtagatcaccaaaaatggggtagaggaattcatggtttagtggttaaaatggggtttgattcggttgtttgtgtgtgcaatactcttttgagaatgtatgcaggcgctggaagatcagtagaggcaaatttagtgttcaaacaaatgcccactaaagatttgatctcatggaactccttgatggcttcttttgtcaacgatgggaggagcttagatgctttaggacttctttgttcaatgataagttccggaaaatcagtgaactatgtgacttttacaagcgcattggctgcctgctttactcctgatttttttgagaagggtaggatccttcatggacttgtagtggtcagcggtttattttacaatcagattattggtaatgcattggtttccatgtacggaaagataggtgagatgagcgaatcgagacgggtactattacagatgcctagacgagatgtagtagcttggaatgctcttattggtggctatgctgaggacgaagatcccgacaaggccctggcggcttttcaaactatgcgagtggaaggtgtttcttcaaattatatcacagcggtaagtgttcttagtgcttgcttattgccgggtgatttacttgaacgggggaaaccattacacgcctatatagtttctgctgggtttgaatcagatgaacacgtgaaaaattcgcttatcactatgtacgccaaatgtggtgatttaagctcgagtcaggacctatttaacggattagataataggaatatcatcacgtggaatgctatgcttgcggcaaatgctcaccacggtcatggagaagaggtgctaaaacttgtatcaaagatgagaagctttggggtgagactagaccagtttaatttctctgagggactttctgccgctgcgaagctagccgt

SEQ ID NO: 167762 - DNA, 493 bp, Arabidopsis thaliana landsberg
actcatcatttctgatattctctatatgcttatttgccgacaacagggatcacaacagatctacaacttctcacatccgtcctttcctcttacgacaccaagctagagtggaccaacttgtgcatggtgtatatggggaaatggtacacgattgctttcttttgaactcccttattcttcagtcacttttaactaacgctttaaaacaaaacaaaaaactgcaggtgaaggtcgttaggtcacaccaaggagaaatacggtttgtccgagcaatgattgccaaaatcttgggatcaggtttgtttcggaactctaattttctatctttagtgtaatactttgctatcagggcattgaactgactattttatttgcacttgctgctgttgctccaacagtcaacgaggatgcaccacgactaggagaaatagcaaatggtagccccgtttcataaacacactcggattcagaatccgattccaatcacgaagac

SEQ ID NO: 167763 - DNA, 685 bp, Arabidopsis thaliana landsberg; identical to SEQ ID NO: 13838

SEQ ID NO: 167764 - DNA, 558 bp, Arabidopsis thaliana landsberg; identical to SEQ ID NO: 66126

SEQ ID NO: 167765 - DNA, 633 bp, Arabidopsis thaliana landsberg
aacatagagacacgaactgcagtaagcttgataggggaaaaagtgtcgaaactaactaacacaagcatgcccatgaggaagggacggataacgaagaaactccatgagttgacaactctctgcgaagtcaaagcatgtgtggtaacctacagtccgtacgagaatccagtggtgtggtcgtcaaccgaaggtgtttaagaggcggttttaatgtttattaaaaggccggcgatagaacggtccaagctgatgatgagtcatgagacctacttgtagaaccaaattaccaaagaaacaaagaaactggagcgtctacgtcttgaaaaccgagaaactcagcttacacattttatgtttgattgtgttgagggtaagataagtgagcatcagtatggtgcaagggaccttcaagatttaagttttcatattgatcactatatcaatcagcttaattccagggtcaagatccttacaaacaatggtgagtcttcttcttccgttcctcctctacttaatacttcagttgcgggtgcgggtgcagctcctcttcctgttgcgggtgccgatcttccgatggatcagaagcagtatgagacggtcatctatatatccctattggtcttagttatcata

SEQ ID NO: 167766 - DNA, 1729 bp, Arabidopsis thaliana landsberg
gtttgagtaactcaaagtcgaccgacaaggcgtcgaacttaacaacaagttcgaatccatgttcactaggatgagatatgtggaatgcatccttgcatcaccatctgttaacaaaaacccatgccagcttccagggaacgcaatccaaaatccataggagtatgccactgcccatgccatcactatcacacatgatcgagagctgctaactcgatatatccctacatcaaacactgagggcactgtaattctagagggggaggatttttatcaagatgatgttttggctaacaacacaatcgaagagcccatactcaccagtaatccactcgaccacaagcttccccagctactctctttgttgaaaaaaccggaagctgcaaagaccaaagacatagtcttcgtgccaccgcccttacaaacctctactttcattccctagtcgtttcaagaaagttctggttgcaaaatacagagccctcctggaaaaacacataaaagatatccctttagtggactgtctcgcgctaatacctgacgagcacaagtacgtgaaagacctgattacagaaaggatcaaagaagtccaaggaatggtggtgttaagtcatgagtgcagagcaatcactcagaagaagattgttcaacaaaagttggaagatccaggatcttttactctaccatgctccattaggcaattgactttcaacaattgtctatgtgatctaggagcctcagtcagcttaatgccactctctgttgtaaagaagctgggattcgttcaatacaagccttgtgatctaaccttgattcttgctgataggacttcaaagagaccttttggccttttagaggatgtgccagtaatgattaatggagtagaggtgcctactgattttgttgtgcttgagatgaatgaagaatctaaggatcctctgatcttaggaagacctttcttggcttcagttggagcagtaatagatgttaagcaagaaaaatttaatcttaatctgggagaggatgtcaaaatgaagtttgacatcagggacgctatgaagaagccaacaatagaaggacaaaccttcttagttgaggaaatggatcagctaggtaatgaactgctagaggagattgttcacagagatcaccttcaaactactttaaccaaaagtactgaagctagatttctctccagtgagaccttaagctatgagatgtcattagactcacacaacgaagtaccaggatcagagatctttaaaggtgtcattgcgtcagaaacagaggatgttacattgaacgaggaaggctcaactgatactcgactagaatgctcaaccaaacagctagagtcaagcgtgagggcatcaaatgattggttagaactcaaggagaggtcaaaatggcacgacaaagctataatagagctaacacacaatgtgaaagagttgaaggatcaagtcaaagagctccatgggaaagccaaccaagctccactcgacatcaaggacgtcccaaatgatgaagttattcctatggttagaaaagaaggatgtgaattcacatcaaaacagtccagaaaagacgactatccagatgatgaaaaaggagcttaccaagaaagggtcattgagtactcaattacagacttgtcacgagagcatgctgaattagatgttgtatttttaaggaaggagaggagacgttaattctactctatcaccctcct

SEQ ID NO: 167767 - DNA, 524 bp, Arabidopsis thaliana landsberg
gaaggagactgcggagaacaagtcgtgcttggctgacgtggaggtgaagctgctagggtttgacgccatgatcaagatactttcaagaagaaggccgggacagctgattaagactatagctgctttggaggatcttcatctctctattcttcacactaacatcactaccatggaacaaaccgtcctctactcctttaatgtcaaggcaagtttatatgttaaaaagtaattcatcattcatattcagctttcatatgcaaaatctagactcatcaaataatacatgtaattatctaatctggattagctgtcataaaacacatttataattttatttagggttttcaatataatcatagatatggatttgtattgttaaagtatatgtaataactatcaagggctaacatgaggtagatgtaaaatatgtgcagataacaagtgaaacgaggtttacggcagaagacatagcaagttccatccaacagatatttagtttcattcatgcaaataccaacatgtaa

SEQ ID NO: 167768 - DNA, 1620 bp, Arabidopsis thaliana landsberg
catttgaaaatgtttatacttggggaaaaggcatgaatggacaacttggtttaggtgacgttagagatagaaactctcctgttcgtgttgagcctttaggtgataggttggtagaaagtatagcttgcgggttgaatttaacgtctgcgatctgtttacacaaagagatctctttgaatgatcaaaccgcttgtagttcttgcaaatcagcttttggattcacaaggagaaagcataactgttacccttgtggtctattgttttgcaatgcatgtagtagcaagaaagcggtaaatgcttcgttagcaccgaataaaagcaagctttctcgggtttgcgattcttgctttgatcatctatggagtataacagagttttcaagaaatgttaagatggataatcacactccgaggatgcagatggttacacgaagagtatctgaggatttgacagaaaatcaatcagagaatgagatgcagaatcttccacaagctaatcgatcttcggatggacagcctcgatggggacaagtctctggtccttctctgtttcgtttcgataagatttcgacaagttcttctttgaatctttcagtctcagcaaggcgaacatcttcaacgaagatttcaacctcgtctgagtcgaataagatcttaaccgaagaaatcgaaaggctaaaagccgtggtaattaaactacttctttttgttttcttacctgtaacaatagtaacacattagacactaaagatacatttttatgaacatgtagataaaaaatctccagaggcagtgtgaacttggcaatgagaagatggaagaatgtcaacaagagctcgacaagacatgggaagttgctaaagaagaagcagagaaatcgaaagctgctaaagagataataaaagccttggcatcgaaggtaaaagatacatagttttttttaatctttctgtttttggtttgttatgtgaccgacattttcacggtatctttgcttgcagctccaagcgaataaagagaaaccgagtaatcctctgaagaccggcattgcatgcaatccttctcaagtctcaccaatctttgatgactcaatgtccattccatacctcacaccaatcaccacagctcgttcacaacacgaaaccaaacaacatgtagagaaatgtgtcacgaaatcctcgaaccgtgacagcaacattaagctattagtagatgcatcgccagccatcacaagaacagggtatctccaaaacgaaacacaagactcgtcagcagaacaagttgagcaatacgagcccggtgtatatataactttcacggccttgccttgcggtcagaagacgcttaaacgcgtacggtttaggtaaaaaaatgttaatgtgcttttaagtgtttatatagtttgaagtacgcttaagtatttatatgattggtttctaactttggttgcagtcggaagaggttttcagagaaggaagcacaaagatggtgggaagagaagcaggttttggtctataacaagtatgatgctgaaatatgaaactaacccctccgtttacttcttcgaatgtattttaaaacaaattgatgtttgttagtgaatatatgtaatgcagaacaa

SEQ ID NO: 167769 - DNA, 620 bp, Arabidopsis thaliana landsberg
tttgttacatgttgattaagcacgcatgtataaaacaaaaaaatatagacttttagccattcgatattttgaaaattttgtgtagtgataaacactttataagtattaaatatttacatttaaagtaactggaaaaaacaaagttaccccacataaaattattggtgataaacctacttatgagttttgcccgagtaaacgtttattagacacgtcaaggtgagcccaaacacaacatgattgtccatatctgcgtcgcagcgcatgtggacaaaaaacccctcaacatgagcaccaaggctccaacaaaattgctacttccaggagcacgtcgcagcaaagtggacagaaaaacactcagccgtcccactcctgatcaagtgtcgggccaagtaaaatcactatgtttcttacaaagccttgcaacatctactcccgatgtaaacattcatcctcacttccacaacctcctccgcttccaagctcttctatagactcacaaggacttggtcactgatcgcactgtagcttcaaatgcgtttttgaataagttgtggtttggttgtatgatagttttggtgaacattctacaacgtaactacaatcgtgaattggaataa

SEQ ID NO: 167770 - DNA, 495 bp, Arabidopsis thaliana landsberg
atgagcggctatgaagcaacccggcaaatccggggagaaaacaagctggtgctgaaccccgatgtgcctattattgcccttacggccgatgcgtttgaagaaacccgtgagcgggttctgcaggcaggaatgaatgattttatcaccaagccttttaagcaacaggaactttatagcaaaatcataaaatacttaccggtataatcgcttaatttgttccctgatcaggcaaatttcatggcatttttaaacatggaggaggttacgctcgaaagcattaacaagcgtaacgaacatacaatggccgaatacatcggcatagaatttattgaattcggagcagattacctggtggcccgcatgcccatagaccaccgcaccgtacaacccctccgtattgtaaatggcggagcttattgtgtgctgacagaaacagccggaagtgtagcggctaatcttgccgttgaccgcagcgagtatgttcagtaaggttag

SEQ ID NO: 167771 - DNA, 2995 bp, Arabidopsis thaliana landsberg
cgaataaacttaagaagagaaaagggagtcaggcgaaaggtcgaaaaccttcaagttcgttaatgtccttgcagaattacatgagttccagccaatgatagataactattggaagaatactgagtcgttattcttgtctacatccactcttttccggttcaacaagaagctaaagggtcttaagcctgcgttaaagttgctcgcaaaagacagaattggtaacctagtgaagaaatcaaaagaagcatatgaagttttgtgtaagaaacaagaggcaaacttatcaaaacccttcattgcagaatatggaagcagagaatgcggcttataaccgatgggagtttgtgtcagatctagaagaaaaatatctaaaacaaaaatcaaagttgcattggatgaaagtgggtgataagaacaacaagacttttcatcgagttgtggtagctagggagacaaatgaatcagatcaaggaaattcaatgtgcagatggtagcattgtaaagggtgatgagataaaagtggaggctgagagattctttagagaatttctgcattttatcccagaggactatgcaggctgcgatgttagtgagcttcagaacttgctaccttttcgttgttctgaatctgatcaagagctgcttactcgtgaggtgtctgcggaggagatacagagggttctgttttcaatgccgaaggacaaatctccgggaccagatggttataccacagagttctataaggcaacatgggctaccataggacttgaattcattttggcagttcaatctttttttctaaaaggtttccttccaaaaggaataaactcaactattttagctctgattccaaagaagctagaagctaaggaaatgaaggattatagacctatttcatgctgcaacgtaatctataaggtaatttctaagatcattgctaacagattgaaagtgcttctgccagagtttgttgcgggaaatcagtcggcgtttgtaaaagacagattactcatcgaaaatctgttacttgctacggaactagtcaaggactattataaagattaagtctctacccgttgtgctattaaaatagatatctcgaaggcgtttgactcggtccaattggcttttctgctgaatgttttattggctatgaattttcctgcggtttttatacattggttaaaactgtgtattactacggcctctttttcagtccaagtaaatggcgatctcgctggttatttccaaagtgcaaggggtttacgtcagggttgctctctctcgccatatctgtttgtcataagcatggatgccctctcaaagatgttggataaggctgccggagctcacaagtttggtttccatcctcattgtcaacgtttaaagctcactcatctaagttttgcagatgatttgatggttctaacggatggtaaggttagatccatatagggtatagtgaaggtttttgatgagttttataagtactctgggttaaaaataagtatggagcgtaaacatggtacacgacccaacccatctagtcgtcttatcaaatggattgatatacacattcgcaatcaactttcggctctcaaaatcagtggcgatcagagatacaacaatggactccaactttggtttgcatcaaggaggatacattgagaaaagtgattaagagtttctatttaaaattttcaaagtttttttaaaaaaattttgcacttgttgtaaaaacgttctgttctttttgaatctaatttaacattaaattcaaaaaaaaaataaaggtgctactagcaaagacatattccaatgtattggttgcggccgaattggctgtggtttcttctacaaatgcgatgaaaaagattgtgatgagtttctcctagacgtcagatgtgcttcccttccagatccttttgttcatgactgtcatccccatgatcatcctctcttctttaacttgaccaaaggtaattgcatggggtgtggttctgataactgttcatcctatttcttggaatgtattaaatgtaagtcctttttgggaatcaagtgtgctactctgccttgtgaggcccactacatacacgatagacaaacactcaatgttgtcaactgtttcttgaagcattatttttacttgaatccccaccacatttttctttacaggtctagagcttgatgaagttgaaagtgcttgcaatgatggtatactcttggctgttttgctctcaacgtaatactgtattctttgtgttcagagttatgtatttgagataagtcgatgcataagtttttgtacatttatttgtacggaaaaatgtatttctgaaaattttgtaccagttgactagaaagacactgagactgagtctgactctgaatgagtcactgccaaaagaaatcaattttctgtatttcaatatgttaagaatttgatctataagccttttggtttctccttttaatttttttcctttactattatgttaaagtttttttatttttagttttcatgggtttgcataattcatatatactctgttttgatgacatcaaaggaggtattgtatagaagatacaatcttgtgtagttttcaggtaatgtttctgaccatggtccatgtcccttggtggttgaaacttggaaagaattttgtgttgatgcctttcacccaatcaatttattattgttataagagaaaagaaatccttaggaattaggattgtgaagatgtaaaacacctctccatacacaatcagattccaaagagattagatttagtaatgaagatggtccaatacagacataagcagactttgtgtaactttcaagtcttgaaccaggactgtacatgtacacttcttcaaacccttctcttcccactaccaccgagttccttcttccctgaaaaaattaactaaatcattccattgaatcaaacaataaaaagtgactattttcaaattgtaaatagtaaaatgg

SEQ ID NO: 167772 - DNA, 422 bp, Arabidopsis thaliana landsberg
  unsure (1)..(422): unsure at all n locations
ttattacatataattgccaagtccttntttgtgtgcaggaacatgcgtggatacaatggtctggatgatcttgcagtagcttgcaaggccatggaaggtgtacaagtaattaatggccttgaatgcaagatgtcttgctcttcctacaaggtaatgatacaggtcttcaaccaatacagagtttcttgtttacaaaatcaagctcttatgtgattcataacatctcgtgttgtagatttcgtatgttttggacacagaggatttcttccacaggaagaagaaacagaagaagagcaacaacttgtcactggctaaattatcacagaatagaatagcaagattccacaagtttctctcagcttcaagatgacagcaaacaagaacacgcaaaacttctcttttacttcaacacacaaaggaag

SEQ ID NO: 167773 - DNA, 695 bp, Arabidopsis thaliana landsberg
atgtgcccccgtcgtaaaaaatttgaggcaagggaaaatgaaaacaagatgcattaacctaggttacctatcgtctttaggtcttgccgtgaggaaaaagcaaaagaaggagagaatagtggtcgtacccgaactctgtgaggaattgttgaccgagattctgagcagattaccggtgaacctctgatgagatttaagtgcgtctcaaagatctggttttccacgatcaaatctcgatacttgaccaaccgtttctttaaatcttgctcatcacgtcgaagtttgtttgcttatttagtggttagggcaaaacagagcaattatgcgttgcttactacatcattgagtcatgatgatcactctgtctctgtaatcgaccaagatctaaccatgccgataatgggaggctacttcttgaacgcttgtcgtggcttggtgtgtttcacaattgggtcaagagtgcaaatttgtaaccttaacacaaggcagcttgtggacttgccgattattctaacacctaaaggaggagaaaattacaagatatggtactatttaggacacgatcctgttcatgacgaatacaaagtgcttagtttcatttggaggcacaacaaggagtggaaagtgagatcagacatcatgtgttggtacttggagctagaacttcatggaaaaagactcaatgccccatttca

SEQ ID NO: 167774 - DNA, 4744 bp, Arabidopsis thaliana landsberg
  unsure (1)..(4744): unsure at all n locations
tctaaccggagaaataaaaaattatctaaagagcggcggagatctaccggaaaaaagagaacgttataaggaaatcaagatcagagaagagagagcaaacctcaaatttttcttcggaaacttcaagtgaacgatttcagaggaagagcttaatatatatagagatataaaggcgcgtcgggtccaaagaagttgataaaacgcgtcaaaggcgcgtgagctcgggaggatacagcacgcccgcgcaaatctcgggaataagcgagacgcttctgcttctcaagaaagcaggcgaccacacgcaatggaagtttgaccgttcgagaagctgaaacgccaaaagtcacgggttaggaagacggacggccagctcggctatcttatccatgaagctcgtcatccttctggttaaagacaacgagctggggggcaaactgttggggtcggatttcatccaggtaaccgagccaatcgtacagataccatcagcacttggggagctaagttcgtcactattctggctcgggctccaggaaacacatcccgagcccggtgcgggaacacctcgagaccaagggaaacacctcggataaacgataatcggctcgggtgttgttccagaaaacacactcgagccaagcttgagtacaccttggggatcgcttgggctcggcttggaaggcgcagttataccacaaaacacacccgagcccaagattgttaaatccacccgaggagaatacttgtacaaaacccgatgaaggatcaagatatcatttccgggtttccgggaatgatattaaagaacctccgaggatattatcaaatctggaagtttttccgaagctcctgaagaataaagaaaatctccatttaagaaaggtcctccatcgccgacttagagataaagagaaatctcccgagaataccgtgagaggcggtttgccagagccctatataaagcgccgcaaagaacaaagaaaggggacacacacaaaaacgctcccaacttcaggctatcaaaaacgctctgactttgaaggcaaaacacctaatttatatatttctaaacacttgtacgataaaattatcattatctcaataataaaatcaagaacagggtccgcggtaatcaataattttgttgttctttgagaatctcacaaagatccattctttgaagaaaccctaaatacaatttccattgtgtgagttttgactatcactattaggcgctagaaggaggggaatttgagatttctcttactcctagaacacagaaccaaccattcaatccacaatggtcaacaatcagatccccgctaacactgttgacgcagaggaaaacccgatcccttcagtccagacagatgctcttgaggccactgctcccttcggtcctagaagaaggtggacgatcaagaactacccgcttccgcgcacggcatcttcatgaccgaaacacgacgaaccaagctgaggaaaccaacccacagcttcctcttcccctggcagaaattgcccaggtcgattagatcggggtcttggacgatgaagattcagaagagaacgttcggtgggctgaggagtacgccagagaacaggaaataagcgctatcaagctctccctagccaaggcagaaaacggatgaagctcgtaagatcccaaatgcataacgcagtctccttggcctcgaacattgacggcattctggaagagtcccacaacacatctttcacacacaggatctccaacgcaataatctcagatcccggaaagctaaggatcgaatacttcaacggatcttccgacccgaaaggacacttgaagtcaatcatcatctctgtggcccgagccaaattcagaccagaagaaagagacgctggtctctgtcacctgttcgtcgagcacttgaaagggccagccctggactggttctcgagactcgaaggaaattctgtggatagttttcaggagctatcgactcttttcctaaagcaatattcggtgctaatcgatcccggcacatcagacgccgatctatggtcactatctcagcagcctaatgagccacttcgagatttcctcgcaaaattctgatccaccctagccaaagtagaaggaatcaacgatgtggcggctctttcggctatcggtgaaattngagagaaagatagtagagtgtaagaaagaattaaatatgtaaaaggtaggaaaatgagataaagaangcaccaagcatcggtttatgtatcccacaaagatttagaggcagaaaaaggtaaaaccgagcaggtcaatgctgtggccaatcccgagcagaccgccctcgcggcgaaccccgaaggacctaaaagaagccgggataatcgcgaagcagacgacgatgaaccagaagctgctcggggaaggatcttcacaattttaggggattcggctttctgtcaagacacggcggcatcaatcaaggcttatcaaagaaaggccgacgcgaatcataactaggcgcggccatttaatgggccaaatgacgaagtaacctttcacgaaagcgataccaacgatttagaccgtccgcacaacgatcccttagtcattacactgaccatcggtgatttcaacgtcgaacgagtcctagtcgacacgggaagcacactagacatcattttccttacaactctgcgagaaatgaagatcgacatgacgcaaatcgtgccaactccacgacctgtgctcgggttctcaaatgaaaccactatgactctcgggaccatcaaattgctagtccgagcaaaaggggtaacaaaaatcgtcgatttttctgttaccgaccagccgaccgtgtacaacgcgattatcggcaccccatggttaaatcaattccgagctgtcgcctcgacatatcatctctgcctgaaatttcccacaagcgacggcgtgaaaaccatctggggaaatcagaaaaatgcccgcatttgcttcatggcagcacacaagctcaggaaccccgtcaatgagtcgacggctgacgcgaatcataagaaagccaagcttggccgagctgaagagaagtcaatctccgagcagttatagcagctaaggatcgaggaggctcgggaatctgcaacaccaactcccgatccggtattcttaatctgccttgacgacgaaaagcccgagcgatgcgtagaaatcggcggagatctgggagaagaactaacagctgaactcacagctttccttaaagaaaacgtcaatacattcgcttggtccccagaagatttgcccggagtaagtgttgacatcgtatcgcacgagctcaacatcgatccgactttcaagcccatcaagcagaagaggagaaaattgggtcgggagcgagcagaagccgtgaaagctgaggtagagaaattattaaggatcggatccatcaccgaggcaaaatatcccgattggatcgcgaacccggtcgtagtaaaaaagaaaaatggcaaatagagggtctgcgtagatttcacagaccttaacaaagcgtgcccgaaagacagcttcccattcccacacatcaaccgcctcgtagaatcaacttctagaaactaactattgtcattcatggacgattcggtggttacaaccagatcatgatgaaccccgaagttcaagaaaaaaccattttttacacagaacaaggcattttttgttaccgagtgatgcccttcggactcaagaacgccggggcaacctatcaacgttcgtcaacaaaatcttcgcattacagatcgggaagacaatggaagtttacatcgaggacatgttggtgaaatccatgacagaaaaagatcacatatcccatttacgctaatgtttcaagcagctcaacctctacaatgtcaaactcaatcctgcaaagtgtcgctttggagtaagatccggcgagttcctcgggtacttggtcacacaccgcggcatcgaggcgaatccaaagcaaatcgaggcattgttgggaatggcgtcgcctcagaacaagcgagaagtgcagcgcctaaccggaagagttgcggcacttaaccgcttcatctctcgatcaacagacaaatgcttagccttttacgatgtgcttcggggaaacaaaaagttcgaatggacaacccgatgcgaagaagcttttcaggaactcaagaagtaccgagcaactccacccatcctcgccaaacccgtaatcggagagccactatatttgtatattgccgtatcagatactgcagtcagcggagtgttagtcctagaagacagaggcgagcagaagccgattttctacgtctcgcagactttcaccggcgcggaatctcgctatccgcaaatggagaaacttgctttagcagtcgtaatgtccgcagtaatgggatccatgccactccgcgccatcttacacagtccaagccaatcaggacgtctggctaagtgggcaatcgagctcagcgagtacgacatcgagtatcggaacaaaacatgtgcaaaatcacaggtcctagctgattttatcgtcgagatacccaccaaggaggctcggaaaaacccgctcgacacaacttggctcctacatgtagacggctcgtcatcaaaacaaggctcgggtgtaggcatccgcctcacttcgccaacgggtgatgcccttcgagcagtcattcaggttaaacttcgaagctaccaatgtggccgagtacgaagcactcgtcgccggac

SEQ ID NO: 167775 - DNA, 1978 bp, Arabidopsis thaliana landsberg
tttctacctaagagttatcagttgtcctattcttcagtcaaggccgcatggttcagctttacggaatcgcttccactcacagccatatgttatcctctcaaccttcactggacctcaccagtaccacaacaactggaaccaccggtctgccaacttcagtcaaccacccgttccctctcgctcatggtcgtttgaccaagaaatcataacctctacacatactcgatcgcgtctacacaccatccaaactactcgacttcctgttctttctccaaggaagcaactcaaccttgccgtttggttcactcgaccgcagctcctgcataacctcgtcgttttcaccactctatccccatagcttcactcggccctccataatcactcgaccagctacccacaaaacgaatatttttttttttaaaaaccagcttcggtttactcgactggtttactcgacctgtttttggtttgtgtggtttgtgtttctggttttgttggaactaacgtattaacgtatatttttgagttacatttgtttttaggcttcggaatgagtaactacagtggagaatcctctattgaccctgataacaatgtggatgaagctgagtcctggtccggtagaccaagagagcaacatgtttaccagagcttcagggatgaattcgaacgctctgcagcccgacgtaatccgagaagagctgaaatttgtagaggaaagagggcgatgtcaagtagatatgagctgattgatgaggacatcgaaactgagtatgagccagagtcatggcgcaaggagacaaagctgctgaacaaacctgacgaggttacagtggaagagtatatcaggttctttgagatgaatgatttctggggaacgcggtatccgtgctatgagactttagcccagctggggttactggaggacgtgcagcatctgttcgagaagtgtcatctggagacactcatgtcttacccttaccctgcctataaggaggagacaatcgagtttctttccacgctgcaagtggagatgtatgaggcactcacggactttgagctggataccatggggttaggcttcttgacgttctcagtgaatgaacagtggtatcagctttcgatcaagaagttggaagaactgtttggtttccctagtggaaagggaaccaaacccagatttgacagagaagagcttaaggatttgtgggccactatagggaacaatctaccgctaaactcggcgcggtccaagagcaaccaaatccggagtcctgtgatccggtactttcagagatccgtcgccaactgagaagatcagtcataccaaaggaggtacaacagaagatattgatgagacggatgatatagatgaggcagagtttgacacgagcatgtatcatttcagtgagcatatacctcctgcgagggaaagcaggagtttgagcgaagctcacaggaacaacagcaagctgcagaagtggtgcatgaaacaggacaagttactcgccaagtgcctcagggctatcaagtttctgaaggacaagatcagctgctcctcttccactacaactattccgcagggacagctccctcaggacatgcctttgaggagatatgacgcgtctgagccaagtcggcgcaggcctgagcccagagagcaggagattctgcatgtccctgcgaggcattcatcattcaagcctcgtgaatctgggaggaaaaggaggaccacactcactcgatctagtagtaggagcagacgacttctgcagtctggtagtttacgcgaccgcggtgctggccgcagcagaatggagagaggtcgagtttcctcagagcggtgctggccgccacagagctgatgaggtcaagtacccacctgctggagctgatacagaacaaggtggttcgtctatggcctgggagcaatcgcaggcagccattgacgagcaactacgttcattcttcaactgag

SEQ ID NO: 167776 - DNA, 675 bp, Arabidopsis thaliana landsberg
actgatgtaagtctccaacagctgacgttgacttttatgcttatagtttagcatgtaagccaaagcctgatattcggttgcagtatatatttcttgacctatttggctttagcaatggtattgatgttgttattcacatttgttgcagttgctgttgaattggctaaagttgcgagtgatgtgaaagctggagatattaaggtcctctttgtcaagcctcttgtttactggactcggtttttcatcattgccactgcgttttcccgccctcaaattgatgcaatagggtacagatttatttagacttgctcatatattccactttggaaaacatcaagtttactttctcttcatgaactgcgaatgcagatccaggatgagagacctggctgagaagaagtacggaaaagttgctaatggagatgtaaagccaaattcgtggacgttgttagattttggtgagtttcttcttgcgttgttggcatgcctctagttcaatgtgtcatgtgagggtaaaataatgacagttttatgttgattgatatacttttaggtgatgtggtgatccatttattcttacctccgcaaaggacattctataacttggaagacttttacgggaatgctatgcaaattgaacttccctttgaggatcagtcacaaccaaggaactga

SEQ ID NO: 167777 - DNA, 695 bp, Arabidopsis thaliana landsberg
atgtacaggtacgctctagggtacgtgaacaagaacaactcttgtcgtagccacaaagtcttgaggtttatagatcattacatctcttcggccgtgaaccacgcacccgaaaaccggttttcatggtatgaaatctacgatattgaaaccgatttatggacaactcttgatgtccctccatattggatagtatcgtgttatcagcgtggtgtttctctcaagggaaatacctacttttgtgctacaaaaagtaacgcaataaacaaaatcgacgatcacataatctgttttgatttcacaagtgagagatttgggccacttttgcgtctaccgtttagcgctgggcatgatgactatgtgactttatcttgtgttaaagaagagaagcttgcggctttacttacgcacaacgactggaatccatatgagtttgagatatggatctcgactaagatcgagtatgataaagtgtcgtggagcaagatcttggaaatggatacaggaccattggctgacatgccgattgcatatatacatgggagtttcttcattgacgaggagaagaaagtctccatggtttttgatcaccacagagtcaacatcattggaaaaactggatatcctagagaattggatctccgagtacatgtagacggcataaagtgtaggccacatttgtgcccttacgttccaaa

SEQ ID NO: 167778 - DNA, 974 bp, Arabidopsis thaliana landsberg
ggtgaatcttgagaacagatatttctttcgatctttaatgtcatgactcgtatgatgttgggtgcaattgttgaagaagaagaaagaacaattcttggaaacgagctcaagaaactgattctgttattccagatatcgaagggagctcaaaaatactcgtatggttttcgcgcggtttgatttccaaagactaactaaggaaatgcgagttcatgtcgaaaacttgatcttttagtcgatcaggtgatggagaatcatgtgaaaatggttgggaaaaagagtgatgaagaagaagaagaagattttcttcagtatttgttgagagttatagatgatgatgagaaagctccattatcaagtcattgcttatggatatggttcttggtgggttcgatacatcggttaaagagcctcatattcctagcttactttacttgcaagctataatgaaagagacgctacctttatcttacagttcctcaccggaatagtaaaacctcggttgttgcgggatacacggttctgaaagatttaaagattttcatcaatgtttgggcgattaatagagatactaagaattgggaggaagaaggatccaaaagagtttaagcctaagaggtttcttaatagttcttttgatttcattgataagtgtttttgtgttaaggttttgtaaggaacattacttcctcgttctttgaaatacagcttttatgtggatgtgatttgtgtgcggttaaaaattcataaaacccgatttaattgttgaaactttaaaaacatattttaaattttcaaatttttttttaacataatatatacatacgattacaacaaacgaacttaaatttgtaagaaaaacatatattgattaactcgtgtattgtacgggttctaatttagtaattatataatcttgttatagtggagcaagtaacatttgacattacataattgataatgaaattttcatt

SEQ ID NO: 167779 - DNA, 463 bp, Arabidopsis thaliana landsberg
acggctcgtccgacaccgagcattccaagctcggctggcgccgtgagcaaccggacgtgagcagcctgccgatctggcagttcgccgacaacttacggcaagttcgcccgcgcgctcggcgtgctgaacgagaacgagggcgtcgccctgcgcgccactttagtcgtcgacccgcacaacgtcgtccagcacgtatacgtcaccaacctcaatgtgggccgcgccccggccgacaccctgcgtgtggtcgacgccctgcagaccgacgagctgtgcgcatgcaaccgtccggcggtcggcgacgttctcaaaccggctgcgtagtccccccgacgcagccccgcctcggagtcgatcgcggcaagtcccccaacccgccgcatcctccggggccactactttcattaagcgttgcgctaccgccctagcggactgcatgagcgaagcgttgctaccgccctga

SEQ ID NO: 167780 - DNA, 617 bp, Arabidopsis thaliana landsberg
cgttgcccagttttggccacaaggtgtttgttgaaattccggagagagagagaagctcgaaattgggaattctgtaaggaaaaaaaaatgagagattttccttcttgctctggtgaaaatggtgttcagattgcggactcttcgtcttcctcgagcgctggaagaaatgctcagaatttggtaatatgcatctaccgttgccgcatccgaggtaggacttgcttgatcacagtcacatggactaagaatctgatgggtcagtgtgttaccgtgggggttgatgattcttgcaaccgaagtctgtgtaaagtcgagattaagccgtggctcttcactaaacgaaaagggtccaagactctagaggcgtatgcctgtaatatcgatgttttctgggatctctcgtctgctaaatttggatccagccctgaacctttaggagggttctatgttgggagtgttgttgaccaagagatggttcttcttcttggtgatatgaagaaaggagctttttaaaaagacgaatgctgcacctttttcatctttaggggctgtgttcattgcttaaaaagagcctgttttttggcaagagaacgtttgcaactaaagctcagttttta

SEQ ID NO: 167781 - DNA, 647 bp, Arabidopsis thaliana landsberg
gtttaaggtaccttactcctacgagaccagacttggtttactctataaacttggttagtaggtgcaaggagaaaccaagtgagcaacatatgctagcagcaaagagaattttgagatatgtgcaaggcaacttctgcatatggtatacaatataagctaggaggagagcataaacatgttggatttgtggacagcgattatgtagaagatattgatgatcgcggaagcacttcaggtatatatttatgcttggtggaggagcagtttcatggacgtcaaagaagcagcccataatgaatctatccacaatggaagctgagttcgtgtcggcagtgtatgggacatgtcaagtagtgtggttaaggaatatactgaaacaaattgggtcagttcaaggagaaggtacggtcttgttctatgataacagttctaccatcaaattgtcaaagaatcctgtgttacatggaagaagcaagcacattcatgtaacgtatcacttcttgcgggagttggtgaaagatggagtcatattgctggattactgtactattcaagaacaattgtttgacatcatgactaaagctgtcaagcttgaagtatttgagaagcttagacaaagaatgggagtgtgcagcaagaaggagtaa

SEQ ID NO: 167782 - DNA, 764 bp, Arabidopsis thaliana landsberg
atggcagcaatgttgactgttgagtttcaaaactgcttgatctttatcctcctctgcatccttttactcctatgttaccctctctttttcaagaaaccaaaggtctcacaagatggatttggtttgcctccaagccctctatctctgccaatcattggtcatcttcacctgcttttctctaatctaactcacaagtccttacagaaactctcctccaagtatggacctctcctctatctccgcatcttcaatgtcccgataatctttgtttcctcggcctcagtggcatatgagatcttcaggggacatgatgtgaacatctcttttcgagggaaccctcctatcgaggagtcccttttggtcggatcttttggatttttcaccgctccttatggagactattggaaattcatgaagaaggtcatggtcacgaaactgctcggaccgcaggcactacaaaggtctcgaggcatccgtgcagatgcgctagaacggttttacatgaacctgcttgataaggcgatgaagaaggaaagtgttgagattggtaaggaaacaatgaagctcatttacgacagcatctgcaagatgattatggggaggaatttttctgaggagaatggtgaggcggagagagtcagaggcttggtgaccgaatcgactgccttgacgaagaagatttttatggcaaacgtgttgcacaagccccttaagaagctcggaatctcattgttcaaaaaggagataatggatgtaaccaacag

SEQ ID NO: 167783 - DNA, 480 bp, Arabidopsis thaliana landsberg
atcaaccaagaagaagacactatagaggcgtaaggcagagaccatggggtaaatgggcggcagaaatccgcgatccaaagaaagcagcccgtgtctggctcgggactttcgagacggcagaggaagctgctttagcctatgaccgagctgccctcaaattcaaaggcaccaaggctaaactgaacttccctgaacgggtccaaggccctactaccaccacaaccatttctcatgcaccaagaggagttagtgaatccatgaactcacctcctcctcgacctggtccaccttcaactactactacttcgtggccaatgacttataaccaggacatacttcaatacgctcagttgcttacgagtaacaatgaggttgatttatcatactacacgtcgactctcttcagtcaacctttttcaacgccttcttcatcttcttcttcctcccaacagacgcagcaacagcagctacaacaacaac

SEQ ID NO: 167784 - DNA, 445 bp, Arabidopsis thaliana landsberg
  unsure (1)..(445): unsure at all n locations
ctctacggatctgatcatcatcaccaactctttgtctgttgcccaggaggccagctttaatcgcaacattcatgttctcatattgctcggcggcagcattaattttcagtatgaattcacaaccggcgacgatgcgatcaggcaactcagcaagtataaagccgacaagctcattctttcgtcagatggtgtcagcgcccaatttggggtgacgacttatcaccacacgnnnnnnnnnnnnnnnnnnnnnnnnnnnnnnnnngtagacaagacgatccttgttgccgattatagcaagatcgggcgggcaaacttctcgcaaatcggagagatccatcagatcgatctgttgatttccaatcacaacgccagcaaagatgaaatcgaagccatccgagaggccggagttgaagttcgccttgtttgaaaaataaatttgggagtg

SEQ ID NO: 167785 - DNA, 1102 bp, Arabidopsis thaliana landsberg
gcctcactgataatactactgatacaactagtcacttgattcataactctccggatctcattttattgatcgtcgacgtgagtaatgcaaacttgtatctaacaaacgggactagctctgattgttattcttgctctttccctgagacacctatacatgagacgtatcagccacgttgggactactggggtaggtttatggagaatctgacttccaaagttcctttgatggtgattgaagggaaccatgagatcgaattgcaagcagagaacaagacatttgaagcttatagttcaagattcgctttcccttttaatgaaagcggctcgtcttctacgctatattattcctttaacgctggtgggattcactttgttatgcttggtgcctacattgcgtatgacaaatcaggttttataatattctcaaactatgtcctcttaatttactgtttgcactctgttttaacaattttgtcttgtgttttgcagcggaacaatatgaatggttaaagaaggatttggctaaagtcgatagatcggtaactccatggttagtagcttcttggcatccaccttggtatagttcttatacagcgcattacagagaagcagaatgtatgaaagaagctatggaggaattactttattcttatggtaccgacattgtctttaacggacatgtaagacccgacccaaaaagctgtcacttatctttctttgcctttcgatttgatatgatggaccgttatgttttttcttttgtgaaaacttatttccaggtgcatgcttatgaacggtcgaacagagtatacaattacgaactggacccatgtggtccagtttacattgtgattggtgatggaggtaaccgtgaaaagatggcgatcgagcatgcagatgaccccggtaaatgtccagagccgttaaccacgcccgatccagtcatgggtgggttttgcgcgtggaacttcacgccgtctgataagttctgttgggatcggcaacctgattatagtgccctgagagaaagcagctttggccatggaatcctagaggtactgtttttagttaactccttaacgcatcaaaacagagtttag

SEQ ID NO: 167786 - DNA, 10490 bp, Arabidopsis thaliana landsberg
caaattcttgttgttgaaaatagtgacttcaactataatgataagactctggcactgttggctcacactcttctatgtaggccgggcttggctggggcacagttgagagccaaaatttatgatggtttcgttagttttgttaccgagagagcaagaggtatatgtgctgaagctttgagtctcaaggagttgactgcttgtcttccttctgctttccatattgagattcttcttatggctttccatttatcaaatgaagctgagaaggcaaaattctcaaatctcattgcttcatgtctgcataaagttgataccccggcaggaatatgtgatggtcctcagctgtcctcttgggcaatgctgatatctaggttgttagtgctgttgcaccatatgttgttacatccaaacacatgcccaacatcattaatgctagatctaaggtctaaactgagggaagttcgtagctgtggtagtaatttacatgtaactgttggtgatcatttatcttcgtgggcgtctcttgtagcaaggggtataactgattcatgggctgaggatgagtcagtcagccatctaatgagtcaaatgattgacttttcccctcatcctcctacatttcagaatgatgtgtctactgccaaaaccttaaacttggattatggagatttatctgcgagtttgtgtcgggttttggggctgtggaaggggaaaaaggcaggaaaagtggaagacctgctagtggaaagatacattttcatgctttcttcagatattgctcgtattaactgtgcattggatagccagccttctttgcatgttaattaccagaatgtggacatatctaactctgtggatctcatcagcaccagtcatttgcttgtaggcgacatcaatgttgttggtagaaatatcgagttgagaaacattctgatcggtgttttaaatcagctccaggcagcacctgagcaggtggttgaggatttgggttgggattatattcgcgaaggagcttggctctctcttctgttgtactttcttgatggtggcgtctgggattattgcaacaaaaattcatgttcagaaatcgatcccttctggaaggagtgcacatctgttgacgccaagtatgttgctgcagcagaaggggtagtctcttacttgatgaagactggtgatattgcagaattgctgagaatgctttcatcattggttggcaaatatttacgagtgtataagaaagctttccttgcaactttcagcgattggaatcatcacggtcatagttcgccttgtctgctacttctcaagcatactcaatttggtaaaagtctccaaggtgaatatgcgaagattggtgacaattctctccatcttcaatgcatcttttatctgtcaaaactggattccctgggagatggaagaggttcgggtgttttatggaaagtgttttgggaatttatggtacatgggtttcccactagtcttcaaacttctagtgcgattcttctttcatgtattctaagcataagatgcattgtgctgacaataaatggcttactcaaactgggtaactctaaggagaagtttggggtagatactagtgtacttcatcagctacttgattctatcatgattattaagtttgaccaggtattcgaaagctttcatgggaaatgtgaggagatccatcaaaatatatgtgccgtgttgcagcttccagatttgactgagttgtttctgatgaaagacatggaggggtttgtaagagatatcagtgctgagcagatagatagaagccaagtgcttgaaggggtgatcaccaagattgtagatgttatggacagtctaagcaaggattcttcgaaatctgatattttcaaattttatcttggtgtagatgcagtctctgagcataccagggaattttatgagttgcaacgtggagatctgtctgtgtttattgactcattggactactgttccttggaaccagtaaacataaaagtacttaacttccttgttgaccttttgtctgtggctcaatcccctgatctccggagaagagtacaacaaaaatttattgacatggatttgatatctttgtctgggtggctggagagaagactgttgggttccttcgttgaagaaatagatgggaaaaagactgcaaaaggaaattctcttcctttcagagaggcagcaatgaattttattaattgtcttgtgtcatctactaacgacctacagaccagagagttacagaatcatttattcgaggccttgctgatctccctcgataccgcgtttctctcatttgatatccatatgtctatgtcatattttcattttgttcttcaacttgcaagggaagacaacctgatgaagatggttttaaagagaaccataatgctgatggagaagcttgctgccgaggagaagttgcttcctggtttgaagtttatttttggtgtgataggcaccttgttgagcaaccgttctccaagtcatggagagagtttgtgtggaaagtccttggcaagctataagaatactgcaacaggtcctttggtcccaaaactttcaggaacaacgaaaaaatctgatacattggctctccccgtggatcaggaaggaagctcaatatcacttgaatgcgatgtcacttctgttgatgaagatgaagatgatggaacatctgatggtgaagtggccagcttagacaaggaagatgaagaagatgccaacagtgagaggtaccttgcctcaaaagtctgcacttttacgtccagtggcagtaatttcatggaacaacactggtatttttgttacacttgtgaccttactgtgtccaaaggttgctgttctgtttgcgcgaaagtttgccaccggggtcaccgtgttgtctattcacgatcgagtcggtttttctgtgactgtggagctggaggtgttaggggaagcagctgccagtgcctgaagccacgcaaatataatggaaatggaagtgctccagctcgtggtacaaataatttccaatcgtttttacccttgtctgaggatgcagatcagcttggagaaagcgattcggatgtggaagaagatggtttcggggaggaaaatcacgttgtcttatatatgcctaaagaaactcaatataagatgtcactgctactcgaagagctcgggatagaggaccgagtactgcagcttttctcatctttacttccgtctatcactagcaaaagagactctggcctgtcgaaagagaagcaggtcaatctcgggaaagacaaagttctttcatttgacacggatcttttgcagctgaaaaaagcatataaaagtgggtcattggacttaaaaataaaggctgattatactaattcaaaggaccttaaatctcttttagccaatggttcccttgtcaagtctctcctcagtgttagtgttcggggtcgccttgcagttggagaaggtgataaagttgctatatttgatgttggacagctaataggacaagccacaattgcacccataaatgcagacaaggccaacgttaaaccactttcaaggaatattgttcgttttgagattgtgcatctttcattcaacccagttgtggagaattatcttgctgtcgcaggccttgaagattgccagatacttactttgaatcatcgaggtgaagtcatcgacaggcttgctgttgagcttgccctgcaaggtgcattcatcaggcgtatagactgggttcctggttcacaggttcagttaatggtcgttacgaacaaattcgtgaagatttatgatctatcccaggatagcatcagtccaacacagtacttcactttgccaaacgacatgattgtggatgctactctttttgttgcttctcgtgggagggttttccttcttgttctttcagaacaagggaatttgtataggttcgaactatcttggggcggcaatgcaggcgcaacaccgcttaaggaaatcgttcagattatgggaaaggatgttacgggaaagggttcatctgtctatttctctccaacatatcgactgcttttcatatcctatcatgatggaagttcttttatgggtcgactcagctcagatgcaacatccttaactgatacatctggcatgtttgaggaagaatcagattgtaaacaaagggtggctggattgcatcgttggaaagagttgttggctggcagtggattatttatttgcttctccagcgtgaagtcaaatgctgtcttagctgtgtccttgaggggcgatggggtatgtgcacagaatctccgtcatccgacaggatcatcttcccctatggttggaataaccgcatacaaacctttgtcaaaagacaatgttcactgtctagttctgcatgatgatggcagccttcagatttattctcatgttcgtagtggagttgatactgactcaaatttcacagctgaaaaagttaaaaagttgggttctaagatacttaacaacaaaacctatgctggtgcaaagccagagtttcccctggatttctttgagagggcattttgcattacagcagatgtgagacttggtagtgatgctattagaaatggtgattccgagggagcaaaacagagcttggcatctgaggatggctttattgagagccccagtcccgtgggcttcaaggtatggttggaattctgcagtaatttttcttgataagtttatctgcatactatgcttggttattagtttagtactctgaagagtattttgtccgcccaattatgagtatatgggttgcttgtctccagttatctaacctccttctctctttcagatatctgtctccaatccaaaccctgacattgttatggttggcatccggatgcatgtgggtactacatcagcaagctctataccttcagaagtgaccattttccagagatcgattaagatggatgagggcatgaggtgctggtatgacatcccatttactgtggctgagtcacttctagctgatgaagatgttgtaatctctgtggggccgactactagtgggactgcactgcccagaatagactcgcttgaagtatatggtcgagctaaagatgaatttggctggaaagaaaaaatggatgctgtgctagatatggaagctcgtgtgcttggtcatggtttgcttcttccaggctctagtaaaaagagagcgttggcacagtctgcttcaatggaagagcaagttatcgctgatggtcttaagctcctatcaatctattattcagtttgtaggccacggcaagaagtagtgcttagcgaactcaaatgcaaacagctactagagacgattttcgaaagtgatagggaaaccctattacaaacgacagcttgccgtgttttgcagtctgtctttccaagaaaggagatatactaccaggtaatgtttctaccaaattcagtcttgcatgttcagtagatatttccgggcgcagatattctttaaatttgtatgttgtctttggcattgattatatctgttgctataggtcaaagacaccatgcgactccttggagtggtcaaggtgacctccattctttcttcgaggttggggattttgggtactggaggttcgattgttgaagagttcaatgctcagatgcgggcggtgtctaaagtagctttgacccgtaaatcaaatttctccgtctttctggagatgaatggtatatgctgtttcagttattatctacagtgtgtctatttgcatgtgtagttcaaaattcaaacacaattttgtttattatccttgtattatgtaataggagcggctgtttgtcatacaaatataatcttcctttcatatagttttgtttatatgagatatgtttgttatgtaggctctgaagtggttgataatctgatgcaagtgctatggggaattttggagtcagagccactcgacacacctactatgaacaatgtcgtgatgtccaccgttgaactaatctatagctatgcagagtgtttggcatctcaaggaaaggatacaggggttcattctgtagctcctgcagttcagttactgaaagcacttatattgtttcccaatgagtctgtgcaaacatccagcaggtgtgttcttgtgtatgttttttatactctgctctcttagatatgtactagtcttctaactcagtttctttacagcctagctatatcatcaaggttacttcaggttcctttcccaaagcaaacaatgttgacaacagatgatttggttgacaatgttacaactccttcggtgcctatcagaacagctggtggaaatacacatgtcatgattgaggaggactctataacttcatctgttcaatactgctgtgatggctgctccaccgtccctatactgagaagaaggtggcactgcactgtttgtccagattttgatctatgtgaggcatgctatgaagtgttagatgcagatcgtctaccaccaccacacactcgagatcatcctatgacagcaattccaatagaagtggaatcacttggtgcagacaccaatgagattcagttctctgcggatgaagtaggtatttcaaatatgttgccggtggtaaccagtagcattccacaagcttcaactccctccatccatgtcttggaacctggtgaatctgctgagttctctgcctcactgaccgatcctatttctatctcagcgtcaaagcgtgccgtaaattctttgattctctctgagtttctccaagagttgagtggatggatggaaacagtatccggtgttcaagctattcctgtgatgcaattgttctacagattatcatctgccattggtggagcctttatggatagctcaaagcccgaagaaataagcttggataagttaattaaatggctttttggtgaaatcaatctcagcaagccgtttgctgcttcaactcgctcttccttaggggaaattgtgattcttgtgtttatgtttttcaccttgatgcttcggagttggcaccagcctggtagtgatggtagtagctccaaattaggtggaagtacagatgtacatgaccggaggattgtccagagctccactgtagtagctactcagtcttctttacatgttcaagagagagatgactttgcatctcagctagttcgtgcgtgcagttgcctcaggaaccaagagtttgttaattatctgatgaacatacttcaacagctagtgcatgtttttaagtcacgtgctgccaatgttgaagctcgtggatcaagctctggttctggttgtggagccatgctcccagtcacaagagatttacctgcgggtaactattctcccttcttttcggattcatatgcaaaagcccatagagcagatatttttgtggactatcacaggctgctacttgagaatgtgtttcgcttagtatataccttagttagacctgaaaaacaagagaaaatgggggaaaaggaaaaggtatacaggaatgcttcttctaaagatttaaagctggacggtttccaggatgttctatgcagctatataaataaccctcatacggcttttgttaggagatatgctagaaggctgtttttgcatctttgcggaagcaaaactcaatactacagtgtcagagattcatggcagttttccaatgaagtgaaaaacctatacaagcatgttgaaaagtctggtggttttgaaaacaatgtttcatatgaaagaagtgtaaagattgtgaagtcgctttctacaattgctgaagttgctgtggcaagacctcggaactggcagaagtactgtctcaggcatggagattttctgtccttcctactgaatggtgtattccattttgcggaagagtctgtaatccagacacttaaactcctcaatttggccttttatcaaggaaaagatgtgagcagctcagtgcagaaagctgaagcaactgaagtagtgacaggctcaaaccggtcaggatctcagtcagtggattcaaaaaagaagaaaaaaggtgaagatgggcatgattcgggtttggaaaaattatatgtggatatggaaggggtggtcgatatcttcagtgccaattgcggagatctcttgaggcagtttattgatttctttctgctggaatggaattcgagctctgttcgcactgaagcaaaatctgttatttatggcttgtggcatcatggaagacactcgttcaaagaaagtctgttagcagctcttttgcagaaggttagatccctgccagcatatggtcagaatattgttgagtacacagatcttgtctccttgttgcttgacaaggctccagaaaacaactcaaagcaagcaattaatgagcttgtggatcggtgcatgaaccctgatgtgatagggtgcttttttgagacgctgcattcccagaacgaactcattgccaatcatccaaactcccgtatatacagcactctgggtaatcttgttgaatttgatggttattatcttgagagcgaaccttgtgttgcctgcagttctcctgatgtgccatatagcaaaatgaagcttgaaagtttgaaatccgagacaaagtttactgataaccgcatcattgtgaaatgtactgggagttatacgatacagtctgtgacaatgaatgttcatgatgcacgaaagtcaaagtcggtgaaggtcctaaacttgtattacaacaatcgccctgtctcggatttatcagagcttaaaaacaactggtcactgtggaagcgtgccaaaagttgtcatctgtcttttaaccaaactgaaccgatgcggaatctcctattcctatcactgcttgtaacttgatgatcgcgttggattctttctgtgagaatcttcaggcgttatctcttgaaccattgcaatgtcctcgatgcagccgacctgtcactgataaacatggtatttgcagcaactgccatgagaatgcttatcagtgcaggcaatgctttaacattaattatgaaaatttggattcattcctttgcaacgagtgtggctacagcaagtatgggaggtttgagtttaacttcatggcaaaaccaagcttcatatttgataatatggaaaatgacgaagatatgaagaagggattggctgctatagagtctgagtctgaaaacgctcacaagagatatcagcaactactgggattcaagaagccgcttctgaagatagtttcaagcattggtgaaactgaaatggattcgcagcacaaggacactgtccagcaaatgatggcatctttacctggtccatcatgcaagataaaccgcaaaatcgcacttttgggcgtactgtatggtgagaagtgcaaagctgcttttgattctgtcagcaaaagtgtacaaacactgcaggggcttcgtagagttttgatgagctacctccatcagaaaaattcaaatttttcatcaggtgcctcaagatgtgtggtctcaaagaccccaaacaattgttatggttgtgcaactacatttgtcactcaatgtcttgagattcttcaagtgctgtcgaagcatccaagatctagaaaacaacttgttgcagctggtattttgtctgagttgtttgaaaacaatattcaccaaggtccgaaaacagcccgtgctcaagctagagcagctctttctactttctcggagggtgatctgagtgcagtgaatgagttaaacaatctggtacagaagaaaataatgtactgccttgaacaccatcgttccatggatattgcgctcgccactcgtgaggaaatgttgttgctttcagaagtttgctctctcactgatgaattctgggagtcaagactgcgccttgtttttcagctactattttcatccattaaattgggtgctaaacatcctgctatatcagagcacataattcttccttgccttaagattatttctgtggcatgtacacctccaaaaccagatacggcagagaaagagcaaacgatgggaaaatctgctcctgcagtgcaagaaaaggatgagaatgctgctggcgtcataaagtattcatcagaaagcgaagaaaataacctgaatgtatctcagaagacgcgagatattcagcttgtgagttatttggaatgggagaaaggggcatcatatctcgactttgtgaggaggcaatacaaagcctctcagtcaattagaggtgcgagccaaaagtctagaacccacagatcagatttcttggcacttaaatatacacttaggtggaagcgaccgactatcaagacatctaaaggtggcttacaggcatttgagctctggtcgatggtcacagagcttattcttagtgcatgttctcaatctatcaagacggagatgtgcacattgattagtttactcgctgcccaaagctcacctaggcgctacaggctgatcaatttgctgataggctcgctttccgctacacttgcagagg

SEQ ID NO: 167787 - DNA, 2094 bp, Arabidopsis thaliana landsberg
atgacgaaacacaatcctttctaccttgtcaatggcaaacaagtacatgtgccattcatgcaaagctcacaaagtcaatatgttaaggcttacgatggtttcaaggtccttagacaaccataccgacaaggcgttaatgatacaagtcgccaattctcaatgtgtacctatctcccggacgagaaagatggattggataatcttgtggagaaaatgacatctactgatggattcttggacagtcacattccgagttggagagttgaagttggtgaattcagaattccaaagtttaagattgaattcggttttgaagcttcaagcgttttcaatgactttgcgcttgatgtatcattataccaaaaagctatgattgagattgatgaagaaggtactgaagctgcggctgctactgctctagttggttcttgtggctgcagcctttataggcctcctcctcccatagattttgtggcagatcatccattttttttctttattagagaagacaaaaccggaactgttttgttcgctggtcaaatcttcgatccttccttatcttcttctgcttaagatcggtctaaataggagtttgggattttaagatttggtttttcatatgatttttgagttttgtttttggttttgctaaatctctatttgctttatcttattatataaagtattaaagttagtaactcgccacagtgttaacggtctcagattttcaacatgtgaaacaaaaaactcatttatttattttaaaagaggaaatttatttatttaaaaaaattaaagaagatttttttttttggtgaagaaaaattaaagaagataattataagaaaactataaatatcttattaaaaaaaaaaaaaaaatattttataattctaattagtagttactaattcttgaaaacatgcaaagggaaatttactaattcttaaaaaaaggaaatttattccaaaaaagtatttctaaaaagtcaagagattaaaaatatgaaaactatatctcttattaaataaaaataaaaatggataaataaaaattttaaaaaggattttaaaagttatataatgttcatataaaataatataactaagaaaaatttacattcaattattaattctaaaaggaaaagaattgtgaatctcaccaaatcaccagttatttattattttaaaacaaataatcgaacaaatcaacccaatatcctaaaactttcctcaaatctctcaaaaacttcaaatagacaaattccacaaaatattctaaatttcttgttccaactgaaaaaattaagaagaattttaactattttttgttttgggatttatctttaatttatacaataaaaaataattacatttatttcaacgtaaatttacttttgttgactctttttagttttacttacctattcgaaagaaagaaaaaaagaagaagaaatattaactctattttccagtgagtgtattgaaatatgaagtttatctaaattaaacctttccggattccatcattcaactaattaataaagaaatctacattttaataataatttgaaatttcctaaaatatcatcaatatgttcaatacaaaaagcacatccaccccttaactggtttacatcatgtaaattacatgtctgagtcctctatcttttctctttcgttatagtcttatagatcaaaaatggatgtaagagaagctatgaagaaccaaacccacgttgccatgatcctttccgggcacgtcttatcttccgcgccgaaagactctaacgtcatcttctcaccggcgtcaataaactctgcgatcacgatgcacgccgctggtcccggaggtgatttagtctctggccaaatcctctccttcctcagatcttcttcaatcgatgaactcaaaaccgtcttccgagaactagcctccgtcgtctataccgacagaagcgccaccggcggcccaaagataacggcggcgaatggcctttggattgataaatcacttccgactgatcccaagtttaaggacctctttgagaacttctttaaggctgtttatgttccagtagatttccgatcagag

SEQ ID NO: 167788 - DNA, 4129 bp, Arabidopsis thaliana landsberg; identical to SEQ ID NO: 5265

SEQ ID NO: 167789 - DNA, 319 bp, Arabidopsis thaliana landsberg
ggttccaggcacaattcaagttaatttatggtcgtcttctcataggcttactatatcttaacatcttccattttgcgttgtcacagggtccttacaccatacttccgttgattgataggtatgatagttaagctcaataaatgaccacacttgtgtttctttttgttgatgattagggtttttgggtttctttgatcttaagcataaaggacaagctaacataacccatgtcggggatggctttgcatttagaaattcttgtattcttacttatgttatccggatttaaaaatcatctacatctcacataatcttaagt

SEQ ID NO: 167790 - DNA, 1814 bp, Arabidopsis thaliana landsberg
agcactccacaatggcacgattagtaccacttcttcctcttcctcttcctctaccacgacttcctcggaacactccacgaccccttccttgacttggtctttcctcgtgagtcacctttaacgcctgctcttcttgtacatgcccattcagcctctgctcgtgaacaagtagactcccatggagctcatcaatactcaatgtactcagatcgtttgattcctcaatcgaacaaaccacgtagttaaattttggagtcaaggatctgagtattttgcttacaattgtgctttgttccatcacctcaccattggttttcatcttgttcaccaccgtcaaagttcttcccagaaaagtatcgatcttctctccttctttcatggccagcaattcaaactcctttcttaatgcttgtagatgtgccctcttcaccttcgtagaaccttgatactttttcttcatcgattcccagatcgccctagagcgtgctcttgtcaagaattgtttccagaatctctctatcgatagcctgaaacaaaaaattcttgaccttcaagtcttttagcttagcctcttccactgcgcttctttgcgcttcactgaccggtgttgttccaacgacaattgccggaattccttcctccaccaatctccacagttctctgctacggagaaaattctccattgtcattgaccagaaatcgtaatagccatcaaatctcgggatagctggctgcacaaatttctcagatgacgacatctctctttttctcacttttctctctctcttttatctttctctctcgatcactctctcacacaggttgtttcttgtttgcaagctctgataccaaatgtgaattgtttgactaaaagtgatacttcattaacgagaaaagatggctttaaatagccttacaaagactcgaaagaaacaacagaacaactaaaaaataggaacagactccatgactccactacacgaagtgactcaattccacatctccactacttagactcctccataagactcggacataattgactccagaagcaaaccaacgactaacaaccaaagactttttcaaacaccaacagtgcaacggtttattattgtgcaccacagatgacagtagacttgtggtttggaacccttatactggtgaaaccaggtggatcccttacaaatccaactcgccttatgaaatgtaccagaagtttgttttgggatacgacaacaccaataaatctcgctatagctacaaaatcttgaggtgttaccacggcttgatcgactttggttatgagtttgaaatctatgagtttaactctcattcatggaggagattttatgacaactctcctaattgttcctttgaatctaagggcgtgacactgaagggcaacacttactggtttgcttcagatactgaaggccgccacatcatactcaggtttgatttcgcaacagagagatttggacgtctctctcttctttatcagagtggtggttatgttgataatgttgtggaaactggggttttatcggctgttagagaagagaaacttgcgttgttatatgagaggtttgatgagctgaatgattcatcagagatgaagatatgggtgacgaatactaaaatcgtcgaggccaaagacttgtcgtggagcgacttcttggtagtggattcctctaaatttatggtaacaaggatgacgaatgtgatgagtttcctggtggacgaggagaaaaaaatggtggtggtttgtgatacagacattgatcaacatatgaacagattttacattgtcggag

SEQ ID NO: 167791 - DNA, 874 bp, Arabidopsis thaliana landsberg
tggttttagtcatcgcttgaccacccgaaggccctccttcctgtacgttcgtaacgagctactcctcaaggagctcatcatggacatcgagtcccctgcatctgccacggtactgtaagacgtgtcctccaccggccaacgcccctcaccctccaatgactaggggggttacatgctctcctaccaccccatagagctccttgtgaggctcctagctctgacggcagttgccggcctcagaagggtgacccgttggggtgatggatcttcccatggtggccccataggccgcgacattggtctaatgtggtcttcgttctacaacccctggaccgggaccatctccatgtggccaggcaaggccccgggtgcatccttgcctcgtcctcccacattggccctctgactggcgccccctacggcgtgcccccaatgactcacgtccgccccagctcctacctccgggatccccaccccgacaccttggtccccactggctggaggatgggactcagcctccatcgtcgtcgccttcagtaccccatggcgatgacacaaccacccccctccgacagggtggtcgactccagtgcgtcctaccacaccacctccatcgcgggcacgttatctcgctctcatccccccattcctcccacccctcctcgatcgtcgtcgagaacagttccactctgccggtcacctcagtaggtgcctcggttctcctaggaccgttctatctcaatgacgttctcatagctcctcacatcactcacaactttctttctgttcgtcggttcatcaccgacaattcttgttccattgagtttgacccttttggtttctctgtgaagagccaccatgacacctctcgccc

SEQ ID NO: 167792 - DNA, 473 bp, Arabidopsis thaliana landsberg; identical to SEQ ID NO: 77419
  unsure (1)..(473): unsure at all n locations

SEQ ID NO: 167793 - DNA, 2574 bp, Arabidopsis thaliana landsberg
gggatcgcttccgcaggggtctcaataccaagctgcgggaacgactcaacactgtccgggttgatagcttcaatgagttggtcaacatggccatctcccaggaggattgcattgttgctcaccgggcagagaagaagagaaaggcaccaatggcagcaccatccgctcaggcttagaggtttcggattgtttctcacaatcagagcaggggtttttagcagcaggcaggcagatgggtgatcaggccacctcagcagcagcagcagccggcacccaaccgctttccagctcccgccccaaggaacaatcagcctccgcagcagcagcagttccgccagggcaatgggaacaagtgtttcacttgtggcaatgtgggccactatgccaagaattgtcccaggaaccagcagaggcagatgccagcaccaaatcaagacaagggaagaaagcagaaggtgcaagtcaggcaagggaagctcaacttcactgctctagaggaagtgccagaaggagctcctatcatgaccggtaccttttcagtttataatcaacctgctttaattctgtttgattctggtgcatctcatagtttcattagccaaaagttcagtgctaaatgtaaactgccattctctcactcaaaagggtcattcatgatagtcacacctgggggtaaaattgcaactaatcaattaaaccaaagtgtgcctattcaactgggaagccacattgtcaaaaccactcttcttgtgttgggattggaaaatgtggacattattctgggagctaattggatgaccttgcaccaagttgtgcttgatgtagtcagccgtactgtggaagttaattctccgttctgtgagaacttcatcttaattctgcctagtcaaggttctactgagtcatgtgctttctctatgacggagttacccctgaagaagatcccagtggtctgtgagtatgcagatgtctttcctgatgaattgccaggaatgccaccagaccgggatattgaattcgacatcgagttgcaactgggaacgacaccaatttccaagaggccctaccgaatgccacccgctgagttggcagaattgaggaagcaattgcaagagttgctggataagggatttattcgcccaagtacttcgccttggggatgtccagcactgtttgtgaagaagaaggatgaaagcttgaggctgtgtatagattaccgccctcttaatgcggtaactatcaagaacaagtatcctttgcctcgtattgatgttctttttgaccagttggtcggggccaaggtgttttccaagatagaccttcgctctggctaccatcagatcaagatacgagcgagtgatattcagaagacggtattctcaaccagatatgggctatatgaatttttggtgatgtcattcgggctgacaaatgcaccagcatatttcatgtatctgatgaattctgttttcatgcctgaattggacaaattcgtagtggttttcatcgatgatatcttggtgtactcgaaaaacgaagaataacatgtcgggcatttgcatgtagtgcttcaacgtctgcgagagcaccacctttatgccaagttgtccaagtgtgatttttggctaaaggaaatcaaattcttgggtcacactatctctcaggcaggaatagctgttgatcctgataaggtgcaagaggtgatgaactggaagccaccaacgactgtctgtcagattcggagttttctggggttagctggttattaccgaagatttattccggacttctctcgaattgtgaagcctataactgagttgctgaagaaagaagtcaaatttgtgtggagtcagaagtgcgaagatgccttccatgcgttgaggcagcatctgaccacagcaccagtattggcgcaacccgacagcagcaagccttttgacgtgtattgcgatgcctctggcaccgggctaggttgtgtcttgatgcaagacaaccgagtcatcacttatgcctcaagagcactcaggcctcatgagcaaaactatcccactcatgaccttgagttagcagcagtggttcatgcattgaagatgtggaggcactatctaatgggaacccactgcaacatcttcactgatcataagagccttaagtacatttttactcaggctgatctcaacatgaggcagagaagatggctagagctgatcaaggattatgacctggaggtacattatcacccagggaaagctaatgtagtagcagatgccttgagtcggaagttgcaatgcaattgtattctgatggattctcgcattaacaccttgtgtgatgagttgagcaagatgcaaattgaagtgattccttctggttctttgtctcacatttctgttgagccagctttgcaagaccaaatcatcatggcccagctcagtgacaagggagtgcagattatcaagaagaatctccatcagaaggatgagaagtataattgtttccgccaagatgaaaagggtgtgttatggttcaaaagcagatttgtgattcctaaggaccaggatctcaagaggaaaa

SEQ ID NO: 167794 - DNA, 1450 bp, Arabidopsis thaliana landsberg
tcatggtatcaatcttccactctgacccaactcaagctcttgtcgccaaaaatcttggaagtagatgtcttagcccgggaaaatcaaattttctcaataatcaatctatggacgttccaccacgccgctctttggctgcgtctctctcgcctctccggctaatcgatggactccctcgtcggaggagtttcaattataatcagatgcctgaagagcccatcaaactcactgttctcaagcttgatggatcttcctttggtacccattactcatctcctacttgcttttaccattaaatttaatatgttaactaagaatgtttgctcaaaagaactaaaagttattgctttacaacgaattctagttttttctgtgttgtttcgtttgaggttgtccagagaaatttgactggtttctgaatttgtgatttagtacaattccctttaagcgtaatttggatttgtaggtattcaagtgttgaagacagcgacagtaggggagctcaagatggcagtagaagctgcgttttctcacttgcccatctcaggccctggcaagatctcatggtaccatctctgattctttgacttgagttattcttataatgattccgattttgtgtctatattaggataagtaactgctaaatgattcttgatgatcctatttttaccctgtgattataaaggccgcatgtttggggacaattctgcttatcttatgaagataaaagattgattaatgagtctgagtacctcactgaatttggcattaaagacggcgatcaggttacccttttactctttctttatcacttgaatacatcaaagagtctatgcttatgatattatttcatctttacatgtgatgtcgtagaacgatgcatttgggtagctagagtctctaacctggattatgtagattgttatagtccagtttagttttgacaacatagtgctttgttttgatgctctataatgtgttttatctgccatcattcagcttcggttcatccgccatatctcaaactactgcatgttaatggtgaagcataagagcaagacaccccgtgtttcttctttcaaacaactcaaactgtaagaacttttggtgttaaaatgtttttagcatttcattatccggaatctccatagtaatacatgtttttggaccaatcaggttctcaaccacaccggaaacccggaaaaagaacgtaataagggaagttgaagaagacggtgttgttgactccatccctcggagccaaccaagctttctagcaactgtattgggaggtttgctctcttacaagtcgacgccaagtcaacgaggtactaaatacagaaacgtgactgcaagtagagtttttaacaaactcattgcaaggtttcgtttcaagtgtaattccgagaaggatgtgtggaacagaaaaaaactcatatccgaaacc

SEQ ID NO: 167795 - DNA, 597 bp, Arabidopsis thaliana landsberg; identical to SEQ ID NO: 67442

SEQ ID NO: 167796 - DNA, 2798 bp, Arabidopsis thaliana landsberg
tggtatggctcctggttaagtctctatccattaaatcttttgatgatttgttcttaacatcttatacgtcattatctatggtacatgatttttttcttctattatttcccggttaatagatcagagatatttgatatttcttattaattatttgagattcttttagaaattagtcttggttgttttatttagtaacgtgtatatatatatctgccattttttcatgggtttattgtgtttgattccaattggtgcagttgcagatggcactccttatggtatgtaacatcaacttttgacttatccttttttgtttttaccaattttttttctttttcctttgacatgttttctaaaatcttcttctttttaattttgtagtgaatctcttagctcattttcgtggacttatcccaaaaggtatatatatatttgatttcatatttttaccactccataaaactttgtggttgattaattaactaatctacttcattatttgtttcatcataggtcgccgttgcactgaccctggtggtatgaacttaatctctccactgtaacataatttcccaatatattagtttcattatagtatgtttatatcacatgcatgatttctataaatagattcctctatactgaaacaaaagacttaattaagggaggcttaatggtatatgttttgttgcttcacgttggacagatccagcgttcactggtccggtcgtactaccacacccgtcagtgttggagggacccatgatgccttacgagacaaagcagctctcaaacggtggtctgtatatgcgtgttgacatgcctggtgtccctagcgagaagttcatggtggcagtggacggcgatggtgtcgtcaccatcatgggacgagctcctgtgaccatgcacgacacgagtgggcgtacttacgtagccaaggtcgccaatgtccctagaggctatgacgggggtcggatcaaattggtccccaagcatggtgtcatccgtctcactatcccttccaactaatttataaatcgcatcttaagatcatgcttatgcatggagcatatctatctgtttgtcttttcttttggatttccgaatgtttcaacaattttaatatgtacctaattaagacgtttcactcgtatgtttatgcatgttaattatgcttaattttgtcaccatctaatgcatatggttaatattcctggtaaaacgaatttgctacttcactattagtactgtaattgatttcaagagagattgactcaaagtctagagtggcgcgatacagctcaactaatacgtgtgcttctagattgctccaaaaaatagaacgcgtgtcagtatagagtgtttgtcgtatttcaccataatactctcttcctcactctctctttcatttgatttacagctttcgcttcaaaaaacctccaagaaccctaaagacaaagagagaaaaagatctcaaaaagcattaaaaaaaccctaacgaaatcttgagccgcctaatcatggtctccccggttactcttgctcctccatctccaggtatgttttaacttttaacaatttctctttttttcgttctcatcaaatcgtaacctctttctttatttccgataaagttgtcatttttctttgttgttgaattgagcagagggtttctacgcaatcaacaatccattccttgtgaatggtccaaagggtttcttagaggccaagactttggataatgaaagctacatccgcttcgatctccccggagttcctagagatggcgtcactgttttactagaccaacctaataatactgtgaatatcttagccgacgctcccaaggaacacaagtatgactcgtcgcaccgtaactacgacggtaccaagctaagacccaagatcagtgtcggcggtatcaacaccaagatcccttgcaaatgctgtgagttcttctccggctttacttctcacatggccgatggtgttctaagactcgttctcaccacgagccacgcctctacacgacgtccttcttgtacttgcatctgtatattttctatctaaccctttttatttatttattcgaaaaatagaaatttgtaataggataattatctgatatgaaccattatttttatttttgtttctacagcttttcttggtggctcagacggagaaggtattattagttctgttttaatttcatccataaacttttgaaatatagcttacttacttacttaattagaattgttttgcactctgattttctggttatagatcgcgttggcacggctactgatggttttccccatgccacggatcctaatggtattcacattattcccctttaagcttatacatggaaactttagaatttttatttagagaatttcattgtatataggaataggagaagagtctttgaatattaatttgttgttgtttgtgaaatatgtggagcagaccccaacttgaccggcccgatattgatgccacattgttatattgcccaaggatcgcagatgccttatgagtctaagaggctccaaaacggtggtctatacgtgcgtgtagacatgccaggcgttcccaaagagaacttcactgtcgcagtcatgaatgggagagtgagggtgaccggtgaagctcctgccattagccacgactcaagtggacgtttctacactggtgacgttgctatgctctccactcctttcgacattcccatccgtaagatcaagatcattgctaagaacggtgtcattcgtctgatcatccctcccgtttga

SEQ ID NO: 167797 - DNA, 630 bp, Arabidopsis thaliana landsberg
gtgaaactggaacgcttgcgtatccagggcttgcgctgcctgaccgaggtcgaactgagtttgtcggacggactgcatgtgctcatcggtcctaacggcgcgggcaagaccagcgtgctggaagcggccttcctgttgtcacacggccgctcttttcgcagcggtgcgcgcgaagccctgttgcagcgaggcgaaaacgcgctcagcgtgttcggcgaatggcgccatgccgacgggcacgccgtccggctcggactgggtcgaaacggcagccgctgggaagcccgcatcgatggcgagaaggggagtctggggcaacttgtacaggcgtgcgccgtggtgtgcttcgagccgggttcgcatgcgctgatcgccggggccgccgacgagcgtcggcgctacctcgattggggtgtgttccacgtggaacatgatttcctgctggcgtggcggcgttaccagcgggcgctgaagcagcgcaacagcctgctgcgaagccaaccggttgcggaagcgtcgttgttcctgccgtgggaggccgagctggcgcagaccgcgaacatcatcgacacatggcgccgacgctatctggatgatctgcttccccacctgcagtcgcaggcacatagc

SEQ ID NO: 167798 - DNA, 595 bp, Arabidopsis thaliana landsberg
aagctggggactgtgttagggagagtcaaagatcgaacggctagtgatctttccgacgaaacgcctgaaatgacggtcgcacgtgaggcacttgaagtgaaaaagaaggtctcctggaaagcccgtgaagctaggggaaaggtaaacgagagggccacaaagaaggctcatagggtccaaaaagttttggagaaggtacagatcgcggtgcgggggataggaacggtggttgcgacggcgctggggctgacgaagatcgggagtgtggtgggaattgtcgggatcgcggcggcgtatgggatgtgcgtgtgggtgacgtttgtgtcgggctacgtgttggcttcggttcttggggagcagcaattcggtgtggtgcagagcaagatgtatccggtgtacttcaaggcagtctctgtagggattttggttgggttgttaggacacgtcataggccgacgccggaaggtttttaccgatgcggtggatatgtggcaatccgttaacctcttgtcctctatcttgatggtcgaagctaatgcgtcatttgtttacacacgagccaccaaggttatttgccactcccacttctattttt

SEQ ID NO: 167799 - DNA, 1165 bp, Arabidopsis thaliana landsberg
aagtgtgttgacataccacgcgtcataaagatcagtcgtcatgatcatcgtattcattataatcattgtcttgaagtcggaaattggaactgtggagtgtgtcataaagagataaaatggacacatggggctcattcttgtttgaaatgtcctaattttgcttatcatgtaagatgtgccacaaggtccgggatttgggataggattgaactcgaaggcataccagaaaaaattgtagaggttagatcatatgaagtgatcaaagaaggagtgataaaacatttcagtcacaagggtcatactttaaagctcaaagaagaaagtgataatgatgattgcatctggtgtaaagtatgcacatatcctatattgtttagcccattctatagttgcatggaatgtgatgatttcatccttcataaaaattgtgcttatctgccaaaaaaaaaagtagattccttctacaagatgccaattactttaaccacaagactcgcaggaggctttttgaacatttgcaatgcttgtcaaaacgttcataatggttttacgtacaaaagtgattatagtaatgtatacttggatgtgcgatgtggttctatttctgagccttttgtccatgaaagtcaccctcttcattcattatacatcaactattcaaagggaaacatgttttgtaatgcttgtggagataagtcaactatggtcttgagttgtgaggagtgtgaatttgttttagacatcaaatgttctgttttgccaaagatatgtatacacaaaaatgatatctatcattttctctctctatgctacggagaagacacgaatgagcggtactggtgcgaggtatgcgaggaagaactaaatccgaaaaaatggttttatacatgttatcaatgtgctttcacttttcatatcaaatgtgctctcggagacttcacatggatggaaacgaataatgatgatgaatattccaaattggtgtttcgtaataatcgtatgtctcgaccgatatgtactgtttgttattctcgttgtcaattcccatccgtcttgctctatgatttaacctgttgttgttctctaagatgtttccaaaaagcggtccacatcgaacccgaatgagatcctcgcatccggcttgctattgatttatctcaagtag

SEQ ID NO: 167800 - DNA, 338 bp, Arabidopsis thaliana landsberg
  unsure (1)..(338): unsure at all n locations
gcatgatgctgtccggcatgaaaccagatgaaattatccgggccatagtccaaaacagtgccgtcgaactggaaagaatcaaaggcatcggcaaaaaaacagcccaacggctgacccttgaactaaaagacaaactgtccaaaatgcatgaccagcaggtcgtatccggagtagcgccaataggcagatcggttcagtcagatgcgctggacgccnnnnnnnnnnnnnnnnnnnnnnnnnnnnnnnnagaaagcgccatccgtaagacgctgaaagccagctcagagagtgccacggatctggagagcctcatcaaattatctctaaagaacctttag

SEQ ID NO: 167801 - DNA, 463 bp, Arabidopsis thaliana landsberg
  unsure (1)..(463): unsure at all n locations
gcttggnatgttcgtcctggtccttctgtcgttcgcggtcgcgaacgtgcnatcgttcctgtggaccaactcaaagtggctggtctccaccgtgcttccggctgtcgtagtgtccgaaaccaacgaggctcgggcaggggaggacttgccgccccttacgaccaatgaggtccttgatcgcgctgctcagatgaaggctgaggacatggctgcgaaaggatattttgcgcatgaaagtcctgaagggctcacgccatggtactggttcaaggaagcggggtatcaatatgcgtatgcgggggagaatcttgcggtccacttcacagattcaacggcagtcgttgacgcatggctcaaatctcctgctcatcgcgcgaatgtcatgaacgggaactatannnnnnnnnnnnnnnnnnccgcgaaggggacatttgaaggcgtggatactgtgtttgtggtgcag

SEQ ID NO: 167802 - DNA, 232 bp, Arabidopsis thaliana landsberg
taaagaggcaactagtactattactgctcgcggagtcatttctcagttttcatatgagtcaactattgtaaaaccggtggtttatcatcccacggatcgtattcaatacttcagtggtgctcgtccttttattggccatgttgaccgctttgagaggccaaaagaacgggctattaactgcgataaggcggttcagctctatggaggggttcttataaaggaatttcgtaat

SEQ ID NO: 167803 - DNA, 501 bp, Arabidopsis thaliana landsberg
caaaagagagatagagaatggctaactttggaatcgaacgtgtttaccaagaatttgagcctgcaactagatggacctctgaaccagacgccgaggttcttgtcgctgatcttccaggtttgttttcttcttctcgatcttgtttatttgtgttcctttttttctacattaaacacatagaatagagagaaagattttggtaagagcaagcaagctcatattgtcttctgtcgttaggattcaagaaagaacaacttaaagtgtcggtaactgcaacaaggaagctaagactaacaggagaacgcccaactggtggaaacaaatggattcgcttccaccaggaaattccagttccattgaccgttgacatcgactcagtttcagccatgttcaaggataacaaactctacatccggcatcccaaactcaaaacagaaatccctcaaaccaagccaccaacaccggtgatcatgaaaccccatgatcagcatgagagaaaac

SEQ ID NO: 167804 - DNA, 975 bp, Arabidopsis thaliana landsberg
ttcattaatctgtcacaaggtattaataatgtagactatctccttgtttgaaaatactatagtttatatgcagtgaaggttttcattaactgttgttagacgttttcaggagcgcaaatgccttacatgactactgatccgaaagaagtttccggcaagtcattcgattacatcgttgttggaggcggaactgcggggtgttccttagctgctactctgtctgagaaatactctgttctggtcattgaacgcggtggctcgccttttggagatccattagtagaagataaaaagtactatggatactcattgataaatacagatgaatactcatccgttgcgcaaagttttacctccgtagatggaatcaaaaaccacagaggacgtgttcttggaggatcgagcgctatcaatggcggattttacagccgagctagcgatgagtttgtgaagaaagctggttgggacaaggatctggttcaagaatcttataaatgggttgagtctaaggttgtcttcatgccggagttgactcgatggcaatccattgtgcagttcggatttcttgaagcagggttttatccgtataacggatatagtttggagcacacgcaagggacaaagatcggtggaagcatattcgatcagtgtgggaaaagacatacatctgcagatcttttgggatatggtaaaccaaattgcatcactgttcttctaaacgcaacggtaaagagcataatctttgatgctaacaagactcgcgcagttggagttaggtttatggagagtgatgggaactcaagtaagagctacaaagttcatgttgagcagcatagaggcgaggttatacttgcggctggggcccgagaatcatctcaatgatttcgacattcctgtgattgtcaatctcaaagaagtcggaaaacaaatgtcagataatccagcgatctctcttctcgttgatagattctcgca

SEQ ID NO: 167805 - DNA, 470 bp, Arabidopsis thaliana landsberg
tagcacatccagaaaccacgttcgtcggtgtctggaatgtgtctttatgcaggattgcgttgctcggtgctgccaccagttggagatcggtgaacttctggacataaggcggtacgtgactgattcgaggggaaggagcatgaggcgttcttcgtttgaagagattgacgaggaatgtatgggctatcaaggagtgatgctagatccggagataagcatgagcgattggaccgcttacgatctagaccttgatcagattcttcaggcgtcactagatgcttacgtttgccatcagcttggtgtttggactcgtctctgggaagtttgaaaacaagtatcaaaatgaataaattgctacttggatttttctgtcttttgttgacaagtgacttgaatcttctttttgttttgttatgagaaaaaaattgtggtttgaatcttttcgtttatttttgttgtcaagtggtttg

SEQ ID NO: 167806 - DNA, 709 bp, Arabidopsis thaliana landsberg
atttaaaacgccatatgagttgagagaacacttggctcactcgttgttcttgaccgtgattggggttaacgactatgcattcttctatactaggttaaccgatgcgaatgatttcgcagacgaacttcttcataagttcttgaaaaaaatagaggtaaaagggtattcacaaattatttacttacgtgtaataatgttaatcaagatacatcctactaaagactttgattttttgttgtagaaattgcataagttaggagcaagaaagttcttcatcaacaacattaaaccattaggttgttacccaaatatagtagctaagacggtaccacgcggaagctgcgacgaacgtataaaccttgctataagcatttacaacgaaaagcttagaagaagcctgcctgttatgaagaaaaaattaaacaacacttcttttttatactctgattacttcaagttcatgttgggactaagaggaccttcgaccaatcaacatagttcgaatctattgaacacgacaggcccgtgttgtcctttagattatgatggaagtttaacttcaagttgcaagcgcaggtcaaaaacgtgtaaagcaccagattctactcatattttctttgatccgcgtcatccgactcagttggcgaatttcatgtactccattgcgtgtttcgacgagagaactatttgtcatgtcgtgtgatttaaa

SEQ ID NO: 167807 - DNA, 618 bp, Arabidopsis thaliana landsberg
gatctagctgagctaaaagtgcatatagtgaagaaggttggggttgaaagatctacaaggtatttttactacttgggcaggtttctgagtcagaagcttactaagagtgagtttgataagtcatgtttccgtcttttggggagagagaatctttctcttcacaataagttgattcgttccatcttgagaaatgcatctctggctaagtccccaccatcagttcaccaatccggtcaccctggcaaatctttggtgcttgggaaagaagatggacctgaagaaagcagatctctaaaccctgaccatattaggaatgatcttgctttgtccaatggggtgttagccaaggttaggcctggaacatgtgacgacaggacaatcagagataagccttgtccgctagggtcaaacggaaaggttttgggtccttttgcttattcaagacctcgtcgatatcctgatgaaagagacagtgcatttctttgccctgctgaacaaaaggcggattccggtatacatcaggttgcagctccaattagcagagttgatcaagctcaagtaaggattctttccacacctcctgtaatggcacctctggggattccattctattcggct

SEQ ID NO: 167808 - DNA, 1601 bp, Arabidopsis thaliana landsberg
caaatggataagacgtggatttcgctgccacggtatacactaaattctttctgagcttattaaccaactgaaagaaatctagctaagttcttttcaaatttacaatgtaggaatagtttcgagtacttataaggagcaacaaacttcgccaattcatcagcaagaagattgggtaatctgtctgaaatgctatgcccatgtatagattgtcgcaatttatgccatcagtctatcgatgaaattgttgagcatctagtgataaggggtatggataagaagtataagacttcttgttggagtattcatggtgaaaaaagagcatctacagaagacagtggtcctcaatatgaaacagaggcatttgacttgtttaagacagtattctctatgggtgaaggtgaaccaaatcagacgaatgatgatcagggaaacgacgatgaagcagtagaggaaactgagtttaggcagaagttaagagaagctgaaactccattgtactctgattgtatcaaatacacaaaggtttcagcaattatgggactttacagattcaaggttaaaagtggtgtgtcggagacctactttgatcagctgttggatttaattcaagacatgctatctaaagacaatgtacttccgaagagtttagctgcaatcaaaagattcctgaagatatttggtttcggatatgaaaatattcatgcttgcaagaataattgcatactatataggaaggagtttgagaagttagatagctgtccaagatgcaaagttttaagatgggaaatggataagcacagtaatgagataaaggttgggattccagccaaggtccttagatatttccaatcaaggacagatttaggagaatgtttagatcaaaaaagatggctgaagatttacgttggcactatacaaagggcactgaagatggtacaatgagacaccccgttgattctatatcttgggcacaagtgaatgcataatgtccagactatgctgttgaaccacggaatcttcgacttggaatttcaacagatgggatgaaccctttctccatgcaaaacaccaatcacagcacatggccagttttgttggcgaactataacacagctccgtctatgtgtatgaaggctgacaatataatgttgtctttgctgaatccctggtccaacaactcctggtaataacatagatgtttacttggcaccactgatagacgatttaaaagatttgtgggctgagggtattgaagtatatgactcatttgcgaaggagaatttcacacttagagccatgctgctatggagtatcagtgactatccagccctaggaacattgtctagatgtaaagtgaaggggaaacaagcttgcaatgtatgtggaaaagatacaccttccagatggcttaagtttagccgtaagtttgtctatatggggaatagaaagagactaccgcctggccatcgttacagatatagaaaagcttggtttgataacactgttgaggaagggaatgccaataggagccccactagcgctgaaagatatgaggcgctacaagctcttagaaatgattttggacaacctatgaaactagg

SEQ ID NO: 167809 - DNA, 801 bp, Arabidopsis thaliana landsberg
catatggggttttactccgatcaaactaggctagagatcactttagaaagttacttggctttttcaacaagctttggaggaggtaattagtttctttcttttgtaatcctcacctaatcaaagtgattgttatttgttttttgtgcgtggtgttttgtaatttgagatgtatatttacgcagcaaccggagaacgatcactatgcgagatcactggaattggcttccaaggtacatctttattgttaaagtttcctcaaatttgtcatgtttcatcttttggttctggtttaagaaactgagatctacgtgttgtagaggcttatctagttgtcttagcaataggaactgcgaggtggtttggtttgatggatatatatataatcactcatagacggagaaaaatgtatctgaatcatacctttatgcctagatatgaagcttttttagtgtagaataaactcattgttcagtgaagcaatggttatgaatctttgatttttgttcgtgagacctattctccttctctctgtgtgaaactgcaggctccagaactacatacaggcggcaccgctggaccgtcatctaacagtgccaaggttgtttcttttattcgaaactacaatttggtttgatgaaaatttaacacgtttgttctttctcacagacgatgaagcagaaaaagaccagtgagttcaagtatgatgtgttcggatgggtcatcttagccagttacgttgttgcgtggatcagttttgccaattctcagacgccggtgtcaaggcagtaacgctcaccaaaa

SEQ ID NO: 167810 - DNA, 238 bp, Arabidopsis thaliana landsberg
  unsure (1)..(238): unsure at all n locations
nnnnnnnnnnnnnnnnnnnnnnnnnnnnnnnnnnnnnnnnnnnnnnnnnncgcagctcatcatgctacggggcgtttgcctggccggcgtttcgttacggctctacccgtacttatctggtttgcccagacgtttaccgctagtccgactgtagcagcgcagtatatggatgtcgcgcaggacctctccagccggtcgttttaatgtggacggtataccctattatacggtcggtatc

SEQ ID NO: 167811 - DNA, 491 bp, Arabidopsis thaliana landsberg
ccggactgccgaccgaccggtctgcttcgaggggttcccgccgcgcaaggagggcgagcgcacccgtcggttcacgaagaacgcgacggacctgcgcacccaggtctatttcgagtcaccccggcggctggccgttacccttcacgaactaagcatctcccacggtgatgaccgcgccgccgtcgtgtgccgtgagctcaccaagacgcacgaggagatccgccgcggcacgctcgccgaactcgcggcgtgggcggcggacgccgaagcctcagggggcgtccggggcgagattacgcttgtcgtcgccgggggcgaccggaccgccgccaaggcggccgcccgtgatgcggcgcgcgaggcccggcgtgccgcccgcttcagcgcccgctccggcggcgacgccggcgcctgaccgtgacttgccaaaggacccggcggttccgagcgacatggccgcggccaggcaggcgaagggcaccgctgtcgtc

SEQ ID NO: 167812 - DNA, 408 bp, Arabidopsis thaliana landsberg
atgccctatagttactcacaaccttccacaaccgaagctagttaggagagtgaaggagcgaatgctgatgcgaattgggagatcccgtgaaatgttactttggtaagcttgtaacacttgaggtgtgccaaactggttacaatcaaggccaaaaagtgtacaaatgcccaatgaacgtaagtttttgtgttacaatttgtgcaacaacaaggtacaattgcctcgagacaattgtacaatttgtataatttccagccaacaataacaactaaaactttattgatacactcttaaaccataacattgtaattctgaatttgaaaccatttcacacaagaagttcaacatcaaaagtaaacacctacaatgttcaacatcaaaagcaaacacctaatctcaatacacaaa

SEQ ID NO: 167813 - DNA, 2118 bp, Arabidopsis thaliana landsberg
tttcaaacctcctcagttctctcctctcttcttctcctctcttccccaaaacgtcacaaaatcccctactcgctacttcgaggttcaaaaacctcccgttccaaatctcccgacagctcaacaaccgtgttcgtatcaaatcctccaccatgactttggctacacctacgctaaaccaccggttctctccaattacacactcccctctcactgctcctctcgagaattctccaaaatcgtcctcgaattcaaatccaccagccaaggaagacaattcgatcgtatcttcggtgtttggcttgacggcgttgagattctccggagctgcaccgccgagcctagaccaaacggaattgtttggtctgtcgagaaagatgtgaccaagtatcactctttgctcgtcaaaaacgagactcagattctctctgtttatcttggtaatcttatcgataaaacctatactggtgtttaccatgttgatgtcatcttccatttctatcaatccgaaagtaatcttcaagatgtttctggttatagctcttctaaagctgatatgatcctgccgatttcgagaaatcttccgttgaacgatggattgtggtttgaaattgtgaattcgaatgataccaagtataaggactttgagattcctaggaatgtttatagagctgtgcttgaggtttatgtttcttttcatgagaatgatgagttttggtatggaaatcttcctaatgactatgtaactgctaataatcttagtgttgctggtaatggaccttttagagaagttgtggttagtcttgacggtgatattgctggtgctgtttggcctttccctgttgttttcaccggtgggattaatcctttgctttggagaccaattactgctattggctcttttgatttgccgagttacgatatcgagatcacgccgttcttgggaagtttgttggatgggaagactcataaggtggggtttagtgttacaaatgctttgaatgtttggtatattgatgcgaatttgcatctttggttggatcaagagaaggagattgttgaagggaaggtgttggatttcagtagaagctctctggagattagctctgtctcggattttaaaggcttgaatggaaacttcaccacgaaagcaaagaggtcgataacttcggttgggttggttaaatcttctcatggggacattataactaatgctaatcaagaatttagctacgagaacaagatggttttaggtaaagatgggaacttgcagatcatagatcaattgatccaagctgatgatcgtattcatgccaagagagcctccagagagatctacgcagcgaaatctatcaagagttttcctttttacctcgactctgacactttggagcagcagaataacacatatctggcggtagcgaatgtctcgatggcattcagcgaggagagatcagagagcgacaaagggttgatgagaacgtttaagagcaagcttgaaaacaagcaagaagggcaaggagtaatggtggtgaagaataacttagtggtcagtggatatggaagcacacaacaagtgtataactatgttggaagtgaccaatgttacttcagaaacatcagtagttgcaactacactattctctatgacaaggttgaatctgtttgcaagaagaaaacactgaagctgcctccacggctcgagcatttaccaagacaacaccccttacttgcttgatatatgaccagagacagtggagaaagaaagatcacaattaaaaataaacagttccttaatgtttcttcggttttttcaacttttcatacattgtctttctggtcaacaaggatcacagtgaaccggtatctgaactgaatgtaacagaaccggttaatgtcttaatgatttatcaaccgatcgatttgaatccatctcacagtgcaaaacagaatctgaattgtgtttgttctgcgcaaaacactctgctgtgacaattaaccgatcaatctgaattgatatcaaattgctcaataccgaaccagcgaatcgtaccggaaatattacccccaaaggccaaaggagaagcaacaaagaaatccggaaggtgggtcctagtatta

SEQ ID NO: 167814 - DNA, 392 bp, Arabidopsis thaliana landsberg
ctacttcctgtgagcatagggtgcgctccgtatgagccagggttaaggtgtaaagacagacagggagaagtgccactcaagcatttcagtgatgtgttacacgtggccccactgctccacttgtcctgtttgtcgatgaagttgagccaagaccgagacttgagcctgagccaagggaaggaccagtcggtactgcaccgcagttgttggtggaaaccaggctgaacttgactgtagaagccgcatcctcttcttcctcagataacaaaacagttgtatccccggcttcgcgattaaattcgtttaggaaaatcttgacgagggaaagatcttcgaacaggatcaaccattcttgtcctgaccaagatcgtgtggcagatcttgagagacat

SEQ ID NO: 167815 - DNA, 514 bp, Arabidopsis thaliana landsberg
agtacgcgacggtccccggcatcgttctcgtgcgatagccgtcgtcggtcgatcacatccacgccgcgagcgtgatcacgcccgggctcgcggcatggcaggcgctcgatacgttcggtctcttgccgggcgatacgatcctcgttcacggggccgcgggggccgtcggctcgatcgcggtgcagctcgcaacgctgcggggcattcgcgtcgtcgcgtccgcttccggcagtgacgcggcgtacgtgcacgagctcggcgcgctgcgcgtgatcgactacaagaacgagcgcttcgaagagatcgtgcacgacgtcgatggcgtgctcgatgtgatcggcggcgagacgcaagcgcggtcctggtcggtgttgcgcccgggcggcgtgctcgtctcgtcggtgggaccggtgaagccgcccgcgatgaaagaagtgcccccgctcccgatcgtcatgcatccctgtcgagtacaagaagaaggaatcggtcacatgctgcaggacggcagtct

SEQ ID NO: 167816 - DNA, 568 bp, Arabidopsis thaliana landsberg
gcaacctctatgttaatccaaaatgcaaaccgcgtccggtttaatccctgttatagacttaaccgactcagatgccaaaacccaaatcgtcaaggcatgtgaagagtttgggtcttcaaagtcatcaaccatggggtccgacccgatcttttgactcagttggagcaagaagccatcaacttctttgctttgcatcactctctcaaagacaaagcgggtccacctgacccgtttggttacggtactaaaaggattggacccaatggtgaccttggctggcttgagtacattctccttaatgctaatctttgccttgagtctcacaaaaccaccgccattttccggcacacccctgcaattttcaggtataacaaccatatcaacctaaaaactaaaacgtttctttcgtcttttacaagttcttttatacaaaaacagagcaatgatcttgaccattctcttcacctccttcatgataaatatactcgaaaactattgttttatacgtcaatcatttccggaaaaaaaaacatgaaatcagagttgccatgtttaacggcgagaaaca

SEQ ID NO: 167817 - DNA, 1592 bp, Arabidopsis thaliana landsberg
ctccaacagttttcttcttcgtaatcctgatgctaacccaaggaagagctgcaatgccatcttgatcagagaaggagatgatatgtgggaggaattggacactgaagacgagttggagctcgcagttgcagagatggtgtcgaccgacaccctcctctgtcgatcgataccatacgggacgctcttctcaaagacgacccaatacgacggtgtcgatcgatacccctctagtgtcgatcgacactggatccggacagcaccctgtgaggtgcaaatacctatgcagcccgagtctgtctacactcctcatgtgccttatccgaggaggcgtcgttctaagcaggagcttcatgctgccaagtgcacagccgtaatggagaagatcctccatactcttcctaaggatgcttctgagacatcttctgtctcactcaacaggtatgtcaagcgacttgttgacaatggaattagctcagatgaagctaagctgattcccagagacatcagtgcaatcatgctgcctaaggccaagaaggagaaagcacagagagtagacatagttgagtacatccgcaccattaatcctggtcaaaccactgaggagcttccagatccaggtagctttgttcttaattactctatctccacaagcaggttcagccgctctttgtgtgatctgggatcaagcatctatctcatgcctaagtctgttgctgagagactaggaatgactcactacaggcctactcgcatcactcttctcttcgcggatcgttccaagcgaatccctgaaggaatccttgaagatgttcatgttaaggttggtaactctgttatcccttctgattttgtggtcttggattatgagaaggaacccaaggaccctcttatccttggtagagcgttcctagctagagctggtgctaggtttgatgtgaagagagggaaaatctctctcaaggtttgtgatttggagatggagtttggcatggatggttcatagcttactaagcctatcagttgcattgcttccagcacagacacacctcctcagactgctgaaaatcccaccacataaccacacacaacgctcccattcgctcagctcacaaatgagagttgcagagcaacagtatcgatcgacacccctacccctgtcgatcaacaccctcgggtttcacagatgattctgcacattctcttcagcccacaccacttgaagatctttgtgataagttctcttctctcgattctcctgctttacctttgattaattctttagattattcgaagacttcttcagaagataacaagcctagagttcctcgaaagcttgtttctcttgttgttcttgcaggtgacgagaagagcgtcaatcgacacacccctaagtgtcgatagacacctgcagctgccccaaccagatccgtttacacaccgccttggaaggcgaggaggcagcagcaatcctccaccattccacccacatcttgaactccgccaagtcaagctattgactcaaaacaagcgcttagtgggaggcaacccactggtttgatttttttttttttttttttcttttgatttatttt

SEQ ID NO: 167818 - DNA, 660 bp, Arabidopsis thaliana landsberg
agtgtatagcaaggtgtcgttgtgtatcgaaactgtggtcgtccataattcgccgtccaaattacaaccagttgttcccggtcaagtcttcggctacaccgcgtcttcttttcgtcttcaaagttgcacgagagttgtttttcaactcttcacctcagcatttcaatccgaataactcgtctcttgtcgccacttctcttcagaagacttctagcacaagattctctcaattatgtcgtcctgtccatggactgatatgtagtcagcatatcgaagagaattatttatttgccttgatttctaatcccacgacaggagagtatatagccttacccaaacagagaatggaggagatgaattcagagacgataattgaaaaagtaagatattcttttgggtatgatccgattgacaaacaattcaaggtattgcgtatcacatggttgcatagaggctcacacgagtggtctagtgagtatcaagttctgacattagggtttggaaatatttcatggagaaatactcaatgttgcgtagttcattatctactagaagatagtggtatatgcatcaatggtgttttgtattatccagctaggctcgatatcagaaaatataccattgtttgctttgatgttatgtctgaaagattcagtttta

SEQ ID NO: 167819 - DNA, 440 bp, Arabidopsis thaliana landsberg
atgacgagcgtgtctcctcggtacagaaatgttcctgtcccgaaagtgttccttagtttccgaggagaagagattcgtcatgggtttatcagccacctcgctgatgctttagagagatatgggatcatgttcatcatagataaagacgagcaacgtggaaatgacttgacaagtctccttttaaggatcaaagagtcaaaagttgccctggtcatcttctctagcaggtataattatgaggaacctatcaatctacgattccttcacttaaaaccggaagtagttcatagatgcatctttttcttggttgcttaatgtttcaacattagctagggtttagagttatcacaaaattttaaaaatggttattgacttattgtcctagctagtcatcaatatctaacagtatttgtatggactatgtggcaagtatcacttta

SEQ ID NO: 167820 - DNA, 701 bp, Arabidopsis thaliana landsberg
atgaattcacatttcttaacgaatgatctcatcctggaggttttgtcaagattgcctttaaagtcagtcgcgaggtttcattgcgtgtcaaagcggtgggcatcaatgtttggtagtccatatttcaaagagttgttcctgaccagatcctctgctaagccacgcctcttattcgccatcgtacaaaacggtgtgtggagattcttttcgtctcctcagttggagaagtcatcgtcgactcttgtagcaaccgctgaatttcatgtgagattatctccagacaatctactgatctatcaacatgatgacatgagatatttttcaattggctactcctctggcttgatctatttatatggtgatcgatacgaggctacacctctgatatgtaaccccaacacaggaaggtatacgatcttacctaagtgctatacttatagaaaggcgtttagctttttcgggtttgacccaattgacaagcaatacaaggcattgtccatgattgatccatctggtcctggtcatagtaaaattcttacttttggagatggagatatgaattggaaaaagataaaatatcgtgtactacatgatatttacagtcaagggatatgcatcaatggtgttttgtattacttaggtgacacgtcagattgggataatgatcatgatgtaacgtctggtaatgtgttagtttgttg

SEQ ID NO: 167821 - DNA, 3131 bp, Arabidopsis thaliana landsberg
aaataaaaacaggaaaaacgtcattaaaatcattatttcgccaaaagtggtgaaacaaatcatcaactttacttatggtgaataaaatcatcaattttagttgacttttcaattaaatcactaatttttgttgactttaccaaataagatatattgtatagtcaattaacagatcaatttaacggtacaaagtcaacatcaacatcttccgtcaaacagtaaacgacatcgttttcgtattaaaaacaaaaatacaaaaatcatcctactatcggatttgaaccatgcacctgtgggaaagagctaaaaactctaaaccaaccgaactaaagtatgttactgtccatatcacgcaaacaaaaatatataagcgtttctactaatatcaaaaccagaaaaaaatgatgaaagaattaagccagaaattgcaggtcctcttcgtcactaatcgaaggttatatatgatgacaaagaagatgacaagcccttaatagtgtatacaaggaggaagaggcgtgaagcacgtgcgaatgaagatggtgctgaggagcacgtgcgctgaagaagacgtcacacgtgtgaagtgtatatatcgagacttagctttctttagaagatttatgcattttgtttgtaactgcctgtgacgtatgtgtctgggtttgtgagagtaatgatctagatttgtgttctagagctctttgtatcaaacaaattgtattgactctttcggataataagatttacagttttcttgttatcaaatggtgcgttcgtgatctcggattgaatctaacgctgaagtttgggaatttttgttcgatcgaagaagacgatagtagttgcaatggtgatggaatcaagtttatctccggtttgtgaaatttctcaggcggaggagcacgcggcttcgttggcggatgtgtacgatcagattggggatttgggaggtaaaatcagaagttctgatgcaagattatcaaccctagattccaagattgggtcgttggatgacaaaatgggttcgcaagatctaaaattcggagcgattgagaggaagttggagctcttactcaattcgatgccaggtattgcaacggtgcaagaagtgggtggtacaagtcaaactcttcctccaagatcgcaagatcataggaaccaggtacgtgtttctcaactggaaccttgtcgtggtgtgattagacctagaattcgcgagaatctacttaagaatgtagaaatgccaatgtttgatggatctgggatatatgggtggattgcgagagtcgagaggttttttcgttcaggaggttacaatgaggctgaacaattagccttggtatcagttagcgtcagtggcgaggctttgagttggtacaattgggctatcagtcgtggggattttgtgagttggttgaagttgaaatcaggattgatgttaaggttcgggaatttgaagctgagagggcctagtcagagtttgttttgcatcaaacagactggttcagtggctgaatatgtgcagaggtttgaggatctgtcatcacaggttggaggcttagatgatcagaaattggaaggtatattcttgaatggcctgacaggtgaaatgcaggaactggtacacatgcataaaccacagaatctgcctgaaatggtggctgtggcacgttctatggagacgagtgtgatgagaagagtggtgcaaaaggaattgcagttggtaagtaaagagaataaagatccacattggtctgagtacaagagttcttatacaccagctacaaacaactggaagatgaagtctgtaatgactgagtcaaatcatggtagtgacaaaccaattggaagaaatgatcagagactagacggcatccagtgcagaattggatgaaaagagaaggaaagggatttgttttagatgtgatggaccttggtccaaagaacacaagtgtcccaataaggagctgcgggtactaacagtgattaatggatttgaaatggaagttttagagagtaatagcgtggaagaagaattccatgattcagttgctcaatttgcagaattatcgttttcatcatacatgggtttgccatcttatacaacaattaagatgaaaggatctatttgtaaaggagaggttgttgtcatgttggacagtggtgccacacacaattttatttccctaactttcatataagattgggtacaggaatcactgtgcaaggtttaggcttgtgtgataaagtgacgatgactctaccagttggttgtgggcaggaattggagttgacaacacattttatcaccttggatcttggtccagttgatgtgatattgggaattgcatgaatgagaactttaggagattgtaaggtcaattgggagaggcatgagttgtcctttttgtatcatgggaggacagtgactttaagaggtgatccggagttggatacctttaaaatgtctcttaagtctttctttacaaaattcaggctgcagaacaaagagctggaagtcagcttgaacagccatcaggtgttaccacaaaatccttcaatgttcacaagtggaactgaaaaaatcctgcaacagtttgagaatgtgttctcagaacctaaaaggattaccacctatcaaaggtaatgagcatgctatttcccttttacctgggactcgagctataagtgtgaggccttacagatatccacacgctcataaagaagcttatggaaggtttagtttcagaaatgcttgataacggtattatccgagcaaacaaaagtcctttttctagtcccgtgttattggttaagaagaaagatcagagttggaggttttgtgtggattacagggctttaaacagagccacaataccaaataagtttccaattcccatgatagatcagcttttggatgaattgcatggagccatcattttctctaaattggatttaagagcaggctaccatcagattcgaatgaaagttgaagacattgaaaagacgacttttaggacacatgatggacacttcgaatttttagtaatgccatttggattgtcaaatgctcctgccacatttcagtcatcaatgaatgacatgttgcgaccatttctccgaaaattcgt

SEQ ID NO: 167822 - DNA, 249 bp, Arabidopsis thaliana landsberg
ggttcagaccggccgtcgcggtaaagaaatagacaacgcctggtgtacattgtcagtgttcaagacgacaatccagtcgattccctcaagcgtcacctgcgtacacagtacaacatgacaccggcccagctctgcgaaaagtggaatcccggcccggactatccgatggtcgcccccaattatacggcggcccgctcgcaactggccaaggacatgggtctcggccagcagcgccggcggcgttccaag

SEQ ID NO: 167823 - DNA, 658 bp, Arabidopsis thaliana landsberg
ttgtcagatctttcagtagatttggtaggggagatattctctagagttccattgatatctctgagtgaagtgcaatgtacttgtacaacgtggaacactttatcctggaaggttttgtcggaaaattatgtttttggtgcttaaagcagatacaagtaagcaatttctaggtttcgtagtaatgaattctaaggtttgttccctgggacttgatctccaaggaatccacaacaacgatttcgttgatccatctttaaaggaaataaatatagttgatcaatacgatatatctaatatatttcgctgtgacggcttattgttatgcgtcaggtggatccaaccaagaagcaaataccataagttccacagattagacatgtatgctttcggttacgacaaacaacaacaagaaccgtaaccacaaattcttgatcaggaagtttttggatgatgatgaatacaacaaaagcagtaaaataaattttccttccaagttcgagatatattattttaacactgattcatggagagttcttaatgtcaatcctgactgtgatttagaaagagatgtgtctttgaagggacatactatattactatgctcgacaaaaagaggtcggagagccagtttcaaatcgtattggttttttactctgtt

SEQ ID NO: 167824 - DNA, 441 bp, Arabidopsis thaliana landsberg
ctttctctccttcttcttcatttcaatcttgctctgtttcttcaatggagctacgacgacacagtttgatttctccacgctagccataagcaacctcaaactcctcggtgatgctcgtttaagcaatggaatcgttggcctcacacgtgatctctctgtacctaattccggcgccggaaaagtcttatactctaacccaatcagattccgacaacctggaactcactttccgacaagcttctcttcttttttctccttctctataaccaatgtcaacccttcttccatcggcggtggtctcgctttcgtcatctctcccgacgcaaactcaatcggcttcgccggtggctcgcttggtctaaccggtcctaacgggtccggttcaaaattcgtcgccgttgaattcgatactttaatggacgttgatttcaaagacattaa

SEQ ID NO: 167825 - DNA, 528 bp, Arabidopsis thaliana landsberg; identical to SEQ ID NO: 78509

SEQ ID NO: 167826 - DNA, 576 bp, Arabidopsis thaliana landsberg
cgtaaaatcaaccgccctaacctcgtcatgttacacggctacggaggaaattcgaaatggcagttcattcatcaagtctcagatctatcgaaatcgtttaatctctttatccctgatcttgtgttcttcgggaaatcgtactcgagaaacaccgatcggactatcgagtttcaggcgaggagtatcgtcggaggtttgaagaggttaggttgtggtgacggagatttatcggtttattcaattagttacggtggatttgttgcgtaccggatagcgaagatttggccggagatgattgagaaattggtgattgtgagtagtggagttgggtttacacaacagcaaaagatgacggagatgaaaaaacacggcggagatgtatcggagattcttgttccgagtaatccgagagatctacggttgttagttaaggtttcgatgaatacaggtatcagatttcttgactgggttccagatttcatcctctcccaattcatcgaagtaagttctgtttattattgttaattactgaatcttccccgtatttatctgttattcaaaaattgacctgtaagt

SEQ ID NO: 167827 - DNA, 387 bp, Arabidopsis thaliana landsberg
gcatgcccatcgtgcggccgatctacaagacgatgaagcagatcttcgagacgctgttctcgaagtcgggctccagtttccgcaaggtggcgctggtggaattcccggcgccgggcatgtggtcgctggtgttcatctcgcagccgccgagcaccgacgtcgagtcgaagctcccggcgcgtgacggcgactacgtctcggtgtttctggcctgtacgccgaacccgaccaccggtttcttcttcttcgtgcagcgcaaggagctgatcgagctggacatcagcgtcgagaacgcgatgacgctcctgatctccgccggcatggtgcagcccggctccgacaaggacgcccagaagaagctcgcaactatggccgcgaccgcgcgcg

SEQ ID NO: 167828 - DNA, 617 bp, Arabidopsis thaliana landsberg
gacatctactcaaataacttatatccgtgtaggagtgcgttttggcatcacagacaggctcagattcttccaacgaatcatctttaattcgggagaagtggtaaccatcagatttcaatacgaacgcctcagaagaatctgtagcagctgcttcaggtttacgcacaacagagcttattgtccctatagaccacgtcctcacagcatagccagagaaagagctgccttcagagacagtgttcataggtcaagcctgaactctcaatcgcagatgacggagacttcgtttcctgctcctgtgacaccgcctcctcgaattgctcaaccacagctgaatcctgaagaattgagagctgcgtatccatactatgcatcagttagagatactcatactttacatgttggagaatctagtactgcaagacaacaatggtcatcgggttctagtaccactccaacaagagcagaccttcctaatcatggtaataacagtctttgaagtaggtcaatcctcaagaagacaagaagtaagacgagaagcagaggatcctagacttcagactcgtcaaaacagtgcttcaagaatgggagagattctgaaacttcccaagaagaga

SEQ ID NO: 167829 - DNA, 1194 bp, Arabidopsis thaliana landsberg
gtttaacaggcataaaggtaaactatctagggcgattggtggagtatttaggaggaaatttgatggtccatacttcatttggaaggtcactcctttgaacatccgagagagatatttcaggagtttcctggtaaaattttcagttttatctttcaaatatatattgttactcatttactaagtatatgtgctaacttatctcttttatttgtactatgtagcggatgttctattgggatcatgggcttactgaggctgttagagcggggttcgaagtgatagcccagaagcggatgaagggcattgttagtcaagctaagaggagtggttcacaacctcttttgattcgtgataaactttggaatcagatgtgggttcattggaacaccagtcaggcaatggtgaggagtgaaagtgcttcacagtgtagaaactccggtcgtggcggtcttggtccccacaaacatgtatccggtcagaaatcatttgtgcaagttcaccaagaattggtaacattcctctaatagtcatccaaacaattcactattttcttatattagttacatgattttaatgtgtttcaatttcattgtaggaggaactatatgggcgccctgtagcatttggggaagtgtttatgaaaacacacactcgagctgacgggtcatatgttgatgcaaaagctgaaaaagtacctgagatttataagaagacatgtgaagagcgactgatagaaatagatgatgatggtccagaaaattcagtgaattcctctgaacagtcaactcatcgtgacctctttctccaggtatagtttctatgacacccttaatttgtatgtgaatcattcactttatatcgcatcataggattatctaattttaatactttgttgttagcctgttatgttgattgactttgcattggtttctctttgttttagtgtactgaaaaagatcaaaagggcaaccattttggtcttggatcacttgtgcagacacttagcaaagggaaaatgaaagaaagttatgcaagctcttcttcatcaacagctttgaaactttaagaacaactacgccgcaagatagctgagcacgacactgagaatgcaagacgggatgaggaccaacgataatctcataagcggatctcatgcttcgagatgcttgttctgtacatgaaagataaagatcc

SEQ ID NO: 167830 - DNA, 784 bp, Arabidopsis thaliana landsberg
  unsure (1)..(784): unsure at all n locations
taaataaggggtatatatatatatatagctttaccaaaaaaagggtaatatatgtataattcaatgttttttatttaatttgtgggaaatatgtcaaaatgacactttttgtgaatcagaggttacatttatttttctcgaaaatatgaatcatatgacggtaattgttttcccatttataatcagaaaaccaaaaacccaaaacattgaactcatgttcgacacccntacactaaatctccgaatatctcaatagatttggatcatgttttaatatatgaaaataacagaatcattgttcattgtaatagtacatgtatacatctagattattagatatatagtttgtgcagtaatcctgtaagattgttcttcatatacatatttaagaaaaaatatattttgattgtttttttccagcgagacaattgttgaagccgcttcccttgttggactttgctggttagatataggcggaacatttaacacgagagagctgacaccatggacacattacgaggtcgtgtacctgctgaagttaataaaatcagctactggatgggaggtaccggtgaacctgaagctgaccttgcccagtggtgcaaagccacaagaacggagtgtgacattgaaggagtatatagggaaatcatgggtagctatacctgccggagagtttatgacgacgcccgagaataacggagagatatctttttccttttatgagatgggccgttggcaggaagggctagttgtcagaggtgttgcaattcgtaacaaaata

SEQ ID NO: 167831 - DNA, 542 bp, Arabidopsis thaliana landsberg
  unsure (1)..(542): unsure at all n locations
ggatctttttttttatttcttgaatgtgcgttaaagaatcttcgagttttcttaattcttgtgatctgttgattatctgtctgagggcatttgtgatattatctgaaatcttgaaagtggatagacttttgttgactctctatagtgttacttagaataaatccatttttttgttggtgtgattgtagatgagaccagaaactcgcgagattattgagaagatgctgctcccggctatgaagttggttaaggaaaggctcgacagggaagtagaaaaacaaagcatggatgagtttatgttctgcttcgaaaactgctacactgagaaggaaactgagatgcacgtgacccgcaagtttccttctttaaaacaatcggatgtgggaattggctttcagacgtttataggcttgatcgataaagagtcctcaagagaggcgtatctcaaggatgctgaagattgtgctaatgtaagaaggatagaggcgcgtcatggtgaggccagtacatctcacaaatgtgaacctaactgcaacanacat

SEQ ID NO: 167832 - DNA, 2824 bp, Arabidopsis thaliana landsberg
  unsure (1)..(2824): unsure at all n locations
gagctccgaaagccagcagcaggaactttttctgttgagaaggagccgctcaaaacttcccccaaaagcgtcaccatcgaaaccgcctttctctccaaaaggcaagaatggagctctcccgagcaacaaatgggtccgagatcctaacgcatactgtgagattcacaaaatgaatggtcatgcgacaaaggattataaggctttgggaaggttgttggctgcaaaatttgcttcgggagaaattcatgatatcgatgtcacaacaatcgatttggctcagacagcgtacgacgtgttagatttcgagatatcttcacctcccaacaaaaagcaaaagaacgagccagctcccgtcactccaaaaggcccgaagaagatggtcaaagtaattatgggaggatctaaactctttcgggattctgtcagcgcaattaagcagcacgaaaggaaggtggtcgctccggtggcgaaaaggcctaagaccaatcaaattgactgccctgaaatttcattttcggaggaagaaacctccgacttagataaaccgcacgacgatgccctcgtgatatcgctcgacgtggggaactgcgaggtgcaaagagtcctcattgatactgggagttctgtcgacctaatttttctggataccctcgtacgtatgggaatttctaagaaggatatcaaaggagctttgagtcctctcgtttccttcacgagcgagacttcaatgttactcagaacgattacacttccggtcactgctcaagggattgtgaaaatgatcgaattcaccgtttttgatcgacctgccgcttacaatataatacttggaacaccttggctttacgagatgaaagcagtcccttcgacttaccatcaatgtgtcaagtttccaactcccaccggagtaaagcaaatcttgggaagtcagcgtacatctagaatgtgttatatgactggacacaagctcaaagtcaaatagcaaccacagctcgaggccgctccgaatccaattaaaaaagtaggagacgacctcgtagagcgggtgataataagcgaggagcatccagatcagcttgtcggtatcggagctaatctaggcgaaagtttccgaagcaaacttgttcttttccttaagcaaaacaaaggaactttcgcctggagcgttggcgaaatgaccgggatcagcacggaagtcatctcgcacgagttaaacgtcgacccgacttttaaaccggtcaagcaaaagcgtcggaaacttggtccggaccgcgcggaagcagtgaatgccgaagtcgttagactcctcgaagcaggactaatccgcaaggtcaagtatcccgaatggcttgcaaatcccgtagtggttaagaaaaagaacggaaagtggcgtgtctgtgtagatttcaccgacctcaataaagcatgcccgaaggactgttttccatttccccatattgaccgactcgtggaatcaaccacgggacacgaaatgttatcttttatggatgcattctccggatacaatcagattctgatgaacccggatgaccaggagaaaacctcatttataacggaacgaggaacatactgttacaaggttatgcctttcgggctaaaaaacgcaggcgcgacgtatcaacgcctggttaaccgaatgttcaaagatctcctcggcaaaacaatggaagtttatattgatgacatgttggtgaaatcagatttctccacttcgcatcttgaccatctccagcaatgcttcgatattttgaacaagttcgggatgaagttgaatccctcgaagtgcactttcgccgttccttcaggcgagttcctcggctatatcgtgaccgagcgaggtatcgaagcaaatccaaggcagataaacgcttttctagcaatgtcttcacctcggacaataagggaagtccagcgtttgaccggccgagtagctgccctgaaccggttcatctcacgatcaaccgacaagtgcttgcctttctatactctacttcggaaggcgaatagaggtttcagctgggacgagcgttgcgaagacgctttcagacagttaaagagctacctttctgaacctccagttctcgcgaaacccgaattcggggaaagactctttctctatatctctgtctcgggaagtgcggtaagcagcgtcttagtacgagtcgaacgaaacgacgagcgacctatattctacgttagtaaatctttttccgacgccgaagcaagatatccgatgatggagaagctggctttggccgtcataacttcagcgcggaagctccggccatatttccaatctcacccaatcgtggttttgacgtctctgccacttcgagccatccttcacagtccgtctcagtcaggacgactagccaaatgggccatcgagttgagtgaattcgacctcgaatttcgtgcgcgggcaagtctgaagtctcaagttctcgctgatttcctgatcgaactccctctagccactgctgaatccgatgttccgagtcaaccttggatccttcatgtcgacggcgcatcatcgaaacaaggttctggagccggagttcgcctcaagtcgcctacggggaagtcctcgaacaatctttccggctcgctttcaacgcctccaataacgaagcagagtatgagtctctgctagccggtcttcgcctcgctattggagttggggtacgggacctacaagctcactgcgattcgcaactggttgcaagccagtactccggagactacgaggctannnnnnnnnnnnnnnnnnnnnnnnnnnnnnnnnnnnnnnnnnnnnnnnnna

SEQ ID NO: 167833 - DNA, 1540 bp, Arabidopsis thaliana landsberg
atggcactattgaacaaaagggtacaatatatagaaggcacatttcgcttttacatcaaccacaccaggttatatgccagggaaaccaatacataattcaaaggagtatgcccacgcaatcactctaagaagcggacgagagttaccaccaagaggagagccaaaccccaacactgaggacagtgtggtcccagagggggaggatttttatcaagatgatgttttggctgacaaaacaatcgataagcgcactcaaccacaagttccaccagctactccctctgttgaaaaaccagtagccgcaaaaaccaaagacgcagtcttcataccaccgccctacaaaccaccgcttccattccctggtcgtttcaaaaaaattctgattgcgaaataccgtgctcttttggaaaaacagataaaggatctttatgtcactatgcccttggtagattatttcgcgctgatacctgactctcacaagtacgtgaaagacctgatcacagaaaggatcaatgaagtccaaggaatggtgatattaagtcatgagtgtagtgcaattatccaacagaaggtcatacctaggaaattgggagatccaggctcattcactctgccatgctcactaggccctctaacattcacaacatgcttatgcgatctacgtgcttcagtcagtctgatgcctctctcagtagccaagaaacttggttttgataaatataaaacttgcaaaatttcgctaattctagcggacagatccatcaggatacctcatggcctgttggaagacttacctgtcaagataggttctatagaagtacctaccgactttgtggtgctggatatggacgaagagccgaaagacccattaattttgggaagaccagttttagctacagcaggagccatcatcgatgtcaagaaaggaaagatcaacctcaacctcgggaaagatcttcggatgactttcgacatcaccaacatgatgaaaaagcccacaatagagggtaaagttttctggatagaagagacggaattgctagctgacgagtttttagaaggactagcagaggaggaccacttacaaagcgccctgaccaaagacagtagagaaaaagacttacatgtggaaactttgggataccagaagctgatggatatgagcagggaagttgatgactcagaagactttgaggagttgagaccactcgatcacgtcactcgatcgcaaggtgagctacatcactcgatcgcttcactcgatcacgattccatctcggacgctgaatcaccacctgacgattggtccgagctcaaggcacccaaggttgacctgaaaccgcttccgaaagggctaaggtatgtttttcttggaatcaatttcacctatcctgtgatagtgaatgatgaactagatactgaacaagtaaatttgcttgtaattgaattgaaaaagtataggaaagccataggttattcactagatgacatcaaggggatttcacccactttgtgcactcatagaatccatctagaaaat

SEQ ID NO: 167834 - DNA, 2359 bp, Arabidopsis thaliana landsberg
tctgaattgcaccagaagatggactgcagctgcaatgacctgaataccatagtggaggtgttgaattccaaagtcagatacttagaaggacaatccgcatgtacctctgctcccaaagttacgggacttccagggaagtcaattcagaatcccaaggagtatgttaatgttcaagctatcaacataaggagcggaagagagttatccactagagagagacccaagtcagtcactgaggacagtgcatatcaagatggggaggattttagtctcaatgaagatcaagttgacaaaccaactgaagtactcgagcccatactcgaccgtgatactcgaccaaccaatccattaacatcatccgctgctctaaaactagttgctgctaaaaacaatgagatagcattcattcctcctccttacaagcctccacttccatttcctggtcgacacaagaaagaggtagaagataagtatagagctatgtttgccaagaacatcaagaaagtcgaattaaggatacctcttgctgatgctctaacgcatatcccggattcccaaaagttcctcaaagacttgatcatggagagaattcaagaggttcagaaaacaacagttctgagccatgagtgcaatgccatcatacaggagaacgatgtcccagaaaagctaggacaccctggttcattcactctaccatgctctctaggttcattgactttcaataaatgcctttgtgacctaggagcatcaataaatctcatgccactctcagtagctaagaggttgggtttcaacaagtataaatactgcaatatctccttgatcttgacagataggtctgttagactacctgatcggttattagaagatttgcctatcaagattggaaatgtggaggtgcctacagacttcgtagtgcgaaacatggatgaagaaccaaaagatcccttgatattaggaaggctttttttggctatagctggagcaatcatagatgttaagcgaggaaagattgatcttaatctggggaagaatttggaaatgaagtttgatatcaatgatgctatgaagaagccgacaatagaagaacaaaccttcttagttaaggaagtggaacagttaactggtgaactgctagtggaacttgaagaagcaagtaattcaaaaactgttttgatcaagagtggtaaaggtgggtatctccttagtgaaactttgagttctaagaagtcattagactcacacaaggcagtagttggctcagaggtttacaagggcttgatggggtctgacacaaaggtcatgaaagctaatgaagtaagttcaacacatgctcgaccaactaattccaccaacaacttgaagaagcctccaacttgtcctgaaagctcatgctcgaccaaacaactcaaggcaagcactcagatgtcaaatgattggttagaactcaaggagagatctaaatggcaagacaaagccatacaagagctaacacatattgtgaaagagctaaaggaacaaatcaaggagctcaatggaaaagcaaaccaagtactactcaatatcaaggacgcccctgacgatggagccactatacttgtcagcaaagaaggatgtgaattcacgtcggaatggtctagaggagaagactatcttgataaaaaaagaagcttactgtgaggacatgaccactaagtacccaattgcagacctgtcaagaaaccctaatgagtatgataatcactctactaaagaaggagaggagacctcatttcctctcacagcccaccctaagcctaataagtatgagaagtcaagcttagagagttaaaataagctcacttgggagcaaatcccttgtcaatctttgtacatatctttatttttccttgttgtttttgatgcatttggttagtgttttcaggagataagtataaagagctgagtgaagtggattctggctctgagagtacagcagtatactcgaccatagagcaatgaaaaatactcgaccatgtattagcttatccacgccaggagatcactcgactgcggtgctggctgcagcagaagaagggaggtcgagtatactcatactggagctgatactgaacatggcggctcgtctatggcctgggagcaatcataggcagccattgacgaccaactccgttcattcttcgactgtggtaagcgcctcacttcaccattgtattatatcatctcttgtgatttgttttgtattttgtttctgtgattggatttgtcttgagtactctcttctaagtttagtcacacagtggactgtgtgatttaagtttgggggagggctcaggaagtgtgtattgcattgtatata

SEQ ID NO: 167835 - DNA, 605 bp, Arabidopsis thaliana landsberg
atggaagcctacctggttcatgttcaaaagctagaaaagaattttgacgaattcgagttaacaaggattccatgaggagaaaatacatctgccgatgccctagctgctctagcctcaacctccgacccgagcctgagaagagtcatcccagtggaattcattgaaaagccaagtattgagctcggcgaagaagagcacgtcctcccgatacaaatcagcgcggatcaagatgactcagacgaatgcagctcagaatggatggaaccgatcataagctatatatccgaagggaagttgccctcggacaaatggaaggctcgtaaactcaaagctcaggctgcgcgtttcgtcttagtagatgaaaaactttacaagtggcgattatccggacccttgatgacctgcgtggaaggagaagcgacttgcaagatcatgaaggaaattcacggcggctcgtgtagaaaccattctgggggaagggctttagccattaaaatacaatgccacaaattcttctggccgacgatgaacaaggattgcgaaaaattttcaaaacgatgtgaaaagtgtcaaaggcacgcgccaacaatccatcaactggccga

SEQ ID NO: 167836 - DNA, 1168 bp, Arabidopsis thaliana landsberg
ctccttcattgttgctggtggtgcagtcgttgctttgctggtagtacctgatcttaagtctcagaatttccctgttttcgcaacattggtcgtgttgacgaatctttctggcgccattggagtactctctactcttgcaggcaccgttttgatcgaacgagactggtaaattaatgtttttagattattcacttcataaaatggcattgtaattgcactctttgatatgagattgttgtgttgtttttattacagggttgttgttatgtcggaaggtcattcaccagcggttttaacaagaatgaactctgttattagaggcattgacttgagctctaagctactgtctccggttataactggtttgatcattagctttgtatctcttagagcatcagctatcacatttgcagcttgggctactattaccgtgtggattgagtattggctctttatctctgtgtataacggtgttcctgctatagtacaaagcgatgagagaaggagtttaaggtcgtctcaatcgcaagcggaagagacagatagtgcatctagtttttatgttcctcttttacacgaagaggagtcttataggaatacgcaaagtagaagcagaatcttaaggattcttgagagaatctctgagtcttcttttgttagcgcgtggaggaattatctcaatcaagagattgtgctccctggagtttctctagctctattgttcttcactgtcctcaggtttcctttctatcctcttgttctttttgtgttggctttggtttcgcatcgcatacatatagtttcttctcgatacagctttggaacactgatgacggcgacattggagtggaaagggatacctacttatatcattggtataggcagaggaatcagtgcaggtgttggtctagctgctaccgttttgtaccctctcatgcaatcccgtgtctcacctctcagaaccggagtctggtccttttggtctcaggtatatagaaagactgtgtgaggttatttgatggatcacaactatatattaaccggtctttgatttatctgactgaatatgataccaaagttggttcttgtttctctagtggacctgtcttttggtgtgtgctggatctatttgggttgagaaggagaaaatagcatcctacatgctcat

SEQ ID NO: 167837 - DNA, 871 bp, Arabidopsis thaliana landsberg
  unsure (1)..(871): unsure at all n locations
tatgttctcnaaaaaaggagagactgtatttgtatcagctgcttctggtgcagtaggtcaacttgtaggacagtttgcgaagatggcgggatgctatgtcgttggaagtgccagtagtaaagagaaggtttatatcaattattaaagagtaatgcaattcacattttgaatttgtttttttatccagagagtgtgatatgtcatcccctctttatannnnnnnnnnnnnnnnnnnnnnnnnnnnnnnnnnnnnnnnnnnnnnnnnnnngaagagcatgatcttagtgctgccctaaagaggtcagtaaattctagggacgtgtatcagttgttccgtttggttcgattttgctcggttatgagaaatgtataccaaaagtagaaaccaaaagtttgtttggctcggttcatttcaacttttggattgggtttagtttggcttgcttttgtaagaaaatttttgtttgatcattttggtgtttttggatctatcaggtgtttcccagaaggaatagacatatactttgagaatgtgggaggtaaaatgttagacgcagtgctcgaaaacatgagaacacatggccgaatcgctgcgtgtggaatgatctcacaatacaatctaaaggagccagaaggtgtacataacttagccagcattgtttacaaacggattcgggttcaaggttttgcagctgtggaattctttgataaatactccaagtttttggacttcatacttccatatgtaagagaaggaaagataacatatgtcgaggatatagcttaaggacttgagaatggaccttctgctttgattggactcttccacggtaagaacgtcgggaaacaacttgttgcggctgctcgtgag

SEQ ID NO: 167838 - DNA, 876 bp, Arabidopsis thaliana landsberg
ataacgcagtctcctcggccccgaacatcgaccgcattctggaagagtcccacaacacaccgttcacacacatgatctccaacgcgataatctcagatccaggaaaactaagaatcgagtacttcaacggatcttccgacccgaaaggacacttgaagtcattcatcctctctgtggcccgagccaaattcagaccagaagaaagagatgccggtatctgtcacctgttcgtcgagcacttgaaagggccagctctgcattggttctcgagactcgaaggaaattctgtggacagttttcaggagctatcgacactcttcctgaagcaatattcggtgctaatcgatccgggcacatcagacgccgacctatgatcactatctcagcagcctaatgagccacttcgagacttcctccggagcccataattaccaagctgatacaccccgaggcgaagccgcccgaggccgaggacgaggccgcggtcgagaatcctacacttggacaaaggatcaacctgcaggaaacgagcacgaatattgcgagttgcataagagttacggccatcatacttccagagcaaagttggcagcaaaattcatagccggagaaatcggtggaggtttgaccatcgaagacatagaagcggaaaagggtaaaaccgagcaggtcaaccctgtggccaatcccgagcaggcagcccccgcgacgaacctcgaaggacccaaaagaggcagaggtaatcgcgaagcagacgacgatgagccagaagctgctcggggaaggatcttcacaattttaggggattcggctttctgtcaagacacggcggcatcaataaaggcttatcaaaggaaggctgacgcgaatcataac

SEQ ID NO: 167839 - DNA, 566 bp, Arabidopsis thaliana landsberg
cgagtcgagttgagatctgctagtttgactttcagttgcattgtgtcttggacctcactaagggacttgtctttgacccggtgtaaactctcggatatatcctttcttaagattctgtctggttgtccaatcctcgaaagcttgagtttgaacatttgtgagtcactcaagtatcttgatctgactaaatcactgcgcttgacaagattggagatagaacgcagatcctgttttcgagaaccaatgcagtctatgcagatcgtggcgccacatattcattatttgagattgagagactctgaggcacactgcactttcctggtatagcaaggctactgcaaacctcacctggattaaagaagttaacagtttacacaattgaaatgtgcagcacgttactggtatggttactgtgaacctcttcaattacctttcataacccaaaacaaataagcatttccttgcctttcttttggtaatctatacatgagcgatatgttgttttatgttttgcagtgggattgtgtcaacagctacttaagaaacaacgttgagattaaagatac

SEQ ID NO: 167840 - DNA, 285 bp, Arabidopsis thaliana landsberg
ggtggtcgtaaaccatgttgtgatgaggttggattaagaaagggtccatggacagtggaagaagatgggaaactagttgatttcttaagggcacgtggcaactgcggtggtggtggaggaggatggtgctggagagacgtgccaaaactggcggggctaaggaggtgtggcaaaagttgccgtctccggtggactaattatctccggccagatctcaagagaggtctttttactgaagaagaaatccaactagtcattgatcttcatgaaaataaacggcgacag

SEQ ID NO: 167841 - DNA, 836 bp, Arabidopsis thaliana landsberg; identical to SEQ ID NO: 4179

SEQ ID NO: 167842 - DNA, 3555 bp, Arabidopsis thaliana landsberg
gagaacatgttatttagctagccaccgactgaaaatctaatagcaattaacaaagcccgcaaagaaaggagtaatccttttgtttcctagtgggcagaaggtggacgatgttgtggtcgaagtaattctaaaagctgataaaccggatcggaaagtttgaattggagctaccttatcctacgaaataaaagaagctttaatcgagctgttatggaggaacaaggagtcatttgcttggtcagcaggagatatgcccggcattgacccaagtataatttgtcacgagttgaatgtggatccaagcttcaaacctgtaaaacagaaaagaaggaaactcggagtggaacgagcaaaagcggtaaacgacgaagtggataaactcttaaaaataggatctataagggaagtgcagtacccggattgggtggcaaatacagttgtggtaaaaaagaagaatggaaaggatagagtgtgcattgatttcacagatcttaacaaagcttgtccaaaagacagtttcccactcccacatatagatcgccttgtggaatcaactgccggaaatgaattgctaactttcatggatgccttttcggggtacaaccagatcatgatgaatccagaagatcaagagaaaacgtcattcatcacggacagagggatttattgttataaggtattgcctttcgggttaaagaacgcgagagcgacttatcaacgtctacttaacaaaatgttcaacgagcacctcggaaagacaatggaagtctatattgatgatatgctagtcaaatcattgaaaaaggaagatcatgtcaagcatttagaagaatgtttcgctatccttgaccaatatcaaatgaagttaaacctggggaagtgtacgttcggagtcccatctggtgaattcctcggttatattgttacaaagctaggaattgaggcaaatccaaaccaaattaacgcctttctcaatatgccatctccaagaaatttgaaggaagtacagcggttaagcggtcggattgcggtattgacctgtttcatttcaagattaaccgataaatcattgcctctctatcaaattttaaaagggaacaaagagtttctttgggatgagaaatgcgaagaagcattcggacagctcaaagcatatctgaccactccacctatattgtccaaaccagaagcggatgagaagctttatctatacgtctcggactcgggccatgtagttagcgtagtcttgatccgagaagaccgaggagaacaaaaaccaatttattacataagcaaatccatgacagatcccgagaccaggtatacgatgatggaaaagcttgcacttgcagtagtaacctcagctcggaagcttcgcccgtattttcagtctcacccaatcgaagtcttatcaaatcaaccgcttcgaacaattcttcatagtccgaaccaatctgggaggttggtgaagttggcggtggaattaagtgagtatgatatagagtacaagagccgagtcgccatgaaggctcaagttcaggccgattttttaacagaattgccggtacttggtggacgggagcaaccagaaaatcagacttggaagttacacgtcgatggttcttcatcaaaaaatgggtccgaggtggggatcaaattggagtctcccacctcgaaaatccttgagcaatcatttcggttattattcactgcatctaataataaagcggaatatgaagcattaattgctggactcacattggcacagggagttggagctgatgaagtgatcacgtactatgattcacaactgattgttaaccagctcaatgaagactatgaagccaaagattcaagaatggaggcatatcttgaggtggtcaaagatttggctaaatattttaagaagttcgaactcattcgcataccacgaggagaaaacacaatcgtggatgcactcgcggctctggcgtcaacgtcagatcccgaagtcaagagaatcattccggtggaatgtatttcagatagaagcattaaggaagaaaaatagacactcgtcaatacaaggtctcgagttttagcctttgatcgcggtgaacctgtgattgaattaccacgtgtcaaaagacgaaaatcaaaaggggcagccgtacctaagccaaccgtgcaagaagataatagggtcgaggaagttgtcgaacgaatagaagatatagctccggaaaacactgttgaagccgagaccgaaccatgggttgacgaagacatcctcaaaccaaatgaacatcctgaaccagaagctcgaatatttcatgaaatcgaccaaattccggctaaagattggggagctgattggagggagccaataaaacattacattgttactggagagctcccaaaggatagatggcaggctatcgaaagattctttgcatagaagaggtgtaaacgctccctatttactttgcatttttgggcccaaagtcgagatcgttatgagcgaagtgcacgaaggtttgtgtagcagtcattctttaggaagggctatggctttcaagatgaagaggatggaatactactggcctactatgatcacggactgcgttaagtatgcccatcgatgcaaacgttgccaactccatgtgcctctcatccatcaaccttcggagttattctcttcgatctctttcccccatacccgttcatgcggtggtcgatggatattattggaccattgcacaggttaacccgaggtgtacaatatctcttggtcctaattgattacttttcaaagtggattgaagccgaagcatatgtaaacatcaaagattcggcggtaaaaaccttcatttggaagaatatcatatgtaggcacccatacgagatagttacggacaacggaccacaattcatctcacacgagttcgaagctttctactctgattgggggatcaaagttagttattctactccgcgatatccacaagggaacggtcaagctgaaggtgcgaacaagacaattctaagcaatcttaataaacgtttaagtcatttgaaagggggctggtatgatgaacttcaaccggttctatgggcatatcgcacgactcctaggcgctcgactggagaaacccgttttcattggtgtaaggaatggaggcagttgtaccagccgagctcaatgtaccaggacttcgtcgaatggaagctcctttaaatgaaaacgagaattctgcaatgctcgacgattcgctggataccatcaacgagaggcgagatcaggccttgatccgaattcagaattatcaacatgcagcagcacggtattacaattcaaaagtcaaaagcagacctttctttgtgttcgataacaagaaagaggaaggagcagacaaacttggcattaattggtaaggtccttatattgttaccgaagtggtccgaaatggtgtttacagattgaaagatttagaggacagaccagtctaacgtccttggaatgtggtgaacttgaagaaattttatgttttaaaaaaaaacgcattttttgtacat

SEQ ID NO: 167843 - DNA, 2479 bp, Arabidopsis thaliana landsberg
cactcgacctctcctttatttcatccaacaccactcgactctcacttcactcatcaactctcactctctagctcaacaaactctcgttctccgtcaccatacttctcgctcaaaaccactcgaatactcctcgccaatcccacaaccatcactcggccaaagctctcatcacctctccactaccactcgatctcttcaccaccatcttcatagccgagtcactcgattcaacaaactcactgcgaccgcttcaccacctctcattcatagccacttcactcgattcactgcatctctctcatcattgctcactccaattctcaccaagtactcgatttcaaatcatcaacaacttcaccgctttactcaattcactcgacttcacggcaagagcacatccgcctttcaagctcacattcgtcactcgaccactcctcacctgcctttcacagccactcgacctcgccaagacacaccgcctcaccatctctttaacactcgaccgcgagttcaccaaactgaaaaaaaaagaaaatttgttttttggtacactcgaccagttcacctgattggtttgtgtttttggtttgctgttactaacgtataaacgtttatttttaagttttgtctgttttcaggtttcatcatgagtaactacagtggagaatcctctatggaccctgattacaatgttgatgaagcagagtcctggtctgctagaccgagagagcaacatgtttaccagagcttcagggatgaattcgaacgctctgcagcccgacgtaatcagagaagagctgaaatcgccagaggaaagagggcgatgtcaagtagatatgagctgattgatgaagatatcaaaactgagtatgagcccgagtcatggcgcaaggagacgaagctgctgaacatacctgacgaggttacagtggaagagtatatcaggttctttgagatgaatgatttctggggaacgcggtatccgtgctatgagactttagcccagctggggttactggaggacgtgcaacatctgttcgagaagtgtcatctggagacactcatgtcttatccttaccctgcctataaggaggagacaatcgagtttctttccacgctgcaagtggagatgtatgaggcactcacagactttgagctgaataccatggggttaggcttcttgacgttcttagtgaatgaacagcggtatcagctttcgatcaagaagttggaagaactgtttggtttccctagtggaaagcgaaccaaacccagatttgacatagaagagcttaaggatttatggccactatagggaacaatctaccgctaaactcggcgcggtccacgagcaaccaaatccggagtcctgtgatccgctactttcagagatcggttgccaacgtcttttactccagggaatctacaggcaccgtgtctaacatggacatggagatgatagattatgcacttacagggattctccgtcagacgaagggaaagaatgtcttgagaggcgatctcaacaacgcaccaccagtaatgtctctgttgatccatctgtgtggatacaggaaatgggcgttgacgaacggaaagaagaaggtgagaggagcactatgcgtgggtggcgttgtgacgccaattctggaagcttgtggagtaccgctcaaggaaccagggttagcaccgaggatgatggacttggatcatttgcgccgatgtgagtttttggagtttgacatggctggcgactttcaccgatacaggtttgagcattcatcgattaaaatcgccaacattcttctcccctgcattgacgctactagaattctcgagggcaggaacattgacttcaagcctgcacttgaagaactttatttcgagggtagtccgccaactgaggagatcagtcataccgaaggagctacaacagaagatattgatgagacggatgatatagatgaggcggagtttgacacgagcatgtatcatttcagtgagcatatacctcctgcaagggaaagcaggagtttgagcgaagctcacaaaaacaatagcaagctgcagaagtggtgcatgaaacaggacaagttactcgccaagtgcctcagggctatcaagtttatgaagaacaagctcagctgctcctcttccactacaactattccgcagggacatctccctaaggacatgccttcgaggagatatgacgcgcccgagccaagtcggcgcagtcctgagcctagagagcaggagattccgcatgtccctgcgaggcattcatcattcgagcctcgtgaatctgggaggaagaggaggaccacactcactcgatttagcagtaggagcggacgacttctgcagtctcgtagtttacgcgaccgcggtgctggccgcagcagaaggagatgaggtcgagtacccacctgctggagctgatatagaacaaggtggttcgtctatggcctgggagcaa

SEQ ID NO: 167844 - DNA, 1144 bp, Arabidopsis thaliana landsberg
ctcctcatctccgtacaacagcggcggcacccaagaccttcgtttaccaagcaatggtgaatctaggtttacaactggtggaccttttaaagtctggcccattaaaatgtcgaaagcccaagtttattaaaggtgatccaaaccttcatacacaaaagcccaggtctgacctaaattattctttgttttttcttagtaaaatactgaatcacttatcggcaccacttgataatggacgtcaaatggaccgttatgtaccagtttttatatgggtgcttaagaattctttgcgaactctgcctttagtttcacctaaggtcttcgatcatgaaatcaattgtttgagtgtgataggtatcttgttctcaattctaataattcgaggttgtgactgttgtcaccaaagcgtcacaaattacttatctctgacacattttgctaccaactttaagcaatctctcatcaatagcaacattaagactcatagctatcggtactacacagaagcttccattctttatgaggaaaatcctgaatattcatcgcttgctcttgaaaataaaagattgatgagaaccggcattatgatctcgtctccacggagcgatgattaccgacgcttctccaatctttttgcctcctttcctcggtttactgaaatcaagcaagttcgatccaacaactttaatattggtattcatgaggttacaaggttgaggaagaacggcatcatgatcccgtctcaatggagcggtgattaccgaagctttctcagcttgttatctccaaacctaaccgaccatagaaccatagtcaaccaactccttgccgttgagcaactcaagctcacccttctcatgccggcgagaacctcggttatgaaaccatcttcaacgtcacctcgtctcttgaccttgaccaatttgtctcccattgacttactcgtggaagatcattcgactagccatgacctcacatgtctcaaaacgcttaatagcctttgtctcaaagttttcatgaattcaccgtcgtctcaccttatctatcataatttggcattgaggaatgccttctttgtttgtattttaaactttatgatttttgtgttatccttttttgtacttggtttggtttgatttaaatg

SEQ ID NO: 167845 - DNA, 1118 bp, Arabidopsis thaliana landsberg
agaaaaagttctgatcttgtccctattcgcacatcaatggacgataatagatctactcatagctcaatgttcggtgacctatcaacagaagaggtcacaagtaagatcattctcacagcaatcattgttctgttcatggcggttctgttcgtccttatcctccatctatacgccaaactctactggtggagaatagatcagctccaacagcaacagcaacagcaacagcaacaacaacagcaagagcaagagcaagaagaagaccaatcatccattgctccacctgtagtcactcgccgtcagcgacgtcgtttcatcttcgtcccaggccaagacgctctaagcaacactggactaacctcttttgaacttagttccttaccaattgtgtttttcagacaagatagttgcaaagatggtttggaatgctctatttgtttgtctgagcttgttaaaggagataaagctaggctgcttccaaagtgtaaccatagcttccatgttgagtgtattgacatgtggtttcagtctcactctacttgtccgatttgtagaaacactgttcttggtcctgagcaagctagctcaaagagagttgaacaagttccagacaatgcagaaaatgctggtaccaccaataacaaccatgatgctttgtctcaactttcaacatcttctccagaatttcccaccaaatgtcttggtatggggtcgtcaggatcaaagttagtaccggaaacaccaatgttgggactcaagaagacggtgctgctggtaatggtgcttctcagagtcaagaagctgttgttctggatatcagcgattcttccagtagaaatcataatgtatcatcttcgtcgtcatctatgaggtttattgttgaggaggaagaagcaaaatctccaatgacaacgaggttgaggtccttaaggaggtttctgagcagagacaagagagtgggttgtagcaatagtagtactagtaatagtagcagctccaatgctgttgcttctgttgatccttgaagattgtaattagcttagctgagtgagattgcctaaagatgtcaaactgtgtgtatgtggtctcggctctttattggctggtttgaagctttc

SEQ ID NO: 167846 - DNA, 191 bp, Arabidopsis thaliana landsberg
cagctgatacactgaacgtgtgtggtgagttgtggttcccggactgacaggaccatcccatttgccgaatgttgcaatgctcttgaggcagtgccaaacgaatgcctttgcaacacgtttcgcattgcctctaggcttccctctcgctgcaacattcctacactttcatgcagttgatatggatcctcata

SEQ ID NO: 167847 - DNA, 632 bp, Arabidopsis thaliana landsberg
atggggatgaagaaggtaaagctatctttgatagctaatgaaagatcaaggaaaacatccttcatgaagaggaaaaacgggatattcaagaaactccacgagttgtcaactctatgtggtgtccaagcttgtgctctcatctatagtccattcataccggttccagagtcatggccgtcaagggaaggtgctaaaaaggtggcttcaaagtttctggagatgtcgcggacagcccgaaccaggaagatgatggatcaagaaacccatcttatggagaggattaccaaagcaaaagagcaactaaagaatttggctgctgagaaccgagaattacaggttagacgatatatgtttgattgtgttgaaggcaaaatgtcccagtatcgttatgatgcaaaagaccttcaaaatttgctatcttgtataaatctatatctcgatcagcttaacggaaggatcgagtccattaaagaaaacggtgagtcgttgttgttttccgtctctccttttcctactagaattggtgttgacgaaattggtgatgagtcgttttccgactctcctattcattctacaactagggttgtagatactcctaatgctaccaatcctcatgatcttgcgctttaaag

SEQ ID NO: 167848 - DNA, 519 bp, Arabidopsis thaliana landsberg
gtctctgcctaatgctagatcagagagacaagttcttctattctctttcatttctaccattatcaggttttcatcaaatgatacttcagtttaggctgatgatggtattccttacaagtctttctcgatctaaagcggtttggaatgctgttagcattttaaaactagatgttttttgggctcctcttgtacatcctataacctattggttgtttctactcaatcgtaatcctacccttaatcgtttatcttcttggagttatgatgtttagttagaatgtctcctttctggggttagcccatgagaccagaaatcatctgttttttaattgtgctttctcaactgaagtttggcgcttgataacataaagacttcagatctcatcttctccgctttcatgggatcagttcctcctttggttgcaaacaacttcagtctcaaagcataaaaaacttgctctccttctaggttggcaaggcgcaatctatgaattgttggaaagagaaatcaacgctttc

SEQ ID NO: 167849 - DNA, 756 bp, Arabidopsis thaliana landsberg
acaatctctcatcttccaacggagttattagatgagataatctctagagtaccattaaagtctgcgagagcagtgagattgacttgcaaaaactgggactctttattcaaaaaccggagctttatgaaagaagaagcagcagcaaaggaaggagagtctaggatgatcgtgttgatggataaaaacctgtttgcaatgagcatcttcttcaatggaattgacattgatccatctgcagagcaaagagataaacttacttgcctatacgacgattcagaacaagtcaagatatctcaagtctttcactgcgagggtttgttactatgcgtcttggaagacgataagtgtagtcttgttgtttggaatccgtattggggacaaacaaggtggatcgaacccagatatttttcccggatacaggattgttatggcaggtacatgtacgtgtacgctcttggatacaataataagagtcgtagtcacaaaatcttgaggtttatagatggtgcattcgatttccctttttggtatgaaatctacgattttgactctgatttgtggacgactcttgacgttactccacaatggtttataaatttccctccccgtggttgtaataaccgtggtgttactctcaagggaaacacttactggtgtgctataagaagcaagtcaacacctaattggtttgttgatcttggtcacaaaataaaaaatgattttacaagtgagaaatttggtccgcttatgcctttg

SEQ ID NO: 167850 - DNA, 2047 bp, Arabidopsis thaliana landsberg
atgttttctttgcttgagttacgacggatttgccaggactttttaggttcacacctttaaaatacaaattggccggttggtggccagtggattgttatgtgcaagttcctcgcatattgctaggaattccttctcaatgttttatgattcttctctctcactatcacatgttagttgatagaaaatcacatctcatataaaacagaacaaaaaacacatactaccacattaaaaaaataagatttggtaacaacaacgtttggaagtggtgtagaacatgatatgtattcattgccacagtgaatgtataatcatagagacccagttaccggtgatgtcacgaaggagtttaccgatagattgcgaggtttcatgtaccaagcaacaaacgaatcatttgctcgtgcaaatggttcaatattttgtccatgtcgtaagtgtttcaacgataaatatttggaatttaataagtgaagaagcatctatataatagaggatttatgccaaactcttttttatggttgcgtcatggggaaggttgtagagatagtgcggaccgtagtaatatgaattatggtgttgttgaacatattgattattatcaaaattatggtcatcatcaagaatctgatcaagggtataaccatgaaaatagatttcatgatatggttacagatgcatttcacgaaagtactgctgcatttagtgaaaatattattgtagaaaccaacgtagatgcacaacgcttttatgatatgttagatgctgctaatcaacccatctacgagagatgtagagaagggcaatctaagttatctttggcatctaggatgatgactattaaagctgataataacttaagtgaaaattgcatgaattcatgggcataattaattaaggaatatttgccatcggataatatatcggctgagagttattatgaaatacaaaagcttgtttcgagtcttggattaccatcagaaacgattgatgtatgcattgactattgcataattttctgggatgaaaatctgcatgaatgttaattttgcgaaaagccgagataccagactactggcggaaggacgcgagtgccatataaacggatgtggtacttgccaataactgatagattgaaacgcttatatcaatcagaaagaactgcggcaaaaatgagatggcatgctcaacatacaactgcagacggagaaataacgcacccatcagatgcaaaggcgtggaaacactttcaaacggtatatcctgactttgctaacgagtgtaggaatgtgtatcttggcttatgcacagatggatttgtacattcggtttgtctgggcgacaatattctctttggcctgttatcttgaccccatacaatcttcctccagatatgtgtatgcaaagcgaatttctgttcttaagtattttattgcctgggccaaagcatctgaaacaagcgcttgatgtattcttgcaaccgctgattcatgaactcaagaagttgtggtatgaaggtgtcatacgtttgattactcgagcaaacaaaatttcaatatgcgggcagtgctaatgtggacgattagtgacttcccggcatatggaatgttatcggggtggacaacgcatggaagattatcttgtccctactgtatggatcgtacagatgcgtttcaactaaagaaaggcagaaaaccatgttggtttgattgtcaccgttggtttcttctcctgcatcatccatatcggcgtaacaaaaaacgttttaggaagaataaaatagttcgtcttcctccgccatcttatgtttctggaactgatttgtttgaacagatcgattattatggtgctcaggaaacctgcaaacgtgggggtaattggcacaccacggcgaatatgcctgacgaatatggaagcactcacaattggcacaaacaaagtatcttttggcaactcccatattggaaggatctcctcttgcggcattgccttgacgtgatgcacatcgagaaaaactttttcgataatatcatgaatacgcttttga

SEQ ID NO: 167851 - DNA, 528 bp, Arabidopsis thaliana landsberg; identical to SEQ ID NO: 80583
  unsure (1)..(528): unsure at all n locations

SEQ ID NO: 167852 - DNA, 494 bp, Arabidopsis thaliana landsberg
  unsure (1)..(494): unsure at all n locations
ccggatattcaaattccgaaagccggccaatatctcctttccgaagattatggaagtggaaaaacaacactccttcaccttataagcgtcattctgaaatcccagcaagggttaatattaatagacgtaacagatatcacgtcattgtccgaacctgcacttgatcacttcagaggaaaaaatcttggtttcatctttcagcgtaatcatttgatatcggctctctccgttagggataatctgtcgcttgcacagtaccttgcaaagacgccttcaaattcgcaatatnnnnnnnnnnnnnnnnnnnnnnnnnnnnnnnnnnnnnnntccggagcaaaagtttcgcagctcagccatggccaacagcagcgcgtagctattgcacgggcgcttgcgcacgaacctaaagtcatttttgatgatgcacctacccccgctttgggcgattccaattgttaaaggtaattaatctgttacggactcttgccactgta

SEQ ID NO: 167853 - DNA, 551 bp, Arabidopsis thaliana landsberg
atttccgcgcaggtcagttgcgctacagtttcgtcagctatctcgtcgatgcacttcggagaagtgagattatcgtcttcatagacaatcaggagcatagaggtgtagacctcaacagtcttttcaagaggatcggcgattctgggattgccatagttgtgttttccagcaggtacacgcaatcaaaatggtgcttggaagagcttgtgaggattaaaggacgtgtgcatcaaggccttctcaaggtgaggtgatataattgcatatttttcaatatatcgtgtaacgttaagatttaggccaatgttattattactcacacttaaaggtagagggagtatacatcttctgacacatattgctagctttcgggttactctatctgaaggtgcgttccaatgtaatacaaggtgactccaaccaacgtgagaaagacttcaggtagagtttggtgaccatttcaggaataaagagtacgtgtacgagtctaacgcacctaagatcaatccgatggaaagaggctcgtgcatttgtgtcccataagtttgccc

SEQ ID NO: 167854 - DNA, 1125 bp, Arabidopsis thaliana landsberg
ttccatgggctgataaacatcaaccgtcatgatcatcgcgtttctcgtactgctcttcttggtgtggtgaattcggtatgtggagtttgtcgtaagaaaatggattggagttgtgggggtttttcttgtcagaaatgtcccaattctacgtttcataccaaatgcgctactagagaagatgtatgggacggtatggagatgaaagacgaacctgaagaagatgaagatattgaaccacttgaggtgatagatgagaacacggttgaacacttcattcactaccactacctaagactcgacaagtctggtatcttcactaaggagaggacttgcaaggcatgcgcttatcctatctatcaccattccttctacaaatgcatgatatgtgattttgtgcttcatgagagctgtgctaatatgcctaaacggaaaaggcatatggtaagcaataaaccgtatgaactacaaccccttattccccctggatgttctagatgtgaggcttgtggagtacattttcatggtttcaagtacggtgagtggccaaatatattagatgtgcgatgtgcttcagttcatgagccattctttcataaaagtcatcctgaacatcccttattttatacaacaccacaaggagtctgtagtgcttgcaataaagaggcaactcatgtgctcagatgcgtcgaagataactgtggatacgtattggacttcaagtgcgctctattaccatatgaggtaaagcatagagtcgacgatcattttctatctttttgctatggtgaaagtgcaagtggtaaatattggtgtgatatttgtgagaaagaaacagatccaacaaaatggttttacacatgtaaagattgtggagttacattgcatattgattgcgtgttaggagatttccgagctatcgagccaggaacaaaagtgacaaatctccgctacgattacgtaacatcttttgcagtacgcaacaatagtatgtctcggccattttgcagccaatgcacgacccattgcatataccctaccatcttgaaagttgttgacgatggcgtgcctgataaatactattgctctattaattgccttgccaataagtacattcgttattccaag

SEQ ID NO: 167855 - DNA, 217 bp, Arabidopsis thaliana landsberg
ctcccttcctcttcggtcaccaccacccccgaagaaatcttcctgtccaccatcgcctctgccgccaccgccacctccacctccacctaattacgtattcacatatccgccgggagacttgtaccctattgaaaattactatggagcggctgtggcagtagaaagcttttcggtgatgaagctgttcgtgtttggagttatggtttttctgattctt

SEQ ID NO: 167856 - DNA, 479 bp, Arabidopsis thaliana landsberg
  unsure (1)..(479): unsure at all n locations
tatgagcgaagggtttttcgtatcgataagggacaggagccgctgcgtattgacaaatacatacagatgcacctggagggttctacgcgtaacaaagtgcaacggggtattgaatcgggctttgtaacggtgaacgggaagtctgtaaaaagcaattacaaggtaaagccgggtgatgaggtcatactgatgagcctgatcaatcccgagcatacggtactgaagaaagaggatatccccctgaatatcgtttatgaggatgatgccgtgatggtgatcaacaagcccgccaatatggtggtgcatcccggcgtgggtaatttcagtggcacccttttaaatggagttgcgtnnnnnnnnnnnnnnnnnnnnnnnnnnnnnnntgaagataccctgccgcgttatcggctcgtgcatcgtatcgataaaaatactacggaaatgatcgtgctggcgaagacagcagatgccgcggcgca

SEQ ID NO: 167857 - DNA, 608 bp, Arabidopsis thaliana landsberg
tttctgcgcaatgccccaacatgaaaatccggacagatcatgttatccacatgtggagcgttatctgaaagacactctcatatttgattatcacgaatggtcccagtcggtccatggcttgatatgtttgggagattcttggggcatattgtagtttggaatccaatcatgagacaacatgttaccttaccaaaagtcgcatttgaatgtagctctttaggatatgatccggtcgagggtaagtataaagtcttgtgcatctcatgctctagataccaagatcctcttgtttttactttgggacctcaagaatcatggagagtgacacaaaatacccctaaacatgtccctctatccgccgagggactaatactaagtatatgtatcaacgggcaagtgtattatgaagcgagtataccttttggagtcgatgatagttctgaagttgaaaaagtccttatgagcttcgatgtgaggtacgaaaagttcaacacaataagaaaatcagcggctgataatttactttgcaaatttttcctcaactacgaaggaaaatttgcatgggtttgctctgacgacgtctctggtatatgattttgggtttggag

SEQ ID NO: 167858 - DNA, 635 bp, Arabidopsis thaliana landsberg
  unsure (1)..(635): unsure at all n locations
aatcatgatacctttacttttgtgatgcttctcccttggcaacagaattgcaggctatcccatggccacaatcctacaagccaccccaactacccatgtacaatgggcattcagacccaaaacaatttctgataagctatgaggcaacaatatcctcatacggaggcaatgcagctgtcatggctaagtccttcgccatggcagtctggaacgtggactagacatggtattcttccctnnnnnnnnnnnnnnnnnnnnnnnnnnnnnnnnnnnnnnnnnnnnnnnnnnnnnnnnnnnnnnnnnnnnagccaaagctagtcacagcttaggccttgttttagtgcacgcaagatcatgaggaataccttcatgcgtatgtccgaaggttcttgcgattgagggcacaagcgcccacagtgcccaatgaaattgtcattgagaccataattaagggtcttcggccaggaccaacggctcagtacttcgctaggaagcccccacaaactctagagaaagctgcttcagannnnnnnnnnnnnnnnnnnnnnngacaacgacttccgccaaagaagggaggaagcttacagattctcggaaatgaccagaggcatcggaggaagaatctacccgaggca

SEQ ID NO: 167859 - DNA, 700 bp, Arabidopsis thaliana landsberg
cgaagaggaatttttttggtatgaaatctacgattttgtctctggtttatggacaactcttaatgtcactccacattggggtatttattcgacttacccttgtgtttcccttaagggaaacacttactggcctgctaaagaaaggagcacacaaggtttccaagattacataatcggtttcgattttacaagagagagatttggaccccttctagctctgcctacggatcgtgaatgttcatttgtgagtttatcttgtgttaaagaagagaagcttgcagctttatttattcaccaggtgcaccatgattcatacgaatatgagtttgtgatatggattacgactaagattgacatcgaaatggtgtcgtggatcaagttcttgagaatggatatgagaccaaagataaagcttccacttagtttctacgttgacgaagagaagaaagttttcatgggttttgatcatggagaatatcccaagttatttcttaacatcattggagagactggattcttaagaaaattggatctcggagtacatgaaggccaccgttcgccatgctcttatgttccaagtttggtccaaatcaagcatcctgcaggagacaaaatgataaaacaaagtagtttagaagaccgtcgatttgctgaaaacagtttgagacttgctgcaattgaaaagctaatcaattagagt

SEQ ID NO: 167860 - DNA, 531 bp, Arabidopsis thaliana landsberg
caatagaaggtcgtcttgtttttaaaaaagtcttttttgattagtgcttaaacacaagttcacttgttagatgtaacatatgtgtgattgcttctgttttgttttacttatgtttaggttgagatcagagtgtctccgggttctcacgctgatgaagtttcaggtgaggaagtcttatgtttactagaccatctcttcgcaatggtttaagttcatatatgctttctataaaccttaactaatatagagattgcaaattgaatggatgatttgtgtaaattataaacattgctcttgtccttggtttgatagattttagtttctaatttaacatcactgcaaaatctggttttctatatttgtatttttgggaaagttgatgtcttaagttctgaactttgacactcattgggatcattttatattgcagtgaataaacaactgaatgataaagaaagagtggtggctgcattggagaatcctaatctccgtcagctcgtggatgagtgtatctactccgatgagatatga

SEQ ID NO: 167861 - DNA, 2085 bp, Arabidopsis thaliana landsberg
caccgttttacacattcattatatattaaaaaatattatacaaatatgcttattttaatatatcaatgattataatgaattaaatttaaacagaataagtgagcttccttttgaaattttacgttaaaaatataatacagtatcttttaaaaaaaaaaaaaaaaacactgcaaaatgagattttttgtaaaacagattttacttgactaatctctaaaaaccactatcaaaatatgtgctataaattgatcctctcgtctagttaatttcacaaaaaaattgtgaacgttacttttaccatctttatattcactacatacaattttttttttcttagctcatcaaacgtactttattccagaatgctactaaaattccgtaatgcaaatatttatttattctcaattggtcaatgaacaagcatcaaataaggaaaaagagacgccaaggattgtgtttcacactaacacatctctaaatagcaaattaaaacttgaaccatccgatgtcccgagtcaacctccccactgtcccatccaaatcaaaccatgtgtcctcttcacatgcacctcatctcctatacattttctcaattcccttatatatacttaaatccttcaaactcaactaattaacaaactaatcacattactgctaatcaacagaaagaagagccctaagacatgacaagcttcgcggtcgtcgcaagattcatcacaagagctccaagagttcgtgctttcgtcccgacaagactcgtccatgtaatctcttttatttttcgtatgaatttatgatacatttaattaatatttgtataacaaatattaattatccttcattttttaaaaaatgattcaaggggactacttctacgaggaaagactccgtctgtgacaaagctacagaggcccaacaaaaggtatcctatcgtgtttacatatccaatttgtgtttgaatattttaactatattttttttttgacttttacatttagaattaccacatagattttgtttaaaattttgaaatagttaattataatatatttattgtaaatttgtaacaaacatgttaatgaagaaagtctcacatcgaaagttggagaaactatcaagtagtatataaaaggttatggccattccacctatagccaacaaaactaaaagaaaaaaatctgttttgtttctttatatgtaattgtctttacatttggttttatgcttccgttacccaaactagacatgattggtgtaggtggccaagaaggcagacgaaggggcacagacgatctcctatgcggcgggtaacttgaaggataaggcaaagaacactgcagaggaggcctgggataaggtgaaggacactacagagaagatcaaagatacggtcaccggaaaaactgaggaaactaaggagtctattaaagccacagccaagaccgttgagagaagcatgaacaccaagaacctcaaataataacacgctaaatttgactatattaaataagatgttatttacctaatgatgagtttgttttaatctgttttatacttctggtttgtgtcgagaaaacgtattgcattattaggtaagaataaatctggttatgataagatcatatagaaactcatgtgtttgttttaataaagataatttgatatatttgtaaatcttgattgaaaacttttgtgagtggtcaacgagttgctggtctagtgataaatctcccaggtggaggtgataggttcgaggcacgttgggagggatttctttttcaaaggagatgaatctaaaatggtgtgggtctcgcctctaggagatgtagggcctttgggcttacacttccagatattcaaaagaaaaaaatgtaaaaattagtctcctctctttgtgctttttattgacatgttgtacatatctcttagtttcttgttttcttgatctacgaggggacaaacttgaagctcgatctcctaaagagatttaacaacgatatgcattgtctttgctctttctacataactttgcttgcattcgatccaaccagccgtttgcaagagacttttcaggttaaagttgaa

SEQ ID NO: 167862 - DNA, 1223 bp, Arabidopsis thaliana landsberg
  unsure (1)..(1223): unsure at all n locations
agagctttattacaggtggattctttattctaatatttagcatttttcttgtctttttcaagagtttgaggatttgattgtgctatcaattgctttgtctcagggaaacccgtgtttggtacgctgattgctctgctctacaaaggtaaaccggtaagacatcagactctcttgttgtttgcgaccttcccatgtttgtggttgtatgcattataagcacattctgatgtcagatcgggaattcttattgaacgtgttttaactacttttctgattctgaagaattgcattttaggcttactaactgaccttgtcttcactttcagattctaggactgattgatcagcctattctaaaagagagatggataggaatgaatggaagaagaactaaactaaacggggaggatatctcaacgcgatcttgccccaaattatcacaagcatatttgtaagtttgcgtccattgacccgtaatagcaatacttttgaaggaaatagcctagaatgacatgtgatgcctttatagtttcgtgtttcaagaaagcaaatagcattctcatgttcattatcatactctaagatctcactgttttctcttctcacattttgattgcccagatacaccactagcccnnnnnnnnnnnnnnnnnnnnnnnnnnnnnnnnnnnnnngagttagagacaaggttcttatctatttgtgtaatatatatattcttacatgggatttagctaaattggaattgtttgtcggttggagcatagtacaggaaaatgaaacttccttatgagaattagaagaataacgcatctcacaataattagtatctcaattaagcttcttatccagttgattttctatggcttcctttgaatcccttcttttctgttcttttcatttcaatgttagtgactagtgactccattctggcttgataaattgtattgtaacaggtgaaagtgcccttatacggctgtgattgttatgcttacgctctcctggcttctggatttgtcgatcttgttattgaatccggtctaaaggtaatacttctctttcagaatggcaccactataatttcttgtcaaaagtaaatgcatcatgtacgaatcttcaactggtactacccgttcaaatcatactaattgaagtcaaatgttattcttcgtcagccatatgatttccttgctctggtgcctgtaataaaggcgcggaggtcc

SEQ ID NO: 167863 - DNA, 839 bp, Arabidopsis thaliana landsberg
  unsure (1)..(839): unsure at all n locations
taagagccaagcctaaatatctctcgttctaaaactcttctcgctttctaggtcaagataccgtcctccttcaatcctctagattctccaggttaactttgtgattcctttatttactgttgtgaaattgctcaattnnnnnnnnnnnnnnnnnnnnnnagactcataatttcttggtgggtttttgtagaggatcagaaggagcaatcctcagatctggactaccagatcgccggagaccgtctccggagaaagaggagaggtattatactacgagaggtgtagtggataacattgggaaagattgtttagatggaaacatcaatggagaagatagcaacaacaaggaagagagtatgtggcctaagctctttataacattatcaaacaaagagaaagaagaagatttcatggctatgaaaggttgcaaaccttctcataggcctaagaagagagctaaactcatccaaagaagcttacttgttagtttcccatactctttttgtcgtttttagaaaagtgttctgaagattcttcagttgtctgtttatagttttgagaataatgtgttgtctgattttaaacagttggtgagtcctggaacatggttggctgatttgtgccctgatagatacgatgttagggtgaagaagagctctaagaaggtatgacctttttatcaatttcattccagtgatccatcaatagtgattgagattgtatttgctttactttttgttagagatatgaaaatgatgatggtgtgtgttgtgtttgtgttgcagaggcgagcaagagggctaaaagccatgggaaacatggagactgattcagattga

SEQ ID NO: 167864 - DNA, 2204 bp, Arabidopsis thaliana landsberg
tgcaaatcttccttgcctttctagtttcttcagtattttcaaaagtcaagacatcaacaggtactaagaacatcgtgcttcttgaatttaatcaagaacatgctactggggtttaaaggaactaatgagcttttatcaatatgtcttaatcatagttgcttcttacatatacgtgtttggatctggacttttgggtttgtttctactcaactttctgattgaagattcatcattccctagtaagttattatgattaattaacttcaagaaagatatttaatacactctgttatgtgttttcacaactgaccacgattgcaaatgaattataattttccaggaggctggattattgtcatggagttatatcctggcttctccttataccgtggcctgtatgagttggcgcaatttgctttccggggaaacttgagaggggaagatgggatgaagtggaaagattttggtgatagtgcaatggatgatgttttttacatcattgtcgttgaatggtttcttgcactcattgcagcatactatatcgataagatatcttcatccggaagaaacccgatgttcttcttgcaaaaccctttcaagaaatctccttctttgagaaggcctagtttgcagaggcaaggctccaaagtctcagttgatatggaaaaaccagatgttactcacgaggtatgtccaaaggctttacaatatattctatgtttttgataatatatactggttctgataacaaaaaatgttccaatcagagtaaaaaagtcgagcggttgatgcttgagtcgagtacaagccatgcgattgtttgtgacaacctgaagaaggtgtatcctggtagagatgggaacccgcctaaattggctgttcgggggttatctcttgcagtgccttcaggagaatgcttcggcatgttaggtcccaatggtgctggaaagacttccttcatcaatatggtcagtcaaacggacaaatcgacccctaaaaaataaatagttgtgcttagcttatgactgaaaaactcccattggataataaaagttgcatcgttttttttctgtatagatgactgggcttgtgaaaccaacttctggagcagcttttgttcaaggtttggatatatgcaaggatatggacagagtatacactagcatgggtgtatgcccgcaacacgagtaatcaagttcttagaaacattttatttttgttcaactgtacaaatgattattagttgtttatcagtctcattgtctattatgtaccaccagcttgctatgggaaacactgacagggagagaacatctactgttttacgggagacttaagaatctcaaaggcgctgatctcaaccaagtatattatcaatctcacttcccttctatattacttcaaaagttatcaaaacgctcaatctatctctcacctttacttacctcgcattaggctgtggaagagtctcttaggagtgtcaaccttttccacggaggagttgccgataaacctgccgggaaatacagcggaggtatgaaaaggcggctgagcgtagccatttcacttatcggtaatcctaaggtacaccattgtctaagaatatcttgttgctattaacaaccatgacctttataaacagtacatctagagagataaggctctttcaagtttaacaaactcgtcctcatttatttcttaccttgaaggtcgtttatatggatgagccaagcacagggcttgatccagcctcgagaaagaacctatggacagtcatcaagaacgcaaaaagacacagtgcgataatcctcactactcattcaatggaagaagcagagtttctctgcgaccgactagggatttttgttgatggaagattacaatgcatagggaacccaaaagaactaaagggaaggtatggtggatcttatgtgttaacaatgacaacatcatcagaacatgagaaagatgtggagatgttggttcaagaggtttccccaaatgtcaagaagatataccacatcgcaggaacacagaaatttgagatcccaaaagacgaagttcggatctcggaagtgtttcaggtggtagaaaaggcaaagagcaatttcaaggtgtttgcttggggacttgctgacacaactctcgaagatgtttttattaaggttgctagaactgctcaagcctttaatgtcttctcttga

SEQ ID NO: 167865 - DNA, 924 bp, Arabidopsis thaliana landsberg
gctgttttgcaggtaacatacatacatatgttcataatagtactgaacacctttagcaaaaaacaaaaatacataagttcttgtaaccatattataacttttcattttatggtgtatagataatattttgtgagtatttataatgtttcatttgaaagatgctaaatgataaagtttgattttgtctttttaagggtgatcatctcgttatagcaaatgcgggtgactcacgagcagtaatagcaacaacttctgatgatggaaacggtttagtcccggttcagctctcggtagactttaaaccaaacattcccggtagagttctagaagcctttccatattttacagttacttttactcagatgaaatgacgaattaacaattggtatgtgataatttccggttaaaacagaggaagcagaacggataaaacaatcggatggacgattgttctgcctagacgatgaaccgggagtgtaccgggtgggtatgcctaatggaggatcactcggtttagctgtttcaagagcgtttggagattactgccttaaagacttcggtttagtctctgaaccggaagtaacataccgaaagataaccgacaaggaccagtttctaatcttggccaccgatggggtaatatatcaaacttactcagcatttaaatcaaaatcaagattgataaatcatataattgtgtaatgaactaatgatgtatgtatgtatatgtagatgtgggatgtgatgacgaataatgaggcagtggagatagtaagaggagttaaagagagaagaaagagcgcaaagagattggtagagagagctgtgacgctttggcgtaggaagagaagaagcatcgccatggatgatatttctgttctctgtctcttctttcgtccttcttagtttaactcttctttaacc

SEQ ID NO: 167866 - DNA, 1113 bp, Arabidopsis thaliana landsberg
  unsure (1)..(1113): unsure at all n locations
agaaattttcgatggaacatcaagaagttgttcttcgtgctgctgaagaacttaaacaagaaagatttgaggtacatgactgagattatatatgatgcaaaaacatgtttaggccctatctatatcacttttgtttttggctggcctctaacaatttgcttcttgcattacctcattgccttttaagtttgaaacttgttgaggttaaagcacaaaaccatttatgtgcttttcttaatcaagtgtattgtctgtttgtttacggatcatgaaacttagtgtatctcattgctcttggtgtaactaaaattaggccgctaaaaaagccaaagaagctaaagaaaaagagaaaaccaaacacgacccctgtaaaaaaagtaagtgttgtttaatttaaacgttgaaaatgtctagtttaaggtgcagttttgttttgtatacatatatatatatactcttattaagaaaaagcatgtgttccattttgcagagcattccagttactgtgataacgactttgaatttatattccaaaatttattcaaagaatctcgagattcctattattcaacacatagagagaaggaacataattggtggtatcactcttcatggtcttctaattactctagcaactcttggagatcgaaatataacttctatgaaggaggagaagaaaaagatgagaaagaagaagaaaacaaagaagatggctatggttcaagaaaatccagaggctcagtgtttgagtcaattgaataccaagcctctcatagacaaacacttggtctgagtccttggggtcccttaaaactcgaagatgtcaaaaaagcgtaagttattttactccaagttcaaacacacaacacatacattcatgaccaaacgtgttgtttattttcagatatcgaacttgtgcattacaatggcatccagatcgtcatgaggaatttaacaaggtaaaccaatatannnnnnnnnnnnnnnnnnnnttatatgtttttatctcttgtgttaatccttgactatataaactgacaggaggcagctgaagaaaagttcaagctctgcactgttgcttatcaatctttaatcgagaagttagcagtcaaa

SEQ ID NO: 167867 - DNA, 2794 bp, Arabidopsis thaliana landsberg
cgccataaccaaaatagagattcaaatggttctcgctctcatatctcgggaaaacgctctgttccccaagacccgaaagagaacatgtcaacagatggacaaaagagaaaatttgttgactcctccaacccaaagaacgtcactgaaccaacaagacatgagaggggtgcttactctcacaaagaataccgagcagtgcacgtggaagagatgagagggaagtgggacctgttgtctctagtatctccgactctcagatgacaatctctgagccccttctgtttccccctagagcgaaacaaggcaatttgtcaccttctcgagttcatgaccgaccttttcgtctgaatttagctaagaagtttaccacgtcagagaaaggcaaaggaaaggcagtgaatccctctgatcatcttcccggggactcctcggagataggaagctcggcaaagaaagccttgaattttgattcccaagagccagcgttgaaggagaatgccattccagaatcggatgtccctcttgttacgggtagccttctggagaaagaaaaaagctggtatgagatcactgtggaagaggaagaaattgaaagaaatgaggatcctgaaactttcctggccaagcaattctctaattgcgtcagctttgctaatcctggcgagactctccgtcgtcaagctttgcctcaaggctcgagcggagtggcagcagattggattggaaatcctaattcagtgtcggaagctcttgatttagactggactccggaggatgaggcagcatacaactctttggaatcacctcacctctcagccgaggactttaacgctgaggaggatgatctgctgggggaggagctgcatgatgagatgaattctcgtttgacagaggctgctggagtaacggatgtagcgaataaggtgaagaacctttccaatgacctaaagaagataatcgcgactgaagaggagccgtcaccactcaccgtttcgctggataagaatctgggcccatgtaggcccaaggaaaaaaaagaaggattccaaaaagaaaggtggtgcctaggcccgacaattgattctcagctcggcccatctaaccaactcagcctctaagaagatctagaacatcagaggccggtccccgagtaagcgcgcaatatacaagcctggcccttccaggtcgaggagttctaggaggtccgcttcaactccgaagagcgaggtctatccatctagcaagatcaagcctacgatttcaattgttggtccggtgaggtcaccaaacctccccgataccaacacatgaggatcttagcttggaaactgtcaaggggcgggagcatcactcaattcccgtcgactaaaggacatgtgtcgtatgttctctccaggttttttttttatcggaaactaaaaatgactttttgtatcttcaaaatatgcaagtatccttgggttttgattcccttaaaattgttgaaccaataggtaacagtggtggtcttgcacttatgtattcgaaagactatccggttaagtttgtttttgagagtgatcggcttattgatattgaaactattattgatggaaaccgagtttttattacttttgtttctggtgatccggtagttcaacaccgagaattagtttgggaacgtttgactcgtattgctctcacacgctcggatccatggtttatgattagtgactttaatgagattataggaaatcacgagaaaaaaggtggtaaaagtaggtcggaatcctcttttctcactttctgttgtatgattgaaaattgtggaatgatcgaagtgccatcacacggcaattagttttcatgggtggggcgacatagttgtggagttacgggccgtagagttcttaagatcatttaatcaagattagatagagctatagctaatgaggaatggcatactatcttttcccacactaatgtggaatatttaaaattatggagttgtgatcacaaacccctcctagcatcaatccacaataccccacaacgattatttaaaccttttatttttgataaaagatggcttgataaacgggggtttaaagaattagttattggaggttgggatgtctcttcacaagaaggagttcttttttcacaaaaagttagaaattgtaaaaaatcaatttctatttggaagaaatctaattcctcaaattctgagaagaggattttggatcttcaaaataagatcgaccttgctcaagaagatgagtctatctccgctgaagatctattagctctaaagtggaagctttgtgatgcttatagagaagaggagatattctggcgtctaaaaagtcgggagttgtggctgaaagagggtgataaaaacacaaaatattttcatgctattaccaaacaaaagagagcaaggaagaagattatttgtttattgaaccaagacgatctttggatagacaaggaggtggacttggaaaggcttgcgattgattactttaaagatttgtttatcacctcagagccataaaacttccattccactcttcgggatgtgccagtaatgatatctgaagatatgaatcagagactcactagagagatttcccagaagaagttaagcgcgctcttttctcgcttaatctggacaaagcaccgggttcggatggtatgacagcgttgttctacagcggttttgggagttgactggaccagatcttgttaaagttgtcaaaatttcgatcatcctgctcttttgaagagcgtctgaatgagcaaatatttgtta

SEQ ID NO: 167868 - DNA, 1576 bp, Arabidopsis thaliana landsberg
  unsure (1)..(1576): unsure at all n locations
cctggtaatcctgatgctaacccaaggaagagctgcaatgccatcttgattagagaaggagatgatgtgtgggaagaattggatactgaagacgagttggagctcgtagttgcagagatggtgtcgaccgacaccctcatgtgtcgatcgacaccatatgggacacttttctcagagacgactcaatacgacggtgtcgatcgatacccgtctagtgtcgatcgacactggatccggattgcaccttgtgaggtacaaatacctatgcagcccgaatctgtctacactcctcctgtcccctatccgaggaggcgtcgttctaagcaggagattcacgctgttaagtgcacagccataatggagaagatcctccatactcttcctaaggatgcttgagggacatcttccgcctcactcaacaggtatgtcaagcaacttgttgacaatggaattagttcagatgaagctaagctgctcaccagagacatcagtgcaatcatgctgcctaaagccaaagaggagaaggcacagagagtagacatagctgaatatatctgcaccattactcctggtcagaccactgagaagcttccagatccaggtagctttgttcttgattgctctatctccacaagcagattcagccgctctttgtgtcatctgggatcaagcaccaacctcatgcccaagtctgttgctcagagactcggcatgaatcactatagacctactcgcattactcttctcttcgcggatcgttccaagcgaatccctgaaagaatccttgaagatgttcctgttaaggttcgtaactctgttatccctgctgattttgtagtcctggactatgagaaggaacccaatgatccccttatccttggaagagcattcctagctacagctgttgctaagtttgatgtgaagagagggagaatctttctcaaggattgtgattcagagatggagtttggcatggatggttcagagcttactaagcctatcagttgcattgcctccagcacagacacacctcctcagactgatcagaatcccaccacagagccacacacaacgctccaacacgttcagctcgccaatgacagttgcagaggaacggtttcgatcgacaccactatccctnnnnnnnnnnnnnnnnnnnnnnnnnnnnnnnnnnnntctgcacattctcttcaacccacaccacttaaggacctatgtgataagttctcttctctctcttctcctgttttatctttgattaattctttagattattcgaagactacttcactagataacaagcctagagttcctcgaaagcttgtttctcctgttgtatttgcaggtgacgagatgagtgtcgatcgatacaccgccttggaagctgctcagactgctccaaccagatccgtttacacaccgccttggaaggcgaggaggcagcagcaatcctccaccactccacccacatcctgaactccgccaagtcaagctattgactcaaaacaagcgcttagtgggaggcaacccactggtttgatttttcttttccctttcttttattttcttttatttt

SEQ ID NO: 167869 - DNA, 1394 bp, Arabidopsis thaliana landsberg
  unsure (1)..(1394): unsure at all n locations
cctaaaaagtcaagacaagccttagatgatgtcagatgcaaggctatgattgataatctgattgttgaaatgcctctagttgaagctattcatctatctcccacaatcagaaggtatgttaagacaatggtcactaagaatttgacgaaagaatgcagtgttacgatgatttcagagcagggcagcgacatcattcaggaatgaatcccaaaaaagctgcctgatcctggaacctctgtactaagtttcacaatcaatcttgatttcttcccaagagctttatgtgatctcggttctagtgtgaatctgatgcctcgttcagttgctatgcgtcttgggtattccaatcttgagcatacctttatcactcttgtgttggcagttcgttctacccgaattaaagatggaattcttattgatgctcctgtgatgattagaaagagcatgattcctacagactttgtagtcttgcctaatgagaaggaacctaaggatccattaatccttgggagatccttcttgcacacagctggagcaatcatagatgtttgacaaggaaggatagggctgaatgttggcgatcttactatgtagttcgatatgaacactttggtcaagaaaccgatcatataaaggaattctttcttgatagattctttcacttcattagcttcagatagtatttcagagatggaattagaagacccactagagcgagttttggtctcttccatagaagatagtgcatatttggatagtgaaacttctacatatagtaagctcctagatgagactaaacatgtgatgcaacttataattgaagaagatctttcatctgtgactccaacaccgactacttattctgattgggattcaacaaaggctcctaaaatcgatataaaaccacttccagcagggttaaggtacgcttttcttggtgaaaattctacttatcctgttattgtgaatgcttctcttaatcccgcagagctcaccttattgctaagcaagctgcgcaatcatcgcaaagctcttggctcttctcttgatgacattgcatttatatctccggatgtatgcatgcataggatccaccttgaggatgaatctaagtcttcagttgaacatcagagaaggctgaatccaaatctgaaagaagtggttaagaacgatattatgaaactgttggaagcagggattatctatcggatttcacatagcantttggttagtccagttcatgtagtccctaagaggcaggtgttacagtcgtcaagaatgagaaagatgagctgatccctactcgaacaatcacaggccatcggatgtgcatcgattacagaaagctgaatgctactactaggaaataccatgtccccttaccattatcgatc

SEQ ID NO: 167870 - DNA, 1300 bp, Arabidopsis thaliana landsberg
ctttactctcgactacccaactaaatattataagatccaagtaaactgagagatctttgtgaacacaattaaggttgtgagtgaagacggcaagaaagttaagcgtacaagtcaatttactgatagagacagagaggaattgcaggtaaatttgaatatcactaaagcttcattgtatttattatcaactatatatgagttcttgttactctttactgttctgcagggccggactgtcgttgcagagaatttgccagatgatcattcttaccagaaccttgagaagatctttggagttgttggaaagtaagaaggctttttactttcattttaaacattttctctacatcaataaacaacaactctggatgcaatttgtctcagcgtcaaagcgattcgtatatgtcatcctccagaatccaactcgtctcgtccaaaaggcgatttcttgatgagcaacaaagtaagtaccaagtcctgtttctacttatcacgtcaacttaaagagcttaacatatccatcttgttttactctaaagattcacgcccttatcgagtatgacaacactgttatcgcggacaaagcagtgagtaaatctctactttcaactatcttttgatccaaggctctgtctattagtttctgagatatatagcaaatgcgatcttaccaggtagagaagctaaacgatgaaagaaactggaggaaagggcttcgtgtgaggctgcttcttagatgctcggttgatttctatattctcttcttaagtcacacatttctctctagacgttctgagattaatttcgttgatatactttgtgtgctacagccaaaatcggtgctcaagaaccgaagaaacttcgatggaatcctcatcgatgatgaactcccttcttatgaatcaggagaagactctccgcgtctccatttaaccgaatcacagcttgataacgatgttagtactgttgcttaagtcccacgaaatgtttttccatatatatatagaaactaaattttcttgctgtgcacgttagggtgatgacaacaatgtttggtggactgtggggtaaagggagaggaaaaggacgaggacgatccccaagaagctacgcagtaggaggaggaggacgtagcttcgggattgggctcggagtcagcctcgggatacccagcctggggtcacacgaatcttcgtctcctaaaacagcaacaaagggaccaagaatgcctgatggaaccagaggcttcaccatgggacgtggcaaaccttccatctcactctcacctaacaatctctaa

SEQ ID NO: 167871 - DNA, 483 bp, Arabidopsis thaliana landsberg; identical to SEQ ID NO: 56462

SEQ ID NO: 167872 - DNA, 930 bp, Arabidopsis thaliana landsberg
gtgtagcccatggcgcagggatcacaatgcagtttgtgaaaaatgtcatcatccatggactgcatattcaccacatttctgagagtagcggtggtatgatccgagactctgtagaccatttcggaatgaggactagagctgatggagatggtctatcgatttatggttcgtctaacatttggcttgaccatatctcgatgtcgaaatgtcaagatggactcatcgatgccattgttggatccactggcattacaatctccaactcccacttcactcaccacaacgatgtaagcattcgtcaaattttccataaaattctatctaatgctcattgatatcaaccactacatttgcattttcggggatatttgtttatgtaggtgatgttgcttggtgctcaaaacacgaatgaagcggacaaacatatgcaagtcacagtggcttataaccattttggtaaaggacttgtacagagaatgcctaggatccgatggggatttgttcatgttgtgaacaacgactacactcattgggagctttacgcgatcggaggtagtcaaggtcctacgattctcagccatggaaaccgattcatagctcctccacacaaaccgcattacagagaggtgaaaattgggttacatattgcaccaaataaaagtttaggtatgaatttgtaaacttataaaattttaataaacgcaggtgacaaagagagattatgcttcggaggacgagtggaaacactggaactggagatctgataaagatgtattcatgaacggtgcttatttcagacaatctggtaatcctcaatacaaatgtgcacacacaagacaacaaatgatcaaaccgaaaaatggattggctgtttcaaagctgaccaaatatgccggagcacttgattgcagagtcgggagacgctgttag

SEQ ID NO: 167873 - DNA, 1083 bp, Arabidopsis thaliana landsberg
  unsure (1)..(1083): unsure at all n locations
ctccggtttctgatgcttacctcatcaatggcctcgccggagattcatatccttgctctaagaatagtaaaacgcactcttcacttaaattatttttgtaaatgatcgacttccatattaattgacacaacacaattgtttacaaaaaaaaacataatttctttcgttttttttccgcttcgataggaatgtttaacctcaaagttgtcaaggaaaaacatacttgctaaggattataaacgcagcactcaacactcacctcttcttcaaaatagccaatcacaacgttacagttgttgctgtagatgctgtctacacgacgccggtacctcaccgatgtgatgatcttaacaccgggacaaacaattgacgcaattctcaccgctgaccagcccattggaacgtactacatggccatcatcccttactttagtgccatcggggtaccggcatcccccgacaccaaacccaccagaggcttaatcgtctacgagggtgctacgtcatcatcatcgccaacaaagccgtggatgcctccggcgaatgacatacccaccgctcataggttctcctcgaacatcactagcctcgtgggtggacctcactggacgccggtgcctcgtcacgtggacgagaagatgttcataacgatggggcttggcttagacccatgtccttcgaacgccaagtgtgttggaccgctagatcaaaggttagctggatctctaaacaaccgcacttttatgattccggaaagaatctctatgcaagaggcttatttttacaacattactggagtctacactgacgattttcccgaccaaccaccgcttaaatttgatttcacaaaatnnnnnnnnnnnnnnnnnnnnnnnnnnnnnnnnnnnnnnnnnnnnnnaagaaagactagcgttaagacaattagatttaattctacagtcgagatcgttttgcagaacacgggaatactaaccccggagagccaccccatgcaccttcacgggttcaacttctatgtgttaggttatggatttggtaactatgatcctattcgtgatgcaagaaagcttaatctattaaccc

SEQ ID NO: 167874 - DNA, 1506 bp, Arabidopsis thaliana landsberg; identical to SEQ ID NO: 34756

SEQ ID NO: 167875 - DNA, 3434 bp, Arabidopsis thaliana landsberg
caagcttgggcaaaaagttgcagtttgtggaccagttggagtatgaaaatcatcgctgttgcatgcagtactcggagaaatacctaaagtttctggaactgtaagcaaatcagccaccaagactgactttcacttttttcattagatatacatttgtttgttccaaatgtttcctttacgttgtccaattgaaacaggtaaaggtctttggttccatcgcttatgtttctcagacttcttggatccaaagtggtaccatccgggacaatatcctctatggaaagcccatggaaagtagacgatacaatgctgctattaaagcatgtgcgttggataaggacatgaacggttttggacatggtgacctcacagaaataggacaaagagggattaacttgagcggaggacaaaagcaaaggattcagctggcccgtgctgtctatgcagacgccgatgtgttacctgcttgatgatccttttagtgctgtggatgcacatacagctggagttctttttcatgtaagtttgaaacattgctttcgaagaagcttttcttaatgactgcttcttattatgttgaactgtgactgcagaaatgtgttgaggactcgctgaaggagaaaactgttattctggtcactcaccaagttgagttcctctcagaagttgatcaaattctggtaaaacttgagagtagcaggaaatgcaaaaacaatattgtctttgtcttacccgtttgattattactgactgatgatcttgatcaggttatggaggaaggaacaatcactcagttaggaaaatatgaggagctcttaatgatggggactgcattccaacagctggtaaatgctcataatgatgcagtaactgtattacctttagcgagtaacgaaagcctcggagatcttaggaaagagggcaaagacagagagataagaaacatgacggttgtcgaaaaaatcgaagaagagatcgaaaaaacggatattccaggggtacaacttacacaagaagaagaaaaagagagcggttatgttgggatgaaacctttcttggactatatcggtgtctctcgaggatggtgtcttctatggtcaagcgtattgggtcaggttggctttgtagtttttcaggctgcatcaacatactggctggcttttgccatcgggatccctaaaatcacgaatacaatgcttattggagtctatagcattatatcaactcttagtgctggttttgtatatgcgagagctattacgactgcccatcttggactaaaagcttccaaagccttcttctctggtttcacaaatgcagtcttcaaagccccgatgcttttctttgattctactccagttggccgcattctcacccgagtaagatctctttgcttataattatatggaatacactacagctcaatgtatgatatagttgaatgtaacatgtgcaggcttcgtctgatttgaacgtgttggactatgacgttccatttgccttcatatttgtggtagcaccggctgttgagctcactgcagctcttctcatcatgacgtatgtcacatggcaagtaattatcatagcccttcttgctttggcagccacgaaagttgttcaggtacatgattcgattctacttctgtttttagttggtttatgcagcaaataagtctgtattaacatccgcttcttctttgaaaaaaggattactatttagcctctgcaagggagctgattaggatcaatggaacaaccaaagctccagtgatgaattatgctgcagaaacctcacttggggtggtgacaattcgagcttttggaaccgcagagagattcttcaaaaactacttaaacctagttgatgcagatgccgtgctattctttctgtctaatgcagccatggagtgggtgattttgaggatagagactctgcagaatgtgactttgttcacttgtgcacttcttcttatccttattcccaagggctacatagctccaggtacatgaattattataactcatcatatcttcctgcagcctgcaattttaacttacctgttttcacagcttgtgtcagtatagcgtgagcatttccttgaaaaatttgatcaaactgaaaggttgtgcatgaacttgtgcctttgtgttgcaggcctcgttggactttcgctctcctatgcattaacactgacacaaactcaggtgtttctgacccgatggtattgtacgttgtcgaattccatcatttcagtagagaggatcaaacaatatatgaacataccagaagaacctcctgcaattatagatgataaaagaccaccttcctcatggccttccaatggtacaattcatttgcaggagcttaaggtgagaagtaaacataacttgttataagatgatagtaatagttatgcaaaaggcattgatttgcatcatttctttgtttcagataagatatcgacccaatgctccgttggttctcaaaggaatctcttgcacattcagggaagggacaagagtaggagttgtcgggaggacgggaagcggaaaaagcacattgatcagcgcattgtttcgcttggtagaaccagcaagtggttgtatattgattgatgggattgacataagtaagattggccttaaagacctgagaatgaaactgagcatcattcctcaagaaccaactcttttccgtggctgcataaggacaaacattgatcctttaggtgtttactccgacgatgaaatatggaaggtgaaataacaaagaaagactgagatttccaaatcaaaagatataaaatctttctgataaaaccattctttttgcaggctctagagaagtgtcagctcaagacaacgattagcaatcttcctaataaacttgattcttcaggtaaatggtaaaaaagctgtaatattttcatttcacaaaaaaatgggtttgatgacacttacgtttatgttttttcattggtgagaagtgagtgatgaaggagaaaactggagcgtgggacagagacaactgttctgtcttggaagagtattgttaaagagaaacaaaatattagtgttagatgaagctacagcttccattgattcagcaactgatgcaatcattcagagaattataagagaagagtttgcagattgcacagtgataacagttgcacatagagtaccaacagtcatagacagtgacatggtcatggttctctcctttggtaaacaacattttctctcattctttcatctcttaaacctactcataatgaccaatgaatgagtttcggttttggttttggataggtgatttagtagagtacaacgagccttcgaagctaatggagactgattcttacttctctaagcttgttgctgagtattgggccagttgcagaggaaactcttctcagaatctccaattataa

SEQ ID NO: 167876 - DNA, 646 bp, Arabidopsis thaliana landsberg; identical to SEQ ID NO: 44481

SEQ ID NO: 167877 - DNA, 4241 bp, Arabidopsis thaliana landsberg
  unsure (1)..(4241): unsure at all n locations
atgcagacgctgtctgaaaacaatgggcgtgagttggaaattgtgtattgggcaatagactggtcaaagtatcaacttatagagatcatacattacttgcaatgtttcgttatatcagtaatcattagtatgcaacttgctacataatatggtcgccaaatcttattttgcgatttgacaatgtaaatctatccgtaggaaaatttttgatacgtatctattgcattaaatgcggcgacagtgttatatacgggttccaatattgcattgggggaaggggtgaaataaattccaaaaacaacgtgtttcgtataaatataacataggataaccactaagcatccaccagataaacgacacgtcgcgcatgacgtctgcgataatgttaaaacacatgaattattgtggttatgcatgtaattcaaatacaattcagttatatgtttgatgcgacatttacagaagcgacagattccatcgattagcagcccttcgagagtttggagagaaatcataattattcaaaattatgtggcttaaaagcttgtaagcactgttgcggaaaatatcttaatatactggagccctacttcgtagcgaaagtttccatatataacaggagagatgagtagcatttaaaacacacgataatgagtaacccgctttatttataaaacacacgccatctatatatggccgtgttctggatgagccacataacttatagacttcattactaatgagaacgtaacatgcgtaggtaatgagtaacccgctttatttataaaacacncgatatatatatatatatatatatttgttctttttttttttattctataaaccacataccttataactttcaattacagatgcatttgatatttaaaccctaacttatatcactagatatgccaaaaacggaccatatatatacagatgtttactttgtatgcgactagttattcaatgaagactaacagataaaaaagtcattggtaactgtaaaatagaacgttatttaaaaacaactcatgtaattcctatatgcaaacgcggtatgaaaagaataggagtgagttgaaaattgtgtattgggttatagtctcggcaaagtatcaacttgtagagatcatacattacatgaaatgtttggttatagcagtaatcattagtatgcaacttgctacataatatagtcggcacattttatttgcgatttgacaatgtaaagagtccgtaggaaactatttgatatgtatccattgtattaaatgcggcgatagtgttatatacgagttccaatgttgcattgggggaaggggtggaacaaaggctagaaacaacatgtttcgtataaatataacaaaggagaaccactaaccatccaccagattgacgacacgttgcgcatgacgtatgtgctagtgttaaaaaacatgatttattgttgttcgtataaatataacaaagaagaaccactaaccatccaccagattgacgacacgttgcgcatgacgtatgtgctagtgttaaaaaacatgatttattgttgttatgcatgcaattttaatacaattcagttataagtttgatgacgactgcttccatcgattagcagccctgcgagagtttagagggaaatcataattattcaaaattatgtggtttaaaagcttgtcagcactgttgcccaaaaatatcttaatatattgtagccctacttgttatcaagagattctctatataactggagagatgagtagcatttaacgatcacaccacttcctcttggaaaacaatacaacgaacaaagtctacaataaaggagaacgacaagttacagcagtactaggtatgccattaatgatagatttgttttacagagtaccctgttttctttattaatcagtgttgtattaatagatctttctcgtttccaatttaatgcaaccacttctcgtttttttcggttgtagttaggggtgggcattcgggtaagcaggtcgggttcgggtaaaacccgatcgggtactggtccttcgggtagagtagtttaggacccaatagggtaaatctaaaatatcggttcagttttggttcggttgcaatcgggttcgggtcaggttctagttcggtttttcgggtaaaggaatttaggacccaatagggtaaatcttcggtttcgggtttgttttcgggtctaattgtttgggtcggtttcggtttgggtaatcggttccggtttttttgcccagtcctagttgtagttatcaatggttgttattattgaaataactgaccgatacatacggactgtgatcggatcatggggaatgggtgctgatggtagctgggttttcatcctgaaccaacataacgccgttagacggatgagcattcgagaaggggagaaagtagctatcgttcgccggttagtgaaggaagcctatggctcggagtacgtagggtgtgaacttcatatgtcataccaatggcctgattggatggatattgaagctacctttggaggacgaacgaagccagtaaccatcgcgacagatgagacaatggggttttccctagctatgcgttttgagttggatgacttaagtttgtttgtctctaagctaacggtagatggtgttccggttgatgatggaatgagtcagacatcgagttacaggttgccagctaaggggaaatcaccattgtattgcaatgaggaaagatgttgtaccgacgagtcttttaaatggaaccgcccctggatgatgaagcggtcctccgatgtatgcgttcgacaggtacagatggtgcaagcatcggtggctcttccttcatcacacatgcaccacgaccgggagctactgttgagccagctttgtcttaggaagcaactcttagtatgaacgagacgagtgaaaaggcagatgaggtagtaaattagtagctcaatattttttatagttgcctagaatgtgccaagcgtacatctacatctgtttacgcaggaaggagattcaaatcttgtggaggcagatttgctggcaaatctagggctaccgtcaattaatctggcaactgataattacgtttctgacagcggaagtgaagggtacaacgacgagaatgaatatgacgggggagaaactcttaaggagtgcaacttcttcgggccgtcggcgacaatcatgaccgaacctctaggtgtacacttggacctacaggtcccactacaacaggctcttgaagatatgtgcattaacttcgcatctttcaacggggatgcggcgccaaccctagatgaacaaggagacgaaggtaccacttgcatagcatgctattttcgtataaaacacatctatttatatataatttgatatcgggtacctataagatatcttgcacattctgtatccgtcgagggcttacttatttatgttcaaaatagtccatcatgttgctaaatagcatgtgaaacattggaaactactgtttctttggtttataattacgttacgtcgaatgtatttgaacaataatttatgtttacattgatatacgtaactataacatggcatgcttacttatatcgtgtactttctgtttatttttccatttattcctatatattgtaatatcatgcgttacggtgaaacacattgttgtctcatttgatagctaagttttgttatttttttacaggtcgtgtcgggatggaactagcaattcaggatgttgtgtatgaaggtgatgaactgtttgtcggccgggtattcaaaaacaaacaagattgcaatgtcaagttagcagtacacgcacttaataggcgttttcattttcgccgtgatcgctcctgcaagaaattaatgactttgacatgcatttcggaatcgtgccctttgcgtgtgtacattgtcaaattggaggactcggacaattatcaaattcgaagtgcaacactggagcacacttgcacagtcgaagaacggagtaactaccacaggggagcaacaacgagggaaatcgggagcataattaagccaaaatatgatggcaacacacgggggccaagagctgtagacctacaacgaatccttctaaccgattattcggttagaatttcttattggaaggcatggtaatcaagagaaattgctttggagagtgcgcaaggctcgctgcgaatagtttcagtctgttaccgacctacattcatgtcttgcgagaacgacgac

SEQ ID NO: 167878 - DNA, 2285 bp, Arabidopsis thaliana landsberg
actctgtgcaatctacccacttctagtactcgagcgcattgtagtaaaagctcttatctcacactaaaatatacaaattggagtatatcatatatatcctcaattccccatcatgcaaaccatgcgtgatacgcctgattcatgtcacgaaaacgcttattatcttggacataagcattcatggtactatagatatcatacagttatagccataagaaagtaaattgcaagccctatccttctgtttatactattttgttaggcgaatagatttatgatgaatgtatatatttcttattattcccctagaaatttgtttttgaaaacaatagtcgtaatgcaattacaagtacataaaagcatgattagcctgatcaagtttagtctttttttttttttgggttaaaatgatacagttttagtttcttctacgaaatcattatatactgagagttctcttgtcactttctggcgtcaacttgttcttttagatggctttgttcttctgtctcttcattagcttatgtaagaaagcatgacaaaaaggcgacattacctttttgctgcctttaataattatatccaaaaatacatacatacacattaccaaaaagcttactatttttttctttttctttgaaattttattttatttttctttcaaatttgtaatagaaagttgaccttgttattgaaggaaaaaaaaaaaatggcccttactttcaaattgcttttgtgggaattgttatgtatacaagataattgtttgaagaagcatgcgtattcatggaggtcacaagttgatatgatggtagttataaaattttgtaagcacatacactctcacgcccatgcgtgaatttttcacatttttttagctctatacttttatttattttgacatcatcaatatatagattattctggtccggaaatataagcggtcatcaaatgttctttatattttggcctttatagtcactttaattatttgatttaatcattcctagggagaaaatcggagcatgcacgaaagatgccataatttgggtaacattcatgcatcttggaccaagaactcgaaaacgttaattttagggggaaaattgagataaatttgatcaagaaatttttaattacaaatttgaaatggagaactttctatatcattatctggtcacatgttataacatatataggattttgtattcatttgtaaattattataagtaaataaataatggcattgatgaaactattttatttactcaaaaaaatatacaggaccgggctgctcgtcgattgcttatggagcttcagaggaaattggaccgtttcgtatcaacaaaaccggttccaatctctatctcaacaagttcgcttggaacaaaggtgattacaaatttcattacaaacaagttcactttattctatgcttcatgtaaggaattattttgaggcttcaaaatttaaatttctcattattgaatgtgtactataacagacgcaaaccttctgtttcttgaatcaccggccggagttggatattcctacacgaacacaagctccgatcttaaagactccggagatgaacgaacaggtttaccattttcttaaatcatgcatgttctgttaattagttataacttataaatcgacatgcttggtttacttacattcttatgtttgctagagattaattgatttataaatgtttatgatcatattcctcctaatcacagctcaagacaacttgatatttcttatcaaatggttatcgagatttcctcaatacaaatacagagacttctatatcgctggtgaaagctatgccggtacgttttttgttttgacaaaaatggttccgtttaaagattcaagaattgcctatttgctaaataattttaatggacattattattttgacagggcattatgttcctcagcttgccaaaaagataaatgactacaacaaagctttctccaaaccaatcattaatctcaaaggattcttggtaaaaacaaaaagggtctacttagctcaaatcaaaactatatgtctccgattcctaattaacgaaagattaccattcttgttgctaaaggtgggaaatgcagtgacggacaatcagtacgacagtataggaaccagtacttactggtggactcacgcaattatcttcgacaaaagctacaagtcaatcctcaaatactgcaacttcacggtggagagagtttccgacgattgcgacaatgcgtttactacgctatgaaacatgagtttg

SEQ ID NO: 167879 - DNA, 613 bp, Arabidopsis thaliana landsberg
gtactcgacatcagaagactttggtctaaaagatgatgcaaaaggtatttacactgagattcgttctgagcttcctagtgattttaatacaagcgttgtggtaggaaaatggtatgtccctttcatatttgtgaaggaaggaaatccaaaggatcagcttaagagctcagcttattacagcatgattcttctacagagatgggagaaggtttactcgtgtgaaaacgcttacaacgatatccgcgaggttgtagttgatgttgaagtggaaccagaagttgtgaagcttgagggacaagaaattgggaaaaataccaaaagtgtggatgaaaatggttttttttggtttgcggttgcagaaaagaggataggtttgagatctgtggtcatggagaggatgaaatgggaagaggagagattcgggtggaagattgaaccgcaaagagcagtggttaagaaatctgagagatttaatggaggcggttcgaattggaagagttatggatgttatgtgttggtggagagctttgagttgaggagaaaggataaaagtttagtgttgacatttgagtttaagcatgttgataagttgagaaccaagtgggaatcatga

SEQ ID NO: 167880 - DNA, 686 bp, Arabidopsis thaliana landsberg
aattggcaggtcgccaatgggcgccgtcccagcacgcctacagccatcgaaaacgaagatggtgtatttcttttatccaaattgacaacctaactgatatcagtacaccggaatcggtgatggccagccgccaggttatcgaaaccgtcaatgcggctatcgacgcactaccggaagatttaagaaccgctatcgtcctgcgtgaaatcgagggccttagctatgacgagatcgcacaaagcatggactgtcccatcgggacggtgcgatcccgaatttttctagcccgcgaagcaattgctgcacagctacgcccaattatggatattgacgccgaccgtcgctggttaggagcaaacaaatgaacattactgcgcaatcaaaggatgcaggacaatctgcttcgtgggaagcgtcggtttccgcctgggtcgacggcgaggaagccgtacgtgccgaagagcttgattcgccctatggtcgtcacgtttgggacacttatcacttgatcggtgacgtgttgcgcaatgacgaactggccatcaagccgtccgatcggttctatgccagggtgtccaatgccattgacgacgagccggctatcgtggcccctcatgcacgacgccatgcgccggtgcgcctgtggttgtccggggttggccgttgccgcatccgtggcatctgtg

SEQ ID NO: 167881 - DNA, 931 bp, Arabidopsis thaliana landsberg
cttgctctgcttttgacacttagcttccttttaacgtatcttctccttgtccgttgtcgctgttaaatcacgacgacggagatcaagctcacagctcactggcactgcttccgggacctctcggaccttcgggatgacccgtaatcggaaaccttctccagatcatcggaaaagctcctcaccgttcatttgctgatctctcgagagtttatggaccagtcatgagtcttaggcttggaagtttaaccacagtggtcatttcttcaccagatgcagcaagagaggttctgaaaacgcttgaccatgtcttatctggacgtacctttagcgagacggttcgagccttcggtcaccatgaagtctccatagcatggctaccttcgacgtcgtctcgttggaggtaacttataaattagtgtgaattaaatatgataatctatatgaatacaatattgttcctattaggttatggaggaaggtactggcgacaaaacttttctcacgggagcgtcacaaagccacaaagtccgtacggtctaagaaagcgaaagaacttataacattcattatcgaaagagccgaaagaggcttctcggtggacattgctcgtgcttgcttcgtcacatcacatcgcttaatgtaatctcaaacgttgtgttttccaccgacttaggtagttacgatgcgaaagcctccacggaactccaggattcgttgtctcgtatgatgaaaataatggggaaaccgaacctcgcaaactattttccgtctcttgagtttcttgatctacaaggtatccggaaagagatgaaggtgtgttcggagaggttctttcaggtttttcaagggctcatcgatgctagaatcgcggaaagatcatcccagactggacctagagatgcattaagaggcgatttgttggattcactga

SEQ ID NO: 167882 - DNA, 500 bp, Arabidopsis thaliana landsberg
ccaaaatatcccaagaaatatttcccttctttggatacgatcatgttaaggatgaatacaaagtcttgtgcatgcgaatatcggatgagtactatagtagatcaggaaatattgtgtccaaggagcataaagttttcactctaggatgtaaacagaagaaatggagaatgatcgaatgtacgattaatcattatcttactcctggaactcaaggaatatttagcaatggggttatctattacttcgctagggtcaatgatgatcagtcgctaatgtgctttgttgtggggtctgaaaagtttagtgtcgttgagttaccgaggccggccgtcgaagttctagcgaactacggcgaaaagatagctgtaacgaatttgttatatgctagtaatgatagactttttgtatggattctagaagatgccagcaaacaagaatggtcaaacttaaatgaaattggttccttcttgggtagatatatagatttcgaccattcagcg

SEQ ID NO: 167883 - DNA, 864 bp, Arabidopsis thaliana landsberg
  unsure (1)..(864): unsure at all n locations
gaacatttgaaaacgaaaccctcgtgttgcaattgtgacctcaaaatctcgaatttcaacgaacccatcttccgtttaggacgacgattctccggagttttgaaagtctggttctcaatcggactaggattcggcgtcgcttctctgatcctcgtcaccgtcttccttctccttcagtttcactctaaccctttattctccaatcgtctcacttccgccgtatttggattctctccttccacggtaagctcacttaaacaaaaatctcagcttgtgaaaattcgaaataaagctaattactttgattttgcagcgtgtatcattatcaggcattgcctatgtacttgtctccactgtcattacagtttcagttcatgaacttggtcacgctcttgctgctgctaggtgagttcttcaaaattcattcttttgtaaagctcttgcctttttcgtgtgaaccaaattgggttccttttgaagctttactcttagattatgaaattcttaggcttcttctgattgagcggcagtgaaggaatacagatggaatacattgccgttttcattgcagctatctttcctggtggtcttgtagcttttgataatgatgtcttgcaatcacttccaagctttaatgctcttcgtatttactgtgccggtatttggcataatgcagtggttggttcctctctttcaagtttttatgttggtctttgtatataatgagttcttgatttgagtttctttatgcagttctgtgcactctgngtgttcgctttgtttctcttgcctgttatgttgtcacctttctacaaacacggcgaaagcctcacggtatgattcttgtgccttttgagtgttatg

SEQ ID NO: 167884 - DNA, 259 bp, Arabidopsis thaliana landsberg
tagtctctggttgcaaatgaggagtttcaacacattcttcgtgtgttgaatactaatgttgatggtaagcagaagattatgtttgcccttacctctatcaaaggtattggtaggcgattggctaacattgtctgcaagaaggctgatgtcgacatgaacaaaaggtttgagcttttgttgctcttctacgtttggctttctttagtgtgaacttaaattaattgtgacatttgagatatatggaacagttatatgtttt

SEQ ID NO: 167885 - DNA, 718 bp, Arabidopsis thaliana landsberg
attttactatgaaaatcatgtgcgtttcaggacatggaccaccagctattcgtatctaatcatcgaattgagtgatatcaaacgttactgtccgccaacccgtttcttgcggtggtactctgacctaccaggtatggctctcacactccatctaaagctatcagagagaaagagaacgtgtcctataataatgtgttggatacttgcaggatcaggatgagatactgtctctgtctggttcattcatggaagcggagagtcaaggttcaaaaggtcggtctggtggcatgagtgtatctttggccggtcctgatggtcgtgttgtcggtggcggtgtcgctggcctgctcattgccgccactcctattcaggtgactcatgaatctaacaacaacgtttacgttatttcttgaaatcgtctctcatctcatcaagttttgttgtttcttaaacacaggttgttgttggcagttttataacgagtgatcaacaagatcatcagaaaccgaggaagcaaagagtcgagcatgcccctgcagcagtcatgtcagtgcctcctcctccttctcctcctccttcggcggcttctgttttctcaccgacaaacccggacagagagcagccgccatcttcattcggtatctccagctggaccaacggacaggacatgccgagaaactcagccactgacatcaacatatctttaccagtcgactga

SEQ ID NO: 167886 - DNA, 3489 bp, Arabidopsis thaliana landsberg
  unsure (1)..(3489): unsure at all n locations
atgtgtatggtaagttttcacaaaaatgtgtgtgtcttccatggcttcttgccctaatacttatactcacaaatgacattaaattccttattacacacaattatactctcttaaatgtgtccgtttcggtcttcgaattcattgctcaaacgtttgaatttgaattgactctgatcttcatgggcctcgccttttaaccgacaaagcccagcccatccttgacttcgactttgcccccacctcgcggtgtgatcatttcgcccataactcgccttcttcccaagtatcttatgggccttactccttgtgggcttacttttcatctacatggcaatcttttgtaggtcccaaacttcggtgcgggatccgacaccaacaattagcccccaagtcttctcgaagtgcttgtccaattcggaagactttattatcttaatggacaaagattgcgctaaatgacttttttatttcccaccaaaaccttttttactcctttgattccggcattgtccgtatttacccgtatgacatctatcaccattatgaccgcatcttcagtactactattaaagcgggaaaactcttccatttcccccacaaatcccgaggcgatttcatcatcaccaccatcttgcgtgaggtaaattcattttatttctttcttacttttacgctttgcctttagaaagaaaattttctctcttttttctctgcaaaccttctcttcttcaagtgctcgatttttccactctcttccatgtccttcgatgagggggttctagcagcgacagatgcactcgcccaaacaatatctccgggccacactatatatctacttgcacccttcaatccctaaaacgactgaaggatctctgccggattccgcttgagattatggtggaatcgaaaatgccttaccccttagagtccctggaggaccatcttcccggttattattgcgtttatgagatctattttaagggctgcgggttgacctttcctcttcccgaagccctagttcgttacctagaggctcttggaattgccctacagcagctaacccccaaccttctctaaaactatcttgggaatcataactattgcggcggaagccagatatgttatcggggtccccgaactgaacgagcttctcagcgtgagaagttcatcgaacaaaacggggtatttctcggcgtacccaaacgctaatagaaacctcatctagcatctcctgaacaaggatgaaaactaacatcatccttggtttttgattaagaaaacccctacttcaatcagaaatctttccgatgcactcccatcgaagtggtctgtgaagcctggtagaaattaggtcacacataccttctctattcacctttatttttactgaccaaatctgatgattcacttcgtagctgtcatcgatcaaactctcccgaccgaggaagtcatcgaactcttcaaaatcgtcttcgaaggggaaaccctctggaattccttcaccctcgaccggtttatagaggccaatcacaaactcagaatgagccctcccggacagcttcatcaacttccgccacctccttccctatctcaaggaacatcagcccgtgctcttgcttctcggtgcaaggtgctatcaaagccgaaggctgaggcttgcgaggtaaagaaggcgttccttgcgaccaccattgataacaaggaatatagcagaaccttgctagttgacaatggtagcgccgaaggggccagatcggccgatgcgtttaggtcaacgcgctttagaacgtaatcacgtacaaaaaaaggtctgcttttgattttggaattgtaatatcgagctgctgcctgctggtaattctaaatccggatcaaggcttgttctcacctttcgttgatagtatctaatgaatcatcgagcattgctgagttttccttttcgtttaggggagcctctgttcggcgaagtccaggcacgttgagctcggccggaaccactgccttcatcctgtacaccaaagaaaatggagtttcctcggtagaacgcctaagagttgtgcagtaagccaataaaaccggttggagctcatcgtaccatcctcccttcaaatgactaaggcgcttttttaggttacgtaggattgtcttgtttacggcttcggcttggccatttccttgtgggtacggtggagttgagtaactaactttgattccccaatccaaacagaaagcttcgaatttgtgtgaaatgaattgtggtccgttgtctgtaattatctcgtatgggacactgtgtcgacatataatgtttttccaaatgaaggtttttaccgccgagtccttgatgctcatgtatgcttcagtctcaatccattttgaaaagtagtcagttaggaccaagagatactgtacagctcgggttgacctgtgcaatggttctatgatatccatcgaccacctcatgaacgggtatggggcagagaatataatctcaaatcatcacgtaaactcgatcaagtccatattcacttagcctagtcatgcaccagttcaactcatgccttaacgatattaactattaagttcgtgaaatggccatatcattttaagattccagttctaacttaagccgaattctgattagtgaagtctaagtgagtaagcatgcatatgatctaaagactagctctacaaaacatgcaaacaaacacacaattcgaccacaaatcacagattcggtaattcaaaaggttctgggtctcgggcagaacttctcaagcacggtcgtgatcccttactcacagtcaggttttcttggccacaagcaacgattctctagtctcagacnnnnnnnnnnnnnnnnnnnnnnnnnnnttatcgattcgggcaagtttttcttagtttctgtcgagtttttaatcggagagcctttcagtctctctctcttgccttcaaaaatgaaactgggcggagagagctctatttataattcgcccaaggtcagccatgcagcacagcccgctgccacatgtccggacagctgccatgcccacaggcgataggtgtctcggacgacgacgtggtgacacgtggcgacgggtgtcactccaccgccctatcaacttcggctccaaggctcagctgacttcggctccaaggttggtgacttgagccgcaaggcaccgcaagtgaggtgtcctactcatttcggttctgtggccggcggggcaaacttcgccgaggcatgcccaactttttgcatctttgcccattcgtgcctattcttgcccgttctggccctttaatgttttggcacccgtttggacacatgcggtcaattggctttgcattcgggcaaaattttttcatttggtcctttggccgtgcccgtatgccctatatgcgggcactacattctcccatccttaatagaattcgtcctcgaattctaactgcggtcattcccaacttccatgaattctcccaaca

SEQ ID NO: 167887 - DNA, 761 bp, Arabidopsis thaliana landsberg
aacctaaattaaaccttaattaaattaggtaataattcccggaaaaaaaatccttccaccttaaaggttttattattaaaaaattttataattgtagcaaaattttactgggatgatggtcttacgtccaaagtagaagataaatttgaggtgatatgtgcgaaccgtttattagattatgtatatgaatggaaaaattggcttaaggggaaagataagcctaaatggatgcgagaaaatgtttggcaagggctaattgtatattggggaaatgagaaaaataaagcccataatgaaaccaattcccaaaaccgcaagagcgagcgaggcggctatggcatggctaaacacacttgtggatcaatagcatatatccgaaaatacaaaaaatggtaagtaaaaaagttatattttaaaaatattaatttgagatttaatataatatgtttgataattacttataaaagtttcaaatggcaaagcgggatcctgaaaccggtgccggtcccgatatggtgacattcatggaggagactcataaacggaaatcggatggtgtctttgttgattaaaaagctgaggaaatagctcgtcgctgccgactgatggagggagagaaaatcacacaattgagtcaacaaccggatacgtccaatgttgatcaactcacacaagtggaacaaaatgaaattttccgatcggtaagtaatagttattataagattatatttagctactatgtttttttcctaacaacaatt

SEQ ID NO: 167888 - DNA, 1816 bp, Arabidopsis thaliana landsberg
gtagattaaaagatgaacccaaaatttcaaagtatgtaaagatcgctgcaactctaccggataaaactgtaagggatgtagcattgaggtgtagatggatgacggtaagttggttaagcttccttgagctatgtgcatacttcctgttgtttatgtgcttttgcttagatgacaagaaaaattaccactctagacgtctctcaaggatatttcttttgctagggaattacttagttgtctctagcattccttttcaagtggtatgtggctgttatgggaggatttttgttgaaggatatttctgtcactgttttttcttttgctaaatatgagggaatcagcatgatgatgcaatcttgcgtgtgtgcttcgtgataaagataaagtcctacaaaaaaagctagcggttatattgatgaaaagtcattgacatgtcgtaaagattgtctaaacactggtaaaggacgagcaaaaagagaaaatgacaagtattgctgacgctagattagtctttatattagctttcgagtccatgattgtggaggaattattggaaaaggaaataagcctaacgctttttcttaattatttctgtagttatcctcacatagattttacttttacgggtgatggctgacactgatccctatacttttatggttttttttttaaaatgattatattgctcgcagcatgagtttacatacatcataatgttaattgcttgcataataatgaaatgaattaatgaagtacaaatgtacaatgctttattatcatcatatatccatctccttcatgtctctgtcctttcataattgacttgagttttcaatcagatatatgatgtaatcaaacataaagctgcaaaattactccgttttcttttaatttagtgcttgtttgccaccagatatctatcatggtctttaaagttctcttggctaagtcgggtatctattttcacagagaaaacggaggaaacgagaggataataatgccgctaagaacattagcactaggaaggtatgcttgcccacctcaacctttcttgtgtcgtatttaccagttaataagtcgatggaggtaggtgcctcatttacgttttgggttaaacgggattttcccacagatgtgacttttattcatgcaagtctgagctaacgatggtatttttcaacgaagaaactgtaattggctaaattgcttgtatggtggacttttcatgagaacatattttgttagttcctgactaagaaaaaggactgtctgcatgactggacaatcaataaagtttgtgatcgatttttcaatgactgacgagcagcaaatgatgttgatccaactctgcagaagtattagcatatattacttatgagtatctgagcttgtgggcatgtttataatgataattataaggtaatctagtgattgttatgacatttgataaagggttagtgtgtgtgtttcatttcatgcacattctccttcctgggtcttatgaacttctgtagatcaatatgcttttaaacttggttctaaagaccatgcttcttcatggtaaggtggtggatacatccccagaactgaacatgctatccaatgtgccacaacaaaatgctttatatgtcctgaacaatatgtgccacagtacacgcacgcctttcgaaggtctagtgctcttttaattctttgctcttcttctggggtgtgtggtcttaaaaataaacaaaatcaaattgtcagctaggtacttttgctgactattccaggttaagtgagcaatatggatctttacagcaaatgctaagcttta

SEQ ID NO: 167889 - DNA, 1492 bp, Arabidopsis thaliana landsberg
  unsure (1)..(1492): unsure at all n locations
aagttcggtttgtgaacatggatccagagagtgttcggtttatggccagggagattctcattcttcgtaagcttgatcaccccaatgnatgaagctagaaggtctagttacctctagactctcaggtagcctctaccttgtctttgagtacatggaacacgatctcgcaggtctagctgcaactcctggaatcaaattctctgaacctcaggtattacatattctgttttcctatgcacttgaaagattggagaattcaagttttataaagagtcctacttcgttttcagatcaagtgctatatgcagcaattgttccgtgggcttgaacattgccacagacgaggaattcttcaccgtgatattaaaggctcaaatctcttaatcaataatgaaggtgtcttgaagattggtgatttnnnnnnnnnnnnnnnnnnnnnnnnnnatggagatctgcagctgaccagtcgtgttgtgaccttatggtacagagcacctgagctgttgctcggtgccactgagtatggaccagccattgacctgtggagcgccggctgcattctcactgagctcttcgccggaaaacctattatgccaggacgcacagaagtaatgaaactctctaacacctctttagtttgttaagaacagtttttgagctcaggctttataattcgacgcatcattcaaattctgagactcagagtcttacttcttatagacagctgatgagataattatcctttttttgtttatcaggtggagcagatgcacaagatctttaagctctgtggttcaccctcggaagattactggagaagagcaacactgccactagcaacaagctttaaacccagtcatccttacaagcctgttcttgctgaaacctttaaccatttcccttcatcagctctgatgctcatcaataagctactggcaatagaacctgaaaaacggggatcggctgcttctaccttgaggagcgaagtaatagatcgatactaaccagaaatccatgtttcttaaacaagttattagatacatttctcatgatgagtttcaatctttcttctcttcagttcttcaccacggagccactccctgcgaatccatcaaacttacctagatatccaccaagcaaggaacttgatgccaagcttcgcaacgaagaagcaagaaagtaaagctacatacatcttcattcactagtctttctcttgggggttttctgatgaaagttttgtttgcagactaagggcagaaggtaacaagagaagagggggagaaactgtgacaagaggacggccaaaggatcttaaaacagcccagacaccagagtttatggctgcaggacagtccaaagtcacatgcataagccacaaattcaaaacagacgaggaaggtggcaccgggtttaggatagaaccaccaagaagagggatccagcagaatggtgaagctcatgctacttcaatggtatcaccaacagtggc

SEQ ID NO: 167890 - DNA, 1252 bp, Arabidopsis thaliana landsberg; identical to SEQ ID NO: 44217

SEQ ID NO: 167891 - DNA, 470 bp, Arabidopsis thaliana landsberg
aatatctcgtacgcagcgacagcgacagcagcatccttgaccggtcagcggtattggcattgctttccaacgcagattaacccgcggcaacggcaccttttgcaaccaggtcgcatttgagtaagaatgcggcctgtcgccgcgccggtttggccggtttctcggacatcaccgatttttcatcctttcagaccattggagtcgacatggccattgatgtcagcgcactcagcaagaagcaactccgcgaactcatccgcaaggagaatgggcgcatgaagaatatcgacaaggaaaagattgccaaggtcaagaccaaggtcgatgccctgctcaaggccgagggggtcacctttgcccaggtttacggcaggcgccgcggcggcaagacccccaaggctgcgccgaagtaccgcaatccggcagacagcgaaacctggtccggccgaggcaagcgcccgcgctggttc

SEQ ID NO: 167892 - DNA, 1090 bp, Arabidopsis thaliana landsberg
ttgaaaacatggagatatcagttgcatcggcaacagtttctgtagctgtagatgtcgtgtcctggtgtatatggagaattttggagtgggtttggcttaaacctaagatgcttgagagttacctgagaagacaaggtcttgtcggaactcgttacacgcctcttgtaggagatgtgagaaggagttttagcatgttgaaggaagcaagatccaaaccgatgaaaccaacggatgatctcatctcacttgtcatgccttactcttttcacatgctcaacacttacggttgagattttaaattctttttgtatttactagaggtctaaacggttcttcttctaatatatatgcatgtatgtatctgtggctacaacagggaagacatttttcacatggtcaggacccatacctgccataacaataatgaatccacagctgatcaaagaagtgtataacaagttttatgatttcgagaagacgcacacgtttcctttgacttcattgctaactgatggacttgctaatgccgatggagataaatgggtgaaacaccggaagattatcgacccggcattccattttgagaagattaaggtttcaaatcctcttctctaatattgtcacaaaaccatgcatgttaatattgcttctggctgacgagtgaatggccttttttttgtgacctgattatgattttgtgtatagaatatggtccctacgttttataaaagttgcatcgaggtcatgtgtgaatgggagaagttagtttcagataaagggtcgtcgtgcgagcttgatgtttggccatggattgtgaatatgaccggagaggtgatctctcgaaccgcttttggtagcagttacaaagaaggacagaggatattcatattacaagcagaattagcccacctcatcatactagctcttggaaagaattacattcctgcataccggtaagaaactttacttgttttggtctttaattacttagcatgactcttggtacaatactcttcttgaactgcgaattcattcttctttgttttgatgcgaggcattcccactaagatacagatgttgaaacatagtc

SEQ ID NO: 167893 - DNA, 3159 bp, Arabidopsis thaliana landsberg
  unsure (1)..(3159): unsure at all n locations
attggtnnnnnnnnnnnnnnnnnnnnncaagacctcaatttgggtgtgaatgacgaacccattgctttacctgaagacattgtgaaccaacgtgtcgcagaaaaccgtttcatccttttcgggcgtccggtgattccaaagcgacaaaacctccgttcaatcatcgcttctatgccgcgaatctggggcaaaaccggacttgttcacagccgcatagtggagggtcgggattttcaattcattttcccaaatgaagaatccttggaatcagttttgtgtcgaggtccgtgggctttcaatgatcaaatgctgattcttcaacgatgggagcccctgttgccgctcctcaatttcattcctttctggacccaaatcagaggcattccattccaatttctcaactgtggcgtcgtcgagcacatcggacgggccctgggacaagtgctgaaaattgattttgatgcagaggctgtggcgagggtggattttgttcgtgttctcctacattgggacatcactattcccgtaaggtttcagtggaagttccaattcactgcgggtgttaacccacttttccggtttagatatgaaaggcttcgaggcttttctgaggtttgtgggatgctgacccatgactcaggggcctgtgttatcgtgaatgggggagaagaacaagatgatgatgacgatgaggatgaccaggctccgcaagggcgtaattagagagattaatgatgatgaagatttggagggtttggaacatgttgttgttaatgtccaaaaccaggatgttgtaaaccaagatagcaacaatggtccggttgaggatgctgaagctgatcttgcagatattgatcctaaccatgatgctctcttacaatctgcaaactctacaatgtttcaggaggaagggaatgctggtggtcagctctttaacccttttccatcttctgctaatgactgccttgatatctcaggaacccctcattataattctctaccaccttgtgcctaccctctggctatcatggactctgagtgtgtgatcaacttggctcctgacactaccacagatcgtgtcaaacgtaagcgtgacgacgaagacaactctatggagataaaaattgaggcgactgaatccatgtctgcgatgaatcaagacggatcccatatgcaaaccatggagacctccctaccgtcaacccgtaagcgtaaagatttggaccttggtgtaggcacaagccagctggcgaatattgtacgggagaacaacgatgataacattgaagttgatgcaaccacagtgagaggcgcggtgggccctgaaccaccacttccaacatgaggacannnnnnnnnnnnnnnnnnnnnntagccattgacctcatagttcgacgctttaaggagatatctcgacgatatctcccggacatcatatgcctttcagaaaccaagcagcaggatgacgacattcgggataaagcttgtgaactaggatttcccttttatgtaactgttccacctgtaggtcttaatggtggcttagtactcctttggaagcagtctgtagatctttcagttttatttcaatcccctaatcttgtagattgccttgttcgaagtaatgaatcatctttctacttttcctttgtgtatgggcatcccaatctaagctatagaaatgatctttgggagagaatagagaggattggaattaatagaaggaacagcccttggctaatcatgggggatttcaatgaactcctaggcaataatgagaaaaggggaggaagggtaagaccagaggctaatttccaggattttagaaggatggttaggaattgtgactttacagacctaaaacagataggagatagattctcttgggttgggcaacgaggagatcacctagtcacctgctgcttggaccgcactatggcaaatacagaatggcacaacaattatcccgcttcagaaactgagttccttgagctgggtgaatcagaccatcgtccattggtctcttacgtctctgatacagtggaagaccaaagaggctgttttcgttatgatacccgttttctgcataaggatgggtttaaagactcagtcttaagaggttggcatggtggtattagacagagtgagacggacatcccctttacagacagaattactagatgcaggagacaaatatcacgctagaaaaggggtcacaaaaccaacgctgaagaaagaatcaggacactccgatataaactggataaggcggctacttcaagtttatcaactacagtagaaagaaataatttgaagagagaactcaatcaaccttacattgatgaagagattttctggaaactcaaaagcagaaactcttgggctcatgaaggagacaggaatacaaaatgcttccattcagtgatgaaagcaaggaaagcacagaacagaatcctctctactgaagacagcgatggttttgttcacagaggtgatgcagctatttcggatgtcgcagtcaactactttcatgatctgtttcaatcctcaaacccttcagatgcacttcaagcagatgtttttcaggattttccaaaacgagtcacacatgaaatgaatatgcaacttacacaaagggtgactcaagaagaaattaaggaagctgtttatagcattggtcttcatagagctccgggtcccgacggtttttcagcagctttctatcatcatttctggagtgagattagccctgcagttttgaaggaagtggaactattttttgaagaagggaatctggatcagatacataaccatacaaatctctgtctcattccaaaaacagaagctcctgtgagtatgggggagttcagacctattgcgctttgcaacgtcagttataagattatttcaaagatcttggttaaccgtcttaagaagcacttatcaagcataatctctgactaccaagcggctttcatccctgggaggatgatcactgacaacaacatcatagcccatgagattttccacgctctaaaggacagaaaacgacagtctaaatcttacatggctttgaaaacaaatattgcccaaagcctatgatcgttcagaacgcgaacttctgcaaacaacactgctgcatatgggttttgatagcaa

SEQ ID NO: 167894 - DNA, 1530 bp, Arabidopsis thaliana landsberg; identical to SEQ ID NO: 19484

SEQ ID NO: 167895 - DNA, 1157 bp, Arabidopsis thaliana landsberg
ggtactctactatctcaaggcattctagccctctcatttgctccaagagattcacataaatctcaaattcagttcgctttggaaagaggagtgcctgcatttgttgccatgcttggcactcgtagactcccctttcctgcatactcctttgacctgatgcactgttcccgatgtttgattccttttacggcttacagtgagtcccttgggttatatacctctacttatgtacgtgtgttgcggtttttagcagcaattattcttattgtgtttggtgatttgtctgcagatgcaacttacttcatcgaagtagataggttactgcgccctggaggatatcttgtaatctctggcccacctgtacaatggcctaaacaagacaaagaatgggctgatcttcaggcggtggctagagctttgtgctatgagctaattgcggttgatggaaacactgtcatctggaagaagcctgttggagattcatgtctacctagccagaatgagtttgggcttgagttgtgtgatgagtctgttccgccaagtgatgcatggtgcgtttttcttgttgtataattatgtgcatgtgacttttgaactgtattgaaaccatgtaaaagacaaaattgaagtttttgttttttttgcctttttcaggtattttaaattgaagaggtgtgttaccaggccatcatccgtcaaaggagaacacgctttgggaactatatccaagtggccggagaggcttactaaagttccttctagggccattgtcatgaaaaacggattggatgtgtttgaagcagatgcaaggcggtgggcaagacgcgttgcttattacagggattctcttaacttgaagctgaaatctccaactgtccgcaatgtcatggacatgaacgcattctaccgaggctttgcagcaacccttgcatctgattctgcgtgggttatgaatgccattgcagctcggtagccattaactcttgacgtgatacatgacagatgactcatgaggaggataccatgagacggatagccacactatggagcttatatgttacgatcagaattaacacttatatatgtcatctgtcttgctctgcatctcatccattggcagtactgatgatcgcattctgtcacaattacttaatagt

SEQ ID NO: 167896 - DNA, 443 bp, Arabidopsis thaliana landsberg
  unsure (1)..(443): unsure at all n locations
ttgactgattgccctgccgagcggcttgtccgctcnnnnnnnnnnnnnnnnngccttaccatcgttgcagtttcaaaaaaatacaaacgatgaccttcgcattannnnnnnnnnnnnnnnnnnnnnnnnnnnngcacaagcacaatttttgtgccaggcactgacggacgctnnnnnnnnnnnnnnnnnnnnnnnnnnnnnnnnnnnnnnnnnnnnnnnnnnnnnnnnggatccgccgccagacctgcttgtgcttgactgggaaatgcccggcataaacggcctcgatgtcttgcactggctgcgctcaaacaaaggttttacgattcccgttgtgttcgtgaccaacagaaccctcgaagccgatatcgttgccgggctcgaagcgggggcggacgactacatgaccaagcccataagaagcgcggaactgctggctcgcg

SEQ ID NO: 167897 - DNA, 1169 bp, Arabidopsis thaliana landsberg; identical to SEQ ID NO: 17981
  unsure (1)..(1169): unsure at all n locations

SEQ ID NO: 167898 - DNA, 1233 bp, Arabidopsis thaliana landsberg; identical to SEQ ID NO: 9150

SEQ ID NO: 167899 - DNA, 1653 bp, Arabidopsis thaliana landsberg
aattgactcctaaccctaacaatctctacaattatatatatatatatattaaaaaattagcagttcttgaatgtgtatactgtttcatatggatatttattattgttttatttctagactcgtttaatatttgatttattttttttcttaccaaaacatagagtatgatctaaccgaatttaacattggatggattactttaagatcgtttgatttgattgttggattacattggaatatgacataataaattaaatacataaaattacaaatagaacttattaaatagaaaatattatgattatgatttattatgtaaactagcaaactaaaatttctgcatatttccccaagctgaacagcgtggatcctatctagtttacctttagattttcaaacctctaaaattgaaataatgtttgataattttcaataatgcaaaaaaagaatgaagaagaaatttaatcaaaacaaaagacaaacatatcacatataaacttcattgttctgatgcttctttgatttagcaattttgggaaaaaataagttcgaatgcaaaaataaagtttgtaattattcaacaaaaaattcgggcataccaattttttttctttcttttaatcgtttgaatgcaatttttttgttcggaatatgaacatgacatgtagaaagatgaaatgcttgctagagcgtttgagtttagagaagcgtttgttagcatgaaagcttttgataccaatgataaatttttgcctttcgaggatgagtggaaccgccgtgaaaagatttgtgatctattgaaaccttttagtgttattatcacttactttttaggctctaagtatcccacatccaatgtatactttacacaaatatggaggattgagttgttgctgaagaagtatgctatttgtgatgatgatgttgttgagcaagtggcccaagagatgcatggtaaattttctgagtattgggaagattatagtctcattttggctatgggagcagttttggatccgaagcttaaattgaagatgcttgaagtagcttaaaagaaagtaaattctactacttataagttaaaaattaaagggctcgagaagaatttgatgatattgtataaagttggaacttggtgaattaacttgatgtgagtttttgtaacataagatctatttgaactagaaagaagtattgaagacggtgtgaacaacacaaagacacacttggatatttatttggatgagagtgaaagtctttttcgaaatttggatgtcttaagctattggaaagataatcagaatcgatttggcggtttagcttctatgacatgcgatgtccttagcattcctattactaaagtagcatcaaactcagcttttagcattggatcgagggttttgactccatacagaaatcgcttgcttccagaaaatgttcatgtttgctttgtactcgcaattggctacgcaagtttgttgactatgaaggtaagagttttaaattgaaagctttataggtaattgaattatattaactaaatttcattgtaaattgtaggtaccacagaagataccaatgagtttaaccatggagatactcgaaagactacaagtagttcgagagtataaggttcaagatcggaaaaatcaa

SEQ ID NO: 167900 - DNA, 983 bp, Arabidopsis thaliana landsberg
gttatgaaccatgcatccaacagtgttttgtattatactgcagtcgaaaaagggtcttcaatgtttactacggtagtttgctttgatattggatcggggaagttcagctttaagaaagtcatgaaaactttcgatagagatttccctagttcaacaactatgataaactacaatggcaaattaggtttgttgatgacggaagagtctaccgatattgttagtggaacaagtaaaagtttcgagttgcgggtcctagaagacgctggaaaacatgattggtcgaagcatgtatacatgttgcctcctctgtggaagaatgtagttggagaagagaccaagctacgacttcttggaatggttggcagttgcaccaatgaaattgtgttttcgtacaagtacccatctacatttatgccttcctacgtcttctactacaatatcgagaggaacacgatcataagacttgaaatccaaggaatggaagagcttaacggtaagtgatgttacatatatctaaaccatgtagagaacattaagcttgttcaagtattttagtattttatacaccttgagatttaggctattaagttccaatcataaggatcatttatttcatatatttttcttatgtattgttctccatttcagtaaaataatacattatttcattctatttaatttatatctaaacatattatactaagagaagaatcttatttctaatcgcaagaacttctgaacactttgttgtgtttggttttccatttttcaagaagaaagagaattttggaagagataatactataagagaatcaaataacaaattagcaaacatattcgttcatcaacatcaactgatgaagttaatcttctgaagactattgtctattgatcatcaagataatcacacaatgatctctgtttcttaagaaagtattccctcttttatcttagtcaatgaagaaattcggatttggacatga

SEQ ID NO: 167901 - DNA, 1229 bp, Arabidopsis thaliana landsberg
gtttgatgtcaggactgactcttgggctcatgtcccttagtattgtcgagctcgaggtcatgatcaaagccggtgaaccccatgaccgcaaaaatgcaggtcagtttcatgaacccattgacatactcatactttaatacttcatattcatactaacgccattttaaaaaaattgtaacaaaatggccagagaagattctgcccctcgttaaaaaccagcaccttctcttgtgtacactccttataggcaatgctttggcaatggaggtatcaagcttatgcatatatatttggatacttatttgtgttgtgcacactttggctttttagaacttatgatgcagtttttactgacgctgttttcaatgacaaaatttgaaaggctctcccgatctttgtcgattccctgcttccagcctggggtgctattctgatatccgtcactctcatacttgcctttggcgaggtgaatggaatttgagttagctttctctgctgatctgatttttaacatcgcccaatagcttattgttctctttccattgttgtagattatacctcaagctgtatgctctagatacggactgagcatcggggcaaagctatcatttttggttcggttgattattatagtcttcttcccattatcttatccaatcagcaaggtaattcaatcagcttaacatcaatggaacttttagtggaatcaattgagtgaagttaaaacaataattaagttttcttctttcaatgctttagctacttgatttgttgcttggaaaaagacattccacactcttaggacgagcagagctcaagtcacttgtgtatatgcacggaaacgaggttcgtttcaagaacttgagatgctttaattgttttgtcaatatttgaggtgaatgcatgtctttttcttctcctttctccgtgtccttaatctgaaaattaggcaggaaaaggcggggaactaactcacgatgaaacaacaatcatatcaggagctctggacatgtcacagaaaagtgctaaagacgcaatgacaccagtctctcacatcttttcactcgatataaattttaagctcgacgagtatgttcttctcttggaattcctctttcttcttcttttagacaatatccagttagttattcttatcatcctctttgggcttcacagaaagacaatggggataatagcaagtgcaggccatagccgaatacctatatact

SEQ ID NO: 167902 - DNA, 690 bp, Arabidopsis thaliana landsberg
tttactacccttataaatatttattccttaaaggttcataacaaggaagaagcgaatctattcaagaaactagtgacggacatcaatgacaacagtggtgcgagccatccaggagattatctaccgattcttaaagtgttcggacacggctacgagaaaaaagtgaaagcactaggcgaagccatggacgctttcttacaacgactgctcgatgaatgtcgaataaatggagagagcaacacaatggttagtcacttgttgtctttacaactagaccaacccaagtattacagtgacgtcatcatcaaagggctcatgctcgtaagtattctcatacatataaaccttaaatataattttttttccttggactcactaaatgcaaacataaaactgaaagaagaaagatggtttatgtttttacatttatattataaagatattatatgtgtacatgtgtagataatgtatcaacccgtgtgtgaattaaatggatatagagtatgatgcgagctggagcggatactgcggccgtaacattggaatgggcgatggccaatttattaaaaaaacctgaagtgttgaaaaaggcaaaagctgagatagacgagaagattggagaagagagattggtcgatgaacctgacagtgcgaatcgaccttatctccaacacatagcctccgagactt

SEQ ID NO: 167903 - DNA, 2233 bp, Arabidopsis thaliana landsberg
  unsure (1)..(2233): unsure at all n locations
ttctgcgaaaagtggatttcatggataatgtggtgtataacaacagttcaatatcgggttcttattaatggacaacctagaggcttgataataccggggagaggtttaagacaaggagatccactgtctccttacctatttattctatgtacggaggtgcttattgcgaatattcggaaagctgaacaacaaaaattgattactggtatgaaagtagctacggcaagcccctcggtaactcatctgttatttacagatgatagtttattcttttgcaaagctagcaaagagcagtgtggagtaatcttggaaattttaaagcattatgaaacggtttcaggacaacaaataaattttacaaagtcttcgatacagtttggtcataaggtcgatgattcacttaaggcagaaataaaagcaacattgggaatcactaatcttggtggtatgggctcctatcttggtttaccagaaagtctaggtggatctaaaacaaaaatcttctcttttgttagagatagattacaaaataggataaatggatggtcagctaagtttttatcgaaaaaaaagggaggaaaagatgtgatgattaaatcggtagctacggcattaccaacttatgttatgtcttgctatagactaccgaaaacaattacatcgaagctcacgagtgcgatcgcaaagtggtggtggagtttatcatcgtgaatctagaggtatgcattgcatggcatgggatcagctgtgaacgngnnnntcggaagggggtttgggttttngtaatgttgacgatcccaattcggctcttctagctaaacaattatggcgtttaatcatggttccaggggaaaaatttccactctttgcgagggtttttaaaggacgttattttcggacatccaaccctttggataatataaaatcgtactctccatcctatggttggaggagtatttgctcagctagatctctggttaataaaggacttattaaaagagttggttctggagaatccatctcagtttgggaggatccgtggattccaactcaattcccgagaccagcattaaaaaatggttacgcttttgatccttctttgaaggtgaaaagtcttatagactcacggacaaatttctggaatattgatcttttacaagagctttttgcccggaagatgtctcgttaataagtgttttgcacttgggtgcgtcaactaaggaagatatcctaggttggcatttcacaaaatctggaaaatatacagttaaatctggatatcatacggcgaggttaaaaactttggatgataactcttctttttttggcccagacatcaaagttttaaaagcatactcatgaaaagtacagtgttcgcccaagttatgtcactttttgtggcaaattttagcgggatgtgtaccagtaacagacaatctacgaaaacgcggtataaattgtgagaaaggatgtagcagatgtggtgctctagaagaaaccattaaccacacgcttttcttatgctatcatgcgagtaagattcgggcactttcacagatacctacggtcccataaaaatttccttatgcatctatttatgcatatttagatcatttatttcggcacatacattcgaaattcgaatcatcttcatttccatggataatttggtatatttggaaagtaaggaatgaaaaaaatatttgaaaatgtggataaagaccctttggaaattttacgtttagcggaaaaagagtcagacttgtggaagtccgctcaacttgagtttcacaatgaaaattttggttctttcaatttggaagatcgtaatcgagtgcggcacttttctttagacaacaattattccgacaagttttcaggcttaggatggtactgtacatcatcaactggagagacatcaactttgggagctgccaatctcagaagaagtctatctcctttacatgccgaggtggaagctctcctctgggcgatgaagtgtatgattggtgccgacaaccaagatgtagatttttttacagactgttcagatctggtggagatggtgtcttccccaaccgaatggtcggctttctcatcgtatttggaggagttacagagcgacaaggatgagttcacaaacttttctctatctttaatctctcgtagtactaatgttaaagcggattttttggcacgaaaagttcgtacccaaccgtttcatattacattt

SEQ ID NO: 167904 - DNA, 1058 bp, Arabidopsis thaliana landsberg
cgaatgagttcgaactgggcgtcatattggcagatcaaacggttatatattgcgaatatgtttaattttgtttctttcacataacttgcatgtatatagttaaaattatttggtgtagggtccccgttcccgaatcaaggctaccattcctcatcgtcttgcgtcattttactttgatcgaatacgagaatatgagtatgagtggataattatcactaatttctcggtccgaaacgacgctgagtctgtgagagcaacatcccatgactaccagatatggtttatggaacaaactattgttactaaagctttgaaaacggatgcactcttgttttggaattttactcctttcgacaatatcatagagaagacggtttacaagaatgtgttggtcggtgagttattttgacaattttatagtattttctttgagaaattgtacgaatacttacttctattattatacacaagatgcggtaggtgcgattatttggtagagccgattgaccgaaggcatcgagggtgtgaagttttctttcaagataatgaatcaacagtaagtgcctccatcttaacttattataatgaaacttggtttctattttgggattagttcaaatggttcaaatgatatagtttaaacggttcacctattttagttcacatggtgcacctattctagttcaaatggttcaaatgctttagttcacatgttcacctactctagttcaaatggttcaaattgctatagttcacatggtgcacctactctacttcaaatggttcaaattgctatagaggacatgggtcactcgctctattctgatggctcaagtgctatagttcaaatggttaatcagacccgcttcatatagggacgttcacaatttctgatcaagtaaataatttctatgaattgcaacaataaagttttttattgtgaagcacacaatcaacaagctttggactttcaagctcactttcggagtctttgtactcggggaattgtggctgtactcgtttgctggcgtgtgagcggtcattctaaaccgaagctt

SEQ ID NO: 167905 - DNA, 584 bp, Arabidopsis thaliana landsberg; identical to SEQ ID NO: 137

SEQ ID NO: 167906 - DNA, 1497 bp, Arabidopsis thaliana landsberg; identical to SEQ ID NO: 27802

SEQ ID NO: 167907 - DNA, 1018 bp, Arabidopsis thaliana landsberg
acaaagtgagtggcttggataacgccaagcagatctgggacaccctcaagatttcacatgaggggaacgacgtcaccttgctcaccaagatggagttggtggagggcgagcttggacgattcgcgatgataaggggcgaggagccgacacaaacatacaaccagctcaagacccttatcaacaaaataaggagctacggaagcacgcgatggacgaaccacgacgtcgtccgattgatgctaaggtcctttaccgttcttgatcctcatttggtgaataacattcgtgagaatcccaggtacaccaaaatgtcgcccgaagaagtccttggaaaattcgtaagcgggcgaatgatgatcaaggaagtgaagtacgtggacgacgctctaaacggtccaatcaatgagcctcaacccgttgctctcaaagcaacgaggagcaaggaggcgttacccagcaaggtggcgcaaattgaggcggccgggcttaatgatgaagaaatggccctcatcatcaagcgtttcaagacgacgctaaagggtcgcaaggggcatcccaacaagaacaagacaaaggggaagcgctcatgcttcaaatgtggtaagactggtcactttattgctaactgtctcgataatgaaagtgaccagggacaagaaaaaggcgggaagagggagaaaaagaagtcttacaagaaggcaaagggtgaggctcacctcggcaaggagtgggatttggattgctcttcgtccgactccgacgacgaaggactcgccgcctcggccttcaacaagtcgtctctcttccccaacgagcgtcacacctgcctcatggcaaaggagaagaaggtaagtgctcgaaatacctctacgtgtgcttcttctagcgatgaagagtctagtgatgatgaggtagactattctagcttgtttaaaggtctagatagaatcaagatagaaaaaatcaatgaattgattgatgctttaaacgaaaagaatagacttttagaaaagcaata

SEQ ID NO: 167908 - DNA, 1163 bp, Arabidopsis thaliana landsberg
  unsure (1)..(1163): unsure at all n locations
gcttggagcttctggctttacccgaggatggtgttcctagattcttactcgacattggtaaaaaaaacatcctattaatttactgatgatgagaaatgttaatttttctgctcgtttcctagaaattagtttagtcaatgttgttgtatgattccttttatttgaatattgtagttcaatgcacatatataaacatgtttgattgaaattcttttctaaagttttcatatttttcgatcatcagttagtttagtatctcgatgactgagtacaaaacttagttgtttagctttggttatctcgataattactaatctctattgcggttcaggttgtggatctggattgagtggagaaacactttctgaagacgggcatcattggattggtttagacatttcagcctcaatgcttcgtaagctccattctttttgaagggttacttatcattctctgtctcttgtgatctaagcccattctatctttaacaacgatgtagatgttgctgtggagcgagaagttgagggtgatcttttacttggtgacatggggcaggtatattataacttcactttatccctctcccttaaatttatgtgtggctattggtttatacggtatatagcttcacattattaattgcttatacatgtgttaccacgaccagggcttaggtcttcgttctggagttattgacggagccatcagtatatcggctgttcaggttttacgtctcacttatcattgacttatgttgctcatccaggtgttaccattctgtataacatatatgctacattgaccatatttttgaatctcatcgactgcatttttagaatttgttgtttaatcagctctcttttttttcatgattcagtggttatgcaatgcggataagtcatcgcatgaacctcgtttgaggctaaagtaggtgtaaatcattatactatagatgaattaattagaaaaatgtgttacaaaactgatattttacctatcaattttataagggctttctttggttcactataccgctgcttatcaagaggagcaagagcagtttttcaannnnnnnnnnnnnnnnnnnnnnngcgtgaattgattcttcgccaggccttacaagctggatttggcggtggacttgttgttgactatccacacag

SEQ ID NO: 167909 - DNA, 1462 bp, Arabidopsis thaliana landsberg; identical to SEQ ID NO: 66830

SEQ ID NO: 167910 - DNA, 940 bp, Arabidopsis thaliana landsberg
atgatttatatcataaacacgcttaagttacatcttcacgaagatacaaatctgaacaatgtagatgatgatgatgcctcttttctcacgtcatggattgattctgcgattaaacgtaaggtacaacatcttcatgtttgttgtccttcagatggtatttgtaatatccccatgtttttctaactgcaagactcgggtatccttaaatctcgttgatgtgaccatggatgatgccgagttcgtttctttaccttatgctgttatgcatttgtaacgtatttggtctcccagtgaggccacctttgcaagacttgtctcttgctatcctgtattggaagagttaaatattgttgaatgttggaatcttccggaagtcattccggctgaaattttttgtcactgatcaagagactcaaaataaagctatgcgattctacggttgtacaagtacatataacgataaatatggagttgtgactgatgctcctcttttacgcgatttgtttattgatgatgaccaagctggaagttatttaataaacaatttgagttccactgccaagttaaatgtttatctcgcctttggtttggacagttttgatgaagcaacaagggtttcatcgaggagaagtagcatccacaattttctgctcgggatttcaaatgtcggggaaatgatcatatatctaaacactttaaagctatatatgtcatgtcaattccagtataagacatgtacgttctctatcatgattcatgaaagtttatgacctacattacttttctttttggttcgagatcatctatcaatactcaaaattagaaccgcttcctcggtttggttacatgtcccacatgtatgctgatatttatgtacctaattggaaatggttaaaaacatttcttgggagttgcccaaacttgaaaatccctcatcttg

SEQ ID NO: 167911 - DNA, 1501 bp, Arabidopsis thaliana landsberg
cctctaggcgactttcaattggtatcagagcccggtgcttcattagagccaaaccgctcgaagtgatgtcgggagcatccgccaagagggatctcgggaccggcgagaagaccgccacaagccatgggaaagctccatccggggagtccgccaacaaggtgaagggatccccttcacacaacaagtcgcgtcgaagcggtgacaagaagaagaagatgaggaaggtggtctactacgagaccgactccttgtcgccatccacctccggcttcgacagccgtccataacttctaagcgccatgagccaagaagtttagtaagattcccctacgctaccctcacattccaaaacgtactccattacttttcgtcccattaggcaaaccacccatgtttgatggtgaagattataatatgtggagtgataaaatgaggcatcatctaacctcactccacactagcatttgggatgttgttgagaatggagtacaggtagcatcaccggggggatgaagattatgatacggacgaagtggcccaaatcgagcacttcaactctcaagctacaaccatactcctagcctctctaagcaaggaggaatacaacaaggtgcaagggttgaagaatgcaagggagatttgggacctactcaagaccgcgcacgagggtgatgaactcaccaagatcaccaagcgggaaacgatcgagggggagctcggtcgcttccgtcttcgccaaggggaggagccacaagatatgtacaaccggctcaaaaccttggtgaaccaagtgcgcaacctcgggagcaataaatgggatgaccacgaggtggttaaggttattttgagatcacttattttccttaaccctactcaagttcaattaattcgtggtaatcctagatacacactaatgactctcgaggaagtaatcgggaattttgtgagctttgaatgtatgattaaaggctcaaagaagatcaacgagcttgacgaaccctccacgtccgaagcgcaaccggtggcatttaaggcgacggaggagaagaaggaggagtctcaccaagtagggtccccatcgacgcctccaagctcgacaatgaggagatgacactcatcatcaagagcttctgccaaatcctcaagcaaaggagggggaaagactacaagtcccgctccaagaaggtttgctacaagtgtggtaagcccggtcattttatcgctaaatgtcctttatctagtgatagtgacagggataacgacaagagggggaaaaagaaggagaagaagacatattacaagaagaagggcgcgatgcccatgtttgccaggagtgggactccgatgagagatccaccgactcctcctccgacgaggacaccgcaaacatcaccgtcaccaaaggcctcctcttccccaacgtcggccacaagtgcctcatggcaaaggacggcaagaagaagaaggtaaaatctaaatcctccactaagtatgcaacatc

SEQ ID NO: 167912 - DNA, 590 bp, Arabidopsis thaliana landsberg
gttcttaacaaagaagagcgtgaggatctgtttcatgtttttatctggatcttctcagacgtcagagagtttaaacagtgattgcatcaacttgagagattcctcaacgagttctgtagctgagaatccacgtgggatcaatggcagaagagagggtagatgttatggcgacagtcctgattgtgtgatagacattgacgacataggaagtccggaaagtgcagataaaaaaggcggtacaagaagaacatggagttcaccaaatgtaccaaatatcagtgcgttgaggattaatgtccctgttaatgcaaaagaagaagagagggagaagttcctatcacatattgaagacactcctaaagagaaaggagctaaacctatgttttggctgcagagatgtcgtgattataaccaggtaagcttctgcagtttggatcatctctacactattagaaaggatcataagtcttagttgtttatcattttgcagctctttgacagagtcaaggtttatcaaagacgatttcgcgttccattgagccgccctattaagctcattctttccttaacgctaatcttgattcttctat

SEQ ID NO: 167913 - DNA, 1672 bp, Arabidopsis thaliana landsberg
ctactgttattcatggacgctttcgccggttacaaccagatcacgatgaaccccgaagatcaagaaatttctgctttttacacagaacaaggcattttttgttaccgagtgatgccctttggactcaagaacgccagggcgacctatcaagcttcgtcaacaaaatcttcgcattacagatcgggaagacaatggaagtctacatcgacgacatgttggtgaaatccatggcagagaaagatcacataacccatctacgcgaatgtttcaagcagcttaacctctacaacgtcaaactcaatcttgcaaagtgtcgctttggagtaagatccggcgagttcctcgggtacctggtcacgcaccgcggcatcgaggcgaatccaaagcaaatcgaggcattattgggaatggcgtcgcctcagaacaagcgagaagtgcagcgcctaaccggaagagttgcggcccttaaccgtttcatctctcgatcaaccgacaaatgcttagcctttacgatgtgcttcggagaaacaaaagttcgaatggacgacccgatgcgaagaagcttttcaggaactcaaaaagtacctggcgaccccaccaatcctcgcgaaacccataatcggggaaccactttacttgtatgttgccatgtcggatactgtagtcagtggagtgttagtccgagaagacagaggtgaacaaaaaccgattttatacgtctcgtagacattcaccggcgcggaatctcgctacccgcaaatggagaaactcgctctagcagtcctaatgtcagctcggaaactgcgaccctactttcaattccattccatcgtagtaatggaatccatgccactctacgctatcttacacagtccaagccaatcaccacgtatggctaagtgggcaattgagctcagcgaatacgacatcgagtatcagaacaaaacatgtgcaaagtcccaggtcctagccgattttattgtcgaactgcccaccaaggaggcccgggaaaatccactcgatacaacttggcttctgcacgtagacggctcgtcatcgaagcaaggctcgtgtgtaggcatccaccccacctcgccaacaggagaggtcctcgagcagtcatttagattaaacttcgaggctaccaacaatgtggccgagtacaaagcgctcgttgccggactcaatctagctcgggggctaaagatagaaaaaatccgagctttttgcgattcccagctcgtcgcgaatcaattcaactgagagtacacggctcgagacaaaaaaatggaagcctatctgactcatgtcaaaagttaaccaaaaatttcgacgaattccagttaacaaggattccacgaggagaaaattcatcggccgacgccctagctgctctggcctcaacctccgacccgaacctgagaagagtcatcccagtggaattcattgaaaaaccaagtattgagctcagcgaagaagaacacgtcctcccgatacaaatcagcacggatcaagatgacccggacgaatgcagccaaaaatggatggaacccatcataagctatatatatccgaagggaaattgccctcagataaatggaaggctcgtaaactcaaagctcaggctgcacgtttcgtcttactagggaaaaaacttacaagtggcgatatc

SEQ ID NO: 167914 - DNA, 1294 bp, Arabidopsis thaliana landsberg; identical to SEQ ID NO: 17307

SEQ ID NO: 167915 - DNA, 1355 bp, Arabidopsis thaliana landsberg
ataaaaacacttccaaagacagaaggtcttgttccaatctatatcaggtaattcgtgtttgctctttcaactgtaaataccatgctagtaatttgctttcccttgctttcccgggctcttttgatctgacttgttgtttctacctggtgcagccctcaaacaggtgactttgttggtgagaatatcaggttgggatctcgtggtgatagctactatgagtatttaattaaggtgtggcttcagcaaggagctaagttgaatagtaatttcacatatttgcatgatatgtacattgaggcaatgaaaggagtcaggcatttgcttgtgcaaaattcaattccaaaaggtctggtctttgtaggggagttaccttacgggtctaagggagaattcagtccaaaaatggatcatttggtaagtgtcactagctacttggtactgaaaatagcaatcatttcatagtattacgctattgtcattcgctgagagatttcacgagttttgttgttcttgacttgtgattcattcaattgctttttgttgctaggtatgcttcttgcctggtactcttgctctcggtgctaccaagggcctcacaaaggaacaagccctgaaggaaaatcttttgtcctttgaggacctagaaaatctgaaacttgcagaaagatttagcgaaaacatgctttgagatgtatgaagtaactgccactggccttgctccagaaattgcttactttcacacaaaggtaagttttgtgtgtacttttttccaaaacgttattgtcatccttgctcttcttgttttttgttaagtcttggattttaataaagcaggattacactgaggatggtcttgatggtgggaataagagttctatgtatgcaaatgacataatcattaagcccgctgatcgacataatctactgcgccctgaaactgttgaatcactctttgtcctctatcgtatcacaaaagatacaaagtatgaaaactattcatccgattttccctcactaatctaagttcttggggactattctactcttaaagctaacacatttctaaaattgcagataccgagatcaaggttggcaaatttttgaagcttttgaaaagtacacaaaggtgaaatcaggtggatacacatcattggatgatgtaacagaagtgcctcctcatagaagagataagatggagacatttttccttggtgaaacattgaagtacttatacttgctctttggagatgactcagtgataccattggataagtttgttttcaacactgaagctcatccattaccaataagaagaaacacctgaaggcttagctttcaagactgctccagacaat

SEQ ID NO: 167916 - DNA, 1334 bp, Arabidopsis thaliana landsberg
gaataaccgcctcttgttggtcgaaagcaacagcctgctgctcgtcaacatcaggttcctcctcttcaagaacagcctgctcagactccggagcaacagctcccaccaaaccatcaaaaccttaattatgaagaggaagatgaggaggacgatggggaagaagttggtggcgaagtcggagaagaagatgatgaggaagtcgaggaagaagaacaaaaccctaatgtcgattaccaagaactattggatcgcttacttgctctgccaggccgacaacatcttctgattctgtctaaggatccaatcccaggagtcgagactctctggtaatatctccctttttctcgagtatttaaatagataggattttttgttggtaattgagctgagtttttcttagcatttggatatgtttttgtcattgatcgtgcctgtttgatttgagatcatgtgtcgctatagtgctgatctggtcttcagtcttcgttttaggattcgacttgaatactaaagccttatgttagctcattatttcatgttttatagccttatgttatggtatttcgttcttgtttctctgttgagattctgtatttgctctagtgctgatatggtcttcagtaaaactattttgtattcgacttgaagcttaaaggcctattttagctcattcgttcttgttttaaaactatttcatgaaagctaattctttattggttgcatcagctaaagttgattatgtttatatttgcaatgtcttggtgtttaatactctgtcatacttttacaggtttaaccggcacaaaggaaagctgtctagagtaatttctggaatagtttggaggaagtttgatgggcattatttcagttggaaggttactccaatagctactcaagagagatacttcagaaattttgcggtaatgtcaactattacttatcattctgttattgtttactttgactgactcttagtatctttgctaacctagctgcttgttatgtagcggaagtattattcggatcaaggcgttactaagctcgtcaaagaaggatacttggttattgccaagaaaaggatgaaaggaattgtcagtcaagcaaagtagagtggtgatcaaccaccgtggattggtgatacactttggaaacagatgtgggtgcattggaacactgaagatgctatccaaaagagtgagacaacatcaaactgtagaaactcagatcgtggaggtcttgccgtgcccaaacacttagctggtcagaaatattttgtgaaagttcttcaagaaatggtaacagttttctttccaacaattcccgttaacggcttt

SEQ ID NO: 167917 - DNA, 1882 bp, Arabidopsis thaliana landsberg
  unsure (1)..(1882): unsure at all n locations
aagcactcatataaacaaaccgtgtttctcatctgatgtaaagacatttgatatctgcgagtaccctcttgttcaacatgctcgaaagtttggtcttaatgctgcagttgctaccaaactgaggagcacattcactggtgacaatgactatatacttgagttttttttacctgtaagtatgaagggaagctcagaacaacaacttttgctggacagtctctcgggcaccatgcagagactatgtcggactctgaaaactgtttcagatgctgaatcaattgacggtacagaatttggatctcgtagtgtagaaatgacaaatctcccacaggctactgtatccgttggaagctttcatacgacatttcttgatactgacgtcaactctactcgaagtaccttttcgaacatctcctctaataaaagaaatgaaatggcaggttctcaaggcactcttcagcaggtatgatgatgcatctaatccattcatttactctaatatattttgatacatgctgctaggtatagagcctgagtattgttgtatatcttacataggaaattagcggagcaagaagattagagaagaagaaaagcagtacagagaagaatgtgagcttaaatgttctccaacaatacttctctgggagcttaaaggnnnnnnnnnnnnnnnnnnnnngtgagaaactagtactagtagtgctctttgcttgtttcccttacaagattattcaattgctgatccttggatgtttttctttttgctttctttctgcagtttgtccgactacactaaaaaggatatgtagacaacacggaattatgagatggccatctcgaaagattaacaaagtgaataggtcactaaggaaaatacagacggtgcttgactctgtccagggtgtagaaggaggactgaagtttgactcggtgacaggggaatttgtagcagttggcccttttatacaagaatttgggacccaaaagagtctgtcttctcatgatgaagatgcacgtgcaagaagccaaggtgatatggatgaagatgtgtcagtagagcctttggaagttaaatctcatgatggtgacggtgtcaagttggaggaggatgttgaaacaaaccaccaagcgggaccaggtaaaaaataataactacattttaagaccttttttggaggagctataagaatgtgaatatggtctaacaaaagatcattctcattgtgttcaggatccttgaagaagccatggacttggataagcaaacagtctggcttgatctatagtgatgataccgacataggaaaaagaagtgaagaggtaaacaaggataaagaagacctttgtgttcgaaggtgcttgagctctgtagcacttgcaggtgatggaatgaatacaagaatcgagcgaggtaatggaactgtagaaccaaaccactccatatcaagtagcatgtcggattcatcaaatagctcaggagcagttttgctgnnnnnnnnnnnnnnnnnnnnnnnnnnnnnnnnnnnnnnnnnaagaactcataacaatagcggtgaaagcggatcaagttcaacactaaccgtaaaagccacttacagagaggacactgtacgtttcaagcttgatccatacgttgttgggtgttctcagctctacagagaagtggctaagcgtttcaagctgcaagaaggtgcctttcagttgaaatacttggatgatgaagaagaatgggtgatgttggtcacagattctgatctccatgaatgcttcgagatattaaatggtatgagaaaacatacagtgaagtttctggtccgtgatataccgaacaccgtaatgggaagttccgcaggcagcaatggttagcctcggaacaggcacc

SEQ ID NO: 167918 - DNA, 1081 bp, Arabidopsis thaliana landsberg
ttccaactaacccttaactcaattagccaactagagagacgtgaacacaaagccattgccgattttgcttgtaaagcaaatcgagtagtactaaacacatcgtcagattactcacatcctcgttgcatttctctctttcctacacatttcgtgtcaatggtattatttagtggatcctaggtctgatctttgcttcttgcgtaacacgtcatgaagttgtgcctataaaataacagagcaagtactaaacatatgcacatatcctacgcttactttcaatcttcgtttcgatttcgtttcgtttcttcaatcaaaggaacgtttgttatttgatctttgaagaaacagagcaaatattaaacacatccctcgttccatctttcttatacattttttcttcaatcaaaggtaccatattttaagttgatatcctgatttttcaaattttgctgctttttgatttcagtcttgatcattttttatttctcgaatgtgattctttgaaatcgaacacgttttcgtaattcttgtgatctgcaaagagatttttctgatggcatttggataatgtctgaaatatggacaaacttttgttttgtgtaatgctttactctcacgttagtccggttttgattattgtttcagttttgatgatcttgtatttgatcctaagataatcatttttctcttgttggtatgattttagatgagaccagaaactctcgcggttattcagaaacagctcacagaaatgaaagcgtctcagagaaatatgaccgaccacgaagtaatacgagccatgaacgagttcatgttctgtttcgaaaactgttacacagagaatgaaactgtgaatcatatagttcagaagtttccttcttacgtacccaagagtgtaagaagtttctttcagaagtccatagccttgatcgatgaagagtcaagagaggcgtatcttacggatgctgaagaatgtgctagtgtaagaaggagtcaggctcgtgatacttctgaggaagctaagagaagtcaaggtgaggccagtacatctcacatatgtgaacctaactgcaacaaacat

SEQ ID NO: 167919 - DNA, 1634 bp, Arabidopsis thaliana landsberg
atggtgaaagcgagtgagaaagaacatgaaaagtacaagccgaaattgttcgatttagagaacgtgaagaagaagaactcatcttcaaggcatttcaagagatggaactcagattccgccttgagaattgaagatccagacattgatgatggcactgttttcaagaaaaccgcgacctccagcatccggccaattctaccggttctggctatggatgagcaacctcagccgcgtgaagcaactgatgaagaatcacagaaagattcaggcaagagagaaatcattagtccatgcttaaaaccttattatttgattaatgagtaatattataggtttcttggggatgcaagctacaacagtaaatattataggtttgaggctcgtgggtcgcgagctaacacaaatgagagattcataatgagaaattcactagagaccaagttatcttgagattccgtggattgcaagctaagtcgtgttattttgcatatgttacagaattggagcagatgaaagataagtttgcaaaattgcttttaggagaagacatgtcaggagggagcaaaggcgtttcttcagcgttagcattatcaaacgcaatcacaaatcttgcagcttctgcgtttggagaaatacggcgtttagaggcaatatccgaggataaaaaagaacgatggagaagagaaatcggatggcttctctctgttactgatcatatagttgaattctctccaacacaccaaactaacgaggatggatctttcatggaggtttcttaccattcttattatagttttctaatagaaagttttgtttctgtgtgtgtctgaatctgaatcttttcttgaggtaatgactacaaaacaaagaactgatcttgtctccaacattccttgtttaaagaaactcgatgaaatgctcctcgtaagacaaaacaaatacttataatcgcttctctgtgtttgatcaaaaggatcttacgttgtaaaatgtcacaaattctgtaggattgtcttgataaattcaaagatcaggatgagttttactacgtcacacccggttctccggaatctgaaaacagtaactcgaccaggaacgatgataaatggtggcttccgattgtaaaagttccacctaaaggcttatcagaaactttgaaaaggtttttactaagtcaaagagagtgtgtgtgccaagtgcttaattccgcaatggccataaactctcaagttcttactgaaatggagatccctgagagctacatcgactcacttcctaaggtataaactctctataccctaaaccctttagtccaagacctatcaacacatcaagaattgattcccttatgatttggtatgcttattgatgtgtgtttttctttaacttaacagaaagggagagctagtcttggagacatgatctatagaatgataacattagagatgtttgatgcagagcaatttcttcttgaaatggatttatcatctgagcacaagattcttgatttaaagaacaaattcgaagcttcggttgttatatggcagagaaagatagtgcaaatagacaacaagtcatcgtctccgtggagtacgaatttgagtatggataagagacaacagttagaagaaaga

SEQ ID NO: 167920 - DNA, 1733 bp, Arabidopsis thaliana landsberg
atggaatacgcggtaactaacatgagactactgagtaacatgatgtactctgcttcggcgatttcgtttccaagggttcgtctgcattgtagtattccgacagagctatcctgccggagaaacccattccgacagagcaatcagcccgtccaagtcccttctccgaagctcgcttgtttcgacggagtcctaactgaagattttcaacggctggacgtcagcgaaaacaactctccagtcgaagcctttgcctacgttctcgagctttgtggtaaacgtagagctgtctcacaaggtcggcagctgcattcgcgcattttcaagactttcccctctttcgaattagattttttggccggcaagcttgtttttatgtacggtaagtgcgggtctctggatgacgcagagaaagtgtttgacgaaatgcctgacagaactgcctttgcgtggaatgccatgattggagcttatgtttcgaatggtgaacctgcttccgctcttgctctctactggaatatgcgtgtggagggcgttcctctcggtctttcctcttttcccgccttgcttaaagcctgcgccaaacttagagatatccgaagtggctctgagcttcattctctcctcgttaaacttggctaccattcaactggttttatcgtcaatgcgttggtttccatgtatgctaagaacgatgaccttagcgctgcaaggcgtctgtttgacggattccaagagaaaggagatgctgttctctggaattctattttgtcttcatattccacgtctgggaaatctctcgagactttagaattattcagagaaatgcacatgactggccctgcccccaacagctacaccattgtttctgctctcacagcctgtgacggtttttcatatgcaaagctagggaaagagatccacgcttctgtcctcaaatcatcaactcactcttctgaattatatgtgtgcaacgccttgattgcaatgtataccaggtgtggtaaaatgcctcaggcagaaaggatccttcgtcagatgaataacgctgatgttgtcacatggaattctctgattaagggatatgtacagaatctcatgtacaaggaggctttagagttcttttctgatatgatcgctgctggccacaaacccgacgaggtttcaatgaccagcatcattgcagcgtcaggaagattaagcaatctcttggcaggaatggaattgcacgcttacgtgattaaacatggctgggattctaatttgcaggttgggaatacgttgattgatatgtattcaaagtgcaacctcacatgttacatgggccgtgcgtttcttaggatgcatgacaaagatcttatttcatggactacggtcattgccggttatgcccagaatgattgtcatgtagaggccttagaactcttccgggatgttgctaagaaaaggatggagattgatgaaatgatcctgggaagcatccttcgagcttctagtgtactgaaatccatgctcattgtcaaagaaatccattgtcacattttgagaaaaggtttacttgatactgtgatacagaatgagttggtagatgtctacggaaaatgcaggaacatgggctatgctactcgagtatttgaatcaattaaaggtaaagatgttgtctcttggacaagcatgatttcgtctagtgctcttaatggtaatgaaagcgaggctgttgaactctttcgacgcat

SEQ ID NO: 167921 - DNA, 1869 bp, Arabidopsis thaliana landsberg
atgagctacgacgacctattattgcgtgtgcgtacggagtttgagctagatggacttggtttaaaacccaaattaaattaatggttgtcgtttcagctgtctgtatttgcagtgaattcaaggcctctagtaatgatcacgagcaacatgagcctcaagaattaattaagtgtaaaagaaactgcagtgcatctcaatttgttgctttctcttgaaccagaacctcttgaggatgttggcacccgaatgaggcagctttgtcatgttcttgcagctaaggcaaacgatttaggtggcaataacacctatgctgcttttgacgctttaatgccaaatattccaggtttgctggagacaactaagttagatgagaacaagttcggtgggattaggagaaggctgtttctagacaatgaagcttcaggttcgaatggtgcgatcagatttcactctgttgaatcaacttatggtgactcatgtttcactaacaaccaaattacagaagctgtacttgaccatgtcgctgcacctgagcaatgtgccatgatcagactaggagatgctcgtacagcatcgatgtctcatcattctgaagacaatgatacagatggtcctcattttattcaacaattttcgtctgatgttgatgaagattttataagagaagttgaagcagctgagaaccgtgagaatcagcgtcgtagatagtcgaaaggaaaagggaaatgcaaagagagtcaggacgaacctatggtcaaggataataccgatgattccaacatagatggtgtgtgttggtctggttcagatgctaatatttctgatgatgatatttggatctagcatttgatagacatctatgcatttgatgagtctcctcggtttttaggcatggcacatcaagaaggacctgatacagcagcagctattaataggccatcacttgctcccggagaagaggatattgggacatcagtgctggcgtacatggaaagcgccagaaaaaaacgtgatgctgctgatgccatcgttgaaggcaatgattgtaatggaaaacaatatggaaggtttgattcacctaatgtggaagatggggtctcatcaggaggttctggtttcgcagacgttggcacagcgatgggcggaggattcactgtttcccctgcagttggtgttggaaacaaagacgctaggccatcatattcaggctttgctgcatttacatctccaaatcagcgagcaagagaaagtttctctggtttaaatgctgcataccctcgaggaccagcgccttctaatgattttactgctgcaaccccagacgcatcacaagattcctctatatttgaagctgcctaccttggactacaaactgcttcccctgcaatggctgcgccaacccaattcccagtacagactccctatgtatgtgatgctggctacactgaagcagtatctttaggagagtttggtcatgactacacacaaaggcgtgatgcataacctgtcattaacgatgcttttgaactcactaacatagatgtgtgtgcgacggtctcggctgaagaagatgcaatatacattggccgtctgtttaaagataaggaggattttcaaaacactttggctatatatgccatcaagagattgttccatttcaggatagataaattagatctgaagaggtgtcggtggagaggctatatacgccaactttcaggtgtacccaattgtttttgcaattgttgacacatagaatgacttagcatggtcctggttctctacgcccctgagccagctcatccctgatgcaaagaataaagtcattgattcagatcgccaccgttcaatttatgcaggagttagaag

SEQ ID NO: 167922 - DNA, 681 bp, Arabidopsis thaliana landsberg; identical to SEQ ID NO: 79656

SEQ ID NO: 167923 - DNA, 876 bp, Arabidopsis thaliana landsberg
atggtgttcgatcgacaccatatgcagaccagaccagctaccataggcgacttcaatagagttgatcttttctactccaatcgatcagcgatccagctacctccttttgtaagagaagactttgctattcaccctgcatattataatcttgtttcacgaggaaagtttcgaggtgcttctaatgaatcaccactagatcatctagaagtcttcgaagacatagtgtcctcaatcaaaatagatggtttttcaagcagataatcttctttgcaaacttgatagcactgtattttactcattttaggtgtatatttatcatcatttagctttgcatttggtcatagtatcatatcattttgcaccattttagcttattttgcatacttaggcatctaggatcattttgcatacacattgcatattttggagtgttttcaggtgcagaaggagcttaaaaggattctacccgaccttctactctatccaaccaggagggaaccaacagagcattctactcgactcattcacttgatccaggcagccaaagaggaggcagcaattcactcgaccctcttactcgatcaaggcatcctcagaagaagcagcagattgatctactcgccccttctactcaatcctctactcgacccatttactcgaccaagggtgaccaactctacaagacttgttgatctatcaaagcgactttggatcctcctcattccccactcaaccagacatctgagcatacagataggagaggaagaagcatctactcgaccaattgatcactcggagcatacacacaaaggcgtagactttacagcaccctccttactcgatccccaagatcgagcatttgaccaaaccgcctga

SEQ ID NO: 167924 - DNA, 2451 bp, Arabidopsis thaliana landsberg
gaattatgtggctagcttaatgcagtaaaggaaaaaatgggcacattccattcagagatttaaagtttacacgcatacttcagacttccttgggaggaaacgccagaacttccataatctgcacactgagtcctgcaagagtacacgttgagcaatcaagaaacacattgttattcgcaagttgtgcaaaggaggtgacaacaaatgcacaagtcaacgtcgtcatgtctgataaagctctggttagacatttacagagagaattggctaaactggagagcgagttgagcagccctcgtcaagctcttgttgtgtctgacacaactgcattactgaaggagaaagacctccatattgaaaaggtaatgcgattatttacttcatcaacatattaagttatgtaaaaaccagttgcagtatgagagctcacttacctattattttttttgtgacaaccaacttttgtattaccggtagttcattcataccagtaaatatttttcatgatctgtcttaatatgtaaatctttttcatgattcattcactctagagactttacgttcatttcattatttacagctaaataaagaggtattccaactagcacaagaattagagagggcttattctcggattgaggatcttcaacagattattggagaagcaccacaacaagagatattatcaacagactcagaacagacaaacacaaatgtacgttaatatcatttttttttagtttcaccggatgataagcctttcaactgcccgatttataatcctgtttttgtatcctccaggtggttctgggacgtcagaccccaagttacgggtgcgtagttcatgggagtctctaaatataacaccagagagtcccctatcagcgcaagcgtccattatgatttcccacaatcaccgagcatggttctgacgagaatgttttccagctttcagacttgaggttgaattcgggtgcaagtagtccagctcaacaccttgcgtttgtaactcctggtaaattcactaaagttcgacttaatattcgtggggtagaaagtaaaaaccaactgcacattcacaagggggaatatgtagatcagtctcgtgttcagggggaacgattgcatgaaatggacgaaccaagtgaggtggattctgaagatacctgcacggaacttcaatgcatagaaacagagagtcctggtatcatcatgtatccagagccaaatatacttccagaccggtgtaaggctgtgagtgcactaccattatgtgaaccagagtcaaagaactcaagaccaccaacagaaactgcagaagaaaaagttgaaaaagaagaaacagaagaaaaagaggaagaagaagaagaaagagttaaggaagtcagtagtgtctctatccaaacaaaggagaaaagtggaccgatcaaagtctctccacgctgtgttttgtcacttactgacgaatcatttccggatgagtcttctaacctcaaaagagacccaacacatcaagattttgtcactccgtctcctgaaaagctttatgcttggcatcttgagagtaatgggcaaacggcgggaggcacggggattactagaagccgaagctgcggagcaagctttgtatcaagctcttccttttctctgtctgagagagatgctaacacaccaccatgctggtatcagaatgaaagagctgagagcaacctgaaaccgtccaacagcaagaggccaccattgccaaagcatattagccggatgagcatgccagcaacttggttcgagaaagacttcaaccacacccaaagaatgccagctggtttagatggtgttaatatgataaagtcatcaccgaatggatcacaggtttctacctctaaatctcatgtgtatgcacgccagacaagtggtagagctttaatcagccaagacgaaggtgaagagactgttcctcagagggacaagcgaatcattcacctatcggttagttttactaacttggtcaagcagagcttgcttttcgtttacctatacttggtacgacctttagatatcgtcattattttgagaaccacctctatcatggcagatggaggagatagagcaaaaattcttggctctaagatcgtcaaagagtttcaaggacgctgcggttgacccaatacaagactatttaaccatgccattgaactggccgttggagttcaaaagactcgagatggagataatagagctatggcatgcttgcaacgtttccttgtcacacagaagttacttcttccttctcttcagaggagatcagaaagattgcttgtacatggaggtcgaactccgtaggctcaagtacatcagagaaacctttacccacaataacaaagctattgaaaatggacgcactcttacatcaatgtccaggtatatatattcacccaaaaacaccttaaaatt

SEQ ID NO: 167925 - DNA, 1416 bp, Arabidopsis thaliana landsberg
agtcaagacataatctaaatcacgcaatattccatcttctaaaccatccaaatcattctgttttgaatgtacaagcgtaaaaataagggcaaatgcatctaccatatctcgacagtttgattcagaatcaaatcaaaatctaaatacggcatttcgattattattttgcacttatgatactcaagcatattcctattttaaaccattcagaatcattctgtttctaaagaatttacgctctaaatctttgcaaatcaatgtttaaggattcactcggctactataaatacgcttctcatatcgttccatttcatcatcacttacaccgcaaacgagagatcaaagcaattatacattttgagaaatggctgctacattcgcataccttaaagacgtgaggccttacaaaaacgcatggagagtccaggtcaagtttcttcactcttggaagcagtacacaagcaacaccggtgaaaccattgagttgtgttctttgatgaatatgtaagaattactgttatctatgcaaaatttacgtttacatatacacaagtactaatatagatttctgttgtttttgtcataaggggaaaaaaatgcatgctaccgtgaagaaggagttggtttctaagtttgttcacaagcttattgttggtgaatgggtcttcattgagatttttggtcttacctatgcgtctggccagtttcgcccaaccaaccatctatacaagatggcgttccaggttagaactgaagtcatgggttgtgcttctgactccaacttcttgactttggcgccattttcaaaaatccagagtggtgagcttaaccctcacatgttggttggtgagttttctgattctatattatatttttgctttattccattcatttgctatcattagattatgaacacagtcatgtttcactgcagatgctattggccaaatcattactgttggtgagttggaggaactcgaggctaacaataagcctacaacaaagattgactttgagatcagagatcaaatgtaatgtctatatcttattagtttattgtgatcttatttgtttattgcttatcaaagaaagtgtttgtttcgattcatttgttctcatagggatgagagaatgcaagttactttgtggggaacatacgctcagcaggtttacagagcatgtcaggaatctgagggaaagaatgtgatttttctcattcgttttgccaaaattaagagttacaagggtatattcagtttttttgtacctattcctcttctttccatactgcatgatctatggtcacttaaatgttatgagactgcaggtgtgaagaagtttattcaactcatttgatgtatgggaagtacatgaaaattcttaaaaccctctagctcaccttttcagtaaaacgtg

SEQ ID NO: 167926 - DNA, 1419 bp, Arabidopsis thaliana landsberg; identical to SEQ ID NO: 66000

SEQ ID NO: 167927 - DNA, 441 bp, Arabidopsis thaliana landsberg
gagtgagcagcgtcggagaaaaggagtggtacttcttctgcatgagaggtaggaaatacaggaatagcgttcgaccaatccgagtgaccggttcaggtttctggaaagccactggtattgataaaccggtttactccaatcttgactgtgttggtctcaagaaatctctggtttactatcttggttcagccggtaaaggcaccaaaaccgattggatgatgcatgaattccgcctcccctccaccacgaaaaccgactctccagctcaacaagcagtgagttgttttattttgaatcatttcgttttatcataaactaatctttttgaaaaaataacaaattaaccggtatgcatcagactaacccataatgtccacttttagtgagacaagtttctaatattcgtggtgttaaatgcgtttagaaagtcagtcacgaatg

SEQ ID NO: 167928 - DNA, 601 bp, Arabidopsis thaliana landsberg
  unsure (1)..(601): unsure at all n locations
tatgttggggtttgataaagctagtanaacgttagactggctgctcaagaagtcaagaaaagccatcaagaggttcgtacaagcaaaaaacctcacnaatgatgatgaagattttggaaacattggaggcgatgtagaccaagaagaggagaaggaggaggatgacaatggcgataagagcttcgtgtatggtttgagtcccgggtacggtgaagaagaagtggtatgtgaggccacgaaggcagggataagaaagaagaagagtgagttgagaaacatctcatcaaaggggctaggagccaaagctagaggaaaagcaaaggagcgaacaaaagagatgatggcctatgataatccagagactgcctctgatattacacaatctgaaatcatggacccattcaagaggtctatagtcttcaatgaaggagaagatatgacacaccttttctacaaggaaccaatcgaggagtttgataatcaagaatctatcttaaccaatatgactccaccaaccaagatgggtcaaagttacaatcaaaataatgggaaacttatgttggtagatcagagttctagcagcaactataagcatttggcc

SEQ ID NO: 167929 - DNA, 746 bp, Arabidopsis thaliana landsberg
atgtatttctcatctgatcacgctagacacatatttgaagaatctccacgcgattctagagatgcaatttgcaaattgtgtaaaattacggattcttttgaatctttcgcatattatcggcgtgaatgtagatcccatttccataaggattgtcttacaattatcaatgcaaagattcatgagcatacactaactttcattcgtagagagaatccgttcccttgtgatgtttgtgggagggatgataaaggtatggatatgtacggatgtttacaatgcgatttctttgtacatagacagtgtatattcctaccaaaggttataaagctcacacgtcactcacagcgtctctctcacgtttttcgtatctctgatggtgataacatttgtggagtttgccggagccaagttgatgttagatatggaggatattcttgtattgagaagacatgtaattatgttgtccattcaagctgtataattcgttttgatgtgtgggatggcaaagatcttgaagaagagcctgaaccagaggagattgactctcaagttgatcttgctgcgttggtggaaatagatggaaaatcagtacgccattttagccatgaacatgatttattgagactcgatatgggcgaaaaagaagaaagtggacaagtatgtcaagcctgtgtccttccaattgaatttggtagtttcttgggttgcaagcaatgcgactttgctcttcacgacgtgtgtgcgag

SEQ ID NO: 167930 - DNA, 681 bp, Arabidopsis thaliana landsberg
caagactaattacttttttttgtggtatcaacatagatgatgaaatcctatatatggcttgaaactgctgatggctcaatccaacaagtggaacaagaggttgcaatgttctgtcccatgatatgtcaagaagtaatacagaagggtgttgggtcttctaagaactacgcaatatctcttccacagcgagtcaatccagccatgttaagcctgatttttgattactgcagatttcatcaagtacctggacgttcaaataaggtttacttgaggttattaaatttgaaacaattaatgacatgtcgattatcctatgcctttttttcatagagctctttgttactttttaggaacgtaaagtttatgatgaaaaattcatccggatggatacaaagaggctctgtgagttgacctcagccgctgacagtttgcagttgaagccgttggttgatcttactagtcgtgcccttgcacgaattattgagggaaaaacccctgaggagatacgcgaaatatttcatttgcctgatgaccttactgaggtatgttgtgcccaaatcatctctttttaggaggcgtcattcccatctgcttctatattttcgccctttgttacgatttatcaggaggagaaataagaacctctaaagaacacaatggatgatccacggattcgattgt

SEQ ID NO: 167931 - DNA, 614 bp, Arabidopsis thaliana landsberg; identical to SEQ ID NO: 45520

SEQ ID NO: 167932 - DNA, 915 bp, Arabidopsis thaliana landsberg
atggtggaggaggagagacataaagtggttggagttagagaggaagatgttaagaggatgctcagactcataatgccttatcataacgagtctctgcatcaactcagagctctcttctccggtgatccatcaaccactctcaaggtaagtctttttctggtcactttctctccttcgtttcctctttctcccttgaccttaataaagaagagatgatgttttgcagatgggagtagtgctgcctgtcttggccaggtgtggctcttctatcactctttggaacctcgccaaatttggtacctctagacttcaagatttcttgttttaagaagtggtgtatgtagatttctgactcgcgagtgctttgtcctcgcgagaacaggctttttgggagcatttacaatacctaaaatctttatatcatactcaacacacttctctgcatacggtaactaaaaactcctttaatatctttcagttacatcttctatgaaacagtttttaatcaaacaaagttgtgtacaattcaggaaatttctggatgaggagattcagggacgcatgggaatcttgcaatcacaaaaaggcagtggcttgggcacttttcacatcagtgggaaccctctcctcagtcactgcccgtgtttgggcagcattcatgttactcgtcgccttcagatattatcaacataagatgatttggacaactgatcaagctgatgatgatgaggatgacaatgaagaagaagaagcagaagaagaaaaagaacaagtccctcctaaacacaaaagggctcctcctcatatgatgatgcgtaatacacgcaagaaaatttcttcaacgcctaattgtttttcctccatatataaaaaacaaatactatgtaatctctttagtttttagtcacttctcta

SEQ ID NO: 167933 - DNA, 399 bp, Arabidopsis thaliana landsberg
ccagcttcatgcgttacgatcctggcgcatggcagtgtcgaggttggcggcgtcaccttttcacccgccctgcaacgctccaccgttgcgacagaggcaatgtacctgatgatgaagcacgccttcgatcccggttatcgccggtacgaatggaagtgcaaccagcttaatctgccgtccagcctggccgccctgcgactgggctttagcttcgaaggcgtcttccgcaatgcgcaggtggcacgcgaaggccgccgcgatacggcttggtattcggtgattgtcgaggaatggccgcaggtgcgcgaccgactggaagcctggctcgatccggccaatttcgatgaaaatggccggcagcataaagccctgagcgcccttcccctttaaatctcggcc

SEQ ID NO: 167934 - DNA, 3049 bp, Arabidopsis thaliana landsberg
taatgatcagatcaacattggtaagcttttgctctatattaaatcttgtagaaaaaagacaaaactgaggttgttgatgtttttatgttagcttcaagaaacagttcaagagtgaagaagaatccacgaaagaaagtagagtcttctttagaccattctcgttttgtggcaaaagtctcagcttggtgcctaagcaatgatagactggttagattagatttctacaatttaagcaaaaatctctttctttagtcttcgagacattaacctaactttgtgatgggattttgcagtatataccactaagtttcgccaggttaaacggtctgaacaaaatcaacagtaagaaaatctatcttcagaacgaagaaggaagatcatggaagttagttttgagacatgacaaatcaggcatgcaaacttttgtccaatccggttggagaagattctgctctgaaaatgggattaggcaaggtcaatatacattcaaacttgtccgaaaatcagcaccacctgtcatccgtttgtgccgcgcaaaagctaaaccaaaacaaagatcagttgcagaatattcatcagaccattcttgttttgagggatctgtcactccttcaagcctaagaaatgatctactggttagtacaaactttggtttttatgccactaagttttttttcttgatttgtttattgatatgcaaagtgtgtcttgaaatatgtttaatgtggcgtttttgcagtatcttccaaggagctttgtgaactcaaatcgtctggacaaaagatgcagtgagatagttttaaagaatgaacagggagtaaaatggcctttagttttgaaacgtttcaaatcagtcacttatctcccaaaaggctggactagtttctgtcaagtaaacaggatcaaagcaggagattcattcaagtttaaactggttggaacctggaaaaaacctgttctttctttgtgtccgacacaatccaacaatcacaaaactccattagagtgttcagaaggtaacaaatccgaagaaagtgaagaggattgcttggaggtaaagaaaaagaagtattggtcgagatgcagagcttctgtagaaaacatggatgatgatcagaccaacattggtaagcttttgctctatgaaatgtactcaaattctgtagaaaagatgcaaaactgagaattttgattgtttctattcacaggaaacagttcaagaaagaagagagtgagtaagaatccaagagagaaagtagagtcttcatcagaccattctagttttgtgggatctgtcaatccttcaagcctatacaaagatcaactggtgaatacaaactttgttttttgagccattatcttaataaactgacactatagtttcactacactcattgctaaagaaaggatcattggaacttagaagtattttttttcttgatgtgtttaatgacatgcaaactgtgtcttgtcttgatgtgtgcataatctggcgttcttgcagtatcttccaaggaattttgtgagctcaaattttctggacaaaagatgcagtgagatagttttaaagaatgaacggggagaaaaaaggactttagttttgaaacacttcaaaaaagaccttacttttctcaaaaaaggctggactagtttctgtcaagtaaataggatcaaagctggagattccttcaagtttaaactggttggaacatggaacaaacctgttctttctttgtgccctacagaaaccaactatcacaaaactccattagcgtgttcagagggtaacaaatccgaagaaagtgaagaggagggtactgaagacaagaatacctcacaagattgcttggaggtgaagaaaaggaagtattggtcaacatgcagagcttctgcagagaacatagatgatgatcagaccaatattggtaaacctttaatctatgaaatgtactcaaatactgtagaaaattgcaaaactgagattttataattgttcttattgacaggaaacagttcaaaagagaagagagtgaagaaaaatccagtaaagaaagcagagtcttcatcagaccattctagttttgtggctaatgtcacagcttcaagcctaaactatgatcgactggtaagatcagattccacattttaagaaaaaattctcttagtattggtttaaattattagtctgtgatggtattttgcagtatttaccactaagtttcgtgagttcaaacggtctagataaaatgaacggtaaggagatcgttcttcttaatgaagaaggactatcatggaagtttaatttgaagtacaaccaagcaggcaagcatacttatgtcagacctggttggtcaagattctgtgatgcaaatgggatgagccaaggtcaacaatttacattcaaactggtccaaaaacatggaccacctgtcatgtatttgagcctcagtgaacatagaccaaagtcagaatcttcatcgcaccgttcctattttgtaggatctgtcactgcttcaagcataaagaaagataaactggtgaatacaaaactttggtttattccactatcttaaactaaactcctttcttacagaaggatcattggaacttatagtgttctttcttgattggtgtattgatatgcaatgtcttgcagtatttatggaagagttttgtgagctctaatggtctggacaaaggatgcaagaagataattttaaagaataaatggggaagagaatggaaattagtcttgaaacactacaaatcaaactgctttactattatcaaacgaggctggaccagtttctgccaaggcaacggtttgaaagctggagattccttcaagttcaaactggttggaaccggggaaaagcctgttctttctttgtgccctgcagaatccagccatgaaaaaattccattagagtgtccagaaggtatagatgatgtcaattcactctcctcaaatcctacaagtggccatgacagtagtagatccgaagaaagcgaaaaagagaatatggaagacaagaacatctcacaggat

SEQ ID NO: 167935 - DNA, 1020 bp, Arabidopsis thaliana landsberg; identical to SEQ ID NO: 7505

SEQ ID NO: 167936 - DNA, 290 bp, Arabidopsis thaliana landsberg
tcagcggcgatggccgttatttttgcgaccaccttcgcccccatcctatccgtcctcttctgtgccgcggctggcaccgccgtcgacaacgacctccccgactacgtcatccagggccgcgtctattgcgacacctgccgcgccgggttcgtgaccaatgtcaccgagtacatcgcgggcgccaaggtgaggctggagtgcaagcacttcgtcaccggcaagctcgagcgctccatcgacggcgtgaccgacggtaacggcacgtacactatcgaccttaaggacagcca

SEQ ID NO: 167937 - DNA, 2031 bp, Arabidopsis thaliana landsberg
atgaaacgatgtctcgtgttagatgatgttcagtcccaaccgcaacattcatctcggcaaagaagagaacaattaatcaacgagcaagcaattgatgaagaaagcgatgatgacttagactctgatagtggtaacgtgccagcaacacaagttcccgagacacaagaagatgaagaagcgtatcgtgttgccgttgatgatgatgaaaccttcaaaaattctgctcctagaaaccaacaacgaattaggcctaatttgtagtcaacatgttgaagtggaattagttcacaaagatctgggtgaagcgcacaagtttatgttggttcacgaggaaatcttagacgagattattgctagttatagagatttccaacgacaaagttttcaaaaacttcgttcaagagactaccgcaatggatatgcgatggcatgctgaacatatgtctcccgaaggagaaatgcacaacccgtccgatggagcagcatggaaaaatttcaatgaggtatatccaaattttgctgctgaaagtcgcaatatttatctaggcttatcaactgatggatttaatcttgttagtatgaatggtgaggcacactcggtttgacatgtgatagtaactccttataatttaccctcgggcatgtgcataaagagagaatttttctttctatcagtcctagttcctggaccgaagcatcccaaaaaaagtttagatatttatcttcagccattgatcgaggagttggtgagtctgtggattgacggggaagaagcgtatgacaaatcaaagaaaaaaaaattcacgatgcgagttgctttgacgtgggcaataagtgacttctcgacgtatggcatgttgtctgtttggatgacgcatggtcttttgtcgtgtccatattgtctagataataccatatcattttggttaccaaatgaaagaaagcatagttggtttgattgccacggaatgtttttacctctaggtcatatgtacatgcaaaatgttcaatcatttcgccgagggaaggaagaaatagatgatcctccaccatggttgaatggagaggaaattcttcacgaaagaataaacaatattcatgggttgtttagtacagtcgattgtggaggaaatggacacgagaggcctgctcaaactatcaatggatacggggttgatcataattgggtgaaaaagagtatattttgggagttaccatattgggaaaatcttcttcttcgacataaccttgacttcatgcatattgagaagattttttttgataatcttatcaacacggttttgaatgttcctggaaaaacaaaagataacattaaatcaagattggatcttccagcgttatgtagcaggagtagcttgcatctcactcgtgatgaaacaatgccggtgccaatttttagattatcgattgacaaaaaaaaagtatttcttcgttagatgaaaaatgatatacggtttcctgatggatatgcgtccaagtttagtcgttgtgttgacgaaaaccattggaagttatctgggctgaaaagccatgattgccacgtcatcatgcaacgactactcccttttgcgtttgcagaacttcttccaaaaaatgttcacacagccatttcaggtaatttattcattctctactttgtttatattttttattttcttatttgtatcaataaattaatttaattatatatttgtgtagatatttcactcttctttcgggatatctcagccaagatgttacacaaagatgatgttgctttgttgaaagcaaatattgccgtcaaactttgcaatttggagaagatatttccgccgtcattctttgatgttatggaacgtcttcctgttcatctaccagatgaagccttgctaggaggtccagtgcaatattggtggatgtatccgttcgagaaatatatgtgccacttgaagaggaaagttaagaaaaaagaacatattgcgggttcgagtgttgcacaatgtattaatgaggagagagcgtatatttctg

SEQ ID NO: 167938 - DNA, 1115 bp, Arabidopsis thaliana landsberg
atccgcccaattaggtttctcgagccgtgtcccgacaattctcatttcctgccatcgagagctatcggcccgcaagtgtcattggacgaaacatttctctcaagatcgagttgaacgagcgcttagattatttcacggcgtttcctgtccttccagctcagaatcctctgaccaccgaacccaattttttgtcgatatgcagacctccaaacccactgtttgagaggtttatgagaaaaagaggctcgccgctgagaggaaacgtgcggccgaggagagacgcgtcgcggaagagagcggcgctgctgaaccttccggggctcggaaggttgttcctgaggctgctatgcccgccgtgccggggattgtcgaaacggatgttgtcgatcaagttccgactgatcccccggttgaagctgcctcgcaggcgatagtagcgctcccggcgcgtgataaggcctcgggtaaacgtcctcaggtcgatgactccgaggagaagaggaggaagaagaagaagaagaagtaggcgaagaaggaggctgagagggaagctggcggcagccgaggccagagcagagaaggtcgaacgggagagagatgcggcagtctctgaggccaccgaggcaagattggcgagggaagaggctgagaggaaagcctatgtgaataaggagaatgctctcaaactagccgagagcaatctgaggatagattccgaggtcgttcgctgtaagcgaatgtttgccgaggcgagggggcttagagacagcgaggtggctcgggttgcgcagaaagccaggcgagaggtttcagaggtctttctcgccaagtttaaggtgaccgaggagaaggcagctcttctcgaggatgccaatgatctgttcatctatttgtcccaaactcgggctaatgcgcagctgatcaaggtgcttgaggatggtggatccttagaagctgagaagaaacaggtcgaggagtggctttcggacttcatggatgccgaggcaaaactcgtgcatattacgtccgagctaaaagaggcgcttaaagcccccgcttccgagccagctcccctaagtcaaagcgaacataggtcggtcgagactctcgcggat

SEQ ID NO: 167939 - DNA, 720 bp, Arabidopsis thaliana landsberg
aaaatgccggttggtggagccgaacctagttaatattgatgatttaacattcgttgatatcttaaggacccagggagagaacgcaggtggtgggaacctagatttggaacaagctgttataaaaactgggtgtgtagaggcggcttctatgccgaaattcaagaaagagtctgatttgttgaaatcgccaatcaattttatgacatactattccacgtccatgaaacgcatgaagtcttccacttcagatcaaggtcgcggagcatttctgattgtatgcactttgataataacagccacttatcagatggccctccagcctcccggaggtgtacaccaatctgagaatgcgaatgcgaatgcgggttctgtggtgatgaaacagacattcttcatccttctttggatttccaacaccgttggtttctgctgcgctgtattctacaccttttgtctcataccactcggtcagttgtttacgatatggtttttttatatagggacatgtctgtgcatttcttatgcactagcaatggcagtaatctcaccacaccctctagtgtttctctctgctacctttgctctcttccttgtttttgctctctatctcttgcttgaagctttcgtggatacttggcggaagcatcggacggtggtacgtaagtcccgattcagctggttttgaaaggtttggcaatattattatatctgaagacaggg

SEQ ID NO: 167940 - DNA, 565 bp, Arabidopsis thaliana landsberg
  unsure (1)..(565): unsure at all n locations
gtcaaacgattatgtcagtaacaatgggatggagaagaaggctctcactactgctgaatcagttcgggttgtggaaaagcatccatgggttatcacctttccgaaccatgaagacttgacttttctcttcgatccattggaatggaagaggtacacactgaatttacccgagttagttggaaccgatgtttgttactcgaaagacggatggttgcttatgcgaagatccagtttagtggacatgttcttcttcaacccgtatactagggagcttataaacttgccaaagtgtgagttgtcctttcaagcgattgctttctcttcggcccctacatcaggtacttgtgtggtgttagcgttaagaccttttacaagatatatcatccgtataagcatttgctgtcctggagcaactgnnnnnnnnnnnnnnnnnnnnnnnnnnnnnnnnnnnnnnnncccatacatgcatagcaaccttgtctatgccaacgatcacttctattgttttagctcgggaggtgttttagttgactttgatgtagcttcccgcacatgagtgaacaag

SEQ ID NO: 167941 - DNA, 1304 bp, Arabidopsis thaliana landsberg
ttgataagggcagatggaagcaatagtgtggatgttgtcaaatgttttttgtggttaaggagaaatgggttgtagtagtaaacccctttttgttaacccaagtccagtgtagattgataagttgcagttgtttggtgttgttataagctgatatgatgcttattcctgaccagagttgggagaaaaccatggattgccatagtccaggtcaaggtttgatgccttgtagtttcaaggtgaaaactgttcctctcgatggcgatgattcaatgaccgaagaagtgttggatcctgattttggggaagcagctattggacgtgttgccccggttgattctggtaagagaaagcttcagatccctatgtgaaaaggactctggtataaaataactaactcacttgtcatttgttttggaatttcaggcttgtggtggattattttgttgagagcatatggaaaatgcactggtgatctttccgtgcaggaaagagttgatgtgcagactggaattaagatgatcttaaagctgtgtctcgctgatggttttgatatgttccctactttattagtcactgatgggtcctgcatgatagaccgtcgaatgggaatccatggtcatcccctggagattcaggtgagcagttccttcaatctgagtttgcactagaagctccctatgctgttgtaaaaccgctttatttatcgtttactttgtcaggcactcttttattcggctttggtctgcgctcgtgagatgcttacgccagaggacgggtcagctgatctaatccgagctctcaacaatcgtcttgttgctttaaatttccacatcagggaatactactggttggacctgaaaaagattaatgaaatataccgttaccagaccgaggaatactcttacgatgcggttaataaattcaacatatatccagatcagatcccttcatggttagtggactttatgcccaacagaggaggatatttgattggaaaccttcagcctgctcacatggatttcagattctttactttggggaacctttggtctatagtgagcagtttggcttcaaatgatcagtcacatgcaattcttgatttcatcgaagccaaatgggcagaacttgtagcagacatgccacttaagatctgttaccctgctatggaaggtgaagaatggcgaattataaccggaagtgatccaaagaacacgtaatttctctctcccatatgattttgatgaagagatgtttgaaaggtttcactatagtatttccaccatcccaattatattttagcatct

SEQ ID NO: 167942 - DNA, 1634 bp, Arabidopsis thaliana landsberg
  unsure (1)..(1634): unsure at all n locations
tttttttcttttcttagtagtagcatgtgcttgcaggaaactgaccggaagtccggcgagaaatggacggcggaagatccatcacggccagccaagtggtggtactccaccttccacaccgtcaccgccatgattggcgcgggagtcctcagccttccttatgccatggcttaccttggctggtacggatactctttcgtcaatcatatttacaaattttatggcctatatgtgtgtaaaattaaaacatgcaagtaaatgaaaagtcaaatctatgcagatgatttataactagctgtaattaaactcatatttcaaaagattcacagaacatgcaaaaagaaaaaggaaaaaaatcgtttttttggtttgaaaaataaaaaatgatgtgatgtgtggtgaaaacaggggaccagggacctttgtgttggcaatgacgtggggactgaccctaaacactatgtggcaaatggtgcagctccatgagtgtgtaccgggaacccggtttgaccggtatatcgatctaggccggtatgcttttggcccaaaacttggcccatggatcgtcctccctcaacagctaatcgtccaggtcggctgcaacatcgtttacatggtgacaggaggcaagtgcttgaagcagttcgtggagatcacttgttccacctgtacaccggtannnnnnnnnnnnnnnnnnnncggcttcggtggagtccatttcattctctcccagctccctaacttcaactccgttgccggagtctccctggctgccgccgtcatgtctctctggtcactctcaccaccttatcaccacaatattattttaccgtgttgaatcaacttaaaatttgttaagagatcgtattttcagtttttggaaaaacatgacataaattacatgaactatagtaagagaaactggtataacatacacaaaaatgcttaaactggtataatcattggcctagaactaatttatctttattatattttaaaatcaattgaagatctacgtaagttggattagccttgtcatcgagtataggatcctattctcatccaaaaaaaaatttcttagcgcaaacttagacgtttacaaatttctattttatataacaattaattcagaatttatgcttttatatatcaaccaaatatctaagttagtaaaagtaatgaaacgataggattttgtcatttatgtacacaatgtttctagaagaaagtaaacgtaaaatttacatgaacttgttacaaaaatgtcgttgttaaccaactatgtataccaattttatacgagccaaaatcatgcatagtagaatacttctagaattttcagtcaagaacttaacgctgatctttgaaaaaacaataattaactagctaactaggtcaagactgatgagactttgtgaaaattgttatttatatactgtagctactcgacgatagcttggggaggaagtatcgcacatggaaaggtgcctgacgtgagctatgattacaaggcgacgaatccgggtgacttcacattccgagtctttaatgcgttaggtcagatctcattcgctttcgctggccacgctgtggctctagagattcaagccacgatgccttgcactcctgagaga

SEQ ID NO: 167943 - DNA, 443 bp, Arabidopsis thaliana landsberg
gatgtcggagatcacgccaagaaggagatggagaccggcgaaaagcccactacaagctacgggagcacttcatcggaagagtcccgcaccaaaaggagggagaagaagaagagctcctccaacaaagggaaggagaagaaatcttcttctcaccacaaagagaagaaggaaaaatcttcttcccacaagccacatcggaaaggcgacaagcacaagaggatgaggaaggtggtctactacgagaccgacacttcatcaacttctacctccgactccgatgcgccctccgtcacttctaagcgccaagagcgcaagaagtatagtaagattcccctacgctaccctcgcatttccaaacatacacctttactttccgtcccattaggcaaaccaccaacttttgatggtgaagattacgctaggtggagcgatttaatgcgatt

SEQ ID NO: 167944 - DNA, 879 bp, Arabidopsis thaliana landsberg; identical to SEQ ID NO: 23757

SEQ ID NO: 167945 - DNA, 684 bp, Arabidopsis thaliana landsberg
atgcgacgcgttgtgattaccgggatgggtatcgtgtcctgtctgggcaacgatgccgacaccgtttccgcttccctgcgcgaagggcgctccggaatcagtttccgggaagcctacaaagagctgggcatgcgcagccacattgctggcgcaccggatatcgatctggaagccctgatcgaccgcaagcagcgccgcttcatgggcgacgcggcggcctacgcctatctgtccatgcagcaggccatcgacgattccggcctgacggaaaatgaagtgagcaacgagcgtaccggcctgattgtcggctccggcggccactcttcccagaatcaggtggacgccgccgacaccgctcgtcagcgcggcgtcaagcgggtgggcccctatatggtcacgcgggtgatggccagcaccacctcggcctgcctggcgacgccattccgcatcaagggggtcaactactccatcgcctcggcctgtgccaccagcgctcattgcatcggcaacgccatggagcagattcagcttggcaaacaggacgtggtcttcgccggcggcggcgaggaagaacactggaccctgagctgtctgttcgacggcatgggtgcactctccaccaagtacaacgacacgccggaaaaagctttccgtccttacgatgcgagccgcgatggtttcgtc

SEQ ID NO: 167946 - DNA, 493 bp, Arabidopsis thaliana landsberg; identical to SEQ ID NO: 63323

SEQ ID NO: 167947 - DNA, 1079 bp, Arabidopsis thaliana landsberg
atggagtctaccggagaagctgttagatcaaccaccggtaacgacggtggtattacggtggttagatccgacgcgccgtcagatttccacgtagctcaaagatcagaaagctcaaaccaatctcccacctctgtcactcctcctccaccacagccatcgtctcatcacacagctcctccgccgctgcaaatttcgacggtgacgactacgactacgacggccgcgatggaaggtatctccggtggactgatgaagaagaagcgtggacggccaaggaagtatggaccggacgggactgttgtagcgttatctcctaaaccgatttcatcagcgccggcgccgtcgcatcttccgccgccgagttcacacgtcatcgatttctccgcttctgagaaacgtagcaaagtgaaaccaacgaactcgtttaacagaacaaagtatcatcaccaagttgagaatttgggtaattatatcttctttgctctgttttcttctctgttttttaagaagagtatttaagaaagaacaaaagataaaactatttttatcttgtcggaatcttgtttcgtagaccaatctaactctattgacaaaaaaaaaaaaaatttgggtctgggatctcattttcatgcatgcttaagtaagtggggtctctgttttgtttctatgtttaatttgtctatggttatagatgtgtcctaaagctacaagtatctacacatatatgtcatgttgttaattgtcacttcttaaatgcaatactaagcttaatttagtagcagttttataagttaaacatgttggtcaaaattagagatttttgttttctacttggctacttaaatttagggacaacaaagtacatgattagtcaatattacaaattaattaataaaaatgttcctcttgtgttctgttatgtgtaggtgaatgggctccttgctccgtcggtggtaatttcacacctcatataatcacagtcaacaccggcgaggtaatctcatcggaatttttctttagatctagacatcaagtccttttttctatcttttacaagttttgaatgatgtattttggca

SEQ ID NO: 167948 - DNA, 1042 bp, Arabidopsis thaliana landsberg
tggcttatatttctacattgttctaatggcatgcattttctgtttgaagctgcaggaaacaattgagtacggtacaataattagagagcacgtagattttgagataattcggaagcgagtcgaaggaggcttgtacaaaagttggaggatcaacttctttcgtgatttgctgctacttgttaataatgcaagagtgttttatcacagaggatcttcagagtttaaatttgctgagcagcttcaccaactcgtcaagaaacagatgactactactctcaagggacttagtaatagagatgagatctcaatctcaccaccaaaagaagaagttgttgcaatcccttcatcaaagcctgtttcttctaaaccaagaatgtctgttcctaatattgtagcttgtcggaaacgtagtgccttggctgctaaacctttgctattattgcctcctggaccagataaaaaggccaagaaaacagatcatgttgtggactatgatgagaagccggtttcagacaaggatggtgaagcctctgggaaagacgatgatgactctctgattgtgaagataatgactagaggaagaacctcctcgacgggaaaagtagctaacaggaacgtcaagaaccgtgactccagtttgaatgttgatgatagcaaagataaggttaagaaaactgatgaagagaagaaaggtggctcgaaaaagaaaggggctgcgagttttctcaggagaatgaaagtgggctcttcggatgacacattgaagcgtagctctgctgctgattcttctactacgggaaaaggaggaggagcggtacagaggaagaataacagcaacaaagctgataataagaaaacaccgataccacggataagacaaacaaataagaaagcaagtcctgtgaagagaagcaataatggtcgaaactcagaaagagaagctgctccatcttatcctattctagcaaagcgaagcagagaagctggtgaaaaagaggaggcgtcttcttattcaccacgattgaagaaacgtgcaaggagg

SEQ ID NO: 167949 - DNA, 1140 bp, Arabidopsis thaliana landsberg; identical to SEQ ID NO: 59051

SEQ ID NO: 167950 - DNA, 565 bp, Arabidopsis thaliana landsberg
tacactttttttcttggttttgtttctcaggatgccaaatatagagaaacttgctttaccaatctggtcctatcaaaacgacaagtcattgcggtttgcattcagtcaatggaagaatcttaaaacattgatcatcgctcatgaacactctttcaccccgagtttcgactttaaagctgtgggggagagctgtagtagcctaaccaacttaaaatatttgggtcgtttggaagaatacacgtgcagggatatagtgtgttacctccgtagcctcaagaggttgagtttacgatgctctttggtcagttctacagcagtttacaggttaatcaacggccttccaaacctcacgattcttaatgtttcacattgcaaaaacccgtatgattattttcttcctatagcgaaatctatagacaattatgttataacagccgccactcagaagcttgagaaatttatcacatgtcctcacgattgtatgatttgcaaagatcgttgtcgctactcattgtcttatctcgctgaggtttggcggaatgatgagataaaggaacttgaattc

SEQ ID NO: 167951 - DNA, 690 bp, Arabidopsis thaliana landsberg
atttatagagtatgatacggctcctgcgtacaacagtagccagatattgtccccaccaaaccggagtcgtagttcaactccaagaaagtgtctcccaaagtcccttctggaagttacaacattgctcaagttacatacgagctgaacttgcttggaacccgtggacctcgtagaatgaactgcattatgcactctatcccctccttagctctagaacccggaggtactgtccctagccaacctgagtttctacaacgttcccttgatgaatctttccgcagcatcggttcctcaaagatagtcaaccactcgggagatttcacccgaccgaaagaggaagaaggaaaggtgcgacctttggtactgaaaactaaaccgccaaggtggctccaaccgttgcgatgttggtgccttaacttcaaagggagagtgactgtagcttctgtcaagaacttccagttgatgtccgctgcaacggttcagcccggtagtggtagtgatggtggagcattggctacgaggccatcgttatcaccacagcagccagagcaatcaaaccatgataagataatactacactttgggaaagtgggtaaggatatgttcactatggactatcgttatcctctctctgcctttcaagcgtttgccatttccctgagcacctttgatactaaattggcatgtgaa

SEQ ID NO: 167952 - DNA, 628 bp, Arabidopsis thaliana landsberg
caacagttgctaaaagttctacagaggctgagtacagagctctatctgaagcagcttcggaaattacctggctatgtaagcttctgaaagaactcgacattccacttcatcaaacaccggagttgtacggggataatctatcatcggtttacctcactgcaaatcctgcctttcacaagaagagcaagcacttcgcgaatcattaccactacgttcgggaacaggtagctctggggactctccgggtaactcacatctcgaatcaatttcaacttgcagatatcttcaccaagtctctgcctcatggtctgtttgcttctctccggttcaaacttggcgttgatgttccacccactccaagtttgagggggactattaatggagatacaaagagatcgatggagaatgagattgaaaggtcaacaaaaggtgaagataacctaatcgagtaagaggacaagagacttaggtcaaattcagacacaactctaaacggtgtagttccaccaatgttgtctaaagattcagataagcccaagtccaataacatggtctggaagtccaagacgaaacaaatgtccagtcagcctgttagtgtgcaacggtcatctacaaaagaacaagaaga

SEQ ID NO: 167953 - DNA, 1023 bp, Arabidopsis thaliana landsberg
aaagcagtgagttttagttgcaaattatggaacgttttttcaaagaacggattttgatgtaaacaaaagctagaattcagtttttagggttcacgataatgaatcataggctttattccatgagattcaatctccatggaatcggcctcgacgaggacagtgaaaagttcattgatccatctcaagatatctaaagtgttttcttgcgaaggtttattgttatgcgtcacaaggaaccactcaagcaagctcgtagtttggaacccgtatttgggacaaattagttggatcaaaactaggaatgattaccacataggcgttacatatgctctcgggtacgacaacaacaagaaccacatgatcttgaggtttttttctggacaaggctactacgagatttacggcatgaactcttctgactcatgggattgtttttatggcattcccaacaaggggtttaaatgttatcagcccggcgtgtcgttaaatggaaatgcttattttttgactgagggaagagaagtaatggaagggtatgattgcttactcggttttgattttacaacaaagaaatttggaccacttctttctttgtcgttttcgcatgattttatagagactgggagactatcttgtgttaaagaagagaaacttgcggtcttatatcagcgctgctatacctatgagatggaggtatgggtgacaactaagatagagccgaatgcggtgtcatggagcaaattcttagcagttgaaatggaaccactcactagtctaaagtttaacgatgattctggcagtttcttcattgacgaagagaagaaaatcgtcgtggtttttgatatagacgaatctgaacgcaacaatacggcttacatcattggagattatggatgcttgaaagaagttgatcttgatgaagttgtgaacccacaagaatctgtggaggtcggagaccgcatttattctttttcaccatttgtgtgctcttgctcttatgttccatgtttagtgaaatttaaa

SEQ ID NO: 167954 - DNA, 1785 bp, Arabidopsis thaliana landsberg
  unsure (1)..(1785): unsure at all n locations
atgtgtttgtatattatacattagactagacattcctttttatcgaatttatgagagcattattatagcgaaaatgcactaactattgtaactggtttgcgatcataaagatgatctctagcagacatacaagactagatttagttcgggattctctgatgtatatctttgattcttcaaagttcaaacaagtgtatagtcagatgtggaagtgaaattgaatatctttacctgagaaagcgacaacagcaacaatctttcgtggcacctccaaaattttgactgaagaatcttttggcaatggaaaattcgaaccatactttgagggcatgacaaaagacatccgccactgagtttgattttttgcctgaagcatgcaaatatactaattgacgaggaccaagaacatggtaagaaaacgaaacataactaatttgcaattttgtaagagaaaagtaacaatcaagaataccaggttcccagcacttacatatgaagaaataatactatacactatcattcattgatctcttcaagatctagagcaaaagagtgtgatgatcctatggagaacaattttcactaaaactggtaataaaaaaagaagaaaccaactcactcgaaacaactccaaaatatgctatctaggttaaaataagctaagaacttccaaaaagaaaccctccaggatccattgatgagataattactttggtagctattactcgagtagtcatttcaatctcttctccaacagattgggctttacgagtaacaacaggggtcttttttcgtttattgtgttctgtcgaaaacaaaagcatccagaattaaaagcaaaacaatagtcaaatcaaacaaaaaaagtgtcagcaagtgaagaaagagggaacatttacggcgttgagagacagaggatgcctcagaggcgagagcaaagacgagagaaaccctggattcagtggcggacacggcttgactctgcctctgccgccggatagctctgttcacgctcgccgttctgaagccggagtaagtaattgggcatctctggatagggtttctgaggggcaatttctcaggagatgaagacagaagagaaagggatcatgtaatggaggaggagctgatcatcatcatttctcttcgcaatctttgttctgttttcgttctaattattaacgaccgctcgattttggttctctcataccataccggttgatttttcttataccaaatcgatttttaattatctccctttggaatttcacttatttatttttttaagtccacaaaggcccctgagactgtggagcgggaagatgacgaacatccactcactcttctctacaacacaccggtgcaaagttcatatgtgatgtttgtgaagaagatatgtcggaaaaactttgggtttattactgcaaagagtgtgattatgtaactagctaggctttctatacatttaaaacgtaatgtcgacccagtgaagcatccatcaaaaaagcaaggagaagtgcaatttcgccgttgcatgcatatacactccacattgttagaaacacctacattatgctcggagacgcaggaacaatcaatatttagggatttctatatcttttcagtctttatttagtactttntataaagcgaagaagaagctcccatttatttttcgtaaacgctttggactagggttaacgacgttttcctcgtaagattgaacacaatattcgggatacgactaaataatgtaacagtttttaattaagaaaatattattat

SEQ ID NO: 167955 - DNA, 1796 bp, Arabidopsis thaliana landsberg
ctctcatcataccaaaaatgtgatgaccacatcaagacctttggagttgcttcatatggacctcttcggacccgtcgcctatctaagcataggaggaagtaagtatggtcttgttatcgttgatgacttttcctgcttcacttgggtattctttttgcaggataaaacagaaacccaagggaccctcaagcgcttcctaaggagagctcaaaatgagtttgagctcaaggtgaagaagataaggagcgacaacgggtccgagttcaagaaccttcaagtggaggagtaccttgaggaggaaggaatcaagcacgagttctccgctccctacacaccacagcaaaatggtgtggtagagaggaagaacaggacgctcatcgatatggcaaggacgatgcttggagaattcaagacccccgagcggttttggtcagaagctatgaacacggcttgccacgccatcaacagggtctaccttcatcgcctcctcaagaagacgtcgtatgagctactaaccggtaacaaacccaatgtatcttactttcatgtatttgggagcaagtgctacattctagtgaagaagggtagaaattctaagtttgctcccaaagctgtagaagggtttttgttaggttatgactcaaatacaaaggcgtatagagtcttcaacaaatcatcgggtttggttgaagtctctagcgacgttgtatttgatgagactaatggctctccaagagagcaagttgttgattgtgatgatgtagatgaagaagatgttccgacggccgctatacgaaccatggcgattggagaagtgcggccacaggaacaagatgaacgaggtcaaccctcttcctcaacaacggtgcatcccccaactcaagacgatgaacaggttcataaagaggagacgtgtgatcaaggggggcacaaaatgatcatgtaatggaggaagaagcacaacaggcacctccaacccaagttcgaacgacgattcaaaggaatcatcctgtcgaccaaatattgggtgacataagcaagggagtaactactcgttctagattagttaatttttgtgagcattactcctttgtctcttctattgagcctttcagggtagaagaggccttgctagatccagactgggtgttggccatgcaagaggagctcaacaacttcaaaagaaatgaagtttggacactggtgcctcgtcccaagcaaaatgttgtgggaaccaagtgggtgttccgcaacaaacaagacgagcacggggtggtgacaaggaacaaggctcgacttgtggcaaaaggttatgcccaagtcgcaggtttggactttgaggagacttttgctcctgttgctaggctagagtcaattcggatattattggcctatgctgctcaccactcttttaggttgttccaaatggatgtgaagagcgctttcctcaatgggccaatcaaggaggaggtatacgtggaacaaccccctggctttgaggatgacaggtatcccaaccatgtgtataagctctctaaggcgctctatggacttaagcaagccccaagagcatggtatgaatgccttagagatttccttatttctaatgctttcaaggttgggaaagccgatcccactcttttcacaaagacatgcaatggtgatctttttgtgtgccaaatttatgtcgatgatataatatttggctctactaaccaaaagccttgtgaggagtttagcatgggtgatgatgcaaaagttcaagatgtcgatgatgggcgagttgacctacttcc

SEQ ID NO: 167956 - DNA, 788 bp, Arabidopsis thaliana landsberg
ccgaccaatgatcacaaagtggttctgaaaatgtttaagtccattatctttcccagatatggtatccccaaggtagtaataagtgataaaggctcgcatttcataaacaaggtctttgaaagtttattgagaaaacatggggttaagcataaggttgccactccctatcatcctcagactagtggctaagtggaagtgtcaaacatgcatatcaaagctatactcacaaaagttgatggtgtctcaagaagggattggtcaactaaacttgatgagactttgtgggcctatagagttgcatataaaacgcctattggaagaaccccattccagatgctatatgggaaatcttgtcatttaccagtagaaatgaaatataaagccatttgggcaaccaaactcttgaacttgtaaatcaaaggagctcaagaaaaagagcagtcgacctgcacaaactggaagagattatgctggaagcatatgagagttcgaagatctacaaagaaagaacaaaagcctttcatgacaaaaagatctcaccaaaagattttaacattggagaccaagttctactattcaactccaggctcaagttgtttccaggaaagctcaaatccaggtggtctggacctttcaccatcaaacaattattggcatatgggacaattactctcactgggaagggaaggtctgactttactgtaaatgagcagagggtcaagcgctacacggcagattgccccattcctgaaggaactaaagttcacctccctcagcccctcagtgcc

SEQ ID NO: 167957 - DNA, 1545 bp, Arabidopsis thaliana landsberg
ctccgtcggagagacgccgtgttattgacggccatgttggcgactgaaaccggaaatgtggctatgaatactttgtttaaagcagcgacttcaaaaggccttaattcttataccttcctcatctattcttatctcattggctctattgttcttcttccttctcacatcttctcttataggtttctaaataacaatctttttgttagttaataaaccctgtttgattgattcttgttttgtcaaaagttttcatttgattacttgtgcattcttttgcaggtcaagataacttccttcactaagtctttcaattctctgtaaaattggagttcttgggctgctagggtaaagccaactacacttcttgttcttcttcaacttttgaatgtaattattttcctaattgttggtaaagaaatttttattaacctgaaaatgtttctaatatactttactttttgctaaatgtgaatataatgaacagatcaatgtatgtgatcacaggaggcataggcatcgaatacagcagcccaaccttagcctccgccataaacaatatcactcctgctcttaccttcatcctcgccattatcttcaggtttttgttttctttgactaattattaagtttttgctgatttcaattttagtttttcggattattctagtcaacaagtcgaaattgtaaccattccatttccggctaatttaattttaataattataatagttttttatgttaaccgaaattaattaaactcaaaagaactaatcccgaaagatattgtttacatatgtgatgaagccgttcgctatgaatttttcgtgcattataataaagttctttagaataattacttcaaagttcccctataattttttcaattcgactatttttttttccataaatcatgttagttttcacttcactatattcaacactatagtttgctaaccaattctttaccactagccgccttacccctatcccacaactgtctcatactcttatcagtaactaggtaaataatctatatttatggtaaatgcgtttaatatgttcttctttctttctttcaatgcatacattaattcaggttttcggcatctatatttatggcaattgatatgaagatttaagttactatcgcactattgctcaatcttgtggtccaaatcatacaaggctgtttgcatgaatgaaataaatgcgtattaattgtgtttgatcattgattatttcttagccttcttttggaataaacacttaacacactaaatttcattttgtgaataaagaatggaaaaagtatctttcaaagagaggagtagtctagccaaattgatggggacgatattgtcactgataggtgcacttgtggtgattttctaccacggtccacgtgttttcctcgcatcttctccgccctatgtaaacttccgtcagttttctccaccgttgtcatcttcaaactccgattggctcatcggtggagctcttctaaccatgcaaggcatattcgtttctgtttctttcattcttcag

SEQ ID NO: 167958 - DNA, 618 bp, Arabidopsis thaliana landsberg
gttggcgtccgaggatttggcatgtcgagtttcaacattaggaacgaaaaaagtttctggagaatgatccaatgctcgctaccccataggccttttcgtgatgagatatgcattgatggagttttgtactatttagctaagtgcattggaaattaaactcgagaaccttatatggtagtttgctttgatgttaggtctgaaaagttcaagtttttagttgtggaaaatataatttggtgttcaagtctcataagttgcaaaggtaaattaggcatactatggccagtgccctctggagatcagagtcatgaagtcacaagaagttttgtgttgcgggttctggaagatgccaataaactgatatggtcgaggactgtctacacattgtcttttaattggaagaaacttgtgaataaatctctatacattgttgggatgactagtggaggtgaaattgtgttatctacacgccatctaaactatcctttctacattgtctactataatccggtgaacaacactgcggcaaaaaatgaaatccagtttgggaatatcgctaataagaaggctgaaaactcaaggatttatacgtttatagaccatgtagagaatgtagag

SEQ ID NO: 167959 - DNA, 1206 bp, Arabidopsis thaliana landsberg
  unsure (1)..(1206): unsure at all n locations
tcttcccgagggttggattctgataaatcaccggtcanagcaagagcctaacgaaaattttgctgatctcgacggattctttaaccaagtgctcgatgatcatctaaagccaggaagaaaagtattagagactccagatgttgtggatgtgatgattgatatgatgaataaacaaagccaagatggttcttttaagctcactactgatcatatcaaaggaatcatctctgtaagcatttctaaataatctttaatccgtcgttgacctaggtggaatgaattgattagtatgcataaataaatgtagaaaaaaataggttattataatatcgaacaaattgaggagatacggacaaatcaaatttaagaatttatgacattttaaaggtaatcgattaggtcagtaacaacaaattgatggtgagttaaaaacttagaaattagaatcttatattttcataatttttctcatatttttcactaagagaattaattttctttaaaatattccttaattatttatataacattaattaattcttttttccttatatggcatgtgtattaaaattttatcttttttgcgattgaatttaggatatatttctagccggagtaaacacaagtgcaacgaccattctttgggcaatgacagagttaataagaaacccaagagtgatgaagaaagtgcaagatgaggttaggacagtacttggtgaaaaaagagacagaatcacagaacaagatcttaaccaacttaactacttcaagctagtgatcaaagagacatttagattacacccagcagctccacttttattaccaagagaggcaatggctaaaatcaagatccaaggctatgacattccagagaaaactcagatcatggtcaatgtttacgcgataggacgtgatcctgacctctgggagaatccagaagagtttaaaccggaaagattcgttgatagttctgttgattatagaggacttaacttcgagcttttaccgtttggttctggtagaaggatttgtcccggtatgacaatgggcatcgccacagtcgaattaggattgttgaatttactttacttctttgattggggattgcctgaaggaaggacagtgaaagatatcgatttggaagaagaaggtgcgattattattggcaagaaagtatctcttgaacttgtgcctactcgtcgtcaa

SEQ ID NO: 167960 - DNA, 675 bp, Arabidopsis thaliana landsberg
ttcgtgctctacttggaatcagggtcaaattccggcgagacactcctgtattaatcccggaatattcgcatatcccggctccaaggttaccttctctcatgaactaccagaatctgaatctccgccacttggaaaggtcagtcatcgtcaaaaaacttctcttggaacaaattggggttataagcttgttagacaaagttgcagcctttttttgtcatttgaacgaaaatgtggtaaaccaaatgtattgtctccatctatttaatagtggtagaagaggcagtgtgtgctagtgttaaacctcccttatgttgcttcattgtgaaaacttttgtgaaaggaagtagagatgtatgattcttcccttgttatcgtcatcttatattgcagaagaagatgcgtgtgttagtgaagccgctagagaaaccaaaggtggtactgaagtttgtatggatgcaaaaggacataggagttgcattagaccatatgattccaggatttggaacaatcccacttagtccatactacttctggcctaggaaagatgcttgggaagagctcaaaactttgttagagagcaagccttggatctctgagcttcatcgtgtcttcctccttaaccaagctacagacatcatcaatctttggcaatcaagcggtggagatttgtcttga

SEQ ID NO: 167961 - DNA, 917 bp, Arabidopsis thaliana landsberg
gtaaggtgatgtgtaccctacacgggagcatttcactacgttacccgttggcacccatctttgtggggtacgatccgattgacgatcaatacaaagcgctcggctttgattttgataagagatgtcatggtaatgctattggtcacaaggtttggacattgggaggtggtgaaggaatgagacagattagaggtgacttgcaccttatagaccgatactactaccaaatgtatgcatcaacggtgttatctactatggtgctcataccttatcccaaaccaaagatccagttattgtgtgttttgatgttagatctgagaaactaagttttatcactgcacctgcggttgtcctccaatcggggatggagactcatagactacaaagggaagctagcttctattgtgagaaactcctgtggtggttgtatcagcagttttgttttttggatactagaagaccccaagaaacatgaatggtctaggcaaagttgtgattttccctactctctgtgggattatgttgggaatgtcagaatatgtttctttggcaccaacaaggctggtgagatcattattgccccaatgtttttgtcacgcgatgttcggtccttctacattttctactataatgttgaaacaaaaaccatgagaagagttaggctccgaggaattggaagcgatatagagtttaggcgctcttatggatccgaaaacaagttgtgtaattgccatgtccgtatcgcacatcaacacgttgagagtattgcctttttaaaggatcatataaattaagaacttgatttcacttatactaatggaaaagaacattggaaactctggggtttttatcattacaacgcttagtttgttgtctttgtggtttcttttgtttcaagtgtgtgttcctcttctcaa

SEQ ID NO: 167962 - DNA, 629 bp, Arabidopsis thaliana landsberg
atggctcgtctagctgacctgcaaaggcagatagacgaagcctctgaagaagttcgtcatcttgctcaagatgaccagaaccgaaggcctccgcacagagagcttcatcaggaaggcttctacaacgatgacgactggtatgaagatttccatcaaggaaattttgcttttgatgatacttctcctctgtcaacagaactgcaggctacaccttggccccagtctgacaagccaccccagctccccatgtacgacggccattcagacccgaagcagtttttgatgagctacgaagcaacaatatcttcatatggtggcaatgctgcggtcatggccaaatcttttgttatggctgtcaggagtgttgctcaaacctggtattcctcccttcgaccaggaacgatcacttcatggcagaagctgaaggacttgttgttaactagcttccaagggtttcagacgaagccggttactgcttaggctctgttccaatgtacccaggatcacgaagaataccttcaggcgtatgtccgaaggttcttgcgtttgagggcacaggcaccaacggtgcccaatgaaattgtcattgaggccatgatcaaggggcttcgcccaggaccgtcagctca

SEQ ID NO: 167963 - DNA, 1138 bp, Arabidopsis thaliana landsberg
gtccgatcgattctccttcgagatcaaacagccctacgttgaagaacggtttggaaaataggaaacgggaagaagcagctgtagatgcggtgagtatcgtggcggagactgaaaatgggaagaaggaggtcaactttgtgccgaagaagcttctaattgtggtcacaccaacgtataatagagcgatgcaggcgtattacttgaacagggttgctcaaacgctgagactagttgagtcgcctgtgctgtggatagtggtggagggtaacgtggcgtcgtttgaaacctcagagattctgaggaagacgggagtgatgtacaggcacttggtttgcaagaggaacatgacgagtatcaaggatagaggagtgcatcagagaaacactgcattggaacatattgagttgcataagcttgatggaattgtctactttgctgatgatgacaatatctactcgcttgagctctttcaaagcttgagacaaatcaggtgactcaaaaagactgctcattacttttgctgtctctaattgatggtaattttgtgtgaaatagacttattagagagactgcggtttatgtttgagtttgttagttgagcaactctatcgtctgcgcttattttattggcatctttttggctttattgcgtgcagtctttgtgattctagtgttgttgaacaccgaatatacgcctattactttgatgttgaaagtaatgagaatttgaagttttctgcacagaatctgagtttgtttttgtctgcctgcctctattcttacttttctgcttgctctgccatgtgctcagtcttgtttgtttgagacttgagagaatacttcatttttcgttattggaaaggactctgttaaacattctttttgtaccttgtcttggttaatctaagcatccattgagtgtaaatgctgatggcttgatttccaaagcttttcttcttctaaagtatttgtccccaattttaatttgctatacttatctgttacattgtgtagccgatttgggacttggcctgttgctatgctcgcacaaagcaaaaacaaggccatccttgaaggtccagtatgcaatggaagtcaagttataggatggcacactaatgaaaagagttaaagacta

SEQ ID NO: 167964 - DNA, 374 bp, Arabidopsis thaliana landsberg
gtgtatgtttggactgtggacagggcaaatttcagggtcgaatctcagcagaagaagcagagtgctcggcacttctatgggcgctacaatctacatgggccctaggttatcgtcacgtagtgtttgagggtgacaattgcaacataacccggcttctgaataacaatgaatctactcctcgactacagcactacctacaaacaatttgggattggcaaagagcttttacacaggtcgtcttcagttttaaacctcaccaacaaaatagatgtgccgatacactagctaaacgagcagttgggtcttcaactttttgggaattgtatcattcatgtcctttcttccttgcatctcttgtacacaacgatatcaac

SEQ ID NO: 167965 - DNA, 707 bp, Arabidopsis thaliana landsberg
atggtctttcggacatcaccctcttaacgaccaatacagagtaatctgctcaattgcgccaaacctaacgacaatgccagagcattgggtctttgtcccaaaacctcatgaagtaggttcatggaaaaaggttccatcagacttttgtcctttcataccggtccgacgaggacagtgtatcaatggggttatatattacctagcttggattgacatgtataattctgtgcttgtgagtttcgacataagatcggaagagctcacaatgagccaaatacctcggagggacgacggagatggatccaggaagaatgtgagtcttatagagtatggtggaaaagttactcttcttgactctaaccatcttagagacaaggggatgttggttttaagggttctggaagatgccgggatcaacaaggaatggtccaaaaagactatggttttgcatccttatcagctgcatttagtccaagtagacattatattcaacgtagacggtacaagtcaaagtggcaagcttgtcttgataccacaggttttggtttctccctttcacattctttgttatgatctacaaagaaacgatatgagaaagattgaaatcaaaggtataccggacaactggtttcgtaaacacaaattagattagacgttttgacgtcatgttcatggatcacagtgagagcgtcatctacttggagtct

SEQ ID NO: 167966 - DNA, 819 bp, Arabidopsis thaliana landsberg
ccccccccgcccccccctttggagctcaatggtccgtttattttctgaaaagctctcttaagcagctgaagaacactcgaagatcttcttcaagaacccatgagcagagaaaggtcttcgccgtatttaatcgatcggcgaaccggtgagacggtgaatctaagaatttgacgacggaatttgaccggaaagaggtgaagaacggcgatgacgttgagttttcttcgaatttctaaactgaaaatctaagaaatcgataaggaatctactccaaatactaccggcctaaacctactgcgattctaggtctaagattccggctatttattgattcaggcgaaattcggaacaaagactgaacgaaaacgaattatagaaaggagtagtcggggttgttacctgaggcgaggaatgagtccggtagcttataagaggtcagtcagaaggtgaagggttcgtcagtttatatagaggattgaatgggcgggaaatccaaaaccctaggattacgaagcgtcacactctttcaaaggaaatcctcgaaaatcacgcgattcagtttccttttttacctcgggagattcttgttttcccgaaatggcgttctgagatctccgagaatggcgccacgagttgaacttaagtccccgaagtgttcacttcgaggacttagggggcaaattgtggatgttggatttcgtatccggcccaatacgcggtctgagcccagcaaagggcccatcgagagaagtaagcctgtttaagaagcccatcggttcaaaagtcagatttagctttaattcgagtaacagaaggatc

SEQ ID NO: 167967 - DNA, 473 bp, Arabidopsis thaliana landsberg
atggatagagcgtgggggtcgaatcctggtagcggaggcgccgccaccggctagaacgaggccatagatcgccgtgatcgtctccgtcgtcttgctcttgacaccataaacattgcaaaagatccttatttcaaacaaaatcactatggaagctatgagtgtagactatgtgcaacgttgcataacaacgaaggaaactacttggtacatactcaaggtaagaagcatcagacaaacttggcaaagagagctaccttggaggctaagaatgcttcagctcagccgcaaccgcagccacataagcgcaaagtctcagttcgcaggacagttaaaatcggtagaccagggtatagggttacaaagcaatacgatcctgagctgaagcaaagatctattttgttccagattgaatatcctgagattgaggacaagataaagccgagacatcgtttcaattcttctcaatatcccca

SEQ ID NO: 167968 - DNA, 1163 bp, Arabidopsis thaliana landsberg
gactatgcaaggtcttcttctttagcggctacctttcggatgaaacaaggagccctcccagtcagatatttaggagtgcccctaatggcccaaaagatgaaaaaaacatgattatcagcctcttttggataggatcaaatttaagttctctacttgaactactaggaatctttcctttacgggcagattgcagttactcaagtctgtaatttattcaacaattaacttttgggtttcgatcttcctgctgcctacccaatgtctcacaaagctagagcagatgtgtaatgcttttttatggaaagcagctccaaactccgtttgaggagcaaaaattgcttgggaaacagtttgttcccctaaggagtgtgacgggttgggttttcgacgtttgaaagattggaacaaggttatggctctcaaactcatttggttattgtttacagctgcagggtccttgtgggtttcgtggatcagaattaatctcattagacacaaatgcttttgggatttgaatctgtcttcctctggtggttagatttggaggaagctttgtaagataccacctttagcgagacccttcttgatgtgtgatgttggttcaggtgaaactgcaagtttctggcaagacaattgaacgagtcttggtcttctcaattaatctgacggggcctactggacctatcttagttggtttgcctctgaatacggaggtaaaagatggcttaagaggtggtgtttgatggttgtctgctagtaggagtcgtaacccctccattcttcttttaaagcgctgcttaccggttgtggggagtgtggctgagtgtactaaagatgatgtttatctgtgaaaagtcgatgctcatgctccttcaaactcgttctctgcttcaaagacttggatggctcttcaccctccgggtgtccaagttaattggcatagatcaatttggttcaaggatcgggtccccaagcatgctttcatctcttgggttgtggcttggaaccgtttgcatacaagggataggctgaaaagttggggtttctctattcatgtagtgtgtgtgctctgtaactcagggaatgagtctagagagcacctcttcttcaactgcccgtatagcagcgctgtatggacttatttcactaggtgtgttggacta

SEQ ID NO: 167969 - DNA, 509 bp, Arabidopsis thaliana landsberg
agcctatatgcaagctcaatcttgactttggttctaattattggtaactgattttccaatctatgaagtataataatcaaataaaacaaacattattgttctctctttagttgattttttttgttgaaagtactctatagttgattggagagttcgtggggacattcactatgatatttgccggttgctcagccatcgtggtaaatgagacgtatggcaaaccggtgacacttcccggtatagctttggtatggggactaaccgtaacggttatgatctactcaattggtcatgtctccggtgcacatttcaaccctgctgtttccattgcctttgcctcttctaagaagttcccttttaatcaggtgatccaaagatatctacaattgtaaaaaaaatacctcatactatctttataatgttatttcatgatttcggccaatatataattaagcagacaaatatgtatttccactagttatttgttaaatcaagtttttctaatttat

SEQ ID NO: 167970 - DNA, 1332 bp, Arabidopsis thaliana landsberg
gggtttgtgtgaaggttgatctttcaaagccgcttagaggaaccgttttgattaatggggagaggttctttgtggcttatgagggacttgcgaatatttgcgctagctgtggtatgtatgggcatttagttcaccaatgctctaaggggactcaagagacggtggttgtcctggaaacacagatggttggacgtagtagtgccggtagtaaaccgggggtggatgggtttactcaagtgcggcgaggtcgcaaggcggagccaccgcggggcaacttgcctactatggtggaagggtcaaaacattctatggaaagaaatcaggttacgagagataagggaaaggggatcgcagggattacgacctcaaatacttttggtagcttagctgcagatatggtagatttggagagagagggagaggaaaatacgcctgtaatgatacaggatgaagtgatggagattgggaagggagcggagaatatcacgatcgaaaacagttttggtagcctggctacggaaatggaaaccatagagaaggaagaaggaggaaatatacatgatgcgaataaggaaaatgtggattcattgaatcaggggaaccgttggatgaatagagtgactggcaaggatgtggtgtttggagcaggctcaaaaaaaagtgttaatgggcctcgtggggtcaataaagatacaaaagggggaccactctcgagttttaataatactcggcccaaacaacagaagtcgaataggcccactagaggtaaggtttatggcccagccctgaaggaatcagacctctcagcgtcggggaagcgacttcgaattgagcaagaaggtcttggtagaccaggtgggtgcttcgcgaatgcttcatcggggaggagagatgaggtcacggttgcgcctggtcacgggaagactcttgcggcggcagtgccggaagcaagttcagagcatgttggctcagacctggttatgtatggcaacccgtcggaggaggcgacgaaaattgttactgcatagcagattgccccggtttttctcaccgtgttttacagattaatgatgaattgtatgatgtggaattgtcggggggcaaataaacctaactttcgaagatctattcggttcttattgaagaaatttccgactgatatccttgccattttcgagactcatgctggaggtgataaggcaggtcagatctgtcagagattgggatttgagagctcctatcgggttgatgcagttgggcaaaatgatggattatggcttctctggaaatccgagattggggaagtggagattgggaatcttggaccagttc

SEQ ID NO: 167971 - DNA, 684 bp, Arabidopsis thaliana landsberg
ggaaaaccattcagttgaatcttgtggtgttcaggtcctactggccctcataatacttgtattggacgtgggtggatatggggatgggaagaggaggccatcgatgtttactacaaaggtaaactgcctaagtggttgacaaaagatttgttggctgcagcaaggatgaatactatgtggtaatttttcgtacgtaatctggttttggaatagcatgcgatagttttccattgatgattcacaacatgttacacatcacaggtgcaagaatcagacattctagaaaatgagtggcttcatctgtatgctgagattgcattgtactccaactggaaatggcatgcggtatatgttcttttaccttcctttttttactctcgaaagacatgatgtttgcttcgacttctgtacactaaccaaatgcaatgtattttgtattatatgaagagctcgcttctaccattaaagatcaagtatgtaattgtacagactcgaaaaagctgtgaagagtcgccgcacctgaagctcaaggccaacaacgctatcttctacatgggtttcaagggcagtggtgatcatcatccgagtggtaagcatgtcgagtaccaagcaatagtacggaaaaccttggatggaaaaccgggacacattcgtctagaagttgactcttggcaagccatacca

SEQ ID NO: 167972 - DNA, 4120 bp, Arabidopsis thaliana landsberg
tttctcgatcgctggaagtatctatcatatcaccgcgaatcttgtgagggtcaggatgcataggctcgtcaaaaaaggatagcttcgatcaacggccccacagtgggcgtcaattatttgtattggggatgcaataataataataatatacgagattttgggggctgaacggagttggtccattttattaacgataacaaagatcgagagattacagcaaactagttttgtctcgccggttatagactatcctgccgagccgagaacttcatcgtaaaagcagaaagacaaagtacagaaatgggcgaggcaccgatgtcgggctaggcaacgaggtcgggctaggcaacgatttcgggcaaggcaacgattctctttgtctctcagctaataacctgtggatcggatcttgctcccaatagtgtttctctctatttatagggaatctgaaccctaaattccgttctgtctcccttgcaaattatgattttgcccttctcgacctaatgggcctttttaatggcaaaaggccctcttctttgttgatatctgttttgggcctcctaacattgaaggggcaaggcccatgtccaacaataagcccccccttagtccgttgtgcgagagtctttttaagcttgacgggcgtatctcaagaatttggatatattagttaggcacaagacagaaaatggtttgagtgattctggcacatttttcgagacaaacaagacctgttgcgggtgaacattaacttcggcacgtttttcgaggcgaaccgaaacatgtttgaatgaatcgtggctttgacacgtttttcgagacaaaccgggcccgtttcgggtgaacagtaactttggcatgtttttcgaggcgaatcgaaacatgtccgtgtgaatcgtggcttcgacacgttttcgagacaaagcagacccgttgcgggtgaacagtaactttttcatgtttttcgaggcgaatcgaaaacatgcatgtgtgaatcgtggcttcgacacgttttcgagataaaccgggcccgttttgggtaaacggtatcttcgacacgcttttctagacttgctggagctttactggaaaataactgttagaatactcttagataattaacaaaaaaggtgtgcctcggtaatatgtctcccttttttcatttctcacttttcactcttcttctccacatttcgtaaagtaatttttgctctctctctactttatttcttctctctctcttattgtttgattgcgtcgtgagtttgtacccatccacgaaattgtcagtcaggtacgagccgtgtgttgatgctcgtcaatttgacttgtggagtggcgggaatggaggagtaagctttgccgcgccgcaggtcttgtcgctgcggctcttgccgaggcgagacgtgtgtgactcgcgtcgagccgctctttgagctttcaatttttgaattacgtactcccaatgagttgaaagctttcgtgtcgcgcccaaggtttgtcgcgcattgccgcaccgtattgcatcaccttgcaccatgccaactcgtgagctgccgcgacggaagtaggtttgccacgggtttgaggtgacgttgtcaatgcgttcaattgctattgcgatatattgcagagcagtttgttttggaaaggcaaatttgtgagtttagtgtcgcgccttgagtgtcgcaattttcttacttggattcgacgatgtagcagagtgacattgttgtgaggtgggcctaaaccatagccggttagttctttgcgtgcttactagtttgtcatttgtttccttgttggttttgctaggtttcgttcgatgtctattgcctcaggagatcatgttgatggagacgttccagttgagttggggaccgactactaccgccaacttgatgatttgccagttttgataaaggaagactttcgagatctcaacggtttgttcgttcctgagaatgcagaagttaggccgagtcccagtcgaccgagacatggtcgtggaaaggtttttgaggttgccattagagagaatatgcggagtgaatcaagatatctttttatgggtttgagtgcttcaagaacgactttgcaattttgtgggtgtcgcgcaaccaaaaatcaagcgacacccgatgagaatccaggcgagacttgcttttctcacgagctagggagatcgttttctactaagcattcgttgacggccgtgttcaagtgctgtcaggcgcccgaaggcatggaaccacatcaacgtcctttggattgtcctaaaggatatatatgtcttttcgagtcctacttcacggagtgcgggctttggttaccactttgagaatttctcacgagctactgctgtcggcgaaatattgcatttttgcaactatcggtagctagcatcccgaacgcggttggcattgtgattttggcggctcaggagcgtttagttgtgcactttgatcttttcgaagaggtaactagtttttcgattggagttaggatcccaggcatggtttgtgcgagttcgagatgaggttttaagattttttacggtgcaactagtagggttagtgtcttcaagaaacgttacttcgtcgtttaactgagtgatgtctctgttgaagatactaaattgtcgtgtgttaacatgtggaacttgaatccttgtagctcttagttggttccggttcgacaaggttagcttctccattgtttacttatgattttttatgttgggtttgcagggttcgttccacgacctaaagcgtcttccgataatacctttctttcgaaccttagccttttgcacaagaggagtgctttatagtggccacacgtgctcgaacattttagtgattgtgaggcctctacacttggttgtcaacctctgtttgttttaagcgtcgattttgctttcatttttcttatagttccaagatatcacgtaggttctcctttgtgcctaaggatgggtagctgtgaacttccgcattatgccagtcaattcgatgacgatgaagagctcgtttgtgaagatgagccgcatgtgcttgttggtgagcctgttcatgaaggttcagctgaggagactgagacggttgacgtgtgtgtcgtcaagccggatgttccaagtctggatagagcagcggaggtagctactcctcgtactgggaagaaggtttcaaaggaggcgacatgaagcattccctctccttccgtcggtggtcgtcgtttgagaaagagggcttattcgcgtcgtagccctgagacctgaccatctaatgtcggtaaaccccctaggcacgggacgcctattcgagatgccttggaaggggttgatcactcattctccttcaactatggaccaagagactgcatgttccacaacgacgagagcgcatgcccagaggttgcgaggaatgtccgtggcgattttctttgagtttccgcaagtcgaaactctcctcgtcgcatatctctatcgcaatgtttgtcgtcagaagtttcaggtttgtaatcttccccttctcttttattctcaagttttctcgggtttggacattgtgtattttgcaggaaatgagccaaacaaaccgtatggtcggtttttatgagaagaaggtgagggaagtcattagggagagagatttgctcaaattcgctttggagactacgagaaaatctcttgcgatgtatagagcggataggcattatgggcaaggaaaggctagcggtttcgatttagaggttaaattgctaaaggaggctcttaaggttgcaaaggcgaagcttgagtccgaatcgacctaggaaatctcgcgaaaatgctgtagcggcagagcgtcgcaaggtggtgactgaaatcgaggataatcatgctcgtatcgatagattaaggaaccatattatcggattgcgagctcagtgtgtcccaaaatacacgctctctcagataaagggggttcaagagtgtctcgagacaatgattgctcaagggtttgtctttccgtgggcgaggatggagcctttagctaacgctcccgcggtttggttgtctgtggttaataaggtcaaggttccaatcattatcgcaaacggccacggccccttc

SEQ ID NO: 167973 - DNA, 608 bp, Arabidopsis thaliana landsberg
ggcaggatatttacaccttcctcacactgggaacaaggtccgtagtgcatgaccgcaataccaacgaaactctgatacatattgaactagtactggatggaagcggccgttcacagatcagcaccggcataggctttttcgaccacatgctcgaccaggtgtcaaggcatggtaagatcgatatgaccattgaagcaaaaggcgacctgcatatagatgaacaccataccatagaagatacaggcattgccctgggtgaagcatttgccaaagcgctcactgataagcggggcattgagcgctacgggttctgcctgcctatggatgaagcggaagcacaggtagccattgatttcgggggccgtaactggatagtgtgggaggctgaatttaatcgcgaaaaaattggtgaaatgcctacagagatgttctaccatttcttcaagtcattcagtgatgccgctaagtgcaacctgaatattaaagcggaagggcagaacgagcatcataaaattgaagcaatattcaaagcctttgccaaagccattaaaatggccgtaaggcgcgatgtaaataacatggttttaccaagcactaagggggtgctt

SEQ ID NO: 167974 - DNA, 1243 bp, Arabidopsis thaliana landsberg
gcatatagaaaatgtattttgcttttcatttgtcttttgtgggtttgtagggcttagcactagtttcagcacattggtattcattggtggaatatactggttatacaaatttattagaagacaaatgaggttaaaccaaaagaagaaattctttaagcgtaatgggggtttattgttgcaacaacaattgactacaactgaaggcaacgtggacagtacaagagtgttcaactcaagagagttggagaaagccaccgaaaactttagcttaaccagaatactaggcgaaggaggtcaaggtacagtgtacaagggaatgcttgtagacggtagaatagtagcagtaaagaagtccaaagtcgtagacgaagacaagctagaagagttcatcaacgaagtcgtcattctctcacaaatcaaccataggaacatcgtaaaactcttggggtgttgcctagagacagatgtccctattctagtctacgaattcattcctaatggtaacctttttgagcatcttcatgatgattccgatgattatacgatgactacttgggaagtgcgtcttcgtattgctgtagatattgcaggagcgctttcatatttgcactcggctgcatcatctccaatctatcacagagacatcaagtctacaaacataatgttagatgagaaacatcgagccaaagtgtccgattttggtacttcaagaacggtgaccgtggatcatacccacctcactacagtagtttcaggcacggtgggatatatggatccagagtatttccagtcgagccaattcacagacaaaagtgatgtttatagctttggagtcgtgctagcggagctaatcactggagaaaaatcagtctcttttctgcgatctcaggaatataggacattggtaacttatttcactcttgcaatgaaagagaacagactctccgacattattgatgctcgaataagagatggttgtaagttgaatcaagtgacagcagccgcaaaaattgcaaggaaatgtttgaatatgaagggaaggaaacgaccaagtatgagacaagtatcgatggaattggagaagattcgttcatattctgaagatatgcagccgtatgagtatgctagcgaaaacgaagaagaaaaaaaagaaacattagtggacgttaacgtagagtcgagaaactacgtgagtgttaccgccgcatcatctcaatacagcattgctacaacatcttcgtcg

SEQ ID NO: 167975 - DNA, 2266 bp, Arabidopsis thaliana landsberg
cactctctactcaaagttttgttctctgaaatatatgtttcttactaaaatcagagcataacaaagcaaacgagtcgacatgaaattcgaaaatctcaaattccagaaacgatccgtttctggtaaactaatcactaaatccagaatcgtaaaaagaaaattgggacatctaagagctagcgattatcattcaggttgaagaacgaaacagtaacttcaaaaatcaagctcaaacggaataaatcaacaaagagaagttactaatcaatcaagtttctcataatttggaatttcttaagctcaaattcagatctagataacaaccaaaagaaaactctgaaacagagacgtgaagaagaagagtttcgcaccttgaaattcatgagacgaaacggatctccagtataattgattttgaattcgcgatcctcactcatcccaaacgaaccatcgctggacaaagccgagccacaagatctcgatccgctagatcccaacatcaagctcaagttcgaacttccttcgtgacaccacttcctcacatagctcgattcctctacagattccgacctaataatcacccaatacgataatcataatcaaacaaggaagataacacagatctaaaaccgcgagcctcaaaattaacacagaaattgaaacgagattgggttctgcgaaccttttaggtgagaagaacactggtccataggaaaggagaagaagagacgaagcaacggttctctcaatcacagaaggatacgtcgccattactgagttcttcttccgaatgaagcttttctctgagcttctgcgaatggcgcgatgatctgattttgttttgtttttgaatttcactttctgtctctcactagaattcattcgtactctgttatattgcagcgcctagagaggaattaaaattgatgagcccatatattaggcccatgaaaggccttatggcccatttaatcctctatctccttcttcgtctttcctcgcctcgtctacgcattactgttactgatacagtttaacagaaatctccacgaacctcgatttcataagcaaataaagatattttcggagaaatatcttaatgtcatgtcctcttgccttcaccttctctctcccgtctatttcccctttccttctcaactgcttccattttcccgccataaacatccttatcttcttcgcgccacaccaacctctgcaaccgaagatgttgcctccgccgtttctggcgcaccttcaatatttatctctcaatcacgctctccggagtggtggattgacttgctccggtccaaagttcgatctaatttgctccgtgaagctgttttgacttacgttgacatgattgttttgggtataaaacccgataattatgcgttccctgctttgctaaaggctgtagcagatcttcaggacatggaactggggaaacagattcatgcccatgtgtataaatttgggtacggtgtggattccgtgactgtggctaatacccttgtgaatttgtatagaaagtgtggagatttcggagctgtctataaggtgttcgatagaatatctgagagaaaccaagtctcttggaattctttaatttcttctttgtgtagttttgagaagtgggaaatggcgttagaggcatttcggtgtatgttggatgaaaatgtggaacctagttcgtttaccttggtgagtgtggttactgcttgttcgaatttgcctatgcctgagggattaatgatgggtaagcaggttcacgcctatggtttgagaaagggtgaattgaattcgtttataatcaacacattggtggctatgtatggtaaactgggaaaattagcatcttctaaagtcttacttggttcttttggaggccgtgacttggtcacatggaacactgtgttgagctcgttatgtcagaacgagcagttgcttgaagcattggaatatttgcgtgaaatggtgcttgaaggtgttgaaccagatgagttcactatttcaagtgttcttcctgcttgttcacacttggagatgcttcgcacagggaaagaattgcatgcttatgctttgaaaaatggctctttggatgagaattcctttgttggtagtgctttggttgacatgtattgcaattgcaagcaagtgttgagtggtcgtcgagtatttgatggaatgtttgatagaaagattggtctgtggaatgctatgatcgctgggtattcccagaatgagtatgacaagcaagcgttgt

SEQ ID NO: 167976 - DNA, 651 bp, Arabidopsis thaliana landsberg
atgacctcacctatgaagggtctattaaaaggtttgaggtacattgctcgtatcttcggtgagtttattcgttctcgaaacaaagatcatatatgtctatacaattaccaaaaatcagattcttaaatcttataaaaaaaaattgttgtagaggatgagaaggaaccagagatgcagattggaataccaaccgatgtcaaacatgttgctcatataggatgggaagggccctcagctaccaccccaagctgggtatatccttctctcaatatttttataacatattctacatatcttttgtttgtggattaggtcaaatattttcatgggaatatgcagatgcatgatttcaagcctaccgatcaaacgaagactgagacgaaaggaacatctaacaaaaaacctgggagttccggggagaaacataggaagggaagacgtaaaacatcaacaggaaacaactcacctacagaatctccatcaagggtaggaggatcagtaaggccatcaaaacgcaacacggggaaacaaagagagcagaacacgggttcagggtcagagtcaggttcaggattagagttacctcaacagactgatcagtttgttgtaccaaaacaatcaaagcaaaaaaagtcaaaaggatcagcaaca

SEQ ID NO: 167977 - DNA, 326 bp, Arabidopsis thaliana landsberg
ataaaagagtcaaatgtctatttataaaaaatttaaattccgtttttcacatataaggaccgtcaacaaacttccatatgcctgcaggcattcttagaaaaattgttagccatgtagctgaaggtgggattggtgagttaaggaattggattatctccgggagggagggaatggtagctgtattttcactagacagcctgaaattgataaggttggacaaatctagagattttgtatactggtccagccttgatagtctctacaatcctttttttggaaatgtctaaaggcaaaaaatctttatgtattgtatggagaaattctta

SEQ ID NO: 167978 - DNA, 412 bp, Arabidopsis thaliana landsberg
atgatgcgagaaaactttcaggtaatgagagagctgtttgagttcgccgcccttaagacgggaaatttcttgctaacacagattaatggccaatttcttaaaatcaacgcattaatggcgggtggagttttggtcggtcacattgagtgtggtatggatttgaaaatctttgaattcgatatttttttgtcggtcggtcaacgcattaatgctattttgtttgatctaccagaatcgctaagcttgggttgcaatacatttgtaacctctattttgtgtgtttactaactcatgtccaggcgcttggaccatcttgacgcatgtatagaattataacgctacattagtctgagtcactcttggatgatcttactttatggaggctctcgtgtcaccatgtagagccactcct

SEQ ID NO: 167979 - DNA, 526 bp, Arabidopsis thaliana landsberg
  unsure (1)..(526): unsure at all n locations
atgagtgacgacgaagatctcgatttgtctttaaggttatatacacaacaaaaaaaacccgttaatgagaaaaacgggttggttcctcaaagacaagaggaacaaggcgaggtcatgcaactcttgacatcagatcctccacaaaatacccaaccctctcctcctcaaccaaatgacatgacttcttttgccaacggaacaaaccatgtgattgttcccacgcaggctcttgagcaagctgtaccgcccccaaacgtctcagtgaggaccccattgcctgatcaaccttcagaagaagtccttccccctcctcaactgaaccaggttgccaccgtggccttggcaactcccggcagaggtcgtccaccagggaggacaagcacgtcgtaactcaaaaagaccggtggctgggggttggaaagaaacgttaggtgacaggggnaagaattcgtacccaccccgtatccatggggggccacccaaaaaagccaggggcaaaaatccaattctttttcaggagaacttt

SEQ ID NO: 167980 - DNA, 681 bp, Arabidopsis thaliana landsberg
agtcctcttatgtgcactagttagctaacttggactgcattctttcatattatgtgcaataaggtactccaatttgggattaggagaagctagtgagctctcagtccgcttggccaacaaagggtcaaacaaaaagctttgaagagtttccaaacagtaagctacactgcataactgaagctacatggcctagatacagagtgtgtcatatgtctttcggagtttgtatccggagagcgagtcaagcttctttcaagttgcaccatggattccatgtccggtgtatagaaaaatggctcagttcacactcatcttgtcccacctgcaggcactgcctcattcagacttgcaagaagatagttggctgcagtgagacagtatcatcacctaatcaaccacaacaaaacatgcatatagcaccgctaggaccggaatcattataacatgttgaatagacaacaacaatatgaagcaaagtcatatgcaaacgaatcacagccaaagcaaattcgggaccatatatgaatttcaacaatatgcaagtacacaaaacgaattttgattctacataaagcaagagactttgagacctagccctagaacccaaaaccagctcactactttagattttgtatcaaatttcaaaactcactccacagtacttgacttcaacgactcccc

SEQ ID NO: 167981 - DNA, 880 bp, Arabidopsis thaliana landsberg
aaagactaatctatcctttacttatttactctaccaagtactaactaaaaacaacaaaagtaaaaatagcaatctcaaattgagattttcgtgctcctccataatggcgtcatcagagcttcttgaattttaacctctacacatttactcttccaatttgaatgagctagttatatactattttacgtgagggtttcgtactagctcggtctcgaaaacgggatgtgtaaagtagactaaatgtagatacaagaaagaaaaaaagctacgatggactaatttggtttggctcttgctaacatttacccaatgaaagaatttggtttcacagagttatgataggaatatggtttcacagagttatgataggtctacgtcgacctatcaggattttcaagtgacttagtctagggagtagtgaactagttggagatagttagatatcactgaggatctattgttggagatactagtgaaattaccagtgaaacaggtgacgagggcaatgcgcgtctcacaacactggtattccgtaatctcctccagctattttacctatcgtttccttgaatcaccagcatcgtcgaaacgaccacgtttgctcatgtctcttgtggacgaggaagaccagaacaggtatgattttctttcatcaacgtccattaatgatcgcggagatacgtctatgttcgatgaaattctgaagatgccgggatgggaggctacttcgtgaatgctcttcgaggcttgatttgtgttagacttggaaaaagagtgcgaatatgtaacctaaccaccaagctacgtgtggcattaccattaataagatcaagtttttggttgaagctaatgacaacacctggaatctctttcagaattc

SEQ ID NO: 167982 - DNA, 1663 bp, Arabidopsis thaliana landsberg
acaaggactgtccaagatgtttggacaacgtgcatggacaaagcctgcaaggggtaggtatagtggacgttgaggttacaacaatcccagacgttgatgcacaaggtgatagtgagaatggaattgaggataatgatgaggaaaatacgagaatgtctatacaactggggcagaggatagggccaactatgaggacaaattcaataacagagacgctggatacgtgtgatttggtccctgaatctggaggataagtaggactagtggacgttgtagtgactgcgttggaagcaagtgcagctgaagaggaaggacaatgtgatgtagaggttcgtaatacatacagtgcgagaaatgataatacatcaagggcactggcagaggacatgtcgagaagagtatcagacggagagactatatttagtgaattagcgggggacgagatgttgatgtgtagggatgccgttccgttcaaggacaacatagccgcgattgcttccgacaaagctaattgaatcttaggaagggtggcgatgcaatatatatcgggcgggtattcagcaataaaggcgagttgcagaaagcattaactgtgtactctatgaaaatgctattcaatttccgaataaacaagtccgacaagatacgggtaattgcggtgtgccatgataaaaagtgtgattggagggtatatacaacgtttcacgagaactctgaaaatatggaaattaggacggcgactctaaaacatacttgtgatgtcgaggcgcggtctaagtatggtatgaaagcaacacgatcgatgttaggtgagttgcttaaggcaaaatatacgcatggtaagaagggaccaagggcctgtgaactaccagaaatagtattggctgaactaaatgtcaccataacatacatgaaggcttggtacgcaaaagaaatagcaatgaagaaagctcgttgcagtgaggaagaaggttataagtttctgcagacatatctccacctgttgaggacaactaatccaggtacgctgtccacagtccatacagattatacggaggacgaaaatattcgtttcaagtatcttttttttgcgtttggagcttcgatttccgggtaccagtatttgcataaagttatagtgatagatggtacacacactaaaggaaaatacaaaagctgcttagttactgcaagtggacaagatggaaattaccaaatattcccattagcgtttggtattgtagacaatgagaacatagcaggttggcagtggtttttcgaacagttgtcacagtttgtccctcatgaagaagatctagttttcgtctctgacaggcatgcgaccatttatgctgggcttgggacagtgtaccctcttgtgaagcatgcgtgttgcacagtacatttgttcaggaatgttgtccataatttccagtgtgagggacttgcgaaaatggtctccatggcggcgagatcttacactgcgggagatttgcgatattggtttgaagaaatacagaagagaaacattcaatgtgccaagtatttagtagagatagggctatctcactggacactggcgtactttccgggtatacgatacaatgtgatgagcagcaatatctcggagtctctaaatgctgcaatgcaaaaggcatagatt

SEQ ID NO: 167983 - DNA, 386 bp, Arabidopsis thaliana landsberg
aaaaatcccatagcaagatattttcctttaattgtggtatattcgaatttagacttcttattttggagattaccagttaatgaatgagaaagaaaaatctcattgttttccatagattttatggttcttatggaaaaaataggaagaaaaagtctttaaatgtttacattccgaatctttagatataataaattacgcttaagtgaacaattagtgttgggagaagctctatcaaatctagaagaaacaagaaattagcaaaacagtgagtaagatgttggattgacggctcgtggaaacaatcggattcaaccataagttttagatggtggtgccttcggagagacaaccaaactgtactacttggagcaaaatgtcattggacg

SEQ ID NO: 167984 - DNA, 363 bp, Arabidopsis thaliana landsberg
ccggtgcaatagatacatccgcttggtttcagacggggttcacaccaaagtcaccactctgattggtttgcacaaccaatcaagtactctgaaggtttagaagcacatgtaggcattcggggcagtgttgcaatttatgcccacgacaacatcataaacgcgtttggcatggagggaattgcacgtattgcgattcaaaaaagaatccctctcccccaaagcataatggatatgggtcttccggcattattaactcaacctcaaccccgaagagcccaagaatgacacatgaaagacggattgaagccaactgcctccatatacaacgcgtcagtgccaggcccaggatttgcattccggaaa

SEQ ID NO: 167985 - DNA, 396 bp, Arabidopsis thaliana landsberg
aaagtacacgaaaaactggaaggagacgatcatgaaacattcgtattaaaagtgcattctttctgggggactagtatggatattttaattcttgatatcgccctttctttagattctgtgatcaccgcaatcggtatggccgatcatatagaagtaatgattgctgccgtaattattgccgttggtattatgcttgtttctgcaggtggaatcagcagttttgttaacaagcatccaacagtaaaaatgcttgctttgtcttttttacttcttattggcgtttctttaattgcagaaggatttgaacagcatattcctaaaggctatatctattttgctatggcattttccgtgctggtagaaatgcttaatttaaaaatgaaagccaattcaggg

SEQ ID NO: 167986 - DNA, 369 bp, Arabidopsis thaliana landsberg
gtgtctggcgctgctgacgggggcgccgccatcaggtgataaccgcgggggcgctgatttgcccggacggcaagctgcgcacccgcgttgcgctgacccgcgtcaccatgctgcgcctgagcgcgaggcagatcgcccgtctatgccgacagccgcgagggtgtgggcaaggcaggcggttacgccattcagggcctggccgagagttttgtgaaagagatttccggttcctggtcgaatgtggtgggcttgccgctggcgctgaccaccacgcttctggcgggcgcgggttatgcgccttgagcttctgatcaacgcaggcgcagggcagacccgtgcggcgctggtcgaagatggccggttgacccg

SEQ ID NO: 167987 - DNA, 501 bp, Arabidopsis thaliana landsberg
tgccggtggtcggtttcatcgggctgagcacgatgggcgcgcagatggtagcgcgcatcgcgcaggacggcttcccagtggtcgtgcataacgcctatgcggcacgcacgcgtcaggtgccagagaccgccggcgcccgtcccacggcgtctcccgcggaagtcgcctcgacggcgcgccacgtcatcaccatgctaccgaacagcgacatcgtcgagcgcgtgatgttcggccccaacgggctcgccgggcagacggcgcccggcacggtcctggcggacatgagttcgggccagcccgagcacacggtgcggctgaccgagcgcgcacgcgcctcggtcctcgcgatgatagacgccccggtctcggacggcgtaccgcgcgcgcgcaccggcgagctaaccatcatggtcgcaggcgacgcgccggcgtaaaacacgatggagccgatcctgaagacgatgggctcgacgatgcgcaccggggccatcggcacggagc

SEQ ID NO: 167988 - DNA, 516 bp, Arabidopsis thaliana landsberg
  unsure (1)..(516): unsure at all n locations
gcattgcattccaagtgaagatagtgtgtgtggctcactactntcnaaatgtattgtctattcgcgatcagatctctctgtatttggagcttcgatggctggagcttgttttgggtttctgcttcacaatcgatacagagcatcagtttccatgggagatacaggatccttggctctaggtggagctttggctgcaatggctgcttgctcaggaatgttcttcccgttgttcatatcgtctggtgtcgcagttttggaagcttcttctgtcattatacaggtaaaaaaatagaacatctttcttaactcacaatcgcaacacaaccccaatcccaacccctgatgatggatgtgtattctggcatgcaggtcgtgtattactcgacaactaagcgtttaaaaggaaaagggcgtcggatattcaagactgtaccgtttcatcatcaccttaggctaaacggtttaaaggagccaatgatagtaacgatggcatatgtaatatcctctttgctctct

SEQ ID NO: 167989 - DNA, 420 bp, Arabidopsis thaliana landsberg
ccctcgcaccgctattcgcctgtctgctgcatcaggcgatacggcaagcggacataccgatgcccgatcttctgtcggccgttccagtggcagacaaacgcctgacggaacgcggcttcaatcaggctctggaaatcgccaggccgctgtctcgcctgcttgcattcccactggcaccagaatttgatagtgcgcacacgcgaaacattaatgcaatcacggctgcatcccgacgaacggcatggcaatattcgtcaggcctttgccccgaaaccacaagcggcaagacaggttcaaggccggcacgtagctgttgtcgatgatgtgatgaccaccggagaaacgctcaacgaagtcgccgccacgctgaagcgatgcaaagcctctcaagtcaccaacctggtatttgcacgcacgccg

SEQ ID NO: 167990 - DNA, 550 bp, Arabidopsis thaliana landsberg
gagccatcagaagttcacggttactaagagtggtggggttcgaattgatcaacttattgcatgggtaccaccgcaagagggttggttgaaattgaatatcgatggtggatcacacggaaatccgggtgttgcaacggcgggtggagtaattagacatgtgaatggtatttggggtggtggtttcgtagtgaatattggcatttgcactgctccattgcctgagctttggggagtttattatggactgtttcttgtatgggagcgtcgagctatacgggttgagttggaggtggactctcagatcgtggttggtttcctaacgacagggattagcgattctcatcctctgtcattcctagtacgtttgtgctatggctttttatcaaaggattggatagtccaagtttctcatgtgtatagggaagctaatcgtcttgcggacgggttagctaactatgcgtttactttacctcttgagttttcataaatttgactctgcaccggattgtgtaaccccaattttgctgaggacgcaaacggtgtgtaagat

SEQ ID NO: 167991 - DNA, 201 bp, Arabidopsis thaliana landsberg
atgagtatggctccaaagacctcaacaacactggctttattccttgtgaccaatattctcttcctcaccctcatgaccgtgagttgcgcagacaaaacttgcccaagagacgttctctagctttcgacatgatagaatgttctcagcctcatccacttggagctcggggcaccagcaatgaggccttgtcgctaaattctc

SEQ ID NO: 167992 - DNA, 560 bp, Arabidopsis thaliana landsberg
tcatggcgacgctcggcgtttggttcatcgggctcgggatctccgtctatatgctcgacggttcggccgtgcgcctgatggatccgtcgatccgcgatctggcgctggcgcgctttctcggattgccggtggcagtctgggtggcgcttgccgccttcctgattgcctgcaccgttcagtattatacccgccttggacgccacatcatggcgatcggcggcggtgaggatgtggccgagctttcgggcatcaatctgcgccgtgtccgcatcatggccttcgggctcgccggcttcttcttcggcgttgccggcgtgctggccgccgcccagcttggccgttcggatgcggtcatcgccgacggccgcctgtttgccgccgtgaccgccgtcgtcgttggcggaacggcgctgactggcggcgaaggtggggtcatcaatacgctggtcggcgtgctgatcgtcaccgtgcccagcacccgcatgatcctgctcggcgtctcgaactatgaaagcagaccgtccagggcatgatgatcattgccgccgtggcgctgtcgc

SEQ ID NO: 167993 - DNA, 349 bp, Arabidopsis thaliana landsberg
gaatctcgcaacggcgttagcagcggagagaaattacctaacggaggaaacggaagcatcagggagtttaacgccgttaaaagtgtcgttaatgagattgctcgaagaaacggcggagagagtcgtcgttgaagagaatgaaacggagagagtaacggcgtcggcgtcgtcgacggttagaggagttaataatgattcggtgtgttgcgtgtgcatgggaaggaagaaaggagcagcgtttatcccatgtggacatactttttgcagagtgtgttctcgagaggtgtggcttaatcgaggatcgtgtcctctttgtaaccgtccgatcatcgagatcctcgacatttat

SEQ ID NO: 167994 - DNA, 683 bp, Arabidopsis thaliana landsberg
caatcatcaacttcttacaatcaaatagcccaacacttcaagagtatgcttctgcatctttgctcactctctccgcgtcagcaaacaacaaacccatcattggagctaatggtgtggttcctttattagtcaaggtcattaaacatggaagcccacaagctaaagctgatgcagtaatggctctttccaacctctctacactccccgataacctaagcatgatcctagcaactaaaccactctcaccaatactgaatcttctcaaatcaagtaaaaagtcgtcgaaaacatctgagaaatgttgttcactaatagaggccttgatggtttctggtgaggaggcgagaacagggttagtttctgatgaaggaggagttttagcggtcgtggaagttcttgaaaacgggtcattacaagctcgggaacatgctgttggcgtgcttttaacgctctgccaaagcgataggagtaaatacagagagccaattcttagagaaggtgtaataccgggactgcttgagctcacggttcaggggacatcgaaatctcggattaaagctcaaagacttctctgtttactaaggaactcggaaagtccgagatcacacgtccaacccgatacaatagaaaacatagtgtcaagctaatactctcatatagacggagatgatcaatccggtaag

SEQ ID NO: 167995 - DNA, 257 bp, Arabidopsis thaliana landsberg
  unsure (1)..(257): unsure at all n locations
tttctttcattttgtattcctatgaatcaacctcctgttttttttataagggtccttgtcaaggatgcggtttcaagagatggtggactgttgcattgtgtgacgagtttgacatgataaaagaggagacgagtgagatgaagaaggatctggaagcagccaataagtgcnnnnnnnnnnnnnnnnnnnnnnnnnnnnnnnnggaaaagaagtttgaaacgctagagaacaagtatgagagcttgaacaagtatcta

SEQ ID NO: 167996 - DNA, 822 bp, Arabidopsis thaliana landsberg
gaacatgacaatattaacaactgaaaccatcatagtttgatttattgtgtaaagactgaaccattacctccttttgatctaaaagagctaaaggtagttctgggtctggctcaacaaatagttccggcttggacattatctcactctgcaaagtaactattattcaagagggaccggagaaaactgatatttaagaaaatgattatggaatggacaaactatcaaccttaagttgtccttcaacatgtgctctgaagagagcttttgcaacagcctggaaaaaatgattagattaaaaaatatatatgcaaagatttcagttcaatgaaatttaggttctatgaaacacaaccttatacagtcctttataatcaagagtgccaagatctgccgaaataaatccatcatccaatctatcaaccatctgaaatgatttgaactttcattgcttagcagaagccgtgcggaaaattttgtaaaaaagaaagttcattggggtgaagagtcatcagttgagaaaacgaatgtgaaaattatatgagttacaaataataaaaaaaagtaaattatgtccaaaatcaactgcaaattgttcagctaccatttcttgtaataaaagaacgtacctgtgcataagccagagcctctgaaactgaaaaaaatgtattgagaaactcccatcgactctggttccgcaggtcaactaactcccttccatagatctcactttcatccatacaaagacaataagagaatgagacttccttcaaaacagaacaatgactttgcaactctcttttttcttcacattaccaatggtgt

SEQ ID NO: 167997 - DNA, 348 bp, Arabidopsis thaliana landsberg
ataacatatgtttttctattgctcttactctatagaagtatggagttctttcactgcaagggcccatgtttctctgccatctttgtttgatgcaggagtcagatgcttaaaaatcctagcaggaagaagaacattgctttgattcttaagttggcttttcaagcgtctatttatctcatttggagggaaagaatctctagacctcacaataactcttcgaggccaagctcagttctaattcaggatattaataactctattagatgccgacttgacctgctatcaagggagcatcactataatcctcaaagtgtttctcctcttctaacttggcatggtatatttcat

SEQ ID NO: 167998 - DNA, 1251 bp, Arabidopsis thaliana landsberg
acgagggtccaggatcgttgcgagaggcttgcaagaggccagaacctttatggatcgtgttcgatgtatcgggaacgatcaatctgtcttcgtttgtcaacgtatcatcgcacacaacggtggacgggagaggacaaaaagtgaagataacgggaaaagggttaaggctaaaagagtgtgaaaacgttataatctgcaatcttgaatttgaaggcggtgtgggaccagacgcagacgctattcagatcaaaccaaaatcgcacaatatttggattgatcggtgtagtctcaagaattactatgatggtttgattgatatcacacgagaaagcactgacatcactgtctcaaggtttgtctcttaaatcttttgaggtttctttcttacttacgcagttagataataaatgcaccaaactgggaaaaaatacttcaaatactagctcaaaacatgaaaaaaaaacaaatggttaaacttttacaaatacatataatatggctctatctattgtgttaattttttgatgtttttaattaataattcaggtgccatttcatgaaccacaacaagaccattttgataggagcggacacaagtcacgttacggaccgatgcataagagttacgatacatcactgcttcttcgacggtacacgtcagcgacaccctcgcgttcgcttcgcaaaagtccatctcttcaacaactacactcgtcattgggccatttacgctgttggtgctggtgtcgaatctcaggtccgtaatcggaagataacatagatgaacctacatttacgattttgccatcatctttgttcataggttcatacatttgacgttgttttgatagatacattctcagtgtaacatatatgaagctggtgaaaagaaaactgtctttaagtacatcactgagaaggtacgtaatatcctttgtacgttcttgaggttcttaaatcattttctttataatgttatagttaacattacgtttttttgtgtttggtgtttaggccgctgataaagagaaacccggagctggattcgtaagatcagaaggggatttgttgttgaacggagccaaatcgtgtcttagtcagggcggagagcgctatgtgttctctccaatccaacactattctgaatggaccgtcgaatctccaaccgatatactcaagaactatctgaaacactcgaccggctggcagaaccttcccctcccactagaccggcctgcgaccaccgcataa

SEQ ID NO: 167999 - DNA, 921 bp, Arabidopsis thaliana landsberg
gagcatattcatgcaccaatcccggagaactacaaccacggtgaccaacaacttcagctacgtccacttccggtgatatttcacgacggaagactagtgaagcggccaacgccggccaccgctctcatcatcctcctttggatcccatttggaatcattctcgccgtgatccggatctttcttggagccgtcctcccattgtgggccacaccttacgtctctcagatattcggtggccatatcatcgtcaaaggaaagcctcctcagccaccggcggctggaaaatccggcgtgctctttgtgtgtactcacagaaccctaatggaccctgtggtattatcttatgtcctcggacgtagcatcccagccgttacttactcaatctcgcgcttatcagagatcttatctcccattccaaccgtccgattgacaagaatccgagatgtggatgcggctaagatcaaacaacaactgtcaaaaggagatctagtggtttgtcctgagggaaccacttgtcgtgaaccgtttttgttaagattcagcgcgcttttcgctgagttaacggataggattgttccggttgcgatgaactacagagtcggattcttccacgcgactacagcgagaggctggaagggtttggacccaattttcttcttcatgaacccaagaccggtttacgagattacgttcttgaaccagcttcctatggaggcaacatgttcgtccgggaagagcccgcatgacgtggcgaactatgttcagagaatcttggcggctacgttagggtttgagtgcaccaacttcacaagaaaagataagtatagggttctcgctggaaacgatggaacagtgtcgtacttgtcgttgctagaccaattgaagaaggtggttagcactttcgagccttgtctccattga

SEQ ID NO: 168000 - DNA, 446 bp, Arabidopsis thaliana landsberg
  unsure (1)..(446): unsure at all n locations
cgccgacctttcaggacgtctaccagaacgcgatgcagccgtttactgtaggacagatcaccaccgaggaagggctgacgcgggccgaaagcccggtgaagaaattcatggcggcccatgtgcgcgccgaggatctcggactgttcgnnnnnnnnnnnnnnnnnnnnnnnnnnnnnaccgtcgatggcgcgccgcttcaggcgctggttcccgccttcatgctgtcggagctgaagcgcgccttcgagatcggcttcctgatcttcgtgcctttcctcgtcatcgacatggcgatcgcctcgatcctgatgtcgatgggcatgatgatgctgccccctgtcgtgatctcgctgcccttcaagctgatcttcttcgtgctggtggacggctggcggctcgtcgcgggctcgctcgtcgcgagctacggggccgggataacgcagtag

SEQ ID NO: 168001 - DNA, 624 bp, Arabidopsis thaliana landsberg
catatattcccaaaataggatcaaaattgatttacatagtgcatttaccttttcattaagataaaaagaatctctaatgcttacaaatttatttttaactgtattaatatgtaattctttcagctggggtcaaatgatctgatgcaacaagcacagatatttctgtacgccaacggcaaaaagaatcctccaactgccgttgattttgacagatctttgcttagagactttctctttaatcaaagccctccaaaggtaaattaaaaccgaaccaatcaatcttataccggggcacttcgatttgattactgaaccgatattttttttgtatcataggacctcgcattggcatcggtatccattagaccgatcccattcgcaccggtcagcgaaaaggttcacgtgtcggagaaaaactacggttctatccgacggttctacatcaaaaccatggaagattacgctgtaccggttcttctccaggaagcaatggtcaaattgaacccaccggaacaagtttttcagctcaaaggctccgatcacgcaccgttcttctctcggcctcagtccttgaacaaaatcctcgtcgagatatctcaaataccgttcaagaaatcatcctga

SEQ ID NO: 168002 - DNA, 1066 bp, Arabidopsis thaliana landsberg
cccccccccccatcccccttcgaagactcgttccaacaagaagaagaagatgaagcctttgttgaattctccaaaaggctcagtcaaacgtagaaggtcaacccatctcaatcctgacttaccaccatctctttcacaagatttggctgctcgtgttgattctcttgaaaatgaaattggtgttcttaaagctcaactaaagaaagtcagcgaccgtaatacacttattcagaacaggtttagggactctagattcctacatgctagacgcagagcaaaaccctcaatgttccgcttcaagaaactcgtccgtaactctgcttcagaaacagcctcaagattcatgcatgctagatgcagagcaaaacccacctttcttcgagagctctttggaaaggatactggtgaacaagattggactcattttgaacatccgttaggtggtcttgaccgtaactctgaaccacaggtactgaactggactcattttttggttatttccaccctcatgtcaagcactttataggctccttcataacattgctattttcgtttagctgtctagtcgtcttgatgatattcaggtatgttcattgctctcatcactctcttacatgttgcgtgtgttttactaagcatagaatgtcttcatctatgtttttttagatggaagaaacagtagagtccttcaacaccgcactcactgaacaccaatctgaaaatacgaacaaagaggtaaaaatactagttactctgtttagtttcataatagtagttcttcctttggaaatcttaaggaacaatcccccaaagttgtatactttatcgatttactttcaatgtttcacaagtacaaatatgtgtctcactccattctctcatatatgacagtctgaagaagttgaacttgatgtaccagctgttatttctcaacctcttaaggtagtacatcacatatacattgtctttggtacatcaaactatatatgcaaactgatattgaatattccattctgatttttctctaggtttcacctgatgtagttcctgaagcgtctgaaccccc

SEQ ID NO: 168003 - DNA, 837 bp, Arabidopsis thaliana landsberg
gtagtgaacccgaaagtgaaaattgacaataatgctggtaaatacaagcagaggggttcttgtctgaactcagactatctccaaactcgtgtctctggtaatttctctctcattctcattcttttcctttgagtttgactctcatttacattgttgagctatcatttagggttgactctgtgttagctatatgttcaggaattagcaacattgacttggtttttgatagagatcatatatgggttctttgttgttgccaattaaatcgaatgcaaattttcaagagaatctattctgatgttctctctttctcgtttggacagataatggccaagaagatgatttccaaatatccgtggctaagattcctaagatttacataccaagtgtcctcatgtctcaaagtgaatccaaagaaatgaataagcctattagaggagctgacattgaagtaaaaccaaaaaccaaagccagtccaaccctacgtccacgcgctgttgtatcaagtcccggtatgggtttttagctgcttttcatctcaaacgttttcatttcctggactgtttccatgtgctttagctatagtgtcacacaatgttgaactcaaatatgtcaaaaacaatgacttctgcttttgaattttctcttcttttagataatgatgcaatgatcggcaacatgaacatgattgaagaaaggaaagctaagaagggtttgaagagtaaagatcatattaagagtagggcttctcagcttaagaatgttaataccaatgtgaagatttctcatcgtatagtcgctaagctaccgggagtcaattcaagggatcacaaatga

SEQ ID NO: 168004 - DNA, 1099 bp, Arabidopsis thaliana landsberg
atgaattccaatccagtgggtgtatttcgtgagagggaaatcgatggaaaaccatttcacatatacactttatcatctcaaacagacaccaaaatcccttcttcttccggtgaaacagccattgatggcgacgaccacctctctcttcaacaacctcttttcctctgtccttctttacgtcttagggttcacgaggaaaacaattcctatactgaatttctcccgtacaagacttcccctcacttccccagcataggaagcgttgatcaacaagtccagcatttgcttgattccgacagccaacaagtccatgatttgcttcattccgacagcagccatgatgatgatgatgatggtgatgaaatctgtaagctccctgttgtccctatctattggtgtaacagtaaagaaattgagtatgatcaattcaattgcggtgcatgtgaacgatcaaagattggcacagactattatatctgtctcacgtgtgatctaatgttccacaaagaatgcgtggagtctccccttgagatcaaacacccttcctatccttttctttcactcaaactttacaaccgtcccggcaaccgcgtgagttgcatgtgctgtgatttagctctctttagcatgctttatcattgtcccacctacaaacttagtatgcatcctgtttgtgccatgaagccaatacccattttaatagaccacccaaaaaggcatccccaccttctcactttttttcccaaacaagcttccttactttgcgatgtttgtggcctcattaaagaatcttttcccacctatgtttgcgttcggtgtatctttgtagtacatatagattgtatctatttcccctatgtcattaaaatatgtcgtcaccaccatcgtatctcttttacctcttctcttccatccggaaaatggtcgtgcggagtctgtcgtcaaaaggttgacaacaattgtggtgcatacacatgtaacaagtgtagccactattttgttcacccaagatgtgcgttacgggaagacgtgtgggaaaaaaaagatctcgagggagtacctgaagagcctgaaataattctcgggccttgtcagtcaa

SEQ ID NO: 168005 - DNA, 542 bp, Arabidopsis thaliana landsberg; identical to SEQ ID NO: 78678
  unsure (1)..(542): unsure at all n locations

SEQ ID NO: 168006 - DNA, 424 bp, Arabidopsis thaliana landsberg; identical to SEQ ID NO: 15195

SEQ ID NO: 168007 - DNA, 506 bp, Arabidopsis thaliana landsberg
caggagatcataaagatgaaccttttccactttgatcatgggatgttttcttttgtctaatgggcgccgatggtggatccaagatatccgttttacatcactttttgggttcgtgttatcggggttcctttacggaatcggacggttgcgattttaagcgttataaaacattttgaacaactggtttagcggttaaaaattagtgcgtttgagggagcttaatgactggttaacggatttacgttttgggtaggaaaattaagggtttatgtttttggcggaaattacggatttacgtttttggcggaaaattacggatttacgtttttggcgggaaaattacgggtttacttttttggtgaaaatttatgggtttacgtttttggcgaaaaaattaagagtttatattttttgtcgggaaaattacgagtttatgataatgttatcatgatgatagctatcatgactttggtatgttgatctgatgatgatggtggtctctaggg

SEQ ID NO: 168008 - DNA, 691 bp, Arabidopsis thaliana landsberg
  unsure (1)..(691): unsure at all n locations
ctatagagacgcttctcatatccttccatttcatcatcgctcacaccgcaaacgagaaatcaaagcaaatatacattttgaaaaatggctgcgacattcgcataccttatagacgtgaggccttacaaaaatgcatggagagtccaggtcaagattcttcactcttggaagcagtacacaagcaacaccggtgaaaccattgagttggtcatctctgatgaacatgtaagaattactcttatctatgcaaaatttacgttacatatacacaagtactaatatagatttatgttgtctttgtcataagggaaaaaaaatgcatgctaccgggaagaaggagctggtttctaangttgttcacaaacttattgttggcgagtgggttttcattgacatctttggtcttacctatgcgtctggccagtttcgtccaaccaaccatctatacaaaatggcgtttcaggttagaacagaagtcatgggttgtgcttccgtctctgactccaacttcttgactttggcgccattttcaaaaatccaaagtggtgagcttaaccctcacatgttggttggtgacgtttctgattctatattatgcttttgcattattccattcacttgctatcattagattatgaacacagtcatgtttcactgcagatgctattggccaaatcattattgttggtga

SEQ ID NO: 168009 - DNA, 1492 bp, Arabidopsis thaliana landsberg; identical to SEQ ID NO: 5594

SEQ ID NO: 168010 - DNA, 3349 bp, Arabidopsis thaliana landsberg
  unsure (1)..(3349): unsure at all n locations
atgatcacaaacgaacccgtgatcgaccaggcccgtgcaaagactcacataacagaatgggttgggtttgagctaaatagtggagatattagtagtatcatggacccaaaccttcatggagattacgattctcggtctgcatggagagctcttgaactagcaatgtcatgtgcaaatccttcttccacaagacgaccaagtatgtcccaggttgttatcgaactaaaagagtgtcttgtgtctgaaaactcgaggaggaatatgagtagaggcatggaatctcagagttccgctgaagtgaacatcatctttgacactggtatgtttcctatggcgagatagtttgagctgctgcaagtaacgtgtgaagaaatcatactcctctgttttctttggtgatattttgaatgtgtgttgattgactcttggtgtgccatgtcgggaatgtttatggatccaaattcttttttatttaatgggccgagaaaacccaaagtttggcccataacaattctttctgttattttagcaacgttgaaaaattaaataccgttgcgtttaaaacgcgcctctcctgcgactgcgtttccagcactccaaatcgtcaatcgcgttatcaaatcagtgctaatttcgctgccaaagatggccgatttatcgccggagattcgacgcccgctgaaagagatgaggctgaaaattctctcagattcatggccggaaggtaattctcagtttatgatatggctgaaaatcctgtaaaaattgctactttatttctatgggaatggttttagatatctgataatcagcgttgataactgtgagtactcggctttttgattagaagctcttcttgttgatgaagaagtcaaaatctgttttaatgtaaaagatttatccgatagaaacctgaagtcaatgaccactctaaaaagtcaaatctcttgctccttctctatctctctctgtgaacannnnnnnnnnnnnnnnnntggtaaattttgacagcttctttcgaaaacacaagttgcccattttctgtcgaagaaagaaagtacaacagatgcagtcttggacatatcatctatctccttgttttttttaacttatctatttccagactcaggacatcttgccatgtcgccagagacttggcttgacttccttatccggttgggtttatctatttatactctcaaactcggtcattggtaatgttttgatacataagcaattatggaaagtcctcctccgcttttgctactcctatcaggagtttttgccattatttgtcttgttcaagctcaggatcaacaaggtatctgcatcttaattttttacattccatattctttaatgcttttgagtctcaatcatatttgttacatgctttttgattctcacttttgcaaatataatcttaagttcatttctcttgccagggttcatcagtttggattgcgggttacccgttagtgaactgtctccttatatcgagccatcaaccggactacaattctcgtctgatgcaaagttcatccaaactggtcaaattggtaaaattgaggctagtctagagagtgcttacctgacgccatacacgaggctgagatattttccggatgggatacggaactgctatagtctgaatgttgacaaggataggaaacatttgatcagggctaggttcgtttatggaaattacgatggtctcaactcttatccgaaatttgatctgcatctaggtcctaatccgtgggcaacagtaaatttgcaagaggctgtgaatggtacacggaaagaggtcattcacaaaccaacatcaaactcgttgcagatttgtcttgttaagactggggaaactacaccaatgatctcagccttggaaatacggcccatgggagataatgattcttatatcacccagtctggttctctgaatctctactttcgggtatatctaaccgaatcgacaaagtacataaggtaacttcaacttaacattgtcccttgtttttgctctgttttatttttttgggtcagagttcttcaaggagaggactgtttccagacactaaataaaagtgtaagacaagacaaaaacaatgaaaaagaggaatctgataatatttacaatggtccaagaggacaaaaatgatattatccattcttttttactgatttccctgttcaaacgttgtttatctcaccctcaggtacccgaacgatgtctatgatcgtcaatggattgcgttcttttggagggagtggacccagatatcaaccagtagcgatgtgggaacttccaatgactatgaactaccaaaagtcgctctcactactgcggccatacctactaatgccagtgcgccattgacgaatgaatggagttcagtaaaccccgatgaaaagtattacgtatacgcccatttttctgagatccaagagttgcaggcaaatgaaaccagggaatttaacatgttactaaatgggaaacttttttttggccctgtggttcctccaaagctagcaataagtactatcctaagtgtgtcgccgaatacttgtgaagaaggggagtgcaatttacagctgataagaaccaacagatcaactcttccacctctacttaacgcttatgaggtctacaaagttattcagtttccgcagttagaaacaaatgaaaccgacggtatgtgtgtttcaaggttatactaatacgatctatgctttcttatgatagtatggaaagaaatttatcataaactctaaagagtattcaaaacgttttatttattctttctaacatcaccaaaacatttctataacagtttctgctgtgaaaagcatccaagcttcctatgaattgagtagaatcaactggcaaagcgatccatgcgtccctcaacagtttatgtgggatggtttaaactgcagcatcacagatataaccacgccaccaagaatcactactttgtaagccattagttcactagtatacacatcaggatctataagtgatcatgatcatattattgaatatggttttggaaatttcaccagaaacttgtcatcaagtggtttaactggaacgatagcagctgccattcaaaatcttacgacactagaaaagctgtaagtatgtcttgttgctgatcaaatgttacgtgtatgcaaaaaaaaaatgttatgtaatatggtattatattctctcttgttaactttagggacttgtcgaataataacttgaccggagaggtgccagaccctcccagcaacatgaaatcgctgttggtcatgtaagtaaatcgcaaaaacatattttccaaaatgcttttcacattcc

SEQ ID NO: 168011 - DNA, 1005 bp, Arabidopsis thaliana landsberg; identical to SEQ ID NO: 25322

SEQ ID NO: 168012 - DNA, 1272 bp, Arabidopsis thaliana landsberg
gccagatagaaaagatataacgctggggcgggttttttacaacaatgaagctccttgataaaggtgggatgtaaagagggaatagtagagcaagttttttaaaagcatatccagatatggaaggtgaggtttttggcaaaaaagctaatataatgtttgaaaagtttcaaaaagttggacttcagatgaatgaaatcgataaattagtgatagacaaccccgaggtgctattagagaaatctgtaaaaagaattttagaggcgttgaaattcttaaaatgtatcagaatggaaaagcagtttattgttaggtttttactgtgtcacatgaagcttatatgttcatcctcttttctaggacctagagctgtttggaatagattcaaaatcggaagagatgagttatgtcagatcattaaggaagagcctttgagattgttcagtatagcttctaaaactaataaaggtagaattgaacttgattcactggattggaggaatgcagagaagacgacattcttgtggaagttagggtatgtagagaattccgatgagatggtgagggctctgaaaaagttccaagggaggggagatgagctacaggagagatttgattgctttgtgaaggctggtttggactataatgtggttagacagcttgttaagcgggcgcctcatatacttaaccggccgaaagatatcatagaaaagaagatcattatgctaacagattatttagtttatccaatagaatccgtgatagagtccccaacatatttgtgttatagtatgaagagaatacatcagagattcacaatgtacatttggttgagggaaagagatgcagtaataccgaggctgacactaggcactattgtcggtatttctaatacccttattgtgtcatactttgtcaatacccacccggaaggtccagctacttgggaaaatataaagaaagcatctacctgattaactggtccgttcaatgatataacgttatcttcaatctagtgcagatgtctgatgatctataacattttctcattgcttagctcacaaccagtgaaacctggaaattctcagtgcgatggagaggatcacagaatatgtcgatgcatagtgaagtatttccgcctgtgaatttgattgcacctctctactcatcagtatagatatagatgccaacaaacgaacaaggaaggacttcgagaaagctgaaagaacaaaggctctccgtaatgttgaaacgccactgaactcagtgaagtga

SEQ ID NO: 168013 - DNA, 1262 bp, Arabidopsis thaliana landsberg
gatcccgattcatccagatgaccaggagaaaacgactttcacttgcccttatggtacatttgcttatcaaggaatgtcattcggtctttgtaatgctcctgcaacatttcagataggtatgatgtctatcttcacaaacatgattgaggatatcatggaagttttcatggatgatttttcagtttatggatcatcatttgaggattgcttagcgaatcgttgcagagtgttagcaagatgtgaggagaaacatctagttttaaattgggagaaatgtcactttatggtgcaggatgggatagttctcggacacaagatttctgagcatggtatagaagttgatataggtaagattgaggttatgacaagtctttaagcgcctgattatgttaaagtagtaaggagtttccttggtcatgctggttctacagacgattttcatcaaagattttagcaaaatccccagaccattgacagctctactctacaaggaagtccagttcgagtttaaacaagattgtcatgatggcttccagcagataaaacaagctttgatcagcgcaccgatagtacaaccaccatactgggatttgcctttcgaagaaatgtgtgatgcgagtgattttgcagttggagctgttctacggcagaggaaggataagaaagtccacgacatctattatgccagtaggacacttgattacgctcagatgaactatgcaacagtagagaaagagttgttagttgtagtgttcgcttttgaaaaattcagatcttatcttgttggatctaaggtgattttgcatacaaatcatgtagccatgaattatttgatgcaaaagaaggatgctcagccaaggctactaagatggatttagcttcttcaggaatttggcatcgaggtgcgagataagaaaagagttgagaatggtgttgcagatcatttgtcacgaattaggattgaagatgatgttcccatcaatgacttcttgcttgaagaaaatatatacatgattgatacaactaagaaagacgactacaaaattgttgagttgatgaatcaagctgcattgtcgatagataaaaaacattcaaagtgtcaatcgacacctccgttacagttgagaatgagattcgaccatgctcgagggtgtcgaccgataccattcaaagggtcgatcgacacctgactaatcagacgaacgactggattttcacaaagaactgcgctgccacagtagttaaaacgattatcctcttag

SEQ ID NO: 168014 - DNA, 530 bp, Arabidopsis thaliana landsberg
gacgaagatgtacccgcatctgttcgacctgatctgggaagtgtaccgccagagcggctcgaaggattacatcaacgtcgtctgcggtttccgttcgcccggcaccaacgccatgctgaaggcgcgttcgcggaattccggcgtcgccgaaaagagccagcacatgctcggcaaggcgatggacttcttcattcccgatgtgaagctcgcaacgctgcgcgccatcggcatgaagatgcaggtcggcggcgtcggcttctatccgaagtccggttcgcccttcgtgcacatggatgtcggcggcgttcgcgcctggccgcgcatgagccgcgacgagctggtccggcttttcccgaacggcaacaccctgcatatcccggctgacggcacgccgcttccgggctaccagcaggcactcgccgactacaagcgccgcgtcaattccgacacgctcgttgctgccgttggcggcgataaccttgcttcgtccaagaagccgaagacgctgtttgcggcgctgttcggcggtg

SEQ ID NO: 168015 - DNA, 841 bp, Arabidopsis thaliana landsberg
gaaacccgaaatttcattgtccttgtagtgtatgcaagaatgaaaaacacatcatctagaagagttaatagtcatttgtttagtcaaggatttatgcctgattattatgtttggtataagcatggagaagaagtgaatatggatataggaacgagtacttacacggatatgacgtattttagttcgaatcatgaagaagtgagtaatgttgtagaagatccatatgtggatatggtgaacgatgcatttaattttaacgtggggtatgatgataactatcatcatgatgatagttatcagaatgtggaagaaccggtccataaccattcaaataagttctacgacttgttagaaggtacaaataatccattgttcgatggttgtcgtgaagggcagtcgtagttatccttagcatctcgactcttgcaaaacaaggcggagtataatatgagtgaaaagttggtggactccgtttgcgaaatgtttacagattttttaccagaaggaaaccaggctaccacttcacattaccagaccgagaagttgatgcacaatttaggacttccatatcatacgattgatgtttgtcagaacaattgtatgctattttggaaagaagacgaaaaagaagatcaatgtcgattttgtggcgcacaaagatggaagcctaaggacgaccgtcgaagaaccaaagtaccatatagtcatatgtggtatctacctattggagaccggttgaagagaatgtatcagagccataagacagttgcggcaatgcgatggcatgttgagcaccaatcaaaggagggagaaatgaatcatccttcagatgcagcggagt

SEQ ID NO: 168016 - DNA, 1056 bp, Arabidopsis thaliana landsberg
agattaagaatacgagcaagtcacatgtagcgttttatgtttgttttggattcaaaaacgttttgattatggttgttgctgttgttgctgttgtcattggtgtttatctctgctgattatcttggtttctccagtttcaaacaacagtaccaaagagttgcttcatgcgcccggctggtgctattcttgctcccggggaagaaattatcgcaactggtatttgcttctcttgtatatatgtttgctaaggtacattttgagcattggcctcgaggattatgtggtgactgtttgtttctatgtcttgttgaattctttagttttcaagtttgttgagcctcctgagaataatgaaaagccgatggaacaaaagagcggggttaagtttaaaatcatgagcctgaagatgaaagtcccaacagactatatgcctgagctggtatgtgaaacttttagtaactaccagtcataaaagaaaagagaagacaagttttttgttgttggattctaagaagtgtggatgctcttgtgttttgcagtttgaggagcaaaaagataatgtctctgaggagcaagtaatgcgtgtggtattcttggatcccgaaaaccctaactccgtgagtccgtccgcttcttcttctttttctggttcttatcgccatcatttgtgaacttgattgggatcattttacggctttaagcaattctagatatcactgattctttaagctttgttacttctctctttacagatgatggagaaattgaagagtcaattggctgaagcggatgctgcagatgaagcacggaagaaagcatcagagggtattgttggtccaaagccaattggagaagggcttgtgatcgatgaatgggtgagagacgcaatgccattcttttcatgccttactcgtcttttttttatgttttgttttataagacaacaaagaaagtgtgatactgatgtttactgtgtttatcttctgtactaatgaccagaagcaacgccgagagagatatcttgcacaacaacaaggaggagtagactctgcttga

SEQ ID NO: 168017 - DNA, 1451 bp, Arabidopsis thaliana landsberg
  unsure (1)..(1451): unsure at all n locations
agagttcaatgttcagattgaaactgaaagtgacatcttgtgggttacgtgtagttcttgcagtanttgccctcactctagtggacttggagtaagtagctttgtctaagtttttttactgaaataatgggattagcacagacaagtgtaagaggcttatcctttgtctatttcaaattcatttcagatcgaccttcatttctttgatgctcctggttccttgactgctggctctgttacttgttcagatccgatttgttcttcagtttttcagacgacagctgcacaatgttctgagaataaccagtgtggttactcctttcgctatggcgatggaagtgggacttcaggttactacatgactgacaccttctattttgatgcgattttgggagagtctttggttgcaaactcatctgctcccattgttttcgggtgagaactttttctactcaaacactagccatgtttttgcatgtagagtatatggcatattaaagatcttaaactttgtacataattttcttctatttgcaacagctgtagtacctaccaatctggggacttgacaaagtcagacaaagcagtggatggaatctttggtttcggcaagggaaagttgtcagttgtctctcagttgtcatcacgagggattacgccgccagtgttttctcattgcttgaaaggagatggtagtggaggtggtgtctttgtccttggcgagatattggtcccaggaatggtttacagtcctctcgttccatcacagtaagctcactaatccttctttttaatttttcactcttagattgtttctttaactgtattatactggcacaacctgaaactgtgataagtctttgttttagtctaatgtataagcattatatgtagcggaggtggtttgtagttgattgtagctgtgttgtcagctaagtaacaatcgttgagttgattaactagagagctaacaggttaaatagaaagttggcagaaccagctggggcattctgatgtttactaggatttgagatagggacttgggccaggaaccaaagattctctgtattgtgtagttctttagtaaattgaatacaggagttaaccagtttcattcataacaatttattgcctcccgattgagtcaatcttttactgctctaagcctctaactggttctataaaattgttgagtggcatgcgatactgatgaatctgtttatcttttgattacgtactacagacctcactataacttaaatctgctgagcattggcgtgaatggacagatgctgccactcgatgcagcggtgtttgaagcatcaaatacccgtggaactattgttgacacaggaaccactttgacatatctggtgaaagaggcttatgatctttttctcaatgctgtaagttttgtatatcttgtgtgttttgcatgaggttgtgacttt

SEQ ID NO: 168018 - DNA, 488 bp, Arabidopsis thaliana landsberg
atggctgcctttaggacggggacgcgggcggcgacggggatggggcgggtgccgctgccggcaaggcccccttctaaccggttcggccctgtgagatttccacggatgcgccactgacctccgtccatctaccctgtacctatgcgtgtggacatctggagtgacgtcgtctgtccgtggtgctatatcggcaaggcccggttcgagaaggcgctcgccgagtttccgcaccgcgaggaggtcgaggtggtgtaccgctcgttcgagcttgaccccgaccgggaagcgggcccccacgagaccgtgctggccatgctcacccagaagtacggcctgcccgaggcacaggcccggcaggccgaggagcgcgttgcgggcctcgcgcaggctgaggggctcggctacagctccgagcggcccgtgggaaatagcttcgacctgcaccgggtgctccacttcgccaagggcaagggcgtgcagcgggagct

SEQ ID NO: 168019 - DNA, 1526 bp, Arabidopsis thaliana landsberg
aaaaacaggagaagtacactggaaattcgctgggagtgcttactacattgctcctgaagtgttacagggaaaatacggtaaagaagcggacatttggagtgcagggattatattgtacatcctactctgcggcaaacctccctttgtgacaggttcaaacttaaaaagctaacataaatgttcttcttcttggggtttgctttgttatatatacgtatctattgtatgtatattgtagaacctgaggcacagatgttctctgagataaagagtgccaaaatcgacgttgacagcgaatcatggaagtttatagatgtgaaggcaaaacatcttgtcaataggatgcttaacagaaaccccaaggaacgaatctctgctgcagaggttcttggtaagttcgtttctttctcttttcaagattgttctagagccaacacaaatatatatatctggatccaaaagaagcttcaaggatccagaattgtgctcactatgtttgtggagggcttgtttcctcaaaagaaattccattgtttagactatgtgaatattgaaatcttgttcttgttttgactgtaatgctccttgctgtatataggacatccttggatcagaggaggagaagcaccggacaagcctattgatagtgctgttttatctcggatgaagcaattccgagcaatgaataagcttaaaaagctagctctaaaggtaaaaacaaatttctatctagaagtagcattttcttctatattccctgatcattggttctgtttctgatctgttttgcaggttattgcagagagtctctcggaagaggaaattaaaggtcttaaaaccatgtttgcgaatatggatactgacaaaagcggcacaatcacttatgaagaactgaaaaacgggctagctaaacttggctctaaactcactgaagctgaagtgaagcaactcatggaagccgtaagtattgccatcctatttgctctgcttcttatgttacttattattctaacaaaagacttttattttatatatgtttcaggctgatgtagatggtaatggaacaattgactacatcgaatttatctcagcaacgatgcatagatacagatttgatcgagatgaacacgtattcaaagccttccaatacttcgacaaagacaacagcgggtaagtttagtcttttgaggaacaaggtaaatatagacttgacgctactttaagaaacaaatttggatttttcttaacacaggtttatcacaatggatgagttggagtcagccatgaaagagtatggtatgggagatgaagctagcatcaaagaagtcatagcggaagtcgatacagataacgtaagttttgttttccctctacacagcatcaaaaaggttatgaacaagtcttaagccaagattgagattaatgggtctcttttgcaggatggaagaataaactatgaagaattttgtgcgatgatgagaagtggtatcacactgccacaacaagggaaaattcttccagtccaa

SEQ ID NO: 168020 - DNA, 675 bp, Arabidopsis thaliana landsberg
aaaagaacgaagaaggttgtgttatattggctgttacgagtagtgatgaagttccagtggtaaagaacaacgattcttgtgttgtttcgggtgaggaaacgatagaaaagaataaagaaggttctgttatatcggctgttacgagtaatgatgaagttccagtggtaaagaacaacgaatcttgtgttgtttcgggtgatgaaaccatagaaaagaatgaagaaggttcggttatatcggctgttatgagtagtgatgaagtttcagtggtagagaacaacgattcttgtgttgtttttggtggaatcagcggggtaaattcattggtgttaaggaaaaaacttcttgttcttgatcttaatgggttgcttgctgatatagttactcctctcaaggatgttccagcggatattaatattggaagaagagcaagtaagtttctttttgttcattgttatttgtgagaccacattgttacttatattagtttgcatttttttttggttatgacagttttcaagagacctttttgtgatgagtttttgagattctgctttgacaagtttgaagttggtatctggtcatcgagaaaacagtaagacgttactcttattatatataagatcatatcattgttacttccatatctgtgtgaataatcgatataagttttgt

SEQ ID NO: 168021 - DNA, 2511 bp, Arabidopsis thaliana landsberg
atgatcaaaggtaccaccttgctctctacttctactaattgttctgaataaaaacgaatgatatcaaacacataaccaaaacccatccagctagaattgaaatgcaggacgatgcaggagcattacccaaatccttgagttgggaaaccctagtgattgatttgatatctctgtcccacgaaagaagaacgttaccaccgaatagcagtaaaccctagttatcgtagttcgtaaatggtaaagccaagaaaaaaaacctcgcctgcctgtggctctgctacgaagatcaagagcgacgccgcctaagcaacatgtaaatccaggcaaatgtatcatcttcttccactggtcacgactgaccctgcacgagatcactagttgtcggccactatacttctttcgcggagaaacagaaaccgatcataattttcaggcagagagagaaagtgaagtcgaatagggatgaattttttaattaattcttttttgctaaatatgaaaaaaactaattaatgcagaaatattgtttgaccaatactatttttgattgttaaagggttttttaaaagatttagggcttgattggttctccctctgccacccgcaaatgctgcgtttgcgagtggtagcggttggtagcgattggcaccaatagtaattgatttgagaaagtcatttaactttaagatttctttcaataacatttttccttttaaaaaactaattaatcaaaagaaaagaaattaattaatcaaaatgaatgtttcacataaagaagatattcaagttaatatatcctaggattttttgcaaattaacaaatttaaaacaaataatactcatattttaacattttttaaaaaaccccattaataattacttctactaattaatatttaatcaacaacaataaaaatttatactttttgttaaataacaaataatacattctaatataatatggaaaccaaataaaaacctacgcttgccgtgtaccgcgggatgaatcctaatatttatcaatatgtaactaaaaaaaattccaattgtaaaaagtttagtcgtgatttaaaaaaggttcattgaattattttataggcatagaccgataaagtttaagtaaaaaacgataaagttattataaacaaaacaaaaaagtgataaggaaatttccgattttttctcgaaccaaattggagtgaaaaaaggaagaaaaacattactatcaagttctctatataaacaaagaaatagaagcaaagacgtacaaaacaaaagattaaaactcatacaaatttgttctctctttctctttgaacggcaaaacaatggagagtaactatcagagaacactggtctcatctttcctcaatatcgctgtagatcaaaccgtggaaaccgctataaagtgtctaaagtctacaaattggaagcttgaagatgccatcaatctcttatttgccatcgacagaatgagaaataatcaaactttgacactaaaaccttccgactctactagattgccttccttgtctcctcctcctcctcctctaaatctgctttttaagggttcgttcgaagacgcgaaactagcttcttctagcaaagatcgatggttgcttgttcatatccaatccgaaactgagtttccttgtaatacatttaaccgagatttatggtcaaacgaagacgtttctcaagcccttgagtttaggtttatgttatggcaagtttatgatcataccagtgaaggaagaaaaatcactagcttctatatgatccaacactgtgctcctcctgtgctgctccttagtccttatcgatccgattactggccagaatatatgtatatggaggggcgagattaaagctaatggttttcttaatgatttgaagaagtatattgatgctagtcctcacgaacacattgcttctacggcaaggaacatgcgcgtaaaagcagaaaagatttgccactctgatcaacaagacatggttggttttacggacgatgattttgacgattttgatgaggcagctgatgaaaagacttaaatctcatacataaggggaatttgtcatcagatagcgtcgtggtttcttcttgcgggcgagaatttgatgatgtagtgactttatccgaagatgaggaggaaacttgtttgtcaagcgacctgtttgagttcccagttttgacaaaagagcctaaaggagactgtgatcgaagcgttgtctgtagtatcagcgttcgatttccaaatgggagaagaaagcagagaaagtttctcaagagtgaaccggttcagcttctctggtctttctgttattctcacatggatgaatcagataacaaggcgttcaagctagtgcaggcgattcctggtgcttccaagactctggattatggagctgaagcctcgtttgatcaatatgggatctctaatccgatcatctcggttacttgggagtgaaggaaaaaacattttgttcctgctctatatcttcttgaag

SEQ ID NO: 168022 - DNA, 988 bp, Arabidopsis thaliana landsberg
  unsure (1)..(988): unsure at all n locations
ttaattttattgggtcggaaaagagaaaaatctaaagcaaattttcctacattattattacaggnnnnnnnnnnnnnnnnnngtttgttcttcagcgacaatcgtcaaggttagtttttaatatattcaattttaattagcttcagccaaaagatttaaaaatttaatatttttccggggatctttcacaggttgatagttcaagaagaaatgggatattgttagaagctgtacaaattctcacagatttgaatctctccattaaaaaagcttacatttcttctgatggaacatggaacatggatggtaataatatatttaaattcaattatctttctaattacatttatataactttgtttcctaattcgttttcttaattactgcagtttttcatgtcactgacttaaacggaaacaaattgaatgaccagagcgtcttgagatacattgaacaggtaattttaagattcatgaatttgtttcaattcaagaacatagtttctaaatatagaatctttttcttttctgattttcacagtcgatcgagacggtttactatggagaaaacattgaagtaaacggtttaacagctttggagttaaccggaacagaccgaatcggtttactatctgagatgtttgcggttctctctgatctcaactgtgatgtggttgacgctaagctatggacacataacggtagagttgcttctgtgatctatctcaaagattgtatctcaggagctccgattctcgattctcaccggatatcaaagatcgaaggacggttaaagaacgttttgaatggcgataacgatgttaactctgctgcaaagacttgtgttactgtggattcgatgatgcatatcgaacgtagacttcatcagcttatgtttgaagatagagactacgagaggagatctaagaaacatgagagatctccatggtggttgtgacggttcagaattgggctgagaagggttactt

SEQ ID NO: 168023 - DNA, 2904 bp, Arabidopsis thaliana landsberg
  unsure (1)..(2904): unsure at all n locations
acctcatcatccacaacctccccctgttcctctccgacgccgcccgggcctggctagagcatctgcctcccgcgcagatctccaactgggacgacctggtcaagncgtttcgctggaaatttctagggcacggacgtgcgccctgggaactcctgggatctccgaagatgccgccagcagccaggggaatccttgcgagagtacatccgacggttttcaaagcagcgcaccgagctgcccaacatcaccgactcggatgtcatcggggcgttcctcgccggcaccacgtgtcgcgacctggtgagcaaactggggcacaagactcccaccaaggcgagcgagttgatggacattgccaccaagttcgcctctggtcaggagctggtcgaagccatctttcggaaggataagcagactcagggacggcagcaggaagacgtccccgagcgtccgcccagcgtggcacgaagaagaaggctaagaagaaggcgcaagcaaagcgcgagccgtgacgcggatctcgtcgctgctgtcgaacacaagaaccctcgaaagcctcccggagggnnnnnnnnnnnnnnnnnnnngctcaaggagtcgtgcccctatcaccagggtcccgtcaagcacacccttgaggagtgcgtcatgctccggcgttacttccataaggctgggccctcggcagaaggtggcaaggaccaaggcaacaacaagaagggggcgacaaggaagcggagtttccggaggtccacaactgcttcgtgatctatggtgggcaagtagcgaatgcctcggctcgacaccgcaagcaagaatggcaggacgtctgctcggtgaacgtagcgacgccagtctacctagactggtccgacaaacccattaccttcgaccaaggtgaccaccccgactgcgtaccgagcccaggaaggtacccgctcgttgttgatcccgtcatcgacaacatcaggcttaccaaggtcctcatggacagagcagcagcctcaacatcatcttacgccgagaccctcgggcttctgcagatcgatctgtccttgatccaggccggtgcggcgccctttcacgggatcatccccgggaaacgcgtccatcgccttgggcaacttgatctgcccgtctgcttcgggactccctccaacttccgaaaggaaaccctcacgttcgaggtggtcgggttccgaggaacctaccacgcagtgctgaggagaccatgctacaccaagttcatggccgtccccaactacacctacctcaagctcaagatgccgggccccaatggggtcatcaccgtcggctccacgtaccgacacacgtacgaatgcgacgtggagtgcgtggagtacgccgaggtcctcgccgaatccgaggccctcatcgccgacctggagagcctctccaaggaagtgccagatgcgaacgctcacgctggcacattttgagccagctgaggcggttaagtccgtctctctcgaccccagcaatgacgcctccaggcaggtccggatcggctccgagttcgaccccaaataggaagcagtgctcgtcgactttctccgcgcaaacgccgacgtcttcgcgtggagtccctcggacatgcccggcataccgagggatgtcgccgagcactcgctggacatccgagctggagcccgacccgtcaagcagcctctgcgccgattcgacgaggagaagcgcagagccataggcgaggagatccacaagctaatggcggcagggttcatcaaagaggtattccatcccgaatggcttgccaaccctgtgcttgtgagaaagaaaggggggaaatgacggatgtgtgtagactacactggtctgaacaaagcatgtccaaaggttccctaccctctgcctcgcatcgatcagatcgtggattccactgctgggtgtgaaaccctgtctttcctcgatgcctactcagggtatcaccaaatcaggatgaaagagtccgaccagctcgcgacttctttcatcacaccttcggcatgtactgctatgtcaccatgtcgttcggtttgaggaatgcgggcgcgacgtaccagcggtgcatgaaccatgtgttcggcgaacacatcggtcgcacagtcgaggcctacgtcgacgacatcgtagtcaagacaaggaaggcttccgacctcctctccgaccttgaagtgacattccgatgtctcgaggcgaaaggagtcaagctcaatcctgagaagtgtgtcttcggggtgccccggggcatgctcctggggttcatcgtctccgagcgaggcatcgaagccaacccggagaagatcgcagctatcaccagcatggggcccatcaaggacttaaaaggcgtacagagggtcatgggatgcctcgcggccctgagccgcttcatttcacgcctcggcgaaagaggtctgcccctgtaccgccttttaaggaaagccgagtgtttcgtttggacccctgaggccgaggaagccctcggcaacctaaaggcgctccttacaaaggcgccagtcttggtgccgccggcggacggagaaaccctcttggtctacgtcgccgcgaccactcaggtggttagcgccgcgattgtggtcgaaaggcaggaggaagggcatacattgcccgttcagaggccggtttacttcatcagcgaagtgctgtccgagactaagatccgctacccacaagttcaaaagctgctgtatgctgtgatcctgacgaggcggaactacgacactacttcgagtcccatccggtgactgtggtgtcatcttcccctggggagatcatccagtgcgagagctcggcaggatccaaagtggcagtgagatcatgcgaacgattcgttcgcctcgaagccacaagtccaagtgttgcgga

SEQ ID NO: 168024 - DNA, 1563 bp, Arabidopsis thaliana landsberg
  unsure (1)..(1563): unsure at all n locations
actcgagcagttgctgtcctaagagagataggacgagttctcttcgaactgatcgctctcctcgatcatctcccgcagctcgatcaatgggtccccctcctccagtcatcgcatcttcttcttctagatctgggggtgaaaagactggtcggagtgcagatcctcgacaggaagaggctgagccccgagatgccaaccctaagtctaaggccgttctagttcctcaaaccaaatcacttgcaggttagaaattaccatttatcctctttacttgctacatcgtttgattcatcggcctaacttctcatacacgggttcgaatctctttattactttgacagcgatggaaacagagggaaacttcttccaatgcttcaagactcggaaagacacaatcctgccaacctttgacaggtggcgtcctgcaattcgcgagcgattcctacttcacgcccatcactcatctcgggttagttccttttgtccgtaataaaccttttaatctttgtttctttaccctgtcgctaaacccttcttgttattatctgatccaggcgagcagtgagcgcaactgacatgattgagatgtatgaaaggatgctgcttcacagggaaaaagtatgttatggcgtggaaggataagtcttcatcccttgagtccgatctccactcttcaaaggataacagagctgatattggaggatcaattggacaacctctcaaccgaaatcatgaagtccaacggcgaactgcaggagcagtaccaaaggtacgacaagatccaagaagaactctcaacttctcgggacagactttcggaatccgaatccagtgcctacgagttgtccaaccagctatccgagttgcagcttaagtacaaagcggtggcaaactatcgggacgctgagttggcgaggtcggcatcaaaggccaggaaagaggtgaaaggtcgcgggatgaaattgatccaaggggcaattgtcttcatccaaaccgaaaaggctagaacggagctggaatcagacatcaaggagtaggagagtaatctcctccttttggaccaaactcatgaagatgacttttccgaggaacgagagagggacgagttggaagccgatttagcagagaagcgaagtcttttggtcgctcttccttcttcatcattcaaccctcaacagttcgaggaattctttaccgactcacctcctttgagcgagtctggtttagattgggccggtaagttttaaaagcctcaaaattttgaaataaaatcgcaataagttactcttgcgtctttcttgatttgagataattgtttcaggtcccagtgaccccgtggaacccgaggtgtccgttatcccggttgaaactcctgaaatggcagccatcccgccagtaattcccccacccacgaactctgaaacagtggtcatcgaggacgacgatggttcagaatttgggatgcctaccgaacagctcactgccaacgaaccggatcaaactgcaacggctgccgcggacccggtcgatcatgagccannnnnnnnnnnnnnnnnnnnnnnn

SEQ ID NO: 168025 - DNA, 1472 bp, Arabidopsis thaliana landsberg
tatgctgcttgggagaagcttcagaattagattgaagcaacaaaggatttggttagtagggtaagtgctggagcaaattctggtcgagcttcttcagcagaaaaggtattaactagtacttatgaagcagagaatatgtatgaaacttacttgaatttgtgtttatataaacagaaactggagaagcttcaggaagaggagctaatagagaagccatttcagcggaaacaaatgaaaatccggtttccggaatgtggattaagtggaagatctgtagtcactgttaagaatcttgtatttggttttgatgataaggtgagatgatatagttagtcaaatgctgttggtagtacattttattgcttgtgttttgatctgtatttctgatgcaagcagatgttatttaacaaggcgaatctagctatagaaagaggagagaaagtcgctataattggtccaaacgggtgcggaaagagtacattgctgaaacttattatgggtttggagaagcctatgagaggtgaggtgatacttggggagcacaatgtattgccaaactacttcgagcagaatcaggtttgttctatcatgaagaaatggctttttagaggaatcagaaaatacagttttactcatttgtttggctgtaggcagaggctcaagatttggataaaacggtgattgagacagttgttgaagctgctgtagattggagaattgatgatataaaagctcttcttggtcggttcaacttcaaagctgacatgttggatagaaaggtctctcttttgagtggtggtgagaaggtaacataatgtctatcattatcctcaatataatactcatcatgttcttcatcgccttttttcttgcggtcttaggcacgccttgctttctgcaaattcatggtgaaaccatccactctacttgtgttggacgaacccaccaatcacttagacataccttcaaaagaaatgcttgaggtctctaaccatactcttatctgttcaataggccaaactgttcttggaggttgagtatgatctgattctctgtttccttctttcatcaggaagctataaatgagtacaaaggcacggtcatcacagtctcacacgatagatacttcattaaacagattgttaacagagttattgaagtcagagatggtggtttaatggactatgcaggagactacaatgtaatgaaatctctctcaacctagtttcctcttgtaaatagacctttgccaaatttgttcattctaggttgtgttttgaactgttttgaactgtttctcagtatttcctggagaagaatgttgaagctagagcaagggagctggagagggaagcagaattggaagaaaaagctccaaaagtgaaagcaaagtcaaagatgtcaaaggctgagagagaagcacggaagaagcaaaagatgaaagcgtttcaagcttccaaaaagaagtcaaa

SEQ ID NO: 168026 - DNA, 857 bp, Arabidopsis thaliana landsberg
aaagtctccaaaacgcattggagtccatccatcaagatagttcagctagggttgtcatgatcagaagtctggttccaggagttttctgtgcaggtgctgatctgaaggtagttttgtcactttcatatctcccggaatgttcaaatccgatttgctagccatgcttgaaaatttctgttttgttttaatttgcttggatgtcaggagcgtagaactatgagtccatctgaggttcacacatatgtcaactcgttgcgctacatgttctcgttcatagaggtatattctcaaatatccttgtttgttctcatagattagctgctactgtcattcatggaaagattgttgggtaaagttaacggtgaacctaaagtatgcttgacattaatgtatacaatctctcatcaagatttagaatttaatagtcttcaaacggaaagtaaaggggaatgtatagtagttctactgatataaattgtttttaagtacttgtttttttttttctgttcctttattgctatgttaaagttctagattttggatctcagtgagatttgcatgctatagtgactttgaagacttgtgtttctaggcactgagtatcccaactattgctgcaatagaaggtgcagcactgggaggtggactcgaaatggctctagcttgtgatcttcgaatctgtggtatttatatatctggacattttcttattataatctactggcctagataagcagttatggttaatacttggaaattctcaggcaaaaatgcggtatttggcttgcctgaaacaggactcgctatcatccctgggtactatctaataagtttcatcgctctttcaaatatttctc

SEQ ID NO: 168027 - DNA, 1279 bp, Arabidopsis thaliana landsberg
tttttgggttgatgagcttgaaatttccggttgcccaagattttggaagcaaaaaagcaatccaaagtttagttgataaggctggacacaacaatatctttgagtttgttgtaaagaaatcagagctgttgagatatgtgatggcatgttaagaagcacataatggatgtgattggtatctatgagctgcaaagcgtaataattctaagccttattctatacgaactcatataaggattcattcatgctctcgttcaagtaaaactacaggacgaagtaaaaggaaaggcacaccgactatggttgcttcattattggccaaagattatccaggtcaaattgccactccaaatgaatagatcttattcatttggttcaaggaagatttggtgtgcaagtctcttatactaccgcgtgtagagaaaaaagagaagctgcaaatgatattagaggtaacccaaagaaagattttagggttgggcattattatatacatgttacaaaatatgaatcatgattcagtttcgtatgtggaagtggttgaggaaaataagtttaagtactattttttgctttaggtgcttccattgaaagcttccgagctatgaggaaagtcatcattgtggatagaattcatatgaagactgcatatggtggagtcctaattgttgctacggctcatgatcccgatcattgccattatctgattgattttggagtagatggtgggaaaaactacagctggacttggattctcatgaagctcaagtcgattataccggatgatcctgaaaattgtgtttctttgagatagaaaccaatgtctcatcaaggcaatagccgatatctattagttgtcccaccatggacattttgtctaccatttgcctcaaaacgtgaacctgaaggtttatggagtagacaaagcaatttctggaaaaaagtatagggaatgtgctcgagcttatacgggggcggagttcttaaggctttatggagatttttcgagtacatatccttcggcacgtacatatctagatgataatgcggatgtgacaaaatgtggtagatgttattttggaggagaaaaatacaacatagacacaagcaattcggttgagtctataaatggtgttttagagaaagtaaggaactactcgctattacaattgatagatgcaatagtgggaaagatagcggagtggtttgccaaacatagaaaatcttcgggacaaataccaaatggacaatatttggatccgtttgattgaggaaacga

SEQ ID NO: 168028 - DNA, 1191 bp, Arabidopsis thaliana landsberg
gtcagcttatccttcttctgcgggaaaagaaaggatagagagctataattatcatcaatccacaaacaagaacaataaacccgcagaatccgtaaatcacacaaggagaggatcgatgcctgatccaggaggaaggcttctattcgtgagggacgatattcaaagattcgatcttcaagatcttttgagagcttcagctgaagttcttggtagcggaacatttggtgcttcatacaaagcagcgatatctagtggacaaacattggttgtgaagaggtataaacatatgaacaatgtcggaagagatgagtttcatgagcatatgagacggttagggagattaaaacaaacaaatatattgcctctcgttgcttactattaccgtagagaggagaagctcttgatcgctgagttcatgccaaatcgtagcttggcaagccatcttcacggtatgtaacattcaacttttttggtcgattaaaattgtaactttatcagttttgactaaaaaaatgctctgtttcagcgaatcattctgtggatcaaccgggattggattggccaacaaggctaaagattatacaaggagtggctaagggtttaggttacttgttcaacgagctaacaaccctaacaatccctcacggtcatctcaagtcatcgaacgttgtattggacgaatcatttgagccactcctaaccgattatgcactaagaccagtgatgaactcagagcagtctcacaatctaatgatctcttataaatcaccagagtatagcttaaagggacatctaactaaaaagacagatgtttggtgcctgggggtattgatcttggagcttttaacaggtaggtttccggagaattatctaagccaagggtacgatgctaacatgagcctcgtaacttgggtgagcaacatggttaaggagaagaaaacaggtgacgtgtttgacaaggaaatgactgggaagaaaaactgcaaagcagagatgctaaaccttttgaaaatcgggttgagttgttgcgaagaagatgaagaaaggaggatggagatgagagatgctgtggagaagatagagaggttaaaagaaggagagtttgacaatgatttcgcatcgacgacacataatgtctttgcttctcggttgatagacgacgatgactttggtttcgccatgaatcgatga

SEQ ID NO: 168029 - DNA, 2613 bp, Arabidopsis thaliana landsberg
ctgaaattttctaattgaactcgtgaagaatcaatggcgacagagactggtgctaatgcaactgtggaggtgagaagaaccatctcaccttatgacttgacctcggctgacaatcccggagcggtgatctctcatcctcttttgaagggatctaactacgatgaatgggcctgcggcatgaagacggcattgacatcgcggaagaagtttggctttctcgatggatcgattaacaaaccggctgaaggctcacctgacttggaggattggtggacaattcaagccctccttgtatcttggattaagatgaccattgatccgatgttacgttcgaccatctctcacagagacgtggcaaaggatttgtgggactacctgaagaaacgttttgctgtgatcaacggtgctcggattcagcagatcaaagctgaattggcgtgttgcaaacagagaggtattgctattgaggcatattatgcaaaattgactcaaatttgggatagtctcgcaagctatcgtccgatcagaacttgcaagtgtgggttgtgtacttgtgatcttgctacggcacaacagacagatcgtgaagaagacaaggtacatcagtttttgtgtggacttgatgaacaatatcgggcggttcgctcaagccttgttgctcgggttcctgtgcagcctctagaggaggtctataatattgtgagacaagaggaagatcttcgtatcagtggaggagaagaaaaacctgagtgacgtcgtttgctgttcacaccaaaccacgttaccgtgtcgatgacatagagaaaggagcgttgtgtaaattgtgtaaccgcatcggacacaacgcatacacttgctatgctgtcatcgggtatccagagtggtggggtgatagacccaagggtcgtactctacaagggaagggacgtggtggcagtacgtctcgtggtggcaggggacgcggagcctcccaagaggttgctaatcgggtttatgtgccgaatgtggaaatcgtgacaactgaacaagctaatcacgttctcacagacgacgatcgatctggagctcatggactgaatgatacccagtggaaaatgataaaatcaattctcaatgcgggaaaacaaccttcaactgaacaacaaacgggtatgtcttctgtctctccttggattatggatacaggggcttcacatcatttaactggaaggtttgagaccttaacaaatgtgctagaaatgccccctgttttgatcattatggcagacggtagagagcaagtttcttacaaagaaggttctattagtcttggtagtcatttggtaatgaaatctgtttactatgttgaagagttgaaatctgatttgatgtctttggggcagttaatggatgaaaacaagtgtgttgttcagttggctgatcggtttctcgtggtttaggaccgcatttcgaggatggtgattgggtgtggtaaaagagtgggtggtacctttcactttcgtagtacaaagatcgcagcttcagccgcaacaaaggaaatcaagtcatttgagttgtggcataatcggatgggtcatccgtagacgcaagtggtgggaaagcttccgtttgtttctgcttctgtttcttcttctagtttgaataagccttgtgatatttgtcttcgttcaaaacagacaagggatagttttccattgagtatgaataaaagttcaaatttttttgaattaatacatgttgatttatggggtccttatagaactccatctcattctggagcaagatacttcttaactattgttgatgactactccagaggagtgtggctgtatttgttaaccactaaaagtgaagctccagagcagttgaaaaagttttgtgctttaacagagagacaattcaataccaaaataaagaggatccggagtgacaacgggattgagtttctatgcttaactgagtattttctcaccaatggtatcatccatgaaacctcgtgtgtagctactcctcacaaatgcaagagctaaaggaaacatcgccattcttaaatgttgccgggcatgagatttcaagcgtctttacccattgaattttggggtgaatgtgtgctaaccgcagcgtatttgataaaccggactcccagctcagttctcgactttgcaacaccattcgaacgcttatttaacaaagttccaacttatgatcatatcagagttttcggctccctgtgctatgcccatgatcagaataaaagtggtgataaatttgcttcccgaagtaaacgttgtgtttttgtgggttatccgtatgagaaaaaaggctggagattatatgacttagaaaaattggaattttttgtctcaaaagatgttgttttctctgagacacagtttccttttgctccgattaatcacttgcaggcttcagacgaatctaaagctttgtgggctccaatatctgaatttttggaaaatgatgattgtgggcttcgtaagcccaatcctattaggtctgttgcattagggcctgtatcatccagacagctgccgactcccatctcctctgcaaatgatacacgccggtctgaaaattcagacggtgacaacggtg

SEQ ID NO: 168030 - DNA, 975 bp, Arabidopsis thaliana landsberg
catgattacatcttaatggttaaaatatttatcaattgttgattacttgattatattataggctccaaggagattatgatatggagcattaggtacaagatagcattaggagttgcggagggtctagtgtatcttcatagaggatgtcataggagaattatacatagagatatcaaagccgcaaacattcttctcacacatgatttttctcctcaggtatgataaatgatgctcttaaggagaaaacatacacttttaatgtattccttgtaatgaaaatgtttgggggttatagatatgtgactttgggcttgcgaagtggttacctgaaaattggacacaccacattgtttccaaatttgagggcacattccggtgagtctacgctttaagtgtattcttcattgcatattggtttttaccaagggagtctcagagctagatatagtttgcatcttttatttcaggtatcttgctccagagtacttaacacatgggatagtagatgaaaagaccgatgtattcgccttgggtgtacttttactggaacttgttaccggacgacgagctctcgattactccaagcaaagtcttgttctatgggtgagtttagctatattgagtttaagcttttatgttctagagcaaagaaaaccattcccacattttgttcatggttccttttgtttttgtgttcctaggctaaaccattgatgaagaagaacaaaattagagagctaatcgatccatctctggcgggtgagtacgaatggaggcagataaaacttgtgcttttggctgctgcgttatcaatccaacaatcatcgatagagaggcctgaaatgagtcaggtacataactaactttcttgtttaacaagtaaacaaaccacgcctttattttgatatcttttgtcttaattaggttgttgagatcctcaaaggcaacttgaaagatctcaaatgcatcatgaaa

SEQ ID NO: 168031 - DNA, 710 bp, Arabidopsis thaliana landsberg
gaagttatcactctgtttttgctgaattactatttttcttcgtcttaaaagctatggtatgtactctcgaagacattagctgaaaacgcagcgtggaaatttgcgaaagagaacgacttacagctggtttcgataaatccagctatggtgattggtcctctcttacagccaacgctaaacactagtgctggtgcagtactaagcttgatcaaaggtaaagaaaaaatacataagcattgatttgattcaaagacttacctaatattaaacattggcttacattttcaggagcacaaacgtttcctaatgcgacgttcgggtgggttaacgttaaagatgtagcgaacgctcatattcaagcgtttgagaatccagatgctgatgggagatactgtttagtggagagagttgctcattactctgaagttgttaacattttgcatgatctttaccctgattttcaactccctgacaagttagtgtttctttttagtgtctcttttttgtctttctagaaattgataactaaaagaatctttgaaaataatcaaattaaaatttgttgtaggtgtgcagatgaaaagatatatattccaacatataaagtgtctaaacagaaagcagagtctcttggggttgagtttgtgccattggaagttagcattaaagagactgtagagagcttgagagataaagggttcatcagattt

SEQ ID NO: 168032 - DNA, 841 bp, Arabidopsis thaliana landsberg
gatgggcctgagttcatggcagaggatgcaaaagttttcaaatacccatttccttacttatatgatgaggtatctttttgtctattcaatgcttttttcagggttgttagttgattatactcatattcggatcttcttgtgacattttctctcttgcctcagtcacaagaggttgcaagagaatttggagctgtttgtacacctgagtttttcttgtataagaaggtaatttgtgatcatatattttgacagcagataagtcagttgcagtgtctactttttgggtattctatgaattttgttctgctaaagcatgtaaagattaactcacaaagttgtatttgaaatatagtattatggatatatgcttaagatagccatttgttggattgggagtagataaatcatgaattcctttataagctcaaacatttaatacttcttatagaaaatcgcgtcttgttttgtttatcaactctatctcaagcttctctcgcctgtcaaatggagcaggatggccgtagaccatttgagctggtctatcatggtcaatttgatgattcccggcctagcactaactcaccagtaaccgggagcttcgttgttactgcttttaacatatgtcagagaagtcttaaagtaaaacctagggggttatatatgtgcgtgcgggtctaatcctggggattgatctttcccttagctgtcaaccaataccatcaaatcaaaagccaaggtacactgaaatctgatacatttttcttctattctatagcctttgatgaccaactgatatcctgcatttggtatcttaagtgttggttgcagcataaagtggcac

SEQ ID NO: 168033 - DNA, 828 bp, Arabidopsis thaliana landsberg
atgggacaaaaactcggcgttgactctagacaaaaaatcagacaagttctcggttcctcatccaaggtgcaaaaacacgacgtggaatctatcggtggaggcgggggagagatcgtacccggtcattcgccgtttgatgacttgccggaggattgcatctccaacataatctcttttacaagtccacgggacgtgtgcgtctccgcttcagtttcaaaatccttcgcacatgcggtccagtgtgatagtatatgggagaagtttcttccgtcggagtatgaatccctgattcctccgtggcgagttttctcatcgaagaaggacctctatttcactctttgctacgatcctgttctagttgaggatggcaaaaaggtatttatatttgtccatttatcagttttacactttgtttctacattttgagaataatgacctatctcttgccttcaagtgggaaactatctattcagattgatcgtttgagattttttttctttctttttgaaaataaaagagcttttggttagagacggcaagtgggaaaaagtgtgtactgttagctgcaaaggaactttggatcacaggagggaataatcctgagtattggcaatggattgaactttgtgaatctaggtatttattacttaaattcgattgtaatgactcctttttattatataaaaaaacactgagcataactaaatcgaaatgcttgaacttgaaacgaaccgaaatttagttgtaaatcaattggctttattgtttcaaaatataaataaaattttaagacaatacattactataatgacgaattgacgatcaatc

SEQ ID NO: 168034 - DNA, 477 bp, Arabidopsis thaliana landsberg
atgcttacccgcaacctggcgagcatggatgtggaagaagcgatccgtggcaacccggtggatgccgtggtgctgctgactggctgcgacaagaccacccctgcgttgctgatgggcgccgccagctgcgacgtaccagccatcgtggtcaccggcgggccgatgctcaatggcaagcacaaaggcaaggacatcggcgctgggaccatcgtctggcagatgcacgaggcctacaaagccggccagatcgacctcaacgagtttctttcggccgaagccggcatgtcgcgctcggcgggcacctgcaacaccatgggtaccgcctcgaccatggcctgcatggccgaagcactgggcacttcgctgccccacaacgctgccataccggcggtggatgcacgcccctacgccctggcgcacttgtcgggcatgcggaaagtcgaaatggtccacgaagacctgcgcctttcgaaaatc

SEQ ID NO: 168035 - DNA, 2805 bp, Arabidopsis thaliana landsberg
  unsure (1)..(2805): unsure at all n locations
agagcgcgcaaattttgaatttattaatttatttcaattatttttccttagttgaatcaccacccaaagtaataatattcatcgtcatgttcgagaagaacggaagaacactgttggcgaagaggaaaacccaagggacaatcaaaaccagagcatcgaagaagattcggaagatggaagggacattggagcgtcactctctgcttcaattcggtcaattgtcgaagatttcttccgaaaatcgtccgtcgtcgaatgttgcttcatcggcgtttcagggtctcctggattcggattcttcggagctccgaaatcagttgggttccgctgattcagatgccaattgcggagagaaggactttattcttagccaagacttcttctggtaaatcttcgttaactctggcatttcttagctgtgtatatctaattcgagatctatcgttatcttctaggtagttgatttttgggattagttagtattacgatttcaagatctgactttagatttgagatggtttcccttatattcactttttaaaaatgaaagctaaacttatgtctagctaaaagatgcttgtgagatgttgatgaatgatggtctcagctactaataatttcttctctggttaatttttccagcacacctgactatataaccccggacaatcagaacttgatgagcggcttagatatcagcaaggtaaaattgttgatttggatgtttatttcaccaatgtctcaaatttaaagttcttctctttattgtttttgtaggatcattctccatgtcctaggtctcctgttaaactaaatacagttaaaagcaaaagatgtcgccagggtaagctttctttggattcagattttgtgtttattatgagtaaaaagaagattttcggatgagaagaaaatatacgtttcagtttttgtggtacaattgttatcattatagttatgtttgatctcctgttttaacaactgtccaatattgaattctttattgctttaagattcacactagtagtatctagtgatttcatgttttggtgacagtgtgttctttgcttaattttttcattactcagttttttttgttttttttgtgtttgatgcagagagtttcacaggaaatcattcaaattctacctggtcttcaaaacatagagtagatgaacaagagaatgatgatattgacacagatgaggtgatgggggataaactccaagctaatcaaacagagaggactggatacgtttcacaagctgcagttgctctgcggtgtcgggctatgccacccccttgcctcaagaatccgtatgtgttgaatcagtctgagactgctactgacccttttggacatcagagatcaaaatgtgcaagtaagtttgttgtccctaaaattcttgctcaagaatttcctgaaggctttaaaaatcaataaggcttggtttcttcagtaaaactgtactaaatatactgttatgtaggttttctccctgtaagtacaagtggggatggcttgtcaagatatctcacggactttcatgaaatccaggtaagcgaaagggtcttttagcttggaattgtgatcatgacggaattatgttgcttcttcttacgtattttggtttggtttctccagcaaattggtgctggacatttcagtcgggtatttaaggtgttgaagagaatggacggttgcctatatgctgtgaaacacagcacaagaaagttgtatctagattcagagaggtataattttctctagttttcttagtaagagaaagacacatatctgctgaaaatagttcatcttgtttggatcgtttttgttcaagtaatcacagctgattttttgcagacgtaaagctatgatggaagtnnnnnnnnnnnnnnnnnnnnnnnngtacagtcccttctttggccttcttgttctcaaactattctgttattccctgtttgcaagctaagctcagtgtagccttaaaccgtttttatcttgttttgttcgtagggtttcatgaaaatatagtaggatattactcctcgtggtttgaaaatgagcaattatacattcaactggaactctgcgatcacagcttgtcagctttgcctaagaaatcttctcttaaagtctcagaaagagagatcttggtgattatgcatcaggtaaacactggcttcattttcatataaaatcaagtatagagatattattgattctttgaattcttatatacataccattgtaccatgtctcttacagatagcaaaggcattacattttgtgcatgagaaaggaatagctcatttagatgtaaaacctgacaatatttacattaagaacggtgtttgcaagcttggtgactttggttgtgccacacgattggacaaaagcttaccagtagaagaaggagatgcacgttacatgcctcaagaaattctaaatgaagactacgaacaccttgataaagtcgatatcttctctttaggtgtgacggtttatgagctgattaagggatctcctcttacagaatcaagaaaccagtcgctcaatatcaaagaaggaaaacttcctctccttcctggccattcgttgcagttacaacaacttcttaaggtatgttatttgcattcttacttgtgtgttgtcatggctgtcccacgcattggaacatagcatttaagacagaaattctgacatgtttcttgaaacagacaatgatggatcgtgatccgaagcgtcggccttctgctagagaattactggaccatcccatgtttgataggattcgaggttga

SEQ ID NO: 168036 - DNA, 562 bp, Arabidopsis thaliana landsberg
taaagaacaaatttaacttccagacaaagtcattctataaggcaaagtagagatgttattccctggagcaaactggtttggtgcatctgacggatctcggcatcgatgttgtgctccagaggctatccctttaaaggacaggttttaaatcagatagcagctaaatttctgagagcgacgaaagatattgttcctaactggctcctctctgttccggatcccaatgtgagcatcgggatgaaatgcattgcttttccagtggaaatggttatcagaggttatctggcggggcatgcctggagggaatatcattccgggaaaagaatattatgtggtgtagctttacctgaaggattgaaagaaaatgacaaactaccctccccgattattacccctaccaccaaagcgtccgaaggacatgatgaggatatttcgaaagaagatattcttgctaaagggcttataacaaaagaggattatgaaaaaatcgaaccatataccagagcgctttttcagaagaaaacaaaaatggcagatgaaagaggtttgatactggtggatc

SEQ ID NO: 168037 - DNA, 468 bp, Arabidopsis thaliana landsberg
atggaatcgtttcatcctctttcactgttgaaaccgtctattagatgatggtgtattcgtggtagagttgtgaggacattcttagtttcgctggttccatcttcaaaggttatgggtttgattctcgccgacgaacatgtaagtattgactgttttgtaatgataattctaggtttgcatgttttagaattttgattagtatgtttgatccgtagggtatgactattgaagctactgttgggtataagatgtcggatcactataaagattttattaatgaaggagaatgggtaacgataacaaattttggagttgttgagatctcgggttctgtcagggcaacaactcatagcttcaaaattggattttctgttgacactgtcgtcagattaacaagtccggtacacgctattcctcactatcgtctagcattcttctctttgattattgatgatgaaatcgataatc

SEQ ID NO: 168038 - DNA, 507 bp, Arabidopsis thaliana landsberg
cgttcaggtggcctgaggtcgtactcgcgggtcagtttgtcgaccagcgcttcagccttggcacgggcggcatcgcggccgagggaatgtttgcgttcgacgctgatctgggtcatgcgggtgttcctgaagatgaagacataatgggcattatgcccgcccctgcccacaggcacaccccgccaagacaaatccgcccgttcgccctagaatggcggtaattttttccggtgaagcgatatgaacgaccagcgcaaaggcgaccacgccgaacccaccacccatttcggttaccaggacgtccctgaaagccagaaggcgaagaaagtcgccgaggtgttccactcggtagcggccaagtacgacctgatgaacgacgtgctttccggcggcatgcaccgcctgtggaagcgcttcaccatcgagctgtcgggcgtacgcgccggcaaccgtgtactaaacatcaccggcggtaccggcgacctggccgccaagttctcgcggctg

SEQ ID NO: 168039 - DNA, 1170 bp, Arabidopsis thaliana landsberg
atgtctcagttatttctcattcgctgcttcattctaactcatttctttgccatagccacttctctaaacgatcaaggtcttgctcttctttcctttaaacaatccatacaaaaccagagtgactctgtttttaccaattggaactcttcagattcaaacccttgttcttggcaaggtgttacatgtaattatgatatgagagttgtctcgattcgtcttcctaataaacgtctttcgggttctcttgatccatccattggaagtctcttgtcccttcgtcacattaacctaagagacaatgactttcaagggaagttacctgtggaactctttggacttaaagggcttcaaagcttggtgctttctggaaattctttttccgggtttgtcccagaagagattggtagcttgaagagtctaatgactctggatctttcggagaattctttcaacggttcgatttctttgtcgcttattccatgcaagaagctgaaaacgcttgttcttagcaagaacagtttctctggagatcttccaacagggttaggttctaacttggttcatcttcggacactgaatctttctttcaatcgcttgactggaacgatccccgaagatgtaggaagtctggagaatctgaaaggtacacttgatctttctcataacttcttctcaggtatgattccaacaagtcttggaaatctccctgagcttctctatgtcgatctttcttacaataatctcagtggtccgataccaaaattcaacgttctgttgaatgccggtccaaatgctttccaagggaaccctttcctctgtggattaccgataaagatttcttgcagcacaagaaacacacaagtagttccttctcaactatatacaagaagagccaaccatcattctagactctgcatcatccttacagccactggaggcacagtcgccggaatcatttttcttgcttcattattcatctactatctccgaaaagcatcggctcgtgcaaacaaagatcaaaacaaccgaacatgtcatataaacgagaaactgaagaagacgacaaagccagagtttctctgtttcaagactgggaattcagaatctgaaacgctagatgagaacaaaaatcaacaaggtttcatgccaatggacccggaaatcgaattt

SEQ ID NO: 168040 - DNA, 1078 bp, Arabidopsis thaliana landsberg
gttatataagttgactttagttttgtttatgtacagagggccagaagctgaaatgggtataaactcagctgcaagagtaacatattccttattcttttcataccatctaaatgattcttcttatttaagtttatgactcttattttctcagatttttttgcagagtgttaacagaaaatcacatcgtaagtgtgtgtttgttgattggtctgagactgatgaaaatgttggtgagggtcgtattctttcttcagatcctgatgatatagtgaatgactgtcgtctaggccctacggacctgaaagtgttagttgaaactgcatatcaaccagatgcatttctatggagaccttcacacaagatctttaatttgaaagaagctgttggacatataatcgcatggccagctgataagtgtaaacttctagacccagacatccaaattgaagacattgcacctttggtaattaaaatttgttgcactgtgttatcaatgtatttcccctgtgtatcatgctgattatttgtattggatttgtttactgattgtgtttgatagggtctaaaaggaaacaaatgtaaactattggatttgaagaatgctgaagtcattgttgcagaggggcgttgggagactcaagaaccaagtgcattggttaatggacttcctcttggaccaaaagcagttaaagtatttgtggattcagtaaagcagcctgatacatcactatggagacctacagctgaaatgtcatatcttgaggactgtttgatggcttttgtagcctggcccctgagcaaagttgattttgaaaatccctcatctccaaccggtcataattctacatcagaagtttctaggtctgcatcaaaggctaagtctgcagccatagcttcgaagtctgcagacgggtccaaaacttcagcaacagcttcaaaggctgcgtcagagtccaaatctgcagctatgtcttctaagtctgcatctggttctgaatctcctattgatgatgcaacaggtccaagttctccaataaggaatactttaccagcacagtctcctctcaggaagtctcca

SEQ ID NO: 168041 - DNA, 1459 bp, Arabidopsis thaliana landsberg
atgcaaaaggatataagaattgataagtgcgcccaaagaaatatctagaaagagaagaatcattgaaaagaagttgtattaagattattctcactaatgaagactagggataaatgcaatatagctttccgtggaagcaacaaagagtttggcaagaatatcaatgggaatttccttagcttagctgaaatatttggagatttatccagtgatcaaggagcacatcatctgtatcaaagagaaggaaaaaaattaaatatcattttctcagccacaagattcagactgaattgatagcaatgttgggatcagaagttaagtttcagattaagaagattcaagaggcaacacatttttcagttattctggactgtagtcctgatgttagtcagaaggagcaaatgtcccttatcattcgatgtgtggatgtttctacggattcaactcaggtatcataatatttcattcactttttggaagttgttgataaagtaggaaaagggttgtttgatcaactttgtgatacattggtgtatcttaacttggatattgatgatgtgtgagactgtgaggacaaggctatgatattaatggctcaaatatgaacggacaaaataaaggagtacaaaaaagaatgcttgttgttaatgtacgagcgttatatacgcaatgtggttgccataatctgaatttggctatttgtgatatggctaaatcatctacaaaagcgattgggttttttcggatcattcagagttcatattatttatttttgccttctacaacaaggagtgttatatacaagaatatggtaggaagtccaacacttaaacttttttcagatactcgttgggaaagtcatcccaaaagcgttaaagctatagatttctaagctccaaaaatttgtgatgcttttttttcttggttgataacactgatgatcctaaattgcagagagatgtggtgtgtcttgtgataagtaaaacttatggaatagaaggatatgagtttctatttggtattgttatatggtatgagattttggttgccgtgaatatggtgagcaagactttgcaaagtgaagatatagatattgttgcaacaattactcaactaaaagggttagtctctttctttcaaaagtatagagaaacaggttttgaagtagcaaaagttgaagtcacaaaaattgatgttgttatggatatcaaactcattttccatgtggaaaggaagcgcgtaaataaaagaagaacctattctgatgaagagcaaagacaagttgatgatgaaactgtaattctgagcgactaggagaagtttagaatcgagtatttcatcaaaatcatggatcaaactctagtttctcttaaaacaaggtcagaccaattttaagagtatgaaaaaacttttgcttttttgtttgatctaagaaaattgaactcaataaacgatgaga

SEQ ID NO: 168042 - DNA, 1706 bp, Arabidopsis thaliana landsberg
attggtctgctaattttgctgttggtctcatctccaaaaatcaaggtaaagatctcaaacctgatgaccctccacaggacaaaaagctcatggctttatgggcaccattcttgctcttacatcttggtggaccagacactatcacagctttcgcccttgaagataacgctctctggctccgacatgtctttgggcttgtctttcaggcaattgctggtgtctatgtggttctccaatctctccccaatagcctttgggtgattatagtcttagtgttcgtttctgggactattaagtatctggagaggacacggctttgtatagtgcgagtttggacaagtttagggattctatgattcaagcaccagatccaggaccaaactacgccaagctcatggaggagtacgaggccaagaaagaggcaagacttcccaccaagatcgttctgattgatgagcctgacaaggagcataggcctaagaagttagagcatccatcattagcttcgaagaacagagaagagttgacccatcttgagattgctcagtatgcttacaaattcttcaacacattcaagggccttgtagtcaaccttatcttcagcttcagggagcgtgacgagagcctagagatctttgagaatttaaatgatccagaggaagctttgaggatcattgagattgagctcggctttctctatgatgctctattcaccaagatcgcgattcttcataccggtattggaactgtctcacgggtctttgcttctggtacccttgtggctgcattcatcatttttcataagaaacctaacaaaggcacagattttcatggagctgatgtcgtggttacttatacgctgtttgcagttggcctagttttggatttcatatccatccttttgttcctgttctcagactggacatgtgctgcatacagtagtttgaaggacgatccggatgagcttcaatcatggcaagagagatgttttaactggttacttgaattcagaaagctgcgttggacgccgcaagagtgccacaagactggtatgcataagtgtaccaaagaaggtttgaaaccgtgtatcatgaaaggtgctgataagaaggaaggtggcaataagaatgaaggtggcaataagaaggaaggtgacgaaaagaaggaagctgctgataagtgttcattggtagataagcatgacgttctcacaacgcgtttcttccttcggaggtggagtggaagcatcaacgtttttaactttatagcgtacgccacaaaagcagatgtagagaggatccacgacgccagaggtagtttccgccgctactcatggaagatcataacttttccattcaaaaaactcaacttcgtcataaagaaaatttttggatcgattgtcaagtttatcaatgaagtgcacagacggatcagccacgaagtcaatgcgttatcaagaaagcatctttgggctcgtcgttttctttaccctatctatttcgagttcatatcccgcatccctcacttcatcaaatcagtgtgggatatcctcagtgagttctttgacatctcggatacgcttgatatggtccacaagacactatttgtacatggagagcccatgacgagagaattgtggaagttcatcttcgaagagcatagaaacaaatcaaagtatggagacagtcctgaaaatgccaagagga

SEQ ID NO: 168043 - DNA, 2021 bp, Arabidopsis thaliana landsberg
atggatgatagctgtgccgtctgcgctgacaatctcgaatgggttgcctatggatcttgtggtcaccgagaggtttgctccacatgcgtcgttcgtctccgattcgtcctcgacgatcctcgctgctgtatctgcaagaccgagtctcctatcgtttttgtcaccaaggtgatcacgttttcttaatcactgtttgctcttcaattgcatcaaatagataattcagctagaattttgtaattgcccttctattacaattacataatagtgatgaagttttgaactttatctatcttagctcctttatgtcccccaatgaatgcatatataagggatttcgtgtaaattttttgtcaggcattgggtgattatacaaggacgatcaatgatttctccaccttcccatcagcaccaagggaaggtcgagtaggagctttctggtatcatgaagacactcaggctttctttgatgacttggatcagtacaggatgatcaaagctatgtgtagactttcttgcggtgtttgtgataagacggaagataaacctagagaaggaggaccaagacatcatcgtcagcggattaagagcgtcgaacagttgaagggtcatttatatcataagcacaaattgcatatgtgtggtttatgtctagaagggcgaaaggttggagcttcatatctgcagcttatttgttattatcttctcggaaaatttgcacatttgtttacatctgtgtgtgtgtgtgtctctctctctctgtggacagatattcatatgtgaacaaaagttgtatactagggcacaactgaaccaacacatacagactggtgactctgaagttgatggaagtgagagtgaaaggggaggcttcgcaggacatcctatgtgtgaattctgtaggaatcctttctatggtgataatgaattgtatactcacatgtctacagagcattacacctgtcatctatgccaaaggtaatgccaatttatattatgaattcttactgttgagagtatgtaacctgaatgacttcattgattttaatatccaatataggtcacagccagggcaatatgaatattacaaaaactatgatgacttagaggtaacatcaacaactttcattacagcacaggttaaattgtggctgcatctgttctgattctacatgttcatgcaacagattcatttccgtagagaccatttcctctgtgaagacgactcctgccttgctaagaagttcacagttttccagaatgaatcagagttgaaagtaaacacttttaaagaatttctcctgtatctttttttttagtttgactccatagacttttgttgaggatttctattcttttttcagaggcataacgctattgagcatggaggtaaaatgtctcggtctcagcgaagtgctgcattacaggtatgtaacacctcttgcatgttgtcattgttaatttatggtccagtttgattgcctgtgtttaacaattggattcaactccagataccgacaagtttccgatacagtcgtggaaatgatcaagagaatcgtcgaggaagaccccgatcatttcgtcgcgagcctggtgatgaagaatataatcttgcagttcatgccgctcttcgtttatctgagtctgagtattctcggcaagagcctgctcctccaccctcaagtgcaccacccggattctctgaaaacaacaacatacacgtggatgatactgatccccttattcagccaatggaatctctatcaactacagatatggaaccctcttcacggtatcttcaagctgtaggaagctttggtggtggtggttcacgtcttggagaatctgcttttcctcctctttctgggcaacagagttctggacagaacgtagagagtttaccaactaacaccatggctgctcgtctaagacgccaaacaaatcgaacttctactgcttccgctattgctagtccttctcaaggatggccagtgattaatcgagggccaggacaagcatct

SEQ ID NO: 168044 - DNA, 2088 bp, Arabidopsis thaliana landsberg
agggcctacttataaggacagacaaggtttcggtggggccggttagagccggtaataaaaccaccgggtttcaaaacgagttaagtccgcgggaagtctttggacctacatatttaccggaacagtcgttacatggtcaaaaacaaaacgttaaaattttcaagaattgacaaaataataattatatacgacaaatatggaaacaaaatatctttctttgaaatcttactgatgtaaatttttgggacctcgttttaagagactttaatgccaaaattattgtttgtttatagtatttctttctgtgttgattagagacgttttccatttttatttctatcttatcttaaaaaaatgatttgattttttttgttttcattagtcatttgaggattcaatttcaagagagatgcaaaatccagctgcatctgtaattaaaggagatgaatttcacaacttctttttatgaatctactacacaagctaagactagaactccagacacaaatcgaaaatgttaaatagaaattaacgcagaagactgttcaattttcctattgtgttcttttatggtgaagtgccgttttgaatgtaaccagaacgtacctgtacggattgaccggagctggagagcagagaagcggcggcaaatacagaagaaagcaaagaaaaagaaaaagtaaacttgtgtgcaagaatttatatgggtaaagttagggtttgttaataggcttgtactctaacattacccaataattagattattaataggttccgttaaattagattccattagccttgaaccgatcggtttaatacggttttcgatttttatgtatccacttctggttaaggacaatgaccatggcggaaactggagatcgaagacagaactgtggaattgaaactgaacagcgaaggaggagccgcttgaagaagaacggggaatgggtcgactctcatgggccagtccgattcagagattccgtttcttctcttacttatctcaggttctcttcgtctctaatgtttctcaacaattcttagcttgagtataagaaagaaagatttgatttttcagatgaagaaactaggacaacaatccaaccaaaataaagttatctcctttagagtagcattgatgatttgcccaagctcctgactaaacgaatgtctcttgtgtttactcttatcttgctttgtagctgaatggaagaagaagcgttttggcttgctctggctaagattcgattttgtgaagttacagtttgattctgacttgcttttgttcttcactccattagctttttatttatctaaaaaggacttgcttgtaccaggttattgcgcttatcttgatgcagagaatgccatggatccttctctagcagaatcaataggtgtgaacacagaagagcttctgatatcacgacctgattctgttgaaaatatgctaaatattgttgatgtgctgaccaagagtgggtcagtagacgtaattgtggtagacagtgtgagttctcattctttcatctcaatatgttcatatattctttctgcatctgttaatattaaaagtggaatctacaggttgctgctcttgcccctcaatgtgaacttgatgctcctgtaggagaaagatacagagacacacaatcaagaataatgacacaggcgctcagaaaaatccattactcagttggctattctcagacactgatcgtttttcttaatcaggtaaaggaaatatcacggtttactttcttttgctcacttagttggatcgtattgacccacctaccaaagataatatctctctgcttatttacctgatccaggtcagatcacatgtgaaatctaacatgcatttcccgcacgccgaagaagtgacttgtggaggaaacgcattaccgtttcatgcagctatacgtctcaaaatgataagaaccgggctaataaagactgacaataaggtatagttaggcacattgttaccattgtacgtgttactgtaagcttgatttgccttaatctctaaaataatgcataatttctgcgaagggcagtaacatctttattatcatttga

SEQ ID NO: 168045 - DNA, 473 bp, Arabidopsis thaliana landsberg
tatatatatatatacaggccaacggttatacaaatatacgagaagaaatcagtggagggagttcaaattgctcctcatttagtgctgttgattcaatgtagtttgtgggttttgtatggtctccctgttgttcacaaggacagtattctcgtcaccactagtaatagtattggtttcgttaacgaagtaatctttgtggttgtcttttggatctgctgtgaagacgaatcacgtgtaggtccatcttttatacttagatatgtctaattctgcatattgattttgatgatgttgatgttgatgtgcagaagagaaatgttaatctatgtcttctggctgtgtttgattttgtgacatcgttctatgtgattactatttgggcaattcaaagtttatccgccaagtatacactcattgggattgtttgcaacattttcaacatttgtatctatgtttcatttgccaaggtaaag

SEQ ID NO: 168046 - DNA, 854 bp, Arabidopsis thaliana landsberg; identical to SEQ ID NO: 58271

SEQ ID NO: 168047 - DNA, 495 bp, Arabidopsis thaliana landsberg
  unsure (1)..(495): unsure at all n locations
tgggattatccatttgaaatcatgtgtgatnnnnnnnnnnnnnnnnnnngagctgttctaggccagaaaatagacaagaagcttcatgtcatatattacgccagccgaacgttggatgacgctcagggaagatatgcaacaactgagaaggagcttctagctgttgtattcgcatttgagaagttcagaagctatttggttggatcaaaggtaactgtctacacagaccatgcagctttgaggcatctgtatgccaagaaggatactaaaccaagactgttaagatggatacttttattgcaagagtttgacatggagatagtagataagaaaggcattgaaaatggcgcagcggaccatctgtcgaggatgagaattgaagaaccacttccgatagacgattcaatgccagaagaacagctcatggttgtagagttcttcggaaaaagctacagtgggaaagagttccaccaactgagtgctgggaaggagaat

SEQ ID NO: 168048 - DNA, 1966 bp, Arabidopsis thaliana landsberg
atggtaagctatctccagatcataatcagccaccagctccatccatcgcctctgcctcaggttcagctctggctgaatgaacacctgcactttcccgccataaagataagacctccaaatcttcaaggcaaagattaccgcagccatctccaaatcgtgagtaggatagttgccctcatacttcctcaactcccgtgatgcataagcaataacctccccacgctgcatcagaacacaacccaaacttactctcgaggcatcagtatacaccatgtaaggctctccatgctctggcaatgctaacactggtgtactcgtcaacatctccttcacgctcacgaaaccctcctcgcactttcaaatcccttgaagaagttatccggcgaagattctcgatggttgttaacgacgtgtttgttgagatttcatactcggctgatgacgttttggtgaggctcaatggtcaggaaacagctccgacggaaatcaaagatgattggtctttcagaatgttcaagtctcttctaaggtctgacagttctgtgaatctttttgtcacctttaagagactggtagacgataagcttgagttcctagatccccttgaaattgctgttccgccttacaacagaggcttcccactgatacaaggtgataacattgtgaagcattgcaaccctttattgttggtgttccagataaaacgagcgtacaccatgaaaatgggtttgacgtacaccaagaacttgaacattctgttcgagaaccaaatccagtttcagacatcagtagcccagctggagatgtccgagacctggtcatttgggatggtactgttgataactcactaatagctcacattgaagaaattgaagctcagttaaaagatgaaaatccacaagaagacgttgttgatgatagtgaaagcaatgatgattctaatgagttcagtgaagaagacgatgatccagactatcaatctggatcgaaagaggatgaggatgatgacgtctggactgagacagttttagacgagaatgtggcgttgaacaacgatgatttcacagatccccctctaagcaaggtacataactatacttatcttcttcgtgaaatggatgattttgttaaccctcctctgttggtagacaaccctcttctgtctcctgtccaagttaagaggagaaaagtctcactaaaagagttgtcctccaatcagaagaaaggacaggcggcagccttaaagagagggataacattgtgtgaaatatatggctttgaagacattgaaccaatgttcattgacagtgactcacccgatttcagaggtcataacattgatctttctaaagaagacaatgttatgtttaaaggaagggtttttgaaaccaaggacgagttcaaagtggcactgtctatttatgcaatcaatcaaatttttcagtttagtttgtgagatacatcaagtgttatcttgtagcacaatgtgttgacaagaaatgaaactggcgggtgtacgcgcataagttggtgatatcgatgagtacgaggttaggaaagtggagcttgagcatgtatgtgatgtggaaacccgaggtcaatttaccaaatacaccacttctaagataatcactgctttattacggtcgaagtatgtcaatgtcacaactggtcctagagcgagagatctaccccaagctgttttagacgagcataatgtgacagcttcttattggaaatgctggaaagcgaaggaattggcaaaatcttctactcaagggacagaggagacttcttacttacttttgcccctatatttgtatttattgcaacttgcaaatccagggacaatttaccatttagagacagaagatgatgatgtcggagatgaaaggtttaagtatgccaatgtttcactgggtgcaagtatatagggtctgaaattcatttggcgtgtagttgttgt

SEQ ID NO: 168049 - DNA, 361 bp, Arabidopsis thaliana landsberg
aaataaatatcactacatggaaaatgctttgttcgagactgaatggatgctatcaaacaacaagaggagattcaggcccaaaaggaaaggcttctcagatccctccatagccatcaaagaaaccttcttcctcttctatatttgacaaaattatatacaaataaacttattataacaaaaactaaatgactaaaaataacttattataacaaaactttttttttccaatcaataaactaaaatgaaagcacaagaaccatgtttttgtgatttcattaagaacccagtttttaataaatacgttacatccctgtaagctcgcgcaatcttagaattttgtggtattccttatcatacttgt

SEQ ID NO: 168050 - DNA, 657 bp, Arabidopsis thaliana landsberg; identical to SEQ ID NO: 43150

SEQ ID NO: 168051 - DNA, 4775 bp, Arabidopsis thaliana landsberg
atcataaaagcgtaagaattgcatccttgttagaagacacaaagccaaagacttatatggactttggctacaccatgaaagctttgagaagcaagaagaaggttggttagtgttttggagtcgaatatgacttgatgtcatgtgtatgattgagtataacaacttaaaccgcaacccgatcttaaaagcctaagtagtgtatccttgttagaagacacaaagccaaagactcatatggagtttggctacaccatgaaagctttgagaagcaagaataaggctggttagtgttttggagtcgaatatgattgatgtcatgtgtatgattgagtataacaacttaaaccgcagccggatcttaaaggcgtaagtgatacaaaggttttctgtgtcaattccctaaatgcatcttatgtcattgcagcatttaaggtgtcaatccaaatgggtgtaattgctatcaatcaggatatgatcagagaatactaagtcaagccaagtgtgaataagtttggtgtgtttctactaaacctaagcaacaggttaacatgcaaatcaaataacaagaacataaagtaaaccaagcactaggtaaagcactcggtcgagcaatcgagtaagcaggtcgagtacaatactaaaaacaccaattttgcacgaaacgaacagagtactaaaaacacgagttttgcacaaataaacgaaacagagctcttaagaatggggtaattggtcttagtggactcctcaatccattagctaactaacaaactcaatcaagctatccctagacaatagattcaaaaccaaatcaagccacttccgcatgaatgattctcataactttagaacttcctaatctcaacttccgttgatgaaacataataaagcaggctttaaacaccaatctattaaagtcaataagcagtctaatcatccaattccttgggctagaatctacaaatctctgaaattagttggttcagacatttcatcaaacatcttttggatggagaaagtctgaaatcaattttcaattgatcagaaagaaaatagcattaagaactcctaaaacagaagggaatcatgcatataaacacttagctagctaaagaagagaggaatccacctaaacctaacccatcctcaagaactctgaagaacactactcaagaacaatgaagaacatcatagaacaaaacccagaaaattcataaaactcagaaatcattataaacttagcaaaagatagatctcaatgagataaacaagtttgcagaagaaatcaaatccaaattctcaacagaacaaccagaaaatgcaaaagaaaatcaaagaaccctaaaaaccagcggacaaaaacgatcatcctctgggcaaaaacataagaggtctatttataggccatcctaggttgccctaattgggaataagacaaaaaagataagtcggcgcaggagcgctcggccctaggccgagtagaaaagccgagtggcttggtcttggtcacacagctcggctctaggccgagtggcttggtcgagtagcttctcttcatccttaagtgcacaactcggcctccagccgagtgccttggtcgagtaggctccttgttcttcacgtgtgctccactcggcctccagccgagtacataggccgagtatacttcaaatccttccttaggtcccccgaactcgagtctgtccatcccttgtgctagaaacctccaagttgagtccaaaagtacctaattcatctgcaaaacactccaaatgcaagtatgctatgcaatgcaatgcaaaatgtgcaaaagaaggaaaagagactaagaatgcataaaaagagacttgaaactaagctaaatgcatgaaaaacaagggcttaaaaaggttaaaatctagtgttatcagaaagctttgagaagtaagaagaaggttggttagtgttttggagtctaatatgacttgatgtcatgtgtatgattgagtataagaacttaaaccgcaaccggatcttaaagttgtaagaattgtatccaagttagaagacacaaagccaaagactcatatgcactttggctacaccatgaaagatttgagaagtaagaagaaggttgtttagtgttttggagtcaaatatgacttgatgtcattgataataggtttttcagtcaattatcccaaaacaccaatcatgtcgttgtagtattttaggttgtcaatccaaatgggtgtgatgctaacaatcaagatgtgatcagaagtcactaagtcaagccaagcaataacaggttttggtgtgttctagcaatcctaagtgaacaagcaggaaacagaaaataaaacagaaacagtaaaacactcgaccaatacagctctttgtagagccctgggtgaggtcgagtgacaggtcgagtaacagacagaaaatgaaacaaagatactcgactgcacagtctgttgccagacaactgggtgggcgagtatcaggtcgtgtaatagtaaagaattgcagaaactaaacaataggtgacaggatgcagtaaacaacagtaaagtaaacaataaaatcaatcagataaagaattcccgaggatggggtaattgagtagtttcgtttcctcagtttacagggattgacatgctcaataacttatccctagacaacaagttcattaaccaaatctaagtgccaccgcaacagagaccctcaagttaaactagtcccagactcaatcactgatctaattatactaaatcaacagtcactttaaaaaaaactacaagcttctccttctcccacgtatgcttaagtctaaaattttgtacttttacattcgtaaaccaattcactaccttttactattattattcaatagaattttttttgacaaaaaatcaataaacttttaccacttttttagcaaccgcttcttccacgatcttaagatctccgaattcacttcccccacaccatgtatatctcggaatcaattaatacagtttcttccattcgctttcttcaaatcaacatcccttcttcaaaaaaaaaattgttacttttacagaatcgttttctctaatctaaaacccgatctctatccgtcaatttaatccacacaattcgttaaatccaacctcccaccactctggtcgtcttctttctcctctcataaggtaatttcaaatacccaaatcataaaatttgattgtatttctctcggttttgattcttatttatttagttgcaggtaccaatatcattgtttgcaacatgaaatttgatgtacgcacttcgtttcagattcatccctttcagacgcaaatgtgttccttggtacgtgttgtcaccatccatgtatattttttcaaaattaaacatctttttatattcttatgatttttgtcctgttcgcaatgctctatgtaaattgttgaatgttcaaggattaattgttataatggtaggtctgatgaattgatttttttcttaacattttttccaaaacctacaaaccttgcatcgtttctctttttttttttctagaaaaatcgtcaacaaagctcttcattagttttgacatttctgagaacgccaacgagatttaggagaggaacgatattctgtttttgagataaaagagatataccaaaggagcggtgctggaaataagtattattcacattgttttacacattggagatctcacttatcccaatgggtatctctccccgtgggatcagttcacagctaagtccagcccattgcttctactgtcccctacatgatcgccaggttagtcaacaagaaaatctacaacattgtgcttctactctctactcttgcagtgctttaagttatccttttcttcactgcagtggcaaccatgagcgtgattggccagacactggatctttttatgccggtacagactccggaggagagtgtggtgttcctgcagagaccatgttctactttcctgctgagaacagagctaaattctggtaaagttagttaaaccattgacattttcttgcaagtttcagaacggtatcttacaaatttcggttgaatgggcaggtacaaaacagattatggaatgtttcgcttctgtgtagcagacagtgaacacgattggagagaaggcacggagcaatacaaattcattgagaattgtcttgccactgttgatagaaagactcagccttggctcatttttatagctcatcgtgtccttggttattccaccaatgattggtatggcaaagaaggaacctttgaagagcctatgggaagagaaagcctacaaaaactgtggcagaagtacaaagtagaccttgctttctacggccatgtccataactatgagcgaacctgccccatttacgaggtttgatcccatcctaaattgctcggttttcgtctcatggatgtagctcttttcttaccctttttttcttctattgcagagccaatgtgtgaacaatgataaggatcactactcagggacctttaaaggaaccatccatgttgttgttggtggtgcaggaagtcacttgtctccctttagctcacttgtacccaaatggagtttggtcagagactacgactttgggtttgtgaagttgactgcttccgatcactcatcactgctctttgagtacaagaagagcagcactggccaagtgtatgactccttcaacatctctagagattacagagatgttttggcttgcactcacgatagctgcgagcccaccacatcagctggatga

SEQ ID NO: 168052 - DNA, 688 bp, Arabidopsis thaliana landsberg
atggagcgtgagacttcgtcatcttcaactcctccggaggatcttgttacatcgatgatcggaaagttcgtcgctgtcatgtctaacaacgacatacgatacgaaggcgttattagccttctcaatctgcaagattcgaaattaggtctccaaaacggtaacaattcgattccaaaccctctccaagatctactgtttatgattttcttcttttcaagttcttcatatttgtttctttggtcgttgttagaatatttccgtgaaaactatacgtttcatatatataaaacagtatcatgtgatagattaaggcctcaaatttatgtatgcagtcgttagggtttatggaagagaggttgagaatgataatgagcaacgagtgttccaggttcttaaagaagttcacagtcacatggtatttagaggaagtgacattaaggttagttttcgttaattttttgggttcaagattcctcgctagtcttcttcctagttagttgcttgctgcacaagaaacacttttgttgaagcttaaactggttattttaattgcaccaatagcagataacgaagcacacgttactgggtttagatttcgaggttagttagtttacggtttgaggagtcgttattgataaaccacttacttggttacttgctatataagataagctttttttattataag

SEQ ID NO: 168053 - DNA, 961 bp, Arabidopsis thaliana landsberg
actttttttgtctcaatgtgcctgaagataaattgactggaaaattatcttgtccaggtgcactacaagtttgaactgatggaggaaactctttatctcacaatcaatgtcatcgacagattccttgcggttcatcaaatcgtgaggaaaaagcttcagcttgttggtgttactgctttgttgcttgcatgtaaatatgaagaagtttcagttccagtggtagatgatctcatcttgatctctgacaaagcttactctagaagagaagtgctagatatggtgaatacacaactttctcttgatcattaactaccatatgatgatgcttcatagttgaatttacctgtttttggtttctattgcaggagaagctaatggccaacaccttgcaattcaatttctctctaccaactccatatgttttcatgaaacgatttctcaaagctgcccaatctgacaagaaggtatatatctccctaactaaataagcttgaatcattatgtccggaaaccatcaggcctaatatctaaatcggtgtggtatatgcaattgtggtttcagcttgagattttatcattctttatgatcgagctttgccttgtggagtatgagatgctagagtatcttccatctaagctggcggcctcagcaatctacactgctcagtgtacacttaagggatttgaagaatggagcaaaacctgtgagtttcacacaggctacaacgaagaacagctactgtaagaacatacattgatttttttgaaaaccccatgacatgagattttggtatcctgacagtgggtttttgtgtttgattctagggcatgtgcgagaaagatggttgctttccatcacaaggcaggaacagggaagctcacaggagttcacaggaagtacaacacatctaagttctgtcatgctgcaagaactgaaccagctgggtttctgatttaatat

SEQ ID NO: 168054 - DNA, 1404 bp, Arabidopsis thaliana landsberg
atggatcccaattcatccaattcatcgagatctggcttaccagttcagatcccaaacgatgacgttacggacgggggacctcccaacggatctccctcccggagcccaggttgctgctatccataacactgacacggagaacatctcccaaaactcgaattcttctggatctgaccaaatcactccccctccgcaaacaaggggcggagaacgaaacgtcacgatacagcctccaaacggagataacccggccaacccatctaatcaggtccctccgcgacctgccagcgaattggccgagctccacgcaatgatcatgaacttgatcaacttaaccaaaaaccaagaaatcgcgcatcgcaacctcgccgcaattgtgggtcagcagagatgcgattccactcgcatggcacattaggtagagcgcgatccgcgggtaaggaggttccccctcgcgaaactgggatttctgcccaggtccccatagatctgacaggtaccgtctccccggccgatcctactccgagaactcgtctggatttcgcctcgatagacgtctcacctcatatcaaccggcaggtcgcctttttacaggcacctgtgaacgctctcatcgaaaacctgacaacaggaaacgaaacaagcacaacgcctgccttcccaaggctaccggtcccacctttactaccaatggggtgttcgccccctaggtacacgtggactagaaaccaaacaaccgcgtccagctcctgcgttcccgggaactcaacgcatcaatcgaacctccattgctaatctaccatccgttccctggataccaggaagtgacctctttaacggtccaaccgatcctggagcaccaatcgattcgcgtaacgtcttggatatggaaacattccgcaattacgcagctcaatccaaatgccaaaacggatcaaatgcattcacgagtgcatctagcagtgagcgatcctcccgacatagatcgagtgatcgaagaaaccaggcgtaccccattcacggataggattacccattatcgcatcagagacgtcgagagattccgtttcccaggatacgacggaacgagcgacccaaaggctcatctgagagccttccgtctggctataacctgagcgtacctgaaggacgaagaaaacgaagcaggtcattgctgtttcttcgcagagaacctcgtaggtcacaccctcgaatggtttgctagtctatagataccttcgaccagcttgccgccgctttcttaaaaaagtactcggtactcatcgtaaacaggacgtctgaagccgttctctggtgtcacccaactttcaaaacgaatccctgcgatcttacgtcgaaaaattcaaagcagtcaaatcaaagattgcgaacctaaacgaggag

SEQ ID NO: 168055 - DNA, 464 bp, Arabidopsis thaliana landsberg
atgacaggcgttgtttgttattatagatgtttgtggcaagcactctcatggggtgcccatgggtagtgcgatcaaggaacgggcgacagtgatctgccgtcaggacgacaagatccttttcgtgcgcaaggcccggcgcaaatggaacctgcccggcggccgtatcgaggccgacgaggcgccgcgccaggcggcccagcgcgaactggccgaagagaccggtctgcaggtggaggccatggcctacctcgccccgctggagctgtaccagaccctccactatgtgttcgaaacggtcctgccagagccgcataacccccggccgcagaacgagatcgccgactgccgctggttctccctggaagaactggccaagcgcaacgttaacaaagccatccggcgcctgctgaaggactaccgcaacccgcaggcgcatcaggcatccagcgccctgaggcctttcg

SEQ ID NO: 168056 - DNA, 3183 bp, Arabidopsis thaliana landsberg; identical to SEQ ID NO: 17727

SEQ ID NO: 168057 - DNA, 1941 bp, Arabidopsis thaliana landsberg; identical to SEQ ID NO: 21114

SEQ ID NO: 168058 - DNA, 473 bp, Arabidopsis thaliana landsberg
ataaccatgaaaagtttctcatttcttgcagttttatctatcttggcaataactctttcattaagcaaggcttcggacccaagctctcttcaggacttttgcgttggtgtcaacaccccagcagatggtggtatgtatatgttcactccaatactccataatcatttaaatgtaatcggtagttaggaaaagtcattacgttcttacactctttttatttggttataacgttcagtttttgtgaacggaaagttctgcaaggacccgaagctcgtcacagtagaggacttctttcttacagggctccacgaggcaagaccacctaatccaaaaactgggtctaacgtaacagccgtcaatgttaacaacctaccagggttaaacactcttggaatctcacttgtccgtatcgactatggagtttacggacagaaccacctcacacccacccacgtgcctccgaggtcttgtat

SEQ ID NO: 168059 - DNA, 657 bp, Arabidopsis thaliana landsberg; identical to SEQ ID NO: 59216

SEQ ID NO: 168060 - DNA, 2155 bp, Arabidopsis thaliana landsberg; identical to SEQ ID NO: 18623

SEQ ID NO: 168061 - DNA, 737 bp, Arabidopsis thaliana landsberg
cgaatctgtacataacaagttcaagtcctcaaagtgcatacaaggtttacttgaatcaattccaaaaagacttcatgaggtgtctaaggttacgttctgaagaaattgtctctaatggacgtatggttctcaccttcatcggaagaaacactcttaacgatccattgtatagagattgttgtcacttttggacattgctatcaaactctctccgtgacctagtctttgaggtatatcaaatcaacttattcatttcttttgtaaaactttttaaatatgggacattcatggtcttcgacatagattaacatttttatatattttactcaaaatataagaccaaacatatatattattgtggaacatggtactcattgctatcttcatataaacagggtcttgtgagtgagtcaaagctggacgcattcaacatgccgttttatgatccgaacgtacaagaactcaaagaagtgatacaaaaagagggctcttttgaaatcaatgaattggagtcacatggatttgatcttggtcactactacgaagaagatgactttgaagcaggacgcaatgaagctaatggcataagagctgttagtgaaccaatgctcattgctcattttggagaagaaattatcgataccttgttcgataagtatgcataccatgtgactcaacatgccaactgcaggaacaaaacgactgtcagtcttgtcgtttccttgactaagaagtaa

SEQ ID NO: 168062 - DNA, 607 bp, Arabidopsis thaliana landsberg
  unsure (1)..(607): unsure at all n locations
gggctggggttttccggccctgccgacggtgctgaaccgcttgtccgtcgncaacaccaatctgcccatcgcgatcggactgatcgtgatgatgtacccgccgctggccaaggtgcgttacgaggaactgccgaaggtgttccgcgaccgccgcctgctgggtctgtcgctggtgcagaactggctggtcggaccgctgctgatgttcggcctggcggtgctgtttttgcatgatgaaccgggcctcatggctggtgtcatcctgatcggcctggcgcgctgcatcgccatggtgctggtgtggaacgagctggccggcggcgacaaccagtacgtggcggggctggtggcgttcaatgcgctgttccagctggtcacgtttggcgcgttggcatggttgttcctgggcatgctgccaccgttgttcggattgccgggactggcggtggacgtgccgttcgcgacgatcgccggcgcggtgctggtgtatctgggcattccgttcgtggccggttggctggcccgccgggtcctgatccgtctcaagggcgaaaactggtatgaacagcgttatctgccgcgtgtggcgccgtggaggtttgtcgcg

SEQ ID NO: 168063 - DNA, 735 bp, Arabidopsis thaliana landsberg
gacaaagtgtcaaagaaaaaaagatcagtctcccacttcaaagcctgtctaatgaaaatgcccaagcagacagtgaagaagatgatgacgatgtccagtggcaaacagatacttccagggaggctgctgagaaacgtatgaaagaacagctcagcgcggtaacagctgaaatggtgatgctgtctacagttgaagaaaaaaagccagtagctgaggtgaagaaggcaccagaacaagtgcatgagaatggcaatagcaagatccctgaaaatgctcatgaaaagcttgtgaatgagataaaggagcttctgagcagtggttcatctcctacccaactcaaaacagccctagcttcaaactcagcaaacccccaggagaaaatggacgccttattctctgccctctttggaggcacagaaaagggaatcgcaaaagaggtgatcaagaagaagaaatatctcttggccttgatgatgatgcaagaagaagcaggagctcctgcgcagatgggtgtgcttaatggaattgaatccttttgcatgaaggcaagcgcagaggctgccaaagaagttgctcttgttatcaaaggtctttacgatgaagacattttggatgaggatgtgattgttgaatggtacaataaaggtgtcaaaagctccccggttttgaagaacgtgactccgttcatcgagtggctccagaatgctgagtctgagtccgaggaagagtgatgct

SEQ ID NO: 168064 - DNA, 1815 bp, Arabidopsis thaliana landsberg
atgtttaggatagatttgcatgcatgttgcatatttgcgttgatttcaggtgatttggagctgttgacgagctatctggaagaagcggacctgatcatgacaaaaccactcgacccagaggtcgagtaggagcttcaagatctcaagagaccactcgacccccaggtcgagtagaagacatcacaacttcacctgaccactcgaccactcgacccccaggtcgagtagaagacatcacaacttcacctcaccactcgaccacgaggtcgagcgtcttcatctccatcacctgaccatcactcgatcacatcactcgaccacgaggtcgagtgtcttcaccttcattgccagaccactacacgacctcatcactctacctggaagtcgagtatcaccatcaccaccactcgactgcatagttactacctggcaacagactgtgcagtcgagtatcgctggtatactttctatctggtactcgacctatcactcaaataccatagttattgaaaataaaacttcaagttcttcatggatggttccatgttcatgtaggtacttacaaataccatagttattgtgtttatgcctgggattttactttggtggagatagattctatagaagaggggagaatagtattcaatatttttgagatatgctataattttggttaatttacaaatcaaaatttataattatattcagggagattttacaagattatataaagaccttacaagattttgaaaaactaatcatagaaattatacaaaactctttagtaatcatttaaaatctttgatttatctactttctatattttttaaaagtcattaaaagtctttcaaaatcacaaaccaataacaccccctaattgtcgaattttttgtcaaaagtcaaattgaagagagatgttagaaataaattagaaaacttggggttttgttcaaaaacaaaggggttttagtaataaaactcttcaactaaagataaattgcaagaaaacctctcgattatatatttagtggaaaaaccctcaacttcaaatatgttaatgaaaattctcttgtctacagtgtcgttaaaaatggacgccctatagttcaaattaaaacgtaatattttcagaatctctcttaatcaacttttaacaccacataaacttgagagaatatcattatgataaattagggttcatgaatttatagttttcactttgtgaaatttagagctaatgtttgaggatttataatcggatagaagaacatattgttgactattcgtgttgtttaagtgtatatatgtctgttttctgtgttcctcaaatactttcactctgttctcttgtttgaatgtttgtggattaggattatttagagcttgcacctgcacaaattgcaacaaactgttagtctcactctctctcatttctgagatagtgtccttattccttatggatagacttgaaagctctttttatggcatttatcttcatatatacaagtaggaaagtgataaaggtattttaggcccagacgtataaataaaactagggtgttttgtgagagaaattaaagaatttgaaaggctttgtcacacctttaagtaaagggacatatagatcaagaagagaagctgaatgatagaaaaaaacaggaggaaggaaacaagcttgactatgagaaaaagctgtaacaatctgttgtaaaataatttgtctaatttcttggcaaatggctcttcaggccttaaaagccagcatggtttaagcattctctaagttccgccatttgcaggtcaggttatgtcctt

SEQ ID NO: 168065 - DNA, 453 bp, Arabidopsis thaliana landsberg
  unsure (1)..(453): unsure at all n locations
gtcatcacccctgacgacaagccgatctggctgtgcctgcgtcaggaggctggcgatgcgatcgccgaagaacccggcctggcctcgatgctgcactccactatcctgtcccatgacgatctggccagcgccctgtcgtacnnnnnnnnnnnnnnnnnnnnnnnngataccctgcgcggcatgaccttgcgtgaactggtaaccaaggcctatgccggcgatccgtcgctggtcgaatatgcccaggctgatttgcaggccgtctacgaacgcgacccggccgccaagggctatctgcaaacnnnnnnnnnnnnnnnnnncttcctgtccctgcaaatccatcgcgtggcccaccgcctgtggaaggacggccgccagaccatggcgcatttcctccagagccgggtgtccgaactgttccagatcgacatcnnnnnnnnnnnnnnnnnnnnn

SEQ ID NO: 168066 - DNA, 792 bp, Arabidopsis thaliana landsberg
ttcaaaagaaatggattacactgtttcctctctacaatgcttcttcttagttttatgtctctctcttttggtttgctctaactctgaaactagttacaagtcaaacaagaaacctatattgataaacttcggcgactctaactccgacaccggaggagttcttgctggagttggacttcctatcggactccctcatggcattaccttcttccatagaggcactggtcgtctcggtgacggtcgactcatcgttgacttctactgtgagtcccaattctttctcttttttttcaacaagagtttcaattctttaaatatatgttttatgtacatgtaatgttatatatttgattaaaccttttgatatatgatcaggtgaacatttaaagatgacatatttgagtccatatttggattcactttcaccaaatttcaaaagaggagtcaatttcgcagtctcgggcgccaccgctcttccgatcttttccttccctcttgccattcaaattcgtcaattcgtccatttcaaaaaccgttctcaagaacttatctcttccggtaattacttttgtcccaaacaatttatacatatctcgtcttaattacttacagaagatgcgtccttgttgataggtagaagtcaccttattgatgagaatggatttaatcacgcgttggacatgacagctattggacaaggcgatctttcacttgctctatatggtccgaatttagcctatgcccccgctgtggaaaaaattcctcccatccttcatgagatgaagaaagccg

SEQ ID NO: 168067 - DNA, 1331 bp, Arabidopsis thaliana landsberg; identical to SEQ ID NO: 15193
  unsure (1)..(1331): unsure at all n locations

SEQ ID NO: 168068 - DNA, 682 bp, Arabidopsis thaliana landsberg
gagtccattgtgttaaaatcttatggtttatctttgtttcaaattacagcaatgtgcttcgcttatgatgatttctaagacatatcaaagaaacggactttggggtttttcatattgctttccttgctaactatgaagcgtgagatgaaagcacctactactccactagagagtctccaaggtgacctcaaaggaaaacaagggtacgcttacatctctcttccttttcttctattgggtttcaatgttgaagttggattgcttttggcaccaaattttgcattcaactagacattctcaggttaataatgatgcaagctctttgtgacattttcataggaggacatctggccctgctagacgatctaccaaaggacaatggacacctgaagaggtgcgttccgttcctgtgtcttttttgttgtctatctgattcttccatgcttcatattatgtatcctggaacactgcctgagcttaatcagttgtctctgtaacaccctattgttgcttcgcacagttccatttaactagttgacattagctatcctttgcatctattgaagaattcgtctctatgaagttttctgttgtatcaattctgtttttctggatcaggacgaagtcttgtgtaaagctgttgagcgttttcaaggaaagaactggaagaagataggtaaat

SEQ ID NO: 168069 - DNA, 557 bp, Arabidopsis thaliana landsberg; identical to SEQ ID NO: 56496
  unsure (1)..(557): unsure at all n locations

SEQ ID NO: 168070 - DNA, 2130 bp, Arabidopsis thaliana landsberg
cttctcaatggttaagcaaaggaattggttattccacaaaggggtatcagacagggtgatcctctatccccttatctattcaccatctgtagcgaagtcctttctggtttgtgcaataaagctcaggtaaatggcagcttaccgggtataagagtctccaaaggcagtccccgagtaaaccacttcctctttgctgatgacaccatgttcttctgtcgctcggatccaaaaagctgcaagaaacttcaagagatcattcacaagtatgagagtgcatcgggtcagaaaataaaccaagacaagtcctctattactttctcttcaaaaacccaagaggaagtaaaggttcaagcaaagcatatcttatctatccaaaaagagggaggacagggtaaataccttggattacctgaactctttgggaggaagaagaaggatctcttcagctaaatagttgacagaatcaaacagaaagctctcagctggtcttcaaggttcctctcatctgcgggtaaactcacaatgttgaaatcagtactagctgctatgcccacatacaccatgacatgctttcatctacccgctcttactcgcttttggtgggatggaaatacagagaaaaagaaaatgagttggatctcttggaaaagaatgacaaaatccttcaagactggaggacttggttttagagacatccgtacctttaataaggcccttcttgcaaagattagttggcgtctgatcacaaagccctctagccttctagccaaggttctattagggaaatactgcaagttctctcctctcctcaactgctcggtgtcgaactccgcttcacatggatggcgcacgatttgcttagggcgggatctcctaaaaactcaactgggcagacttattggcactgggataaccacaccgatttggagaaccccttggatatctttatcatcacctctctctccaatagtccccccacagagaacactcaaaacatgactgtctcagacctcctattaccaaatttctgcgattggaacaaggatctcattagaaccattctcccacaatacgagtaagaaattctaactctgaaaccaagcaaactaggtgcagcggattgttgggcgtggctaccaataaaggatggaatctatactgcaaaatcaggctatcatgggacttacccgattgattatcccaacgatgtagctctcaatggcctctcaacggatggatttgagtggaatagcaacatctggtcactcaaaagttcacccaaaacaaaactcctgctctggaaagctgctcaaaatgctcttcctgttgggctcaatctcctccaccgtcaggttagtgatgatatcaaatgtccacattacggaagtgagtaatctgtgttgcatctcttcttttcctgcccattcgcaaaaaaagatctgggaattggttccttttaagtcgcatctttaatctggataatatctactccactaaagaaggaatcaaaagctctaaaaatcttacatgtcttcctcccacggggattggagaaggaccgctagccccttggatattctggaccttatggacttctagaaatcacctaatcttcagcaaaaagcagaccacaatggaggaggccctgcaacttgcacttatcagagccaaagaatggcaatcagcccaatccctgcatccgcaaacccaatctgcaacccaacttacccgccaaatcaatcagacatcttctacttctctctctgggaaatgtttttcagatgcctcttggaagataggtggattggctggaattggatggatctttaaagactcgcaggacgtcactctccaggaaggctcagccccaatttctttcgccggatcgccactgatcgccgaagctatggcaactctcgcagctgttggagttgcactggaatcggattacaaaaacttgttcttcgcttcagactcgatgattctagtcaaagtcctcaatttgaagatccaacagaaggaacttcacgggattctacatgatatcctgcatctatatttaaatttcaatgtctgctcctttaatttcatttctagatctctcaatcaccaagcagatctgtgacaaaa

SEQ ID NO: 168071 - DNA, 732 bp, Arabidopsis thaliana landsberg
atggcagcaatgatcacctttgactttcaaaacagcttcatcttcatcctcttttttctcttctctctcctttgttactctctcttcttcaggaaaccaaagggctcacgagctggccgtgatcttcctccgagccctccttcttttcctgtaattggtcatcttcaccttcttctctctgctcttgttcacaagtcttttcaaaacatctcctctaagtatggacctcttctccatctccgcgtcttccacattcccatagtcctcgcctcctcggcctcagtggcctacgagatcttcaaggcccaagatgtgaatgtctcctctcgcggtcacgctccagtcggggagtctctctggtttggatcgtctagcttcttcttcgctccctatggagattactttaaatttatgaggaagctcatagccacaaagcttcttggaccacaggcactcgagcgttcacgaaaaatccgtgcagatgagctagatcggttttacaaaaccttgcttgacaaggcgatgaagaaggagagtgttgagataggtgaggaagcagcgaagctcaataacaatatcatctgcaagatgatcatggggaggagttgttcagaggagaatggtgaggcggagaaattcagacacttggtgatcgagtcgatggctttgacaaagcaaatcttctttggtatgatctttcacaaaccgcttaaaaagctcgggatctcactt

SEQ ID NO: 168072 - DNA, 2749 bp, Arabidopsis thaliana landsberg
  unsure (1)..(2749): unsure at all n locations
tttgttttggcatcaatcaccaaaaagggggagattgtaagggaattaggcttactcctacttcctaattgattttggtggtgaattgcccaacacaaataattggactaacgagtttgctctagattatatgttctacaggtgccaaaggttcatctacaactactaaatcgactgtccggaataccgtagattattccggacaggagaagctttttggaaaaacaggccaagcgcagaccgtccgggacccttgcggcggaccgtccgcaacaccaggatgacactcggacagaaccaatgcaaaaaaaccgagtctgcactatggaccgtccggaggataagcgcggaccgtctgagacctcgcttggaccgtccggcctcaggcgcggaccgtccggtaggcaaggatccgaaaaacccgaaggtgacgggttcggaagaatgaattatagcggcctcacggaccgtctggggtgcacgaccggaccatccgcgactgggtctatctgacatctgacgacgcattaaatgcaatatagccgttgatatagccgttattgctaaccgttgcgatttcagtcgttgatgtgcaggggcggaccgtccggaccagtggcgcggaccgtccgcggtcggcagaaaaagagcaacaactaggaagtggttgggggctataaatacaaccccaaccacctcattcaccacacccaagcattccaacctttcacattcaatacaagagctagcaattcgttccaagacacaatcaaagcttccaatctctccaagttccacaattgagacaagtgatcgttagtgattagtgacttgagagagagagagagtgacccgtgtgatatttgtcgctcttgttgcttggcttttgcaatcgtgctttcttcttcctccattcttgttctcacgacacttgtaatcaaggtaagagacaccaattgtgtggtggtccttgcgagaacttagtgtcccaagtgattgagaagagaagctcactcggtctaagtgaccgtttgagagagggaaagggttgaaagagacccggtctttgtgaccacctcaacagggagtaggtttgcaagaaccgaacctcggtaaaacaaatcaccgtgttcattcgcttcatttctttgttgatttgtttttcgccctatcttttggactcgtttatatttctaacgctaaccccggcttgtagttgtgcttaagtttataatttttagattccgcctattcaccccccctctaggtgactttcaattggtatcagagcccggtgcttcattagagcctaatcgctcgannnnnnnnnnnnnnnnnnnnnaaagaaggagatggtgatcggcgacaagcccgttacaagccacgagaaggctccatcgggagagtcccgcaacaagggcaaggagaaggaatcccctttagacaagtcgcatcggagtggcgaaaagaaaaagaagatgaggaaggtggtctactacgagaccgactcttcatcgcgatccacctccggctccgactcatcgtccgtaacttctaagcgccatgagcgcaagaagtttagtaagattcccctacactaccctcgcatttctaaacgtactccattacttttcgttccattaggcaaaccaccggttttgacggtgaagattataacatgtggagtgacaaaatgaggcatcatctaacctcactccacactagcatttggaacgttgttgagtttggtgtataggtaccatccataggggatgaagactatgattcggacgaagtggcccaaattcaacacttcaactcccaagccactactatactcctcgcctctctaagtcgagaggagtataataaggtgcaagggttgaagagcgcaaaggaaatttgggacgtgctcaagaccgcgcacgaaggagaagaggtgaccaagatcaccaagcgggagacgatcgagggggagctcggtcgcttcatgcttcaccaaggggaggatccacaagcgatgtacaactggctcaagaccttggtcaatcaagtgcacaacctcgggagcaccaagtgggatgaccatgaaatggtcaaggttattcttagatcacttgtttttcgtaatcccactcaagtgcaactaatccgtggagaccctagatataaatagatgtctcccgaggaagtaattgacaagtttgtgagctttgaacttatgatcaaagactccaaacatattgtcatcttggagcgaggngcacctccacacccgaggtgcaacctgtcgcattcaaagcgacggaggaaaagaaagaagagtctacgtcaagtaggctctccatcgacgcctccaagctcgacaacaaggagatggcgctaatcatcaaaacgtttcgccaaatcctcaagcaaaggagggggaaagattacaagcctcgctctaagaaagtttgctacaagtgtggtaagcccggtcattttattgctaaatgtccattatctagtgatagtgacaggggcaacgacaagaagggaaagaagaaggaaaagaagagatactacaagaagaagggcggtgatgcccacgtatgtcgggaatgggactccgatgagagctccactgactcctcctccgacgaggacgcctccaacatcgccgtcaacaaaggcctcctcttccccaacgtcggccacaagtcctcatggcaaaggacggcaaaaagaagaaggtaaaatctagagc

SEQ ID NO: 168073 - DNA, 1400 bp, Arabidopsis thaliana landsberg; identical to SEQ ID NO: 33892
  unsure (1)..(1400): unsure at all n locations

SEQ ID NO: 168074 - DNA, 923 bp, Arabidopsis thaliana landsberg
cggattctttgactggatttagaatggaacccaaatggcaaattgatcctcagcttctctttgttggtccaaagattggtgaaggagctcatgctaaagtctatgagggaaagtaagctcctttcttcttctttgttaactttctggatttgatttgcttatgagattattgggaaagtttggattttgatttgtgggtaagtgaagtctagtatttgttctataagggtatgaataaaatgcttgtttggtacactcatctatcttgatttgtctagttgaattattgaaattgtaaagttggagtttttaatggatctctactgtgtttggtcgttatgatctgagacagatacaagaatcagacagttgctataaagatagttcacagaggagaaacaccagaagagattgctaaaagagattcaagattccttagagaagtagaaatgctctcacgtgttcaacacaagaatttggtcaaggttcttgtttcttgagatctatggctgtttttgttgttactagcttaaagggtttcatgagttcatgattgtgttttgtctctggatcagttcattggtgcttgcaaggagcctgtaatggtgatagttacagaacttcttcaaggcggtacattgcgtaaatatctattaaacttgagacccgcatgtttggagactcgtgctggcaatcggttttgcgcttgatattgctcgtggtatggaatgcttgcattcccatgggatcattcaccgtgatctcaaacccggtaaaactacctctttaaacctgatatgtatcatttaatgatctgcttaaagtatttgcaaaacaccttgcttcatggaaaccacatgctcagatctcaatcacaaagaatcttttctttcttttttattgtctgacaccacacggagagc

SEQ ID NO: 168075 - DNA, 2636 bp, Arabidopsis thaliana landsberg
  unsure (1)..(2636): unsure at all n locations
tgcggacgagctggcgaaaatagcctcagggcggacaacggttccccccgacgtcttctccagagccatacatcaaccctccgttaagatcgacgacacgcccgagcccgaggaggcctcggcccagcccgaggtatcctcggccgccgagggtgaggccttgcgcattgagggagagcggaatggggttgcgtcaaaccgaaactggcagactccgtacctggaatatctcctccgaggagagctacccctcgacaaggccgaagcttggcgactggtgtggcgcgccaagtcgttcgtcttactgggtgatgaaaaggagctctactaccgtagcccctcgggcattctccaatgatgcatatccatcgccgaagancaggagctattgcaagaaatacactcgggggcttgcggtcaccacgcagcacctcgagccctcgtggggaacgccttccgacaaggtttctactagccaaccgcggtggccaacgccactaggattgtccgcacctgtgaagggtgtgagttctatgcgaagcagacacacctgcccgctcaggctctgcagaccatacccatcacctggtcgtttgctgtgtggggtctagacctcgtcggctctttgcagaaagcacccggggctacacgcacctgttggtcgccatcgacaaattctccaagtggatcgaggtccaaacccctaaacagcatcaggtcnnnnnnnnnnnnnnnnnnnnnnnnnnncatcatccatcgctttggggtcctgaactccatcatcaccgacaatggcacccagttcaccggcagaaagttcctggacttctgcgaggatcaccacatccgggtggactaggccgccgtggctcaccccatgacgaatgggcaagtagagcgtgccaacggactgattctacaaggactcaagcctcggatctacaacgacctcaacaagttcggcaagcgatggatgaaggaactcccctcggtggtctggagcctgaggacaacgccgagccgagccacgggcttcacgccgttctttctagtctatggggcgaggccatcttgcccacagacttagaatacggttcctcgaggacgagggcctatgccgaccaaagcaaccaagctagtcgagaagactcgctggaccagctggaagaggctcgggacaagtccttgctacactcggcacggtaccagcagtccctgcgacgctaccacgcccgaggggtccggtcccgagacctccaggtgggcgacctggtgcttcggctgcgacaagacacccgagggcgcacaaactcacgcctccctgggaagggtcgttcgtcatcgccaaggttctgaagcccagaacatacaagctggccaacagtcaaggcgaggtctacggcaacgcttggaacatccaacagctgcgtcgcattctacccttaagatgctttcaagttgctcgtatacctcgttcacacaccgagtctggtcgtcaaggaagggtcagccttgcctcgcaaagcccgaccctccctcgggggctagaaggggcaaccccctctgcgtcaaaattttcctcgaaaaaagaaaaaaatcttttctgccagaatgcctttcgtgctcttcgactacttcaaaagtggatcctgaaaacgacggagtacacgtaagcagccaaggctgactgagccgagggactcctacgcctccaggatacggatacctcactcatcaccttctgcgataagtaactcacgttcggataagtgactccgcggaccgaacaagtcttcacgttcggaagctcttcttccgaagcgatccttcgagccttctcgactgcgtcggtgacagagccccatggactagtaagggtgcgtttaagcggcaaggccaccgagccgagggactcctacgcctccgggatacggatacctcactcatcaccttccgcgagaagcaactctcactcgcacagacatttctgttaccgacaaaaaagtccagatactcgaaacaagaggaaaagagacgcagctttacaacacggcgagggtgtgttttggcctcggcggccacaggaaacacacgctacaagacaatccgatcctgcaggctcgggtcttgacgctggaagggagcagcagcaccctcggcatcaacgacaccttcggcgaggtccgacctagcctcggacggcgacacggtccaaggtccccgctctgaagacaacatcatcaccaagcccggccatcgccgctaggtcttctccaagaatccgtcccgagcaggcggctcggccggtcaccccggggcctcggctagctgtcccccgaggacatcagcccggcacgaggcctcggcaggtcgattccggcgtcggtcccactagcggacgacccggccaggctccggccgacctggtcttcttttcgagccgactctgcctctgttcgcgctggcaccgctacccctggcctcggctcatcgaagcaaaggaagccccgaacaacaaggctgaccgagccgagggactcctacgcctccgggatacggatacctcactcgtcacctttacacggggcaactcgcgcttggtgaagcggttcagacaaccaacaggcgagtcttag

SEQ ID NO: 168076 - DNA, 2156 bp, Arabidopsis thaliana landsberg; identical to SEQ ID NO: 4771

SEQ ID NO: 168077 - DNA, 2023 bp, Arabidopsis thaliana landsberg
tcatcgatctcagcaacaacaactttcatggacaactttcagccaactgggaacaaagtcaaaagctggttgcattcatcctctcaaacaacagcatcactggagccatcccacctgaaatttggaacatgacacagctaagtcagctcgatctatcttccaaccgcatcaccggcgagctacctgaatcaatcagcaatgtcaaccgtatatcaaaactccaactcaacgggaatcggctatcaggcaaaatcccttcaggaatcagactcttaaccaatcttgagtctcttgacttatcctcaaacattttcagcttccagatcgcacaaacctttgactccttttacaagcttcatgacatgaacctgagcagaaacaaattcgacggaagcattccccgactatcaaagctgactcagttaacgcaacttgatctcagccacaaccaactcgacggagaaatcccatcacaactcagctccctgcaaagcctcgacaagctcgacctctcacacaacaatctctcgggtctcattaaaaaaactttcgagggcatgaatgtgctgacgtacgtcgatatatcaaacaataaactcgaaggtccgcttccagatactccagcgtttcgaaatgcagcagcagaagcattggagggaaacaaaggcttatgcagtaatcttcctaaacaaaggttgaaaccatgccgtgagttgaagaaaccgaagaagaatgacaaccttgttgtgtggatactagtgccaatcctaggagcactcgttattctctctatatgtgcaggcacattcacctactacattcggaaacgaaaacaacacaatggaagaaacacagattctgaaacaggagagaatatgtccatattcagcgttgatggcaaattcaaataccaagatatcattgaatcaacaaacgaattcgatccaacacacctcatcggaaccggaggatacagcaaagtctacaaagcaaacctccaagatgcgatagtagccgtgaaaaggctacatgatacaatagacgaagagatatcaaagccagtggtgaagcaagagttcctaaacgaagtaagagcgttaacagagatccgtcaccgcaacgtggtgaagctcttcggtttctgctcacaccgccgccacacgtttctgatctacgagtacatggaaaaaggaagtctaaaaaaactcttagccaacgacgaagaagctaagcgactcacttggaccaaaaggatcaacgtcgtgaaaggtgtggctcacgctttatcgtatatgcaccatgaccgaacaactccgatcgttcaccgtgatattagcagcggcaacatccttctcaataacgattacatagctaagatctctgattttggtacagcgaagtttctcaagacggattcatcaaactggtccgccgttgctggaacctacggctacgttgcaccaggtaaatctaaatccctaaatttgattttgagcttatgaaatttaaatcactaaattcgaaattgaacttgatttttcgcaacagagtttgcttacacgatgaaggtgacggagaaatgcgatgtgtatagcttcggggttttgatactcgaattgataattgggaaacatccgggagatttggtatcgagtttgtcttcgtctccaggagaaactctgtcgctaagaagcatttccgataaacgtgtattagaaccacgggggcaaaatagagaaaagctcttgaagatggtggaaatggctttattgtgtttacaagcaaatccagaatctcggccaacgatgttgtcaatctccactacattttcttagaaactgatcttctccatcaatttctatgttataattgtgtttatctatacagcattagtaatctctgttggcttttgttctctgttcttgcttgtgtttgcaggaaggggtgtcgactctcgtttcagcttttgttgttgttgtttgggcttctcgagcctgcttcagctatttgtatgtattgggct

SEQ ID NO: 168078 - DNA, 1743 bp, Arabidopsis thaliana landsberg
  unsure (1)..(1743): unsure at all n locations
caacaatcaaggtggctacaaagggtacaacaacttcaagactaacaaccccaacctctcttaccgaggcactaatgttgctaatccataggatcaagtgtatcctccacaacaagagcatggtgagagcaaaccctttgttccctacaaccaaggctttgctcctaagcagccatttcaggagaactaccagccgcaaccaccacttgggtttgaacctcggcaacactaaggtccttctgctcttgatactgacatgaaacaaatgctacaatagctactccaaggacaagcatctggctccatggagattgttaagaagatatctgaattacacaataagctggactgtagctacaatgatataaatgtcaaggtggagacactgagttccaaagtccgatccttggagggacattctgcatctacttccgctcagaaacagacaagacaacttccaagaaaagcgattcacaatccaaaagattatgctgatgctcatggtatcacccatcataatggaaaagcacttccaactagggaggaaccaaagacggtcactgaggacagtgaagatcaagatggggaggatttaagtctcgagcaaccactcgaccgtgctacttgacctatcttcccagcagtatcatcaactcctccaaaacccgttgctgtcaaaaacaaagaaaaggtctttgtccctcctccctacaaaccgcagcttccatttcctagtcgtcacaagaaagcgttagcagacaagtatagagctatgtttgccaagaatattacggaggtcgagttgcggatacctcttgttgacgctctagcgttaatcccagactctcacaagtttttaaaagacttgatcatggagagaattcaagaagtgcaagggatggtggtattgagtcatgaatgcagcgctatcatacagaagaagatcattcctaagaagcttagtgatcctggttcattcactctaccatgctctttaggtccattggctttcaatagatgtctatgttatttaggagcatcagtcagtctcatgccgctctctgtcgccaaaagattggggttcactcaatacaagtcttgcaatatatccctcatcatagctgacaggtcagtaaggatcctgcatggtttactcgaaaacctacctgtcaggattggagctgtagagataccaagtgactttatagtcctggagannnnnnnnnnnnnnnnnnnnnnnttgattctggggagacctttcttagcaactgtaggagctatgattgatgtcaagaaagggatgattaatctaaaccttggcaaagactttaggatgacctttgacgtcaaagacgcaatgaagaagcctacattagaagggcaactcttttggattgaagaaattgatcagttagctgatgagttactggaagagcttgtagaagaagatcatcttaacggtgctttaaccagaagtggtgaagatgggtttatgcatttgaaaactttgggatactgatatgtctataatttgcatgatttaggcattcattcttcaccactttgtcattgtttcatccacatttcatctcattaggagtcgttttagtgtgttttacatacttaggacgattttgcattaggattgcatgtgcatggcatatttggttgttttcaggtactttggatgcttttggagttcaacagaggaaaaacagaacatgaagtcagaatgcccaatga

SEQ ID NO: 168079 - DNA, 663 bp, Arabidopsis thaliana landsberg
cgagttctgcttttgccctacacagagatgtattttcgacattgatgttcagggggcaaggtgtgtgagagcgagttctcttgatgccatattcatattcgtatgtcccccttcaatgaaagagcttgaagatcggctccgtgctaggtaaaaagcaggcttttacaatatgagttgttgatatctttcataacagtttcctgggagatcattatcagttcaacttcttaaaaacagaggaaccgagacagaggagcaaattcaaaagcggcttagaaatgctgaggcagagatcaaagaagggatatcctcgggtattttcggtctcattttgtataatgacacccttgaggaatgctacaagaagctcaaggtgaaccaccttttgttaattgctcaaaatgttgtcatgttctgaatgcataacattaccggatctgtttccagaatctcttggggctagatggactcgctcatgtcaatggtgtagaaagtgagaaacttaacactatgcatagtaaaaataagtgaatatggaaagtaattgcttttgtaattgtttgattctgcagtagaggggatcaatcttcccattgagtacacagtatctaaaatggaagataagatcattattcaagaaacaggaaaagaaacaaggaataa

SEQ ID NO: 168080 - DNA, 1568 bp, Arabidopsis thaliana landsberg
  unsure (1)..(1568): unsure at all n locations
atggaaggcttttggaactcaaagagtatcattcgtattactctctcttttatgttcttattcatctgtcatttctcggacgtgcttgcggctccaactaggaacttgtgtcgtcccgaacaaagggatgcactcctcgcgttcaaaaacgagtttgagattgggaagccttctcctgatcattgtaagatttatggcattgaatctcctcgaaagacggactcatgggggaataacagcgactgttgtaattgggagggagtcacgtgcaatgccaagtccggaaaagtgatcgagctagacctaagctgcagctctctccatggccggtttcattccaacagcagtattcgaaaccttcatttcctaaccactctagacctttcatttaatgattttaaaggtcaaatcacgttatcaattgaaaatctttctcatctcacctatctcgacctttcttataatcatttttcgggtcagattctgaattcaatcggaaacctttctcgtctcacctatctcaacctttttgataatcaattttcgggtcaggctccatcatcaatttgtaatctttctcatctcacttttctagatctttcttataatcggttttttggtcagttcccgtcttctatcggaggtctttctcatctcaccactctcagccttttcagtaacaaattctcgggtcagattccatcttcaattggaaatctttctaatctcaccactctcgacctttctaataacaatttttcgggtcagattctatcgtttattggaaacctttctcaacttacctttctcggcctctttagtaacaatttcgttggtgaaatcccatcttcttttggcaatctaaaccagctgacccgcttatatgttgatgacaataagctcagcggaaactttcccaatgtcctactgaacttgacagggttgtcacttttatcactctccaacaataagttcacaggcacgcttcctcctaatatcacctcactatccaacttgatggattttgatgcaagtgacaacgccttcaccggaacgttcccttcttttctcttcaccattccttctttgacttacattcgtttgaatggtaaccaactcaaaggcactcttgagtttggaaatatatcttcaccatctaacctatatgagttagacattggcaacaacaacttcataggaccaatcccgagttccatttccaaattagtcaaacttttccgacttgacctttcccatttaaacacccaaggcccagttgactttagtatcttctcccatctcaagtcactcctagatctaaacatatcccatttgaacaccaccactaggatcgacttgaactatttcttatcatatttcaaaaggctccttttattggatctctcaggcaaccatgtttcggccacaaacaaaagttcagtttcagatcctccttcgcaattgatacactctttgtacttgtcagggtgcggtaacncaggntttccagagttcgtaagaacccaacacgaattggggtttctaggcatttccaacaacaaaatcaa

SEQ ID NO: 168081 - DNA, 1945 bp, Arabidopsis thaliana landsberg
ctttcgtctcttcgccaccaccacctctcattcttctccgtttcactcaaccttcacattcgtttcactcgacttgaccgcaaggacacctccgattctcaagttcacaactactcgaccggtgcagctcacctcttcaccagagccaccatcgtttactcttcttccgcgagctcaacatcactcgattacaagctcgagtacacacagcctctacaattcactcgaccgcaacgcttgcaccattttccacaccactcgactcgtttctcttcaccatctccgagctggttcttgttcaccaatcactcaatcatcctcactcgaccgcaagaagttttgccacttcaagttaaccaaagaaaacactcgacagcgagttcaccaaactggaaaaaagagaaaaagaaaacaaatttggtacactcgaccggtttactctgttggtttgtgtttttggttttgttggaactaacgtattaacgtttatttttgagttacatttgttttcaggttacatcatgagtaactacagtggaaaatcctctatggaccctgattacaatgtggatgaagctgagtcctggtctgctagaccgagagaacaacatgtttaccagagcttcagggatgaattcgaacgctctgcagcccgacgtaatcagagaagagctgaaatcgccagaggaaagagggcgatgtcaagtagatatgagctgattgatgaggatatcgaaactgagtatgagccagagtcatggcgcaaggagacgaagctgctgaacaaacccgacgaggttacaatggaagagtatatcaggttcattgagataaatgatttctggggaacgcggtatccgtgctatgagactttagcccagctggggttactggaggacgtgcagcatctgttcgagaagtgtcatctggagacactcatgtcttacccttaccctgcctataaggaggagacaatcgagtttctttccacgctgcaggtggagatgtatgaggcactaacagactttgagctggataccatggggttaggcttcttgacattctcattgtatgaacagcggtatcagctttcgattaagaagttagaataactgtttggtttccctagtggaaagggaaccaaacccagatttgacagagaggagcttaaggattcgtgggccactatagggaactatctaccgctaaactcggcgcggtccaagagcaaccaaatccggagtcctgtgatccggtactttcagagatccgtcgccaactgagaagatcagtcataccaaaggaggtacaacagaagatattgatgagacggatgatatagatgaggcagagtttgacacgagcatgtatcatttcagtgagcatatacctcctgcgagggaaagcaggagtttgagcgaagctcacaggaacaacagcaagctgcagaagtggtgcataaaacaggacaagttactcgccaagtgcctcagggctatcaagtttctgacagataagctgagctgctcctcttccacaacagctatcccacagggacaacctcctctggacatgccatcgaggagatttgatgagccttagccaagtcagcacaggcctgagcttagtgagcagagagtctcacatgtccctgctagacattcgtcattcgagtacaggaaacacaagaggagaaagaaggctacattcgttcgctttagcagtagatcacgccttattcactcgaggagatcacttgactgcggtgctggccgcagcagaagaagagtggtcgagtatcctcagagcggtgttggccgccacagagctgatgaggtcgagtacccacatgctgtagctgatacagaacagggcgactcgtctatggcctgggagcaatcacaggcatccattcacgaccaactttgttcattcttcgactgcg

SEQ ID NO: 168082 - DNA, 1489 bp, Arabidopsis thaliana landsberg; identical to SEQ ID NO: 21138
  unsure (1)..(1489): unsure at all n locations

SEQ ID NO: 168083 - DNA, 1040 bp, Arabidopsis thaliana landsberg
tcttccgcctcccacaccaatccttctccgtcgctttcttcctctcacatttccactctgatcactactccggtctctcctctacttggtctaaaggaattatctactgctcacacaaaaccgctcgtctcgttgaagaaatccttcaagttccttcacatttcgtcttcgctttacatatgaaccaaatggttaagattgaagttgtgttgattgaagctaatcattgtccaggagcggtacagttgagatttgattcgtttcttaatggttttgttggttgtgatggtgtttttctggatactacatattgtaatcataagtttgttttcccgagtcaagaagagtctgttgattatgtggttatgtgatagataaaattagtgaggagaaggttttgtttcttgtagctacttatgttgttggtaaagagaagattttgggtgagattgctaggagatataagaggaaaatcgttgtggatgcgaggaagatgtcgattttgtcggttttggggtgtggtgaggagggaatgtttaccgaggatgtgaatgagagtgatgttcatgtggtggggtggaatgtgttgggtgtgacttggccgtattttaggccgaattttgtgaagatgaatgagattatggttgagagagggtatgataaggttgtaggttttgtgcctacagggtggacttatgaagtgaagcggaataagtttgcggctaggtttaaagattcgatggagattcatcttgtaccgtatagtgagcattcgaactatgagagcttagagagtatatatagtttttgaaacctaaaagagttattcctactgttggagttgatattgagaagcttgatagcaaggaggttaataagatgcagaaacatttttctggattggttgatgagatggcaaacaagaaagattttttattgggtttctatcgtcagtcttaccagaagaatgagaaaagtgatgtagatattgtgtcacgcactgctgaggtttacgaagaggaagagaaaaatgcatgtaa

SEQ ID NO: 168084 - DNA, 3404 bp, Arabidopsis thaliana landsberg
  unsure (1)..(3404): unsure at all n locations
atgcaacaagctatgaccgatatgacgcaaaagtttgcaagcgtggaaaaaaccgtcgaaacattgcaaacaaaccaggtatcactcagccagaatgttagtaccattcagtctcgtgtccgttctttaaatgcagggaattctagagtttggagaaccatcttcggatccccaccctcatcttccgcgaaatgcaacaagagaccaaacagaccccggatggtacaaacgcggagaatcaaccagaagatggagaaacgcatcctgaagatgatttccagttttttgaccaacacgatcaggaaaacttcgaccaactcgaaaccatgaaggaagtaagtcgggagnnnnnnnnnnnnnnnnnnnnnnnnnnnnnngctacaagctcggaaccggatatcaaccgggttatcgagaaagctaggcgaacaccattcactctgcaaattacaagtttgagaatcagagattctcgaaaactcaacttagaatcatacaatggtttggaagatccgaaaggttatctcgcagcctttctgatagccgctgggtgagttgacctaaacgaggccgatgaagacgtagggtattgcaaacttttctccgaaaatctgtgtgggcaagccctgatgtggttcactcagttggaaccaggatcgatcagtaatttcaacgaactatcgacagtatattaaaacaatactcaattcttctggataagagcattttggataccgacctctggaatttatctcaagggccgaatgagacacttcgggctttcatcgctaaatttaagaacgtactttcaacgctcccgaggatctcacaacagtcggctctagcggctttgcgaaaaggattatggcatgattcgagattcaaagaagatttgatacttcacaaacctgatactattcaagatgcattattctgagcgaataattggatggaagtcgaagatgaaaaagaaagtttcgcaaagagaaataagcaagcgaaaccagcagctactttttcacccaagaagttcgaacctcgggagaatcaaggaccaaggaagtttggttcacaaccattcaataataacgttgaaaagtaatttcaggggaaaggaaggtcaaatacctgggttcgggatgagagcttgtattgtgatatacaaagagtcaccgggcatctgaccaaagactgcagtgtttttaaaaggcatctcgcagaattatgggcaagcggagatctttcaaaattaaatatggagaacttcgtcaagcaatatcatgagtcgagggataactcagaagctcaaaactctaagagaccaagaccggctggcgaagaagaaccaagaagttcaaaagataaaatcaacgtaattcttggaggatgtaaactttgccgtgattccatcagcgcaatcaaaaagcatagacggaatgttcttctaaagtcaagtttaagtgaagaagtagattttcaaggcgcttcaatatcattcgaggaaaaagagacgcagcacctcgaaagacctcacgatgacgctctagtaattacgctggatgtagctaactttgaggtttcaagaatcctcgtcgataccggtagttcggtagatctaatctttcttagcactttggaaaggatggggataagcagggccgatgtagtaggaccgccatcccctttagtagcttttacaattgagtcaacaatgtctctcggaacaattaagctaccagttttggcgggaaagatgtcgaagattgtagattttgtcatctttgataaaccagcagcttataacatcatcctcggaactccgtggatctaccagatgaaagcggtcccatctacgtatcattagtgcctcaaattccaaactccaaacggagtggaaactattcggggagaccaagaagcttcgagaacttgttatttggctagccaccgactgaaaatccaatagcaattaacaaagcccgcaaagaaaggagtagtcccgaggtttcctagtgggcagaaggtggatgatgtcgtggtcgaagtaattctagaagcagacaaaccggatcagaaagtttggattggagctactttatctggcgaaataaaagaagcttgaatcgagctgttaaaaaggaacaaggataatttgtcacgagttgaatgtggatccaagcttcaagcctgtaaagcagaaaagaaggaaactcggagtggaacgagcgaaagcagtaaacgacgaagtggataaactcttaaaaataggatctataagagaagtgcagtacccggattgggtggcaaataccattgtggtcaaaaagaagaatggaaaggatagagtgtgcatcgattttacagatcttaacaaagcttggccaatggacagtttcccacttccacatatagatcgtcttgtggaatcaactgccggaaacgaattgctaactttcatggatgccttttcggggtacaaccagatcatgatgaatctagaagatcaagagaaaacgtcattcatcacagacagagggatctattgttataaggtaatgcctttcgggttgaaaaacgcgggagcaacctatcaacggctggttaacaagatgttcaaagatctcatcggcaagtccatggaagtatagatcancgatatgttggtaaagtcagctttttccacttcgcacctcgatcatcttcagcaatgttttgatattctcaatgaattcagaatgaagttgaatccttcgaaatgcactttcgctgttccttcgggggagttcctgggatatattgtcactaagcgcggaatcaaagcaaatccgaggcaaataaatgtgttcttataaatgtcctcacctcgcactataagagaagtacaacgtctaacaggccgagtcgcaacactgaacaggttcgtatcgcggtctactgacaagtgcctcccattttatacattgcatcggaaggcgaataaggggttcgtgtgggatgaacgttgcgaagaagcattcaggcaactgaagagctatatatccgagcccccggttcttgcaaagcctgagttcggagacgactattcctttatatttctgtcttagagaatgtaataagtggtgtcttcgtacgcgtagagcggagtgatgaacgacctatctcttatgttagtaagtctttctccgatgcataaacaagatatccaatgatggagaaattggccttagctgtcgtaaccgcagctaggaagctaagaccatacttccaatctcatccgattgtgcttttaacatcgctgccacttcggaccatccttcatagtccaaccaagtcaggacgtctggcgaagtgggcaatcgagttgagtgagtttgatctcgattttcgtgcacgaacaagcttga

SEQ ID NO: 168085 - DNA, 1313 bp, Arabidopsis thaliana landsberg
aaatgagacctcgcgggtatcaacgagctccgtcaatgcagaaaccaacagattatccgacggataagacgcttcatccgaattacccatttctcatgtcctctcatggtctcaagtcctttgaatcggacgacgaagacgacgactccgactcctccaacgatcaattcgctttcactatcaacacagagttgcttgtcgatgtcaaagacatatctataggggacttcatcggcgaaggttcatcatctactgtctacagaggattgtgggtttctcgtttctcaatctcctacttcgaaattgcttctgggtttggtgcaaaaattgcagattttgttttcctgtttatcctttcttgatttcggtatttattcgaagagtataggtttcagggtatattggtgatttaattttgggtttaaccttgaaatttggaatctttcatgctggttagtgttaggttttgtcactcttaggtttatgtagtctcagctctagtgtttcctacacaatgcctcaaaaaaggattaatgttacagagaaaccatgaattacaataagaaggaagattctgatgtgggtgtttgaatgagtaatctttgtattgtggcatacttgttactgatttttggaatttggatatgggttaaagaacatttctttatccatgattataggttcaggagagttgtccctgtgtctgtgaagatattccagcctaaaagaacatctgctttaagcattgagcagaggaagaagtttcagagagaggttttgctgctttccaagtttagacatgaaaacattgtgcgggtaatattggagcctttgatgttttgtttgttttcatatgttagcagccttatctcgttggtcgtcgatggtataatatccctaatgggatccttttgatgacagttcattggggcgtgcatagaaccaaagttgatgataattactgaactcatggaaggcaatactcttcagaagtttatgttgagtgttcgtccaaagcctcttgatctgaagctctccattagctttgcgttggatattgctcggggaatggagttcttgaatgcaaatggcattattcaccgagatttgaaaccaagtaagttaaactgagacatcacgaaaagaggaatcaagatttgtgaattgaagaagattggtttttgtgcaggtaatatgctcttaacaggtgatcagaaacatgtaaagttggctgactttggacttgctagagaggagactaaaggtttcatgacctttgaggctggtacatacagatggatggctccagaggt

SEQ ID NO: 168086 - DNA, 685 bp, Arabidopsis thaliana landsberg
aaagggggatttcttgtgaaaaaggaagacaaaagggtcgggtttttttttgttcttcaagtcattggcaacttagatgtttctgaggtgactagtcatttgcacaaggaaacttcatcagacgatgtcaatgggtttctaattcttccttcacaagtaacaagttctcaaagattcaaactcttttatagatatgagtgttatactttattcatcattttttataacttcaggtggaatctgcgaaacgtatattcgaaagacactcagacatggcactggagttccgagcaaagaaccaatatgtgaggacatcatgtatgaatgtactcctcagcctaatcgatacactgtgccagtcactgcaagatttttccattgatgacctcggccaagcagagagagcactaacatacctgaaagattcagactttaaggtggattggttggagcgtaaactggaagaactaaaggaaaagaagatagaagagcagattggtaagactgggatgcaagaattagaggaagacctgaaggtcctcaaagcagaagtgctctggcatagaagctttgctggagaaagagaatcaaaagtgctcaaacattaaagccgtgctgggaaaagagaagaacaaagtgttggctgctgccagaactcctcctctaacatttggatgaaggtggc

SEQ ID NO: 168087 - DNA, 1186 bp, Arabidopsis thaliana landsberg; identical to SEQ ID NO: 4389

SEQ ID NO: 168088 - DNA, 857 bp, Arabidopsis thaliana landsberg
tagtttaatagactatcaagtattgtgagaactggtttgttcagtggctctctcaggatgttcttatcattttacaatttaatatacctcagttttggctttgatgaaccaagcttggttggtttaggttcaggtctttgcgatttagtatacttctgctggtattttcctttgttctcattgaaagatactgtaactatgtcttagttcttcttggtaatgaattcaattgcaggtggcatcaacggatctattgcttatgaacttgagagacctgagaacataggtttgaagaaatccttaaaggcactaaatccctctcttttatctgttggcgtgagctaataaggatgtaattttcgcatctattttaactgctcttttttgtgtctatttgcacttgtttatcagatttgtcttattttcaaataagtaatcttcgtagaaaatggattctttgttaggttctagcgaaagcaaaggttaaggttgacgagatacaaccaggtaaattactatttgaactgtgtgcaccaaagaaacgtgttctgttatgcgcctttgtgctaatttcacattttatgtgatctcagtgtcttgggcggatatgatctctgtcgctgggtctgaagcagtttcaatatgtggcggcccaacaattccagtagttttgggaagacttgattcagcgtaagcacaacataaacggtttttaatcctattggatagatctctggtcactgtttctatacttttaacagggtgattgtttcatgttcacaggcaacctgatccagaaggcaagctacctccagaaaccctgagtgcctcgggattgaaagaatgcttcaagagaa

SEQ ID NO: 168089 - DNA, 1595 bp, Arabidopsis thaliana landsberg
tataaacaatcacaatggtcacctgatggattgctcaatccatcatttcgcacacctttgtgtaaacggtgtgcttgaaaatttgattcgattgcttactcttgagaaaaacacgaaagttctctcactttttaacaaacatggtaaaggtaagagatccaatgtgcttcggcttcccgcaaacactttctcgcatccaaagctcgcaacacttttcctacatcgatacgattttgtaaccgcacatgccttcaaggagtgtcaaaatctgaagattctcaaacttgagggaatcttagtcgaagttgatgtgttgaacatagttattgcatcgtgtccttctctcaaggtgcttgcgctaaatgccatgtggtacaacgaaaagacctccttgaagattcataacaataacattgaggtcttgcatttggattgtcctcatgttgattgcattgacgtgtctgcagctcttctggatattttctccattttctactttacatttgctagggaacaaaactttgtcatcaatgcaccaagacttttgtttaataattggactaaatacttggagagagtgccaaacatgaactataatattacatctcatgttcaggtacaagtacaagcacatatatatgtatagaaaatggtattttatataaagttatgttggaaaataatacgtttttaaaacataatatgaaaagtagtacatatactattcacaattagtaatatagtcggttttgattgggtgagagagagagacatgtggggcatatttagtcggtcaagtttttaaaaattttttttctttattacacattccctcaatgtttaataactaaaatgcttattagtaaattttatttttctaaaattgatcatataaataaaaatctatattttttctctatcatttgatatgcattttgtttaatgatttttaaattttatattataaagcattgtacagatatagatcattgtacagatatagaccgctgtacaaatgtagactaatgtacagatatgcaccactgtacagatatgcaccactgtacagatatgcaccactgtacagatatagactattgtacaaatatagatcaatgtacaaatatagactattgtaaagaatgatgtatctgttaaacgaagtcataatttactgttaaacgaacaaatatttttctcaaagttttgatggtgtaaccgaagtctgtatgagtctttggttttgtatcttctaacaaggaaacactacttagacttttaagatccgtttgcggttctagttcttatactcaatcatacacatgacataaagtcatatttgtctccaaaacagtaaccgagcttctttatgcttcacaaatgttaaacgaacaaatatcttctgtacatatgcatcattttgtatagtggtttatatttgtacaatagtctatatctgtatattagtctatatctgtacataggtttatatctgtacagtgatctatatctgtacactgccttatatctgtacagtgatctttctttacagtactctataatataaaatgttaaaattattaaacaaactgcag

SEQ ID NO: 168090 - DNA, 521 bp, Arabidopsis thaliana landsberg
tcgccccggcaccgagctccacaacgtaacggtcgcgcggcgtcgaaccgccacggagggggtcgtcaagctaaccctcgcctcggcggacgggcagccgctgcccacctggcagccaggcgcgcacgttgacctgctgctcggggagggcctgacccgacagtactccctgtgcggcgaccccgcccgccccgaggagtggaccgtcaccgtgctgctcgagcgcgacggccgcggcggctccagcttcgtccacgaccagctggccgagggcgcgaccctgcaggtccgcggtccgcgcaaccacttcgagctggcggacgcgccgcgctaccagttcatcgccggcggcatcggcatcacgccgatcctggcaatggtgcgggaggcgaaggcccgcggcgcggactggcagctgttgtacggcggccgctcacgctcctcgatcccctcccccgacgagctcgagggcgacgagcaagtaaaagtctggccgcaggacgagcacgggctgctggacc

SEQ ID NO: 168091 - DNA, 2261 bp, Arabidopsis thaliana landsberg
  unsure (1)..(2261): unsure at all n locations
agctgctgcataagaaggcgccgaattatgctcatcttcgtgtttttggatctttgtgttctgcccacaatcagaatcataaaggcgacaaatttgcctctcgaacgaaaagatgtgttttcgttgggtatcctcatggacaaaagggatggcgtttgtttgatctcgatgatcaaatgttcatgatttctcgagatgtcatctttaaggaaacagagtttccttttgcagaagtccctcgtggagaagatgatcacgatttgggccgtatgggccaggaattaaacacaacaagtttaattccttctcttgtaccaaatgggccgactattgtttcttcagaaggcccagcaactttatctcccactcaggcccacgtagatgattctctttcaaccctagttggtgtctctctcgacacaacaccagaagagtcgcaacagccaatagaatccacagtttcacttccaatggaaccaacgctaacaccggtgaactctgagccaaatcccccagaggctgaaccgcttggccgtggtcatcgccgaaaacagcaaccggtaactctaaaacactttgttacaaatactgttaccgtggaacctgatgtagttgcggattcatcgtctctttatccaatcgagcactatattgacagtagcagtttctcatcggctcataaagcttttcttgcggctgtaactgctggtgtggaaccgacaacgtataatagagttgtgattgaaaaagtttggtgtgatgcaatgtctgatgaaatcacctctctccaagccaatgaaacattctccatcgtggatttaccccctgggaagcgggcaattggcaacaaatggatctacaagattaagtatcgttctgatgggacaatagagagatacaaggcgcgtttggtggttttgggaaatcgtcagcaagagggtgttgactatgatgagactttcgctcatgttgctaagatgagtacggtccgagtgtttcttggagtagctgcggcccgtgactggcatgtacatcaaatggatgtacataatgctttcttacacggagatttgacggaggaggtatacatgaagttgcctcagggctttcattctgatgatccgactaaggtatgtcgtctacataaatctctctatggtctgaagcaggctccgcgatgttggttctcgaaactctccacggctttgattcaatatggtttcacacagtctctatcggactactctcttttcagnnnnnnnnnnnnnnnnnnnnnnnnnnnnnnnnnnnnnnnnnnngatgacttgatcatcccaggcagttgctccatcgctgttgaacgtttcaaagtttatttggaatcttgctttcatatgaaggatttgggtctgttgaaatattttctgggaattgaagtggcaaggaatgctgatggtttctacttgtctcagaggaaatatgtcctcgatattatatcagaaatgggtctgttaggcgccagaccttcttcttttccgatggaacagaaccacaaactgtccttatccaagtctgttttacttcccaatcctaaaaggtatcgtcgcttagtcgggagacttatatacttggctgttacccgtcctgagctatcatattcggttcacactctggctcagtttatgcaacatccactttcagaacactgggatgctgcgatatgtgtggtccgatatctaaaatccaatccacgccaaggccttttgctttccagctcatcgactttgcagcttcatggttggcgtgatagtgattgggccgcctgtcctcttactagacgctctctcacaggttattttgtacaacttggtgacacaaaaatctcatggaaaatgaagaaacaactgactatcactcgctcttccgcagaagtcgaatatcgagccatgacatttcttactcaagaacttatttggcttaaaaaggtgatgcatgatcttggtgtctctcaagatcgacctatgcgcatattctctaacaataagtccgctattgctctaagtgccaatccggttcaacataaacgtacaaaacatattgaggtggatggtcactatatccatgatatccatgctggtattatgactactacccatgtgtcctctcaacaacaattagcagacattctcactaaggcgttgggacaaagagagacttccatttctttctctgcaagctgggcattcttgatgtatatgctccaacttaaggaagggtgttaa

SEQ ID NO: 168092 - DNA, 738 bp, Arabidopsis thaliana landsberg
atgggccaaaagattcacgcttttatgttcccctggtttgcttttggtcatatgactccgtacttgcatctagccaacaagttagccgagaaaggtcatagggttactttcttgctacctaagaaagctcagaaacaattggaacatcagaatctatttccacacggtatcgtctttcatcctcttgttattcctcatgttgatggcctccctgctggtgccgagacagcctctggatatccccatctcgttggtgaagttcttgtctatagccatggatcttacacgcgatcagatcgaagccgcgattggtgccttgagaccggacctaatcttgttcgatttagctcactgggttccggaaatggctaaagcgcttaaagtcaagagtatgttgtataacgtgatgtcagctacctctatagctcacgaccttgtcccaggtggtgaacttggagttgctccacctggttatccttcatcaaaggcgttgtaccgcgaacacgatgctcacgccttgttaaccttctccggcttctacaagaggttttatcaccggttcaccacaggtcttatgaattgcgatttcatttcgattcggacatgtgaagaaatcgaaggtaaattttgtgactatattgagagtcaatacaagaagaaggttcttttaaccggtccaatgctttccgtacctgacaagagtaaaccacttgaagatcaatggagtcattggctgag

SEQ ID NO: 168093 - DNA, 4001 bp, Arabidopsis thaliana landsberg
gaagactgttaattcggtgaagaacaaggaagttgctacaaaggtccttactaagaagaaagttgcaaaatctgataagaagaagacaattgtaaatgtagagaaggtagaaaaaccaaaacctgaaatgaagaagacagttgtgaaggtagagaaggtagatagtccaaaacctgagaagaagaagtcagttgtagctccaacaacaaagacgtttgatgatgatgttgtggatgtcactgacaaggttaatgcagacaatctgaaaatggcttcacgttcagaagaaacattctccaatcctctagatcagatggctaataaggcaacgactgatgcattgagagcacttcaagaaggactagataatctggacggtattactagtaagaggagacgagtgccacagctagcgggttctcagaaatatcagtatgtaggaaattcaacagtgaaacgcataatcaccgatgtaccatcgtcttcatcggtacctgaacatcttcaacctgtttctgatgaccaatttgataggctgaaggattggctcgaacctgatttgtaagtctctatttttttcttcaaatataattgctatcattactcattcctttttttttctgcagtgaaaaagaaggcctgaacaccagcaactttaatgcacggttctactggcagataatgactccaagaagcgattggccaacagaaaaatatagatggttgaaagcctatgtaagtatagcaacttttaaatttttttgctttcaattgattaaatcatttactattggctggctgaaactatatgtaactctaataattgttgttctgattataatgcagcacatgggagctgcaatgtcattgtttcgccgaagattcaatcgtgatccgtcaaaatatcccaaccaaagaatagcttttttggaccaagatttgatctccacaatgctcaaagactacaaacagtttcaaccagattataggtgcttcaaattcagggagttttatgaggatcaagtcaatggtacagctcaatgtgaagcggtgacaaacaagaaatggtttgttgatgtggatcacctatatgcatacctctttgtcaacgggaatcattgggtcgctctggatattgacttgacaaagaaacgggtcaatgtttatgatagcatcccgagcttgactacggatacagaaatggcgatacagtgcatgtttgtgatgacaatgattcctgccatgttgagttcatttataccgtcaaagcaacgtaggaggagctactcaaagttggagtggaagaggattatgaagatcccggagaatcttgacccaggtgattgtgctatctactcaataaaatacatcgaatgcttggcgcttggcaagtcctttgatggcttgtgtgatgagaacatgcagtccctacggactaaacttgctgtggagatgtttgaggaattaggcgagaatgctggaacactacactctgaggttcgtcgcaaggccttcaaattcccaagcctcatggatgagtagaagcttctattaagaaccatgttccattttaagcttcttattttgttatgttcacaaatgtcatcgactcgtatttatactcaatacatcgaatcaaacgtattaaaatacttgctgacgagctggatgaaccgtggtagagagacgagttggacaaaccgagttgtttgctgaaggtctagacgagctgggcgacgagataggtggaccatgcagtcaatggacgaactgccgctaggcgaggaggtagatgagttttgcagtcgagggatgagctgatagctagacgtggagttggacgagctgactagctgacagctaggcgaggagatggtcactgagtgatgggaagagcttgaggacgagctgaggagcttgaggacgagctgaggagcttgaatagcttaaaagcgagctgaagagtttggcgatgaggagcgagctaacgagcttcttgagaagggcgagctgacaagctactttatacggacgagctgacgagctacttgagacgggcggaatcccgcgataatcgcgcatttgcatctcacttctcaaacttctgccgtcaagaccttggttgggaagctcttacctcggaccgaatccgagcatctggtaaacgacttcggactcgtcctgacctcgctatctcttcacctcccttttctcctcgtatattttgcaaagctgagatgtctggaccatcgtaccgagctgaaaagaagcgtgagagggaaagagctgatcaagaaaaggccaggatcttgtctgacagggtcgtgatgtcggggacccttgaagacagcaaactccgagctgcggagaaggccaagcatccggtgaccgacagtaaggccaaatttcgtcaagagcctggaaagacgccgtcttcctttgccgacatcatgaggactctcgtggcccccggttctttgattttgcagctaatcttggaattcaactccgtcttctgcagtcacgaagatcagctttctgacaaggatagcgaacttgacagctttaggcgaaatgaagacgagaacgctcatacggtggagagggccagcagggtgctgaagcggatgaaagacgccgagctacgggtccaggaactcgaggtgaacaatattgacctcatggcgaaactggaagtaggtaaaaatgcctatcttccatcgtcccctttacaaatgtcatcgactcctatttatactcaatacatcgaatcaaacgtattaaaatacttgctgacttcacaccgcggatctcgcgttattaacgtcgaacgttacgaatcttcaattcgggtctttaatgcgcggtttaagtcgtgatccttccgtttctgtattaatgtcggatcgttcttttgattttttggtttatataagcatcaaaaatttgcaaatcagattttttggttttcattgggatacatctgttgattgaatgcattagtgaaagctttgtggacgtttaggagaaggctgcttaatgaattcgttgtattttttttcccttggtttcagacatatgcaatgtaaacagcaaacgggaatcgttgggatttattgtcttagaacagaatcatagaaatgaacataaaaagaaaaaagtcataaaagacattaagccttgcatgtcttacgattgtgtccaatttgcttgcaattgccacaagtgtgtcgtcttctaggcttcttcttctccatagcaatctctagtgcagacttaattctcgatttctttggtctacctggttgttgacgagcttccggtggtaaacatatcttcgacacgacattctcgggaacaggtatatcaaagttcctgggcatgatggcattagcataggacttgcataaataattcttctgaaagtaaggatgacacaatgatatccgagaaagttttcgtttttcagcagctgcaatcgcgtgggcacatggaatcttttttagatcaaacctatgacacgaacatttctagtctttcaaattaacaacatgcagagatgctccaaacgtaacttgtacttgatttgcatctatgtcttgacctgaccgatgtctatttcaaattcaagtccctgctcggacagtaactggtcgaaaagcctcacttagcaatttggcgtactctacacgactctacaaaaaatacattgtcattagttagctataatcaccaatatacggacgtgtataaattatgtttgtattagaaatgaaacctgcaagatcttctctactccatgagtaagatatgtagacaaattcaatgcatcatttcttctgtctgaaaaccatctcgtcatcatggatgtaatttcttctaacagttgtacaataggatggcttcttgctggtgacatgaccttattcattgactccacaatgttacttgtaagcaagttgtacttatcaccagggaaatgcacacgaatccacaaacgt

SEQ ID NO: 168094 - DNA, 1312 bp, Arabidopsis thaliana landsberg
  unsure (1)..(1312): unsure at all n locations
ggtattgtctattacatgacggaaatgtggtttatgatgatgctgtttggtatccaacacatgaagaaaaggacacagtttcttggaatgcaattgttgcttcctgctcaaggaacggtaagctcgagctgggactttggtttttccaccaaatgccaaatccagacactgtaacatacaacgagctcatcgatgctttcgtcaagtccggggatttcaataatgcctttcaggttctatcggatatgccgaatcctaattcatcttcatggaacacaatattgaccggttatgtcaacagtgagaaatcaggggaagctactgagtttttcaccaaaatgcattcgtcaggtgtcagattcgatgagtacagtctgtcaatagttctggccgccgttgctgctctcgctgtggttccatgggggagtctcatccatgcttgtgctcataagcttggcctagactctcgagttgttgtcgcgagtgctctgatagatatgtattccaaatgcggaatgttgaagcacgctgagctgatgttttggacaatgcctagaaagaatctgattgtgtggaacgagatgatctctggatatgcccgtaatggcgattcaatcgaggcgatcaagctctttaaccaactgaaacaagaaaggttcctgaaacctgatcgattcacgttcttgaatctcttagctgtgtgttctcattgtgaagttccaatggaagtcatgcttggatactttgagatgatgatcaacgagtatagaatcaaaccaagcgtagagcattgctgttctcttatcagaggtatggggcagagaggagaggtttggcaggcaaaacaggttattcaagaattcggttttgggtatgatggtgtggcttggagggcgttacttggtgcttgcagtgctcgcaaggatctgaaaactgcgaaaaccgttgccgctaagatgattgaattaggggatgctgataaagatgagtatttatacatagtgatgtcgaatctctatgcttaccatgagagatggagagaagttggtcaaattaggaagataatgagagaaagtggggtacnnnnnnnnnnnnnnnnnnnnnnnnnngattcaagaacaaaatgtagtagctattaaattttgagttgttggttatgttaacgcaatgtcaaactagtcatgaaatcaatcatgaggctagaatctgagagatgaatcgtgtaaaaagaagaaatagtattacaatttttcccttcatgaatcaaagaacataagtttggagtcataacacaaaaaacaaatactagtct

SEQ ID NO: 168095 - DNA, 1068 bp, Arabidopsis thaliana landsberg
aaaaaaaaaaatatgacaacggcgttgttttcaccgtctaaccgtagaaaacgccgtctcacacacttcttcttcaccgtactcgctttcatcttactcgccgccttcatctacggccacgatttcatctctttctctcgtcgatctcttcactctccgacgatcgtccaccaatccgcaatcgtcgttgtagttgacgaacctcctccgcctccaccaacatctcctcctccgccttctcctccaccaccgtctcctccaccaccatctcctccaccgccatctcctccgccacctgcttttgcagtaggtaaaacgccggaaggatgcgatgtcttcaaagggaattgggtcaaagactggtcaacgcgtccactttacagagaatccgagtgtccgtacattcagccgcagctcacttgccgcacgcatggccgtcccgatagtgattatcagtcatggagatggcgacctgattcctgctcacttccttcgttagtctctctctccgttcgattttgaatgcgattcggtgattgatcttcagatcggatttgctctgtggttgttgaatgtgttaataggtttaatgcgacggtgatgttggagagcttaagagggaagaagatgatgttcgttggagattcgttgaacagaggaatgtatgtttctctcatctgtcttcttcattcacaaatcccagagaactccaaatccatggatactttcggatcactcaccgtcttctctctcaaggtaagtttggttcagatttagaaagtcttgcggaagccattgaagttgctttgtagaatctgatgttacaattcatagagatctgagtatgaggatgacaaagattaagcttagatgtgaaaactgttggcttggttaggattcttatagattcatgtggtatgtttatgtaggattacaatgcaacgattgagttctattgggcaccgtttcttctagaatcgaattcagataacgcaacagttcatagagtatcagatcgaattgtgagaaaaggatcgatcaacaaacacggtaggcattggcgagggg

SEQ ID NO: 168096 - DNA, 492 bp, Arabidopsis thaliana landsberg
gtgtatcctatccatgccatactgaattgaagtcttattgggtgcaggtcgaaggggatcccagtgatgcgcatctggcgccgctcaggaaaggtgtcgatcttggcgacttcatcaccaagccggccagggtgcgcaggatcgatgccccgttaggattatggcccagattcccgcccattcgcgaacgcaaggctatccccaccagctggctggaggtcatcatcgcagagggcaagaaccgtcaggtgcgacgcatgacagccaaggtcggtttcccgacactgcggctgatccgttacgcgatcggccagcatacgctggaaggcttggcccctggtacctggaaacgcttgtgaaacccatttctgaaggagggtaagatgaaaccggtggtcgtgttccggcacgctttggcacagggtgccggctatcttggggcgttgttgacggagaaggcgattccctggcatatggtgcgcatcgatcagg

SEQ ID NO: 168097 - DNA, 494 bp, Arabidopsis thaliana landsberg
tgtgatagaaaaacaagaaacatagtcgtattagttataatagaaaaccagcttcacaactaagtgtgtcagtgtgtaagaaccacaaatacaggttctttgtggatgatgtgccgatacgagtgttcaagaatagcaaagacgttggggtgaagtttccattcaaccaaccaatgaagatatattcgagtctgtggaatgcagacgactgggccacaaggggagggttggagaagaccaactgggaaaaagctccttttgtcgcgtcctacagaggcttccacgtcgatggatgtgaagcttcagtaaatgctaagttctgcgagacgcagggaaaacgttggtgggatcagaaagagttccaggacttggacgctaaccagtacaagcgtctcaaatgggttcgtaagagatacaccatctacaactattgcactgaccgcgtccgatttcccgtacctcctccagagtgccgcagagaccgcgacatatag

SEQ ID NO: 168098 - DNA, 1378 bp, Arabidopsis thaliana landsberg
  unsure (1)..(1378): unsure at all n locations
atgggaatacacttgggagagattggtattgttctctttccttggtttctgtggttaagtttattcctaagttgtggctatgcagctataactatttcaagtcctttgacattgggacaaactctgagttcccctggtggattttatgagttaggattcttcagtcctaacaactctcggaatcagtatgtagggatctggttcaagaaaattacaccacgggtggttgtgtgggtggctaacagagaaaagccgatcacaacccctgtggcaaatcttactatcagcagaaatggtagtcttattttgctagacagtagtaaaaatgttgtttggtcaaccagaagaccttccatatctaataagtgtcatgcaaagctcttagatacaggaaatcttgtcatagtagatgatgtttcagaaaatcttttgtggcaaagttttgagaatcctggtgatactatgctgccttactcatcgctgatgtacaaccttgccactggggagaagcgagtattgtcttcgtggaaaagccacactgatccatcccctggtgatttcgtagttcgactaacaccacaagtgccagcacagatcgttactatgagaggctcatcggtttataagagaagcggtccatgggctaagaccggtttcactggcgtaccactaatggatgaatcatacacaagtcctttcagcctttcccaagatgtaggaaatggaacagggctcttctcttatttacagagaagttctgaactcactcgagttatcataacatcagagggatatctaaagacttttcggtacaatgggacaggctgggttctggactttatcactccagcaaatttatgtgatttgtatggtgcatgtggaccttttgggctgtgtgtgacgtccaatcccacaaagtgtaaatgcatgaaagggtttgtaccaaaatacaaggaggagtggaagcgcgggaacatgacttctggatgtatgcgacgtacagaattatcttgtcaggcaaacttatctacaaagacacaaggaaaaggtgtagacgtcttctatcgtctggccaatgtaaagcctccggatctctacgnnnnnnnnnnnnnnnnnnnnnnnnnnnnnnnnnnnnnnnnnnnnnnnnnnnnnnnnnnnnnntctgcttttgcgtatattactggaattggttgtttgctttggaatcatgagctaatagacacagttagatattcggttggaggagagtttctttccattcgtcttgcaagttcagaactgggtagggctgaaagacactatcccccacagacacatcatttttgttaaagtatttaaacaactgcagtgtggttttaacttgttgaaatgtgtgttt

SEQ ID NO: 168099 - DNA, 202 bp, Arabidopsis thaliana landsberg
cccaaagcacagccatgtatacgattaagatcaggtttgaacagaagggcctggaggaaaaaatactcaccgatatatcacccgaccagagtttgctggaggtttgtctcgataacgatattgacctgcaccataactgcggggccgtatgcgcctgcagcacctgtcacctgtttgttgacagcgggatggatcacctgga

SEQ ID NO: 168100 - DNA, 2199 bp, Arabidopsis thaliana landsberg
tacccagagtgatcccgaatacgaatatccggggagtgggagtgatgtcgacggtggaagtgatagtgataaaagcggagattcaggggactttgatagtgagattgagactgagagagacgacaaggaagatgacgacagagccgctgaaagagagttcgatggagccaacgaaagagatgacggagccggtgaaaaagaggccgatgatagagccgaagatggagaggccgatggagcccaagatggagaggtcgaggctgatggagccgaagatggagaggccaatggagccaaaaatggagaggccgatggagccgaagatggagaacaaacccgcagggaaaagaagaagagagaagaagattcagaaaatgatgaaggcaatggagagtctcaaaggaagaggagaaaaaagaaagaagatgtacctgaagaagacataatggagaggtttgagttcgagatagaggaagctatagcaaattggtttgatgagtttcggattggtcgcaatgaaataccagattcagatgatgaagacgaggatcctgtgatcactagagataggaaaattaggttggcatcagatgataagttagcaataggaaagacattcttcactggttttgagtttagagaatgtgtgttgcattatgcattgaagcataggattaatgctaggcaaaataggtgggagaaggataagattagctttaggtgtgctcaacgaaaggactgtgactggtatgtatacgcctcatacgattctgctaggcagttgtggtctgtgaagaccaaatgtttggatcatacttgtacttctaatgggaaatgcaagttgttgaagagaagagtgattggcagactatttatggataaattgaggctgcaacctaattacatgcctcttgacattcaaaggcatatcaaggaacaatggaagttagtaagtacaataggacaagtacaagaaggtcgacttctagctctccagtggctgaaagaagagtatgataaacagttttctcatctccgagggtatgtggcagaaatcatgagttcaaacaagggttcaactgcaatcgttgatactattagagatgccaaagggaatgatgttttcagccggatatatgtatgtcttggagcaatgaagaatgcattctacttttgtaggccaatcattgggattgatggaacatttctgaagcatgcagttaagggttgtctttttacagctattgctcatgattcaaacaatcagatatatccagtggcttgggcaacagttcaatccgagaatgcagacaattggctttggtttttgaaccagctgaagcatgacttgaacttgaaggatggcgctagctatgtgattttgtcagaccgttgtaaggtatgatcaagtctaagtgagttattaagtgatttattttctgtagatgaccaagtctaatgtatgtcttttacagggaatcattagtgctgttaagagtgcattgccaaatgctgaacacagaccttgtgtgaagcatatagtggagaatctaaagaagagacatgcaagtaaagacgacaagctatggcacgtataagtaagagaaaggagaaggctagaagatggaaaaagaagatatccgagtatgtatcagacatactcgaagaagagttggagagggctatgaaatgtgaagttaccaaaggaacacatggcaagtttgaggtctggattgatggaagttctaattttgtgaacttgaccaaagaggagtgggattgctcatgctgcaagtggccaatcacagggattctcactatcctgctcattagtcttaccatttaacacagattctcattagtcttatcaattaacacaaattctcaccaaaagacacaaaacacagattctcattatcattccattaccattactcttaaaacataccatattacacataccaaatacacattcttattacactctataaaccaaccaccattttcactcctaaactacactcctccccaaagccatacaattgatcttacaattacaatactaagacctacagtcttcacagctgaacctacactcttcccaataaccttcaccttattaatcttcttaatcatctctttctccatcttcttaattcgctcaatcatctctttctcaaattcttactgattttgttc

SEQ ID NO: 168101 - DNA, 1998 bp, Arabidopsis thaliana landsberg
  unsure (1)..(1998): unsure at all n locations
tatcaatcaaactcaaccacctagcatactgagaattctacactactctaacccatcctcagaaacctattcactactcagacatcatagcagaaagcataaacgttgaatggaatggagacatgataacaacagagtaatagcaagatggtaacaggatgaacaacagtaaaacgaaattaagaacaaatactgaatactgaatactgaatagataaagagaaatccagattacaaaaggtctagaacacagtgtctgcggaataaaactagataaaaacttgttctcgaaaatgtaaagtacatgctacttataacaaaatattctgaaaccctaatactcaaaacaacgcagtattgggacggattaagaactatactcgacccaggtggtcgagttagaggtcgagcgaatagctggagtcttcttttcttccttgcgctcgagtgtctggttgagtgcggaatgaaaaagactctgaagcttgccatcgagtatgtagtcgagtggtggtgatggtgatactcgacttccaggtagagaggtgtgatcgcggtggtgatctggtgatggagatgaagacactcgaccttggggtcaagtgaggtgatcgagtggtggtcaggtgatggagatgatgacactcgacctcagggtcgagtgatatgatgaaatcgagaagtcctctactcgaccagggggtcgagtggtctcttgaggtcttgaagcttctactcgacctcggggtcgagtggtttgacatgatcaggtccgcttcttccaattagctcgtcaacagctccaaatcacctcaaatcaacacaaatatgcaacatgcatgcaaacctatcctaaacatgcaaagtgatgacaaatgatgagaaatggtataaaacagtgatgatatggtgctaaagtgatgacaaagggatgctcaaaacatgcaaaatacacacttatcagctatttcaagaaatcagatagtagaggtgaatgctaagctggattcagttcataacttgctcacagggaagaagcatgtctactttgcagctgaggaagagactattgagcctgagcctaagtcagaggaaggagtcttctacatagatggtcagggatacaggaagtttgagagagtaagttactattgagcctgagcctgagtcagaggaaggagtttccgtgaattcaatcctaaaatactgcaattgatctcttatttgagagagtagttctaggtaatttgaaccataccatatacaactgggaccgtgcaataaacaagagagttaggatagactttgaagcaaagctgaagaatagaatctgcgatcaaatctgtcgctggaagggaaagtggatggtgaagggagatgaggcaatgccgcagtggcttgatcctgaggtgtgggctggtcttgttaggtattggaaagatccgaagtcagagttaaagagtataaaaagttggcaagctcgatatcatgatccaaagggcctcggcatatctaaacaccgttctggccagacctcttacaaagctcggattcgaaaacatgtaagttaagtatcaactttcataccatttcttaatatgcaatgttataatgacaactaaccttatattttgatgtggtttagtgtgagaagaccggagaaatgactcctgatttccttgtgctcttagatgagactcacagaaaagctgatgggactttcatcgatggaaagtcccaagagatctacannnnnnnnnnnnnnnnnnnnnnnnnnnnnnnnnnnnnnnnnnnnnnnnnnnnnnntacaaagagcatcgcttcaggtggattatatgttcaagccaagaacatgatttatacccaggtatgttgacttttaagtcattatagtttttgttggctgaaatgattttattgtcttaactgctttgtatttgcgttttgtgaatggtgtctgaattgctctgatttggttgtcgtgtttttggtatggga

SEQ ID NO: 168102 - DNA, 325 bp, Arabidopsis thaliana landsberg
atatgttcctcttcgagtcaccgcggcccaggtcgaacaattggaacactggattgattccgtcaacgagcttttgcaaccgctgacgagcttcattctgccgggaggctcgctggcagcggctcacctgcatctggcccggacggtctgtcgccgcgtcgagatcggagtgctggaactcacagcgcgcgacaaaattaatccgcaagttgtgatctacctcaatcgcctgtctgacctgctgttcgtgttcgcccgggccgccaatgatgatggcaaaagagacgtgctatgggttccgggcgcgaaccgctcgggctcgtga

SEQ ID NO: 168103 - DNA, 515 bp, Arabidopsis thaliana landsberg
  unsure (1)..(515): unsure at all n locations
gtgatcgtgctgtcggactacccaagggcagcctgatcaatgtggtgcatatgattgcagcagccaaacgcctgaacaagcgcatccttgtcgatcggaaaggggatgatttcagtcgttacaagggagcgtcgatcctgaccccaaacaagtcggaattgcggcaagtggtcggctcctggaaaagcgaggaagagctgacgacgaaggcgcagcggctacgtgcggcgctggaactggaagcgcttctgttgacgcgctcggaagaaggcatgacgctctataccgaaggcgatgtcattcatatcccgaccgttgccagagaggtctacgacgtgtccggcgccnnnnnnnnnnnnnnnnnnnnnnnnnnnnnnnnnnnnnntgcgggtgtgccgctcaccgacgcggtatccatcgcaaaccgtgccggtggcattgtggtggggacactgggccccgcgacggttaccagggaagaaaattttacaaagtccgagtaaatgctgaacgga

SEQ ID NO: 168104 - DNA, 1353 bp, Arabidopsis thaliana landsberg
gtcaagcccaatcccgagaagtgtgtcttcggggtgccccggggcatgctcttggggttcatcgtctccgaacggggcatcgaagccaacccggagaagatcgcagccatcaccagcatggggcccatcaaggacttgaaaggcgtacagagggtcatgggatgtctcgcggccctgagccgcttcatttcacgcctcggcgggagaggcctgcctctgtgccgcctcttaaggaaggccgagcgcttcgcttggacccctgaagccgaggaagctctcgggaacctgaaggcgctccttacaaaggcgcctatcttggtgcccccagctgatggagaagccctcctggtctacgtcgccgcgaccactcaggtggttagcgccgcgattgtggtcgagaggcaagaagaggggcatgcattgcccgttcagaggtcagtttacttcgtcagcgaggtactgtccgaaaccaagatccgctacccacaagttcagaagctgctgtatgcagtgatcctgacgaggcgagagttgcgacattacttcgagtctcatccggtaactgtggtgtcatccttccccctgggggagatcatccagtgccgagagcgctcgggcaggattgcaaagtgggcggtggaaatcatgggcgagacaatctcgttcgcccctcggaaggccatcaagtcccaggtattggcggacttcgtagccgaatgggtcgacacccagctgccgacgactccgatccaaccggagctctggaccatgtttttcgacgggtcgctgatgaagacgggagtcggcgcgggcctgctcttcatctcacccctcgggaagcacctacgctacgtgctacgcctccatttcccggcgtccaacaatgtggctgagtacgaggctctggtcaatgggttgcggatcgccatcgagctaggggtccgacgcctcgacgctcgcggtgactcgcagctcgtcatcgaccaagtcatgaagaactcccactgccgcgacccgaagatggaggcctactgcgacgaggttcggcgcctggaagacaagttctacgggctcgagctcaaccacatcgctcggcgctacaacgagactgcggacgagctggcaaaaatagccttggggcgaacaacgattcccccggacgtcttctcacgggcatctgcatcaagccctccgtccaagatcgacgactcgctcccgagcccgaggcgccctcggtccagcccgaggcgccctcggtccaccccgaggtaccctctgcacagcccggggcaccctcggctcggcccgaggcaccctcggtacggccgaggtaccctcggcctctgagggcga

SEQ ID NO: 168105 - DNA, 999 bp, Arabidopsis thaliana landsberg; identical to SEQ ID NO: 34365

SEQ ID NO: 168106 - DNA, 2138 bp, Arabidopsis thaliana landsberg
  unsure (1)..(2138): unsure at all n locations
gtcgcttgggcaaacatctccatgtgtaaccgcatttgcagcgggtcaagctgcagcatataagatgtttgagacgatcaaaagaaagcccttgattgatgcttatgatgttaatggaaaggttcttgaagatatccgaggagacattgaactgaaagatgtgcatttcagttaccccgcgaggccagacgaggagatattcgacggattctctctgtttattccgagtggtgcaacagcagcattagtaggagaaagtggaagtggaaaatctaccgtgatcagtttgattgagaggttttatgatccaaaatctggcgcagtgctcattgatggagtgaatctcaaggagtttcagttgaaatggattagaagcaaaataggattggtcagccaagaacctgttctgttttcgtcgagcatcatggagaatatcgcctacggaaaagaaaatgcaacagttgaagagattaaagctgcaacagagctagctaatgcggcgaagttcattgataagttacctcaggggttagatacaatggtaggcgagcacggtactcagctctcgggaggtcagaaacagaggatagctattgcgagagctattcttaaagatccgcggattttgcttctggatgaagcaacaagcgcgctcgatgcggagtccgaaagagtggttcaagaggctttagatagagtgatggttaaccggactacagttatagtcgctcatcgattaagtactgtccgaaatgcggatatgattgcggtaattcaccgcggaaaaatggtggaaaaaggttctcattctgagttgttgaaagattctgagggagcttattcgcagctcattcggtgtcaagagataaacaagggtcatgatgcaaaaccatcagagctatcttcgggatcatctttccggaattcgaatttgaacatatcaagagagggatcggttatcagtggtggaacctcgtcttttggaaatagcagacggcatcattctttgaatgtccttggtttattcgctggactagaccttggtagcggtagccaaagagtaggccaagaggaaactggaacgacgagtcaagaaccgctccgaaaagtatcactcacccgaatcgcagctctaaacaaacctgagatcccggttctccttcttggaactgtagtagcagcaatcaatggcgcgattttcccgcttttcgggattctgatttcaagagtcatcgaagcgttcttcaaaccagctgaccaattaaagaaagattcaagattctgggcgattatatttgtagctctgggagtaacttcgttgattgtctcaccgtctcaaatgtatctgtttgcagtagctggaggaaaacttatacgacgaattcagtcaatgtgctttgagaaagcggttcacatggaggttagctggttcgatgagccagagaactcgagtggtacaatgggggcaaggctctcgactgatgcagctttgattagagctctagtaggagatgcattgtctttagcggttcaaaacgctgcatctgctgcgtctggattgattatagcgttcactgcgagttgggaattggcgcttataatcttagtgatgcttcctcttattggtatcaatggctttcttcaagtcaagtttatgaaaggattcagcgccgacgcaaaggtctgttcatggctttctagggtttatttcttgtggatcaagaaacttactctggttttgaataactttgcagtcaaagtatgaggaggcaagtcaggtagcgaacgacgcggtggggagtataagaacagttgcatctttctgcgcggaggagaaagtgatgcagatgtataataagcaatgtgaaggtccgataaaagatggagtaaagcaaggtttcatcagcggattagggtttggattctccttcttcattctgttttgtgtctacgcgacaagcttctacgcggcagctagattggttgaagatggcaaaactactttcattgatgtttnnnnnnnnnnnnnnnnnnnnngtctactgtcattgatggcaagactaaaatatttttggaaatctcggtgcctagtaatgaagtagaatggatcttgctctggatcttacaggtgtttttcg

SEQ ID NO: 168107 - DNA, 453 bp, Arabidopsis thaliana landsberg
ggaattcaatggtttgcagggagacaagagagcgttagatattgtacgtgtagcgagggagagaatggttagagcttttgcatatgaggaaataggagaaacatccactgaagctcatgctagtgtcgaggataataagagagatagaacgagaagagtaattaattacaatctaaggagcacaacgatgatttccagcttgagcaaacgattgaagattgatgagtgcaagaatcaagacccggaacaaaaccctaatcgtgttgcttcttctccaagtttgtgccatgtaaagtccaagaggcctcaaaaaggggtttcaaacaaaccagtaagaaatacaaatattttggggagaaataaatcgtttttctggacttaaattaaatagtttgagaatctcaccaaaaaaaaaaagtttgaaggtaaatacatgtatttaaagtttaaacc

SEQ ID NO: 168108 - DNA, 559 bp, Arabidopsis thaliana landsberg; identical to SEQ ID NO: 50104

SEQ ID NO: 168109 - DNA, 440 bp, Arabidopsis thaliana landsberg
  unsure (1)..(440): unsure at all n locations
ttattatgcatacttaggcatctaggatcatctcgcatacgcattgcatgccaaggtgtgttatcaggtgcaaaaggagcttaaaaggactctactcaatccattcactcgatccgggcagctacagaagaggcatcattctactcgacctctttactcgatccaggatgctacaaaggaggctgcagtttacttgaccctcttactcgatcaaggcaacctcagaagaaagcagcagactaatctactcgcccctcctactcgaaccactactcgatcnnnnnnnnnnnnnnnnnnnnnnnnnnnnnnnnnnncttgttgagctatcaaagcgtttaggaatcctgctcattccccactcaaccagacatctgaccatacggataggagaggataaagcatctactcgaccaattgatcactcagagcatatacacaaa

SEQ ID NO: 168110 - DNA, 1271 bp, Arabidopsis thaliana landsberg
  unsure (1)..(1271): unsure at all n locations
ggtttgatttatttattttttcgtggggaaaaacagcgaagactgcaatggaggtgctgaattattgtaagttaaagggaaaacctatgaggataatgttttcagaacgtgatcctagcaacagaatgagtggacgaggtaacgtgtttgtcaagaatctagacgaatctatcgacaacaagcaactttgcgatatgttctctgcatttggcaaagttctctcttgcaaagtggctcgcgatgcttctggagtttccaaaggatatgggttcgtccagttttactcagacctttcagtctacaccgcatgcaattttcacaatggcacgctcatccgcaatcaacatattcatgtttgtccattcgttagccgtggtcaatgggataaatctcgggttttcactaatgtttatgttaaaaacttggtggagactgcgacggatgctgatttgaagaggctctttggggagtttggggagataactagcgcggtggtgatgaaagatggagaaggtaagtctagaaggttcgggtttgtgaacttcgagaaggctgaggccacggttactgcgatagagaagatgaacggggtagtagttgatgaaaaggagttgcatgtaggaagagctcagaggaaaactaatagaactgaggatttgaaagctaaatttgaactagaaaagataatacgggatatgaaaacacgtaaagggatgaatctttatgtgaagaatcttggtgattctgttgataacacaaagcttgaagaattattctcagagtttgggaccatcacttcttgcaagtacgcatgcaatagcaaaagattgatttgtgactacgacgaataataaatttaactaatgaattttgaaggtcatggtccattccaatggtattagcaaaggtgttgggtttgttgagttctcaacgagnnnnnnnnnnnnnnnnnnnnnnnnnnnntaaaccaagtaatggtcttttagtgttgccttcttaatcaaggaactcacactaattaattttttatccttacacagatgctcaagatgaatgggaaaatggtgggaaataaacctatctatgtttctttggcacaatgcaaagagcaacataagcttcatttacaaactcaatttaataacccaccaccaagtcctcaccaacaacctatcttcagtcaagtggtcgctccggcaacaatgttatctcaacaaactccattaagaggatacaacttccaaccatattctatgtgcggatcaagaatg

SEQ ID NO: 168111 - DNA, 868 bp, Arabidopsis thaliana landsberg; identical to SEQ ID NO: 7649

SEQ ID NO: 168112 - DNA, 567 bp, Arabidopsis thaliana landsberg
catcgggatcgggcgcattgcttggtcactggtacaggcctgactcacctgggcagcgccgccacgcgtgacaagatgcaccagcagcaggccgaaggcgccgtgaccgacagcatgcgcatgttccagtggggcctggagggcggtcgaccgcttgcaggcgaggagggcgcacagccggagtggttctacaagggcgacggcggcatcgtcgtacgccccggcgccgacctgccgttacccgctttcgctgaggatgccggcgaggagccggagctggtcgggctgtacctgatcggtgaagacggcacgccgtaccgcctcggctatgccctgggcaacgagttttccgaccatgtcatggaacggcgcaattacctgtacctggcccattccaaactgcgcgcctgcagcttcgggccggaactgcgcctgggcgcgttaccggcgcacctggaaggcaccagccgcatccttcgcgatggccaggagctccggcgcaaaccattcctctccggcgagcaaaactaaagccacagcttcgagaacctccagttccaccacttc

SEQ ID NO: 168113 - DNA, 305 bp, Arabidopsis thaliana landsberg
aaacaacgccgcgacagggaaaaccccggcgaaacccaacgcaaccgccgcgcagcacaccccccgaccgccagctggcgcaagagcgaagaggcccgaaccgaccggccaccccaacaggggcgcagcccgaacggcgaacgggacgcgcccagaagcggcgcacaaagcgcggcgggagaggaggacacgcgcaacgagaccgcaacacaagccagagccccaacgcccgcaccacacgcaaacaaaccgaacaaacacgacacgaacggcggcccccccagaaagcaccaaaacgggggccc

SEQ ID NO: 168114 - DNA, 922 bp, Arabidopsis thaliana landsberg
agaattattttaattaattaagaaattttttttttaacctaaccgctaccgcccgcagccgcaaacgcttgcgagaaggagcttttgaaatctggctatttcgaatggttcaaaacggtatttagcggtttctatgattggtgtcaatcgctaacaatcgccaccatccgcaaacgctgcgtttgcgggtggcaaagggagaaccaaacaaacccttaattaagtacatgtgatgttccagccattccggcatattacatgaatccggataaaaatccgaattaataattatacatccattatgtgcagcttcattacatcgccttcttaattgtatatatgaactaaacatacttcttacaatttctgagtctaaccgatgatgttttgatgcagattatcgatggatatgtctttgaaatcaccattcatgattttagtaagtacttgataatcaactttttaaccaaacttgttgtattgaagccaaaatagctttagcttccgcttccaaaggtgatgaggccaattgtaattaggctactccccaactaataggggttcccgttgatctagaatgatccaaccgctcgttacctgatcagtagtcgggtctaaaccagcgtcaaaatgacatgggaaagtgaagagaacatggttaattgatagtttccttagagatcccacatttttgtcatgtcggatcaatattcattcctcttggttaagtcgtgaacacatactcaaacctccggagaaaacacaccatacaaagtgtttgacttttggaattgttgatgatttccactctcatttttaactcaattgaaccattaacaaccattaactggagtttactgtatatgattgttaacccttaccgtagaggaggaaattatttctttgatggaacggaaaagga

SEQ ID NO: 168115 - DNA, 116 bp, Arabidopsis thaliana landsberg
ataaatggatgttcacaatatttatatatcattgatagcttcggcttgacagaagatgagaatgtgagtgacacacgagcgactacaatgtagtgtgaacagtacgggtgtaaagt

SEQ ID NO: 168116 - DNA, 1724 bp, Arabidopsis thaliana landsberg
cggactctgtggaagcggggaattagataaagctattgagatagttaagggaatgcgggtgcatggaagtgctgctcttggtaacttaggcaattcatatatcggactggtggatgatagcttgatcgagaacaactgtttgcctgacctgatcacgtattcaactttacttaatggtttgtgcaaagctggaaggtttgctgaagcaaaaaatttgtttgccgagatgatgggagagaaactgcaaccggactcggtcgcatataacattttcattcatcatttctgcaaacaggggaaaatatcatctgcatttcgcgttctcaaagacatggagaagaaaggttgtcataagagcctagagacttataactcactgatcctgggcttaggcataaaaaaccagatttttgaaattcatggactgatggatgagatgaaagaaaagggcatttcaccaaatatatgcacctacaatactgcaatccagtatctttgtgagggagaaaaagttgaagatgcaactaacctccttgatgaaatgatgcaaaagaacatagccccaaatgtattttccttcaaatatttgattgaagcgttctgtaaggtccctgattttgatatggcccaagaagtctttgagactgctgtaagtatctgtggacagaaagaaggcctgtacagcttgatgttcaatgagttgcttgctgcagggcaactactaaaggctacggagttgctcgaagctgttttagatagaggttttgagttggggacttttctttataaagatcttgttgagagcttatgtaagaaggatgaactagaagtagctagtggaattttgcataagatgatagacagaggatatggatttgaccctgcagcattgatgcctgtgatagatggcttaggtaagatgggaaacaagaaagaggcaaacagttttgctgataagatgatggaaatggcttcagttggtgaagtagcaaacaaagtcgatccaaatgcaagggatatacaccagaaaaagcataataagaatggtggaaacaactggcagaatatattacacaggtatggatgacactttctccttctggtttgtcatcatttattgtttctcctgttataggcgccgtttcaatatgtattttaagatgcttttattggaggttttgtagttctgctttctccttttaaagtttggttttttgaggaaagaaaaagattccaagatttggagtaagcattcgtgtatatgattaggcagtagagtctttggtttcaagtgagtttacattaagaatatcggtttaactgtcttgtcggaaacctaatgaatgttttctctatcaatcgctattttgcagagatgacggtagtggaattgcgttaaggtctctgtcaagagttaaaaaaggatggggtcaaggggatatatcaagctttcagcctccaagagttgactacttagactactgggaggacgatggttaaggatttgcatgactctgttttctttctgatgggaaagttcagatggcgcaagcaagtttttgaggtgcagctcatcaaggatgacaggtaaaggtaagaacgaatactgttgtagacacgtctgaaatacaacagccttctgatgtagacacgtctaatcttttggacaaaaaaacaaaattctcgttaaatcaaaaatcaatttaaagtaatgtagagtagga

SEQ ID NO: 168117 - DNA, 386 bp, Arabidopsis thaliana landsberg; identical to SEQ ID NO: 72009
  unsure (1)..(386): unsure at all n locations

SEQ ID NO: 168118 - DNA, 338 bp, Arabidopsis thaliana landsberg; identical to SEQ ID NO: 43675

SEQ ID NO: 168119 - DNA, 1533 bp, Arabidopsis thaliana landsberg
agcaatccggtccccccataaatacgacgggtgagctgaagcgcaatactttatgtacctaagatgcgtggttttcttcgcgctcgtagtatgcaattcgcagtagatagtctccgctggctctgtaaggtataactcgcctatttgggtcatgaggaagcagtcatgttccatgttcaaatcgtgtctcatgatacatgtttaggttggtcgactttatgatgccaaagtagtgataagaaacatctggggaggatctgaagtcgagaaagctgtagaaggttttcagtcggttatgaagaatagtggctccaagttaaatagcagatgggtggaactccttgataaaccacattcacgaggtcatgttaaggttgcttttaatgttagttctaacttctaagggtgttatattgtaccataaatcagaaactgaaaacattcaagtttaagaataaccttttccaggactttgatctaagaaactgagaatatataacttcatacatgacaaatctatgtagctaaattgtatgtcttgttgatataatggttgcagttgcattcattgggggctccctttttgtcctacagcaattcgcgggcataaatggcgttctttatttctcatctttaacattccaaaatgttggaatcacgagtggtgctcaagcaagtctatatgttggagtcacaaattttgcaggttctcaagtctcacctatatcaactttaaatttagatgattgtttttttctactgtttccatcacaatgtcccttttctgaactgttgggtctaataggtgctctgtgtgcgtcttatttgattgataagcaaggaagaaagaagcttcttatcggtagctacttgggaatggtaaatatctttttcgtttatcacataaactcttttgcttttcactgctttagcttattttgattgaattgatttggtgtcacaggcagtctctatgtttcttattgtttattctgttggtttccccttggatgaagatctgagccagagtttgtcaatacttggaacactcatgtaagtagcttgaagtccagcaattactagtctccttttctcagctcatatagtacccaaaaaaagacaaacgtatcatatgtttggtcctgttacaggtatatattcagttttgcaattggagctggtcctgtaacaggtctcatcatccctgagctaagcagcaacagaacgcgtggaaaaatcatgggtttcagcttctctgtacattgggtatgtgttttcttgttttcccataaatcattttataacctttgaagtttgaagaatgacgaagcaaatgttcttcaggtctgcaacttcttggttggtttgttcttcctagatctggtggagaaattcggggttggaacggtctatgccagctttggctcagtatcattgttggcagcggcattctcacacctcttcacggtggaaacaaagggtcgatcactagaagagatcgaactgtctttgaactccagagacgacctgagt

SEQ ID NO: 168120 - DNA, 438 bp, Arabidopsis thaliana landsberg
ttattttgcacacttagacatttaggatcgtcttgcatacatattgcatgttttggtgtgttttcaagtgtagaaggagcttacaaggattctactcaaccctctactctatccaaccaggagggaagtagtagagcattctactcgaccatttcactcgatccaggcagccacagaagagccagcaattcactcgacccacttactcgatcaaggcagcaacagaagaagcagaagatcgatctactcgccctcctactcgctcctctactcgacccatttactcgaccaagggcgacccactctaccagacttgttgatctatcaaagcgtcttcggatcctcctcattcctcactcaactagacaccttagcatacaaataagagaggaagaagcatctactcgaccaattgatcactcggagcatagacacaaa

SEQ ID NO: 168121 - DNA, 1262 bp, Arabidopsis thaliana landsberg
gtaggcttttagatccgtctcagcgtgcaccggtggacttggtggttgtagttatcgtaggtggaacaatgaacggtgcgtaactacaaatggtcaaacgagccatgaggcttgtgatctcctcgataaaaacagctgatcggctatctatcgttgccgtcgtcatgacggttcccaagagactccttccgctgaagagaatgaccgaacacggcaaacgctctgctggagccgtggtagatgggttgctttgtggtcaaggttctaacacaagtgaggcattaaaaaaagcatcaagagtgcttgaagatcgtagggagagaaacccggtggctagcatcgtactcctaacggacggtcagggccagttgagtaaagtccacacaaatcaacggtcaacaataactaacgtgggatcaacacgttttgctcacattgagatccctgttactgagcatggcttcggagaaagcggtggacgtagtaacgcccctgcagaggaagcttttgcaaaatgcataggaggattgcttagcgtagtggttcaagatctcaggatccaaatccgggttggatcaggatctggaccatgtgaaatctcagccatttatctatgtaatggacggcctactttggttagttccggttccgggtcagtccggcttggggacctctacgcaggagaggaaagagagcttctagttgagcttagggtcccgtcaaccgccactagggcctaccagattttgtcagttagaggtctctttaaggacccatcgacacaagaagttgtatatggacgagaccaatctctccgcgttcctcaagccgttcgatcatcttcttctcctagaatcgaacggcttagaagcctctttatagcgactcgggctgttgccgagtcgcggaggctagtggaatacggagaatgcacaagcgcataccacttgctaacatcagcgcgtgcgttgcttggccagtcgggaacggtggaagcggctgagtacataaaggtcgtggaggcagagctggtggaagttcaatggagaggacaacaactaatggagtatcaaagtcagcaccagcagcaacataatcaacggcggagaggaagcgagagagagaccacgacgacgatgacgttgatggatgaaaacggtgagccgttgactccagcatcagcgtggagagcggctgagaaactggctaagttagctatgatgaagaagagcgacttgcacggcttcgaaaacgctagattt

SEQ ID NO: 168122 - DNA, 1784 bp, Arabidopsis thaliana landsberg
ctttgttcaatggagattggtgttcctacagatgttagacatgtcgctcatgttacctttgatcgtttccatggctttcttggcttgcctgttgagtttgaacctgaagtccctagacgagctcctagtgcaaggttcgtttacttgtaacgatgatagatgtttctggtaatgtttggtgattaggattcttttagttcttgttttagttaacaaattcttgggaataatgttgttgttgaagctatgtgttaaaaatcaattttgggtgtggttttggtttcttctatttccagtagttgccgtaattgaaatccccttctgttaatagaatctattctgtcttttacttgcaattagtgtgtcccctgacatcaatgatccatactttttgatgttcttgattcaaatccctttgttttctgtgagttgttaaggatcttgagtgaggtatatagattgaggacttcttttgtgaattctctatgaatttgggtgtaattattaagtgaatagctagtcaacgactcttgactgatcagattagatagtttaactcttttgtgtaaatcagaagctgattagtctttttctgtaaatgcagtgcaaccgtgtttggagtctctactgaatcaatgcagctatcttatgatactagagggaacatcgtgcctacgatacttttgatgatgcagagtcacttgtacagtagaggcggattgcgggtacgtgttaatctgcatgtttaaaacaatttccatctggtttaatgacaatgggtgaataaagttttcatttgctttgtttgttgccttatataggtagagggaattttcaggattaatggtgagaatggtcaagaagagtacataagagaagagttgaataaaggtattatacctgataacattgatgtccactgcttagcaagtctcattaaggtaaaaacccataaactccacaaggatcttattgtttcctttcccttctttcaccctttttgaatttgtggattttttcttggtttatcctctaggcttggtttagggaacttcctagtggcgttttggattcactttcaccagagcaagtaatggagtctgagagtgaagatgagtgtgtggagcttgtaaggcttcttccttcaacagaagcttctttgttagattgggctatcaatctaatggctgatgttgttgagatggaacaacttaacaagatgaatgctcgaaacattgcaatggtttttgcacctaacatgactcaggtaagttttttgaatgaatctctaaagattgtttgatgtgttcgtattttggtaaatgacatcagtcaaattgcagatgttggatccattgacggctctaatgtatgctgtgcaagttatgaactttctgaaaacacttattgtgaagacgcttaaagaccgaaaagaatctagagataagttggttccagcctcaaatccaagtcctcgggaccataatggtgatcagagcagcagtagacagttgttacatctcatgaaagctaacaaggaggaaactttagacaactttgaggcggagatgaaagacaaagaagagtctgcagatgaagaagaagaagaatgtgccgaatctgtagaacttgttgacataagaaagtcttctctggttaataacagcagtggaggttttggacagaaacacattggttgggaggagcagagaaccatgtcgaaagcgagtagtattgtgggacgtgtgaattacagagttgagctattcgaagcttggcgatga

SEQ ID NO: 168123 - DNA, 604 bp, Arabidopsis thaliana landsberg
tcaagaccatcctgctgatgagttcccaaaatcccaaaacaagcagggaaccctatcactctccaaggatcattattcgcactgggagtaaaacgactgcgtccacagcttctcaatcctcaatcaaacctgagcttgaaagtgtctatatataccaaaaaaaagaacattctctcacatttgtgaccactgactcgtttcgacttatggagaagacggttccacaaaaaaacatttctcttaccgatccgatactcattccatttaagaacgcacttgagcttgctcgggtcgcagaactcacctcaggagacataattatgtatgtgagcgagaatcaatgcgctttgagtgtcgataatatctatataacctcacggcttgtgagtggcatattccctgattatgaacagatcatcccaaaggaatataagacgaacataacccttcttactaaggattttgcacaagcactcaagaagacgagcatcttcctgaataagttcatgcagctcacgttaaccatctcaggaggcacattcacactttcagcacagagtggggactctggggccaccaccgaatcaatatctgcaagtacact

SEQ ID NO: 168124 - DNA, 1750 bp, Arabidopsis thaliana landsberg
aaaaggagctgccaacagatttctttgcggattaacgacatcgacatagttgaaaattattgcgtgtgggatttgaaacgagatgatgtggatgtgatcttagggtatgaatggctttcaaaacttggagagacagaggttaattggcagaatcagagtttttccttcatccataaccaagattgggtcactctatgtgctaagaataaagatcttgagcaaggtactaaaagggtgaagatgagaagtgaaaaggagcaaggaggaatgagaaatgaattagaaagcgattgtggaattgttgcttactaccttgcggacaaggtagctttaaaaggggagagtaaggttagttgtgtagaagtcactaatgaccgagactgtgaagatgagaagaggggtgaaaatcaagaaatgaagttaagtactgaatatccaaaggaagtttcttggttcaatgagtttgaacaaattgggatccttgttaagatgcaattcacccgtccaccagaagtgttcttggtcaagtgatggaacaaaagaacgttaaagcaaccattgaagttgatgtctgtgtggaaaaacagaaacgcgagattgaagatcacctagtcttagggttaaagacaggagaagacaaggttaggctgatggttgggagtttttcaaaacaccaggatagagtttacgagtgttgcatgatgttggagatgttgttggtttcgaatggggtctcatcattagagaatacacgtgcgttgaaaaggtcagctgaaatgagtaggtggaaacagtttggggtcacacataaggagggcaaggagagaggctctagccaaacaggttttggcggtacaatcgatcctagagctaagacaaaacacgagactaaggcgaacaaggcaatgatcaatgcccgagagtttcattttcaattccttccaccatgaggacatggtgaatctcaacgagagagtattgatagattatgatttgggcctaatgggctgtcgtttatggcttattgtttaaagcttgttttctttagttcttctatttaacattagcttttgtttctgaaacacttatcgattatgaacaaagaaaagtttatcttcttcatctcatctcttcttcttcctttccttctctgaatattctgcttcccatctctaattcttctactatctcatctcctttctgttacttaacttaatagcccattttgggtcttatcagtaccaccccatatattcgaagcatagatgaagctcagagacaccgtgttccagggcattacatatccagtggttaacaacaagtttgccatgcccttctcttatattcttttgtttagacatacacttttttcatcaaattttaatgacaatttctttatacggctatagccttccaaattagccaatgttttgtacaggaaataccgaaagctctttcgtttattcttttcagggtgacaaaatatggaatcgttacagtctagattaggactgaaagcaaagagagtcctccatctcttggagagaatagaggttgaagcagcttcgttagtgagaatgaaggacacgattccgacaagaagctcatctggaagacaatctattgaagccatgcaacacatagagactgactccatatctagtcgtacctaaaacatgaagcttaaactcaaagtcaactacttattaggaaaaaatattgcaacctaatagaaatcgacttcaactaa

SEQ ID NO: 168125 - DNA, 307 bp, Arabidopsis thaliana landsberg
atgggtgatcaaggaagaagattcccaactagatgtcgatgcggtgaagctataaggatgggtacgtcaaagacggcttctaatccggggagattatttcattctttttctaatggatctgccgaggtaatttcaattctcagatctttttaattatttctgtaaatttgggatgattttttttttttttcagagacggcggcatcactcgtttaaatggactgatgagtgtagggtggaagagcttgaggatttgaggttcaaaatgtttaatgttgaacacgattcaatgtcatttcaaaagagt

SEQ ID NO: 168126 - DNA, 368 bp, Arabidopsis thaliana landsberg
  unsure (1)..(368): unsure at all n locations
aaacacccaaaggaagggccaccgcaagacacaaaatgggagttcaaacccggcaagcaagaacagaacgaagggaaaaggaaagagccctgcccacccagcacagagaccaaaacaaggaggagaaacaggaacgaaagcccaacacaacangacaaaacgggagggccaacgaagaaagacaagaagccagcagagcgccaacaagggagcaggacaaacngcaacacaagaacgaaaccccgacagaacacngacagagagacagacaaaaagacangaagaaaaagcgagaagagcaagacgacagaaccacaaccacagagagaaaacggaagacagacagacggaaacaccgacaaacaagc

SEQ ID NO: 168127 - DNA, 465 bp, Arabidopsis thaliana landsberg; identical to SEQ ID NO: 74768
  unsure (1)..(465): unsure at all n locations

SEQ ID NO: 168128 - DNA, 1408 bp, Arabidopsis thaliana landsberg
atgaatcttgacaatgagagacacgagtccccatctttcgatgaaggtggttcttccaacgagatttgcactcgccccaacgacatcgccggtccccattatcaatctacctgcaccttacagtccctcaagcgactgaaagatctctaccgtatcccgcctgagattatgacggaatagaagatgcccgaacccacagaatccgtggaagaccaccgtcctggattcttttgtgtttatgaaatttattttaagggttgcggactgaccttcccgcttcctgaagctttggttcgttaccttgaagctctcgagattgccttacccagctgaccccaatcttctccgaactatcctgggaatcataagtatcacggcggaggccagatttgtcatcggggttcatgaattgaaagagctcctcaacatgagaagctcatcaaagagaaccgggtactttctgcatacccgaatgctaacaggaatctcatttcgcaccttccgaacgaggacgagaattggcaccatccttggtttttgattaagaaaacccctgcttcaatcggaaacctttccgatgtgctcccatcgaagtggtctgcgaaacctaatagaaattaggtcatgtatgtcttttttgcttatttttcacttacctgattgaaattacggtttttcgcttcgcagctttcattgctccgactctcttgactacggaattcgttgaattcttcaagattgttatcgaaggggagaccctttggaactcattcactctcgaccgtttaatagaggctaattataagctcagaatgagtccacctagacagtttcaccaacttccaccgcctcctcctctacctcaacgaacttcagtcagggctgttgcttcccggtgcaagacattgtccaaaccgatggtggaagcctgtgaggcgaacaagtcgtttcttatgtctgctgtcgacaagaaagagtacagcagaactttactagtggatgacgacagcgctgaaggggcgagatctgccggtgctttcaaacctacacctcaccgtgaaagtcgtagcagtcgctcacctcgaagagatcgttctcctcgccgtgactctcctcgaccctcttcccgggataggttgagcagcgaaccgattgcagacttgatgcgaaaaagagagagaggccagcccgcagcaactcttcccctaggaggggcaaattgaaagctcggattgatcgttccccttaatcatcttccccaccacgctcgatgggttcccctccttctcttgttatcatatctcctttctctcgacctggaggtgagcaaaccgatctgagagcgactccttaacaggaagaatctgagccccgagatgctacccccaagttaaaagttgtgctcctt

SEQ ID NO: 168129 - DNA, 328 bp, Arabidopsis thaliana landsberg
aaaggacgtgaggcgccggaggcgatcgaccggcgccgcgcccccgagacgcgcgagcggatcctccgcgcgacgcttgccctgctcgccgaggaggggaccgcggcgctgtcgaaccggcggatcgcggccgaggccgacgtcgcgctcggctcgctgacctaccacttccccagccaggcctcgctgctgcgcgagagcctcctcctatatgtggggaggggaaggtcgcgcggctggaggcgatcgccgcggcgctgcgcgagcgcgacccgagcccgggggaggtcgccgccgatgtcgaggcgctgatcggccgaccgagcgg

SEQ ID NO: 168130 - DNA, 834 bp, Arabidopsis thaliana landsberg
tcttgtgtcattttccttgtgcccatgttggatcgcagtctacaccagccaacgtgacccgccccagctcagaatgtttcaaagattgggaccagtcgtaaccctagccatacctagctgcatcggggtatgcctagagtggtggtggtacgagataatgaccgttctatgtggtttactcatagaccctagtactccagtggcatcaatgggcattcttatccaaacgacgtctttgctttacattttcccatcgtctctagggttagcagtctccacccgagttggtaacgaacttggctcaaaccgcccaaacaaggctaggttatcagccatagtggcggtttcctttgctggggtaatgggtctgacggcgtctgcgtttgcttggggcgtaaacgatgtctggggatggatcttcacaaacgacgttgctatcatcaaattaaccgcagccgcgttgccgattctcgggctttgcgagctcgggaactgcccgcaaacagtaggttgcggggttgttagaggcactgctcggccgtccatggcagcgaacataaacctaggagcgttttacctcgttggaacgcctgtagccgttgggctaacgttttgggccgcatatggattttgcggactttgggtaggtcttttagctgctcagatatgttgtgctgccatgatgctatatgtcgtggctactacggactgggagaaagaagcaattagagccagaaagctaacgtgtactgaaggcgttgatgtggtaataacaacaacgcaaaccaacggagacttatcggaaccattaatttacgttgtcactgtcgctac

SEQ ID NO: 168131 - DNA, 250 bp, Arabidopsis thaliana landsberg
gcttgacaacaatgagatgatgggtaaggagatagttaaagaggcgtttaggttatttgatgagaatcaggatgggtttatagatgaaaatgagttaaaacatgtgttgagtttgttaggatacgatgagtgtacaaagatggagtgtaggaagatggttaaggtttatgatgagaatagagatggaaaaattgatttttatgagtttgtgaagcttatagagaagagcttttcgtgaagtagattggaa

SEQ ID NO: 168132 - DNA, 2460 bp, Arabidopsis thaliana landsberg
  unsure (1)..(2460): unsure at all n locations
atgaattttgatgctgagagacctgaatccccatcctttgacgagggcggctcttgcaatgacatatgcactcgtcctaacgatatccccggcgcacactatcagtccacttgtactcttcaatcgctcgaacgattaaaggaacattggtggattccgcctgaaattatggcgggatcgaagatgtctaagcctatggaatctccggaggaccaccgttccggttatttttatgtctacgagatatatttcaagggttgcggatagacctttcctcttcccgaagccctagtttggtacctagccgccctcaaaattgctctaccccagttaaccccaactttctccgaaccattttagggatcataaccgtcgcgacggagaccgggtacatattcagagttcccaaactggtactcaacgatcatgtggagggctctcgcttaagctttgctctattggctgcctcctactcctgctgaggcgagcgactagggacccacatgagaaacgtctgaagtacgactaggctgcgacatctaaaggggctccatatgcgatcctctactgtcttggtcctcgaacacaaacacatannnnnnnnnnnnnnnnnnnnnnnnnnnnnttgctcatcgtaatgttgttcttcttagtagaggcaattgatgtaagtcaaattaatcctaagaccactctctcaaataagagattgattgtaggattttagggtcgaatttcacaatgctttttgacaacacaatagactaatgttatcgaattaagctaaacaaatagattataaaataaagaaataaaatcaagcaataacatattgagagttgtaaaataagataataaaagcgttaggcttagggtattctcaggaaatagatgatagtagatcaagcnnnnnnnnnnnnnnnnnnnnnnnnnnnnnnnnnnnnnnnnnnattcttaatacacgccttcaaaccagactcatcaaatagtagttcttgtaatagatccctatggtgggtatacctgttatctgagatcaagttctaggtggtcaatctaaaactagcattaagaacaaacaaagatgaagaatcctacaataacttagcaagttggcaatctaccaaatcatctatgaagcaaacaacatgattagtccacttgtactcttcaatcactcgaacaattaaaggaacattgctggattccgcctgaaattatggtggaatcgaagatgcctgagcccacggaatcttcggaagaccaccgctccaattatttttgtgtctacgagatctatttgaagggttgcagactgacatttcctcttcccaaagccctagtttggtacctagacgcccttgaaattgctctaccccagttaaccccaaccttctccgaaccattttagggatcataactgtcgccgcagagacctggtacatattcagagttctcaaactgaacgagcttcttagcgtaagaagttcgtcaaagaaaactggctacttctcggcatacccgaatgccaatagaaacctcatttctcatcttccgaacaaagatgagaactggtaccatccttggttcttagtaaagaaaattcctgcttcgattgggagcctttccaaagtgcttccatcgaaatggtccacaaaacttggtagagattaggacataaacatacttatcttatgtttgattacccgttcctttactaacccgagncgtcgttttttttttttgaaccttcaatcaccccgactcttccgactgagaattcatcgagttcttcaaagtggttctccaaggcgaaactctatggaactcgtttacccctgaccggttcatagaagccaatcgaaagcttaaaatgagtcctcttgagcaacttcatcatcttctgccgcctcctcccctacctcaaggaaaatcagcccgggctattgcttcccggcgcaagacgctagccaaactgatggtcgaggcttgcgaggcaaacaaatcattccttatgtcttctatttacgaaaaggaatatagcaggactctgctagttgatgatggcagtatcgaaggggccaggtctaccggcgctttcagatctagtcctcgccgtgagggccatagtggtcgctcacctcaaagagatcgatcccctcgccgtgactctcctcgaccttcttcccgagattgattgagcagcgaaccaattgcagacttaatttgcaaaaagagagatagaccagcgcgtggtagctcttctcctcggagggacaaatcaaaggctcgaactaatagctcccctcgatcatctcctccaccccgatcgatgggtccccctcctccttggaagggcaaattttcttccctcgaagctgaccttcgctccctctctgattctaagcaaaagctggaggaccgcgttgaccatctctattccgagctcagaaaatcaaa

SEQ ID NO: 168133 - DNA, 815 bp, Arabidopsis thaliana landsberg
aatctgagctatatgaagtaatcgagaattaaatgattcatgggccatgtggtactgcaaatacgaattttccatgtatggttgaaggtaaatgttctaaacaatacccaaagaaacatcaggatattaccaaagttggtaaggatggttatcccatctatcgaaggaggatgacaaaagactatattgaaaagggtggttttaaatgtgataatagatatgttgtcccttataataagaagctgtcacttcgatatcaagctcatatcaacgtggaatggtgtaaccagagtggttctttcaaatacttatttaagtatatcaacaaaggtctggatcgtgttgtatttattattgagccagccaaataggataaaacaacagagactgcgacccctggagaacctccaaattctactgagaaaaaataggatgaaatcaaagattggtttgactgtaggtaattgtttaaaccgtcccccatttcatatattggcattaattttaatgtgatatttacaaataagtttcatatgtttaggtacgtatccgcctcggaagttgtttggaggatttacaaatttccacttcaacaacgatctacaacagttcaaagattatctttccattgtgaagagaaacaacctgcttactttgatccaaacgcggttattgaagatgtcctggaacgtataagcaatgaagattcaatattcatggcttggttgactttgaataggaataatactgttggaaaaatggtaaacgtgctagagaacttctatattcacaaatctctgcctattttacttgga

SEQ ID NO: 168134 - DNA, 546 bp, Arabidopsis thaliana landsberg
atgggctctataccatttatcttcatcctccttctttttcatgtacataaatctaaatctcagaccattgaatcagcacattttcttgatcttatgatcagagattacaccattagaaacttcaacatacatttcaagacaggcgcgatccagaaagttcatcttccttcgaatttctcctccattgatatcgccacggctaagtttagatgtgggagtttgagaagacacggtgcaagaattggagagtttcacttaggtccgggcttgaccgtggagccatgtgttgagagagtgatcctggtgagacagaacttggtgtttaactggtctccttatatttactcaaccggttataacttaaccggttacaaataccgaattgcgtctcctgttcttggttcatgggcttacaattcaaatccggacggtgtcgctgtgaatccttatgagatcaacggaatgtacacggatcaacattctattatgatcaagttcttaagcagagaggcatgtgcatgccctaatcttatcacgaagaagaac

SEQ ID NO: 168135 - DNA, 430 bp, Arabidopsis thaliana landsberg
cggagatctactgggagaggtcaaaaaatacttagcctttttaaatttcaccaagaagacagtcatcgtcaaaggacaggagtcttttacggttgcgcaagccaaagataacaacaatgaaaatttggctgtctttagacaagcagaagctattacagttgctctgcatgattctctacttagctacatgtctgtatcatagaattttagcagatggtcagtcgccttaaagctaatgaagaaaatgaaaattacgtgtgaagagcaagcaaacaaattatctagggttgactccgaattccaatccaagaagaccttgacgatggaagatgttcagaccctagagtcatcattcaaattttgaagatggactacaatccctttcatattttgtataaaaaggaaatataattacttgtaaatgaagcat

SEQ ID NO: 168136 - DNA, 638 bp, Arabidopsis thaliana landsberg; identical to SEQ ID NO: 776

SEQ ID NO: 168137 - DNA, 1576 bp, Arabidopsis thaliana landsberg
atgaagaacaagcacacattcatacaatttgacaatgggtattattcagaagagcatgagtggatttcaaacaattctttaagcggtgtattgttgaagacgtcaaaggtaacatactcgttgttagtagaaaagatatgcaagaagattggaatagatgaaacctcaaggaaggtgaaattgagttacattctatgcacatctgagagagagacatctattgtagatgatgatgactttttagggtatataatggttgtgaatgctaagggaattagaccagctttgcacgtggaattagtaaataaagaatctgagagggtggaacaaatttcaagggcagagggaagaagttcagttggtgttaattttgaggagttgaatgcatttgatgtggagaatggtggagtagtgacgatttttggagtagaaattgcaggaggtaattgtgtgaatgatgaaccgattattgaagagcctaattgtgtagaagaggctattgagaatgctgatagccggatttttgaaaaggctatggagaatgtagttattgaaggtagggagcatgtggatagccagatggatgttgataaagataatggtattgatggtagaattaagtattatgagcttccatgtgctggtgaaggaagtcagagtagtgagaaaaatcagagtgttaaggaatgggaagatggaacggggattgaattgcaccaagaatttgtttctaaggaggccgtgcaagatttggttaatagagctgcaaataagtattgttttgcgaccacaactatagcgtcagatccacagtgactcatgttacgatgtcggcaatctaaaacaacaggttgtcgatggtatttacgatgtgcaaaagtaaagagttcagattgttttagtgttagagttcacaggaagatgcacacatgcaagcggtctgataagaactcaagcaattgtaaacataccggcacaccacgattaatcgcgtctattttgcatgaggattatccaggtgagtttcaaactccaccacctaaaagcataatgagtattgttcggggaagaatgggtttgcattgctcgtatgctaccgcatggagagggaaaagacaacacgttagtgatgtgcgtggtagtcctgaaaaaagctacaccgacttgtactcttatctgcacgtattaaaggaggtgaatcccgggacaatatcatatgtggaagtggatgcacaacaaaagttcaaatatttattcgttgctttgggtgcttgcattgaagggttcaaagttatgaggaaagttgttattgtggatgccacttttcttaagaccgtatacggcggtatgctagttttcgcaacagcccaagatcctaatcatcacaattatatcattgcgtctgctgtaattgatagggagaacgatgctagttggtcgtggttctttaacaagctgaaaacagttataccagatgtaccaggtttagtttttgtgagtgatagacatcagagcatcaacaaatcaattatgcaagtgtttccaaacgcgagacatggccattgggtttggcatt

SEQ ID NO: 168138 - DNA, 1041 bp, Arabidopsis thaliana landsberg
tttgtcagtatcatttgggacgaggtcatattgggttaacgatgaaagctcaactttatcgattgttgttgcaacgagcctccgagtggtaataacatcattaagccttgttctcgtttaattataatccttggatctttttattctaattgatgttgcaaattgcagccgatactttgtcattccattgtggagaggaaatggttacattacaatgtttgctcaaggttcaaactttaatcctccattatatatacatctttcatttccttgtgagaaatttatatgaaatggttacataacaatgcttgctctaggtttgtggtagcttttaagttcagttagattagtgagattcattagcaatggatcttcttttacttgcactaatttagtcagaacaaaaattagcgaactactggatcgcaagaatagtttattctcccgctatgtgaggttgaatcttgctaaatgtaccgtttaatcttgtgtaaaggtttgtcgtagcttttatctgaaagttcagttaacttagtgagattagcagtggaaatgtttaacttagtcaggaaagaaattaacaaactactaatctcaagaacagttcatttacctggtgttttgatatgtgaggctagatgtaccatttaattcatgttgagcttcattacaacagttatgtaactccgctgaagagttcattatgatcttatataaatggtcagttttattgtggcagttgaagcgcctcacatgatttttactggtctcgaagactacaaagcaagaggaactcaagcggctccttacctgactacaaccttctacactgagctgtcagagacaaaagacttggtgtttatccgaggcgatgttgtgttcacaagcaaactcactgacgaggaggcaaaatggatcatggagacagctcaatcgttttatttgaacgactctcgctacaagctgcttgagcggttcaataaacatactcatgactttgagttcaaggatgtgttacaagctctggatatgcctcttctg

SEQ ID NO: 168139 - DNA, 367 bp, Arabidopsis thaliana landsberg
gtggtcgctctgcttgtttcaatttcgctgtttctgcttggcggatttcgtattcttgtgaaccctctgtcctaaggagattcagaaagctgcgtctgaagctgcaatggcgcttcagaatgagactgcgacgtaggcatctaaaactgcgcggtagccagagcagcaggcaggggagggggttagggaggggcagaggagggctgaggagcagaatggtggtgtgttttatatggatgatgaggcgcttttggggatgcctaccttttttgagaatatgacggagggtatgcttttgccgccgccggaagttgtctggattcataacgactttgacgaagtgccccacgtgtcaatatggagtcct

SEQ ID NO: 168140 - DNA, 238 bp, Arabidopsis thaliana landsberg
atgcgtattgtcattcaaagggtttcggaagcatcggtcacggtcgaccaaaaaacagtgagcggtattggtcacggcctgctagtcttattggggatcgaagaaacggacgttttggaagatgccgaatggctggcccaaaaaacagcaaaacttcgcatttttgccgatgaaaacggggtcatgaacaaagatataaccggggtcaaaggcgagatcattgtgtgagccggtttcg

SEQ ID NO: 168141 - DNA, 878 bp, Arabidopsis thaliana landsberg
ttcttctacactccaaaaattcaagacctttcagagacaaaaacgtgaaacaacacaacttcgatgaaagccgccgttttccgtaacgaagacggagacgaggaggaggaagaagaagaagaagaagaagtctgtaatgttttcgacggcggcgaggtagagtctaagagaaacaacgaaaccaaaaacctcaaaggatttttcacttctttgcttttgatggaggagcacgagaagcaagaccaggaagctcgtaacgctgcttctcgccgtgaaatgtctgattttcaatctaattaccggaaaagagctagaactatgtccgattactactccgatctcaacgattactacgctgatgctgaggaaagtggagatatcaatctgaagaagtcacgcgtctcacgcgccgtcgcttccgttgctgttgctgctgcttcggagattgaggcggagagcagtgagataaccggatccggatcggttcgtggtaccggttcgggtcagcaaagacggttatgggttaaagatcggagcagagcttggtgggaagagtgtagccgattggattatccatgaagaagatttcaaataagcgtttcgaatgtctaaatcaacgtttgagttaatctgcgatgagcttaattcagcggttgctaaagtagacaccgcgttaagaaacgcgattccagtgcgtcagcgagtcgcggtttgtatatggagattagccaccggtgagccacttcgtcttgtctccaagaagtttggtttaggaatctcaacttgtcacaagcttgttcttgaggtatgtaaagctattaaggacgttttaatgcctaagtatcttcaatggccagatgatgaatctcttagaaaca

SEQ ID NO: 168142 - DNA, 124 bp, Arabidopsis thaliana landsberg
atgggagagccaccaaacaagtggaatgaaagcaatagatgggttgaccattcacatgtcactgaggtggtcgagactttgccggagaaaaccagtaaatgggctgatgcaaatgtgaaaagtc

SEQ ID NO: 168143 - DNA, 144 bp, Arabidopsis thaliana landsberg
ttttttaaatctaatatctatgaccaaccttggtttcaagctatcattaataatttccagagcgagacaaggtttgatcatccaatgggtggcttagcgattccttgtcctgaagatacctacatcactgcaaatccaacattt

SEQ ID NO: 168144 - DNA, 1577 bp, Arabidopsis thaliana landsberg
  unsure (1)..(1577): unsure at all n locations
cgtgtttgctttaattctcaatgtcatgtgtttttaggaacctgggcattgtcctttgacagtagtcacatttttctggatggtgagaaaatgataacaactatggagctttggtttcctcttatcggttttgaacatgaaagattttcccttttttggatacctgtatatatatctctattagcttagacttctctttccaatgactctatgacttccttagtactagttcttctgttgccgtatccaagattttactggttgagacctttgtaggcaaatttggaacctggaggagtagcttaaggaaactccttgttaacttgtattcattaagtttaagaaactgatcgaatcacctatttagttgtatacttgctagagtatttactgatcgagatgtcactaatggctctcttattttttatattccgatcgacctctctctcagtggtagatgatgttctgcgagttcttaatcttttatttttactatttgtttcgttggcagggaagaagttggctaacagcattgtccaggaaaagcttgcagcgtgtgtgaacattgtgcctggtactttccttttcttgtgttagcctcttacttctttgtttccagtctgaatttcagtaacttgagtaaacagattctatcgtctaattgggtttctgcggtcgagattttgtagaaccttatctgctagcgtaatcactttttggtcagaatgtttttgctattcagaaaaagaatgaagttaattcaagaaagaactggaagctaattctagcaatttcgtgatctgttcatgctttatgatattgaatatagaacttactactttgtttgctggcatgttttgttttgtgatattgaatactactagttctgtcactagaagatgtttatgtttgtttgcttggaatttggatgcaggcattgaatcggtgtacgactgggagggccaggtaagtacggaacaatagaagcacatcaaacatcattcttcagtatattttgatctcaatccgatctcgaggactaccattgataatagttgaacaangatctgtgagcttttaggaacccctagaaagacttataagatctcatcaatattacaaatgatcattaaccctcgtactttttttttttttttttgaacaccgattatccctccttcttaacataaatattctgcttggaacattgttcatcttgaaactgagctgttttgctagctgatctctgaatatattgcacataatcaaaccctttggcttcaggttcagagtgattcagaggagctcctgataatcaaaacaaggcaatcccttctagaacctctaaccgagcatgtcaatgcaaatcacgaatacgagtaagcattgttctatgacgtattctgcatataaaaacatgagtaatgcgagtgtcttgccttttctttagcaatcacacaagctaagttaataaatatggtttacttgttacctttagtgtgccagaagtaattgcgttgcccatcactggtgggagcgacaagtatttagaatggttgaaaaacagtacaaggaac

SEQ ID NO: 168145 - DNA, 2627 bp, Arabidopsis thaliana landsberg
ctctaccatgttccattggaaattagctttcagcaatggcctgtgcgatctcggagcctctgtcagtttattgccactctatgtggcaagaaagttagaattttttcaatataggccttgtgacctaactctaatccttgtggataagtcttcaagaaaacccttcggcatgctcaaagatttacctgtcatgattaatagagaggaagtgcctacagactttgtggtgctggatatggaagaagagcataaggatcccctaatcctgggaagacctttcttagccttagtgggagcagtgatagatgtcaaggaagggaaaataagtctcaaccttggaaagcacatcaagttgcagtttgacatcaacaaaactccacaagagtcaacagaagataaaaaaaaactctaagacgatagagtgatccaggagaaggatatgagagtgaaagagtaaagcatcttaaaaagaggtctgataagcaagatgaaactataaagaagctagcccacactgttaggaacatagaagtaagctgaatcagttgcagaagaaaactcaacctaaaggcgggattgacactatcccgagaaagaagttcacttcaagatggtctgaagagatagattaccctccagaaaagaaagaaacatattttgaagagaggagaattgagtattctgctgcagacctctccagggagaacgctgagtatgatgatgatactagagaggactatgcagaccctctctatcattcattttctttttgataagtgtgaggagtcaagctagagactttaaacaagctcacttgggaggaagtcccatgattatccttgtaaataatttttactttcatgttatttttgatttgttttagttgtgtttgtggctctcagaaaaaaaaggaataacgtgaaggtagagtaaaaattcaaaacttttactccactgatagcctagagatcgagtacattggtcgagtatgagtgatgtttgaaaacccaaaaaaaataaaaattttaatcatcattttactcgaccaacagaagctacagagtcttacagggagtttattaagtttacagaagattgcgggatttcctggggtttttctagtgaacagagaataaggagaagaaacatggaaacatacttgggacccactgcttacacctatgttccccatgcagctgaccagaagacaagaatctatcctcttcttctctgcaccactcgacctcaaccctccttatcccctccactcgacctcaccttatcacttcactcgatcccatcgcccctctctccacaaatactcgacctcgccatttctcttcctcaaacactccaccctctctcaaacactcgaccaaacatgaactcgctcacactccgccttctccttccttaataaccactcgacttcaccctttcaccttcacaccacaaccactcgagctcttatcacccccttctcctccgtccaagcggcaccactcgaccgcttcatctctccagtccatacatcactcgaccccgctcccacttcaccatctctcattcatagccacttcactcaattcactacatctctctcatcatcgctcactccaattctcaccaagtactcgatttcaattcatcaacaacttcaccgatttactcaattcactcgacttcacggcaagagcacatccgcctttcaagctcacatcatcactcgaccgctcctctcctgcctttcacagccactcgacctcgccaagacacaccgcctcaccatctctttaacactcgaccgcgagttcatcaaaccgaaaaaaagaagaaaaaaaaaaataaaaaatttgggtacactcgaccggttcacttgattggtttgtgtttttggtttgctgttactaacgtattaacgtttatttttgagttttgtttgttttcaggtttcatcatgagtaactacagtggagaatcctctatggaccctgactacaatgtggatgaagctgagtactggtccgctagaccgagagagcaacatgtttaccagagcttgagggatgagctcgaacgctctacagcccgacataatcagagaagagctgaaatcgccagaggaaagagggcgatgtcaagtagatatgagctgattgatgaggatatcgagactgagtataagccagagtcatggcgcagggagacgaagctgctgaacaaacccgacgaggttacagtggaggagtatatcagattcttcgagatgaatgacttcttgggaacaaggtatctgtgttatgagacgttagcccagctggggttactggaggacgtgcaacatttgttcgagaagtgtcatctggagacactcatgtcttacccttaccctgcctataaggaggagacaatcgagtttctttccacgctgcaagtggagatgtatgaagcactcacagactttgagctggataccatgggattaggcttcttgacgttcttagtgaatgaacagcggtatcagctttcgatcaagaagttagaagaactgtttggtttccctagtggaaaggaaaccaaacccagatttgacagagaggagcttaaggatttgtgggccaaaatag

SEQ ID NO: 168146 - DNA, 338 bp, Arabidopsis thaliana landsberg; identical to SEQ ID NO: 48314

SEQ ID NO: 168147 - DNA, 298 bp, Arabidopsis thaliana landsberg
tttacaaagtcttcgggatttacacttggacaacatcgaagtttggtcagattgtggtgcggcaatagaagctattattgactcttctaattggcctcgttactctacgtatctcgacaagattcacagaatcatttcaagtttctctcgggttattttcatggcttcatcctcgaaggcgaacttgatcgcaagggagattgctctaagtgtttcaagggatggaagaacaagatcttacctatctcgtggtggtcctgtgtggttatcttccagaattgaagaggaaaagaggcga

SEQ ID NO: 168148 - DNA, 577 bp, Arabidopsis thaliana landsberg
  unsure (1)..(577): unsure at all n locations
atggccggagttaggttatcgcttctcaagtcaattcaaagatcaataaaacctcatgccactgcaaaatcgtgttctggtctcctaaactctcatgccagggcctttacttgcggaaaccttcttgatggaccaaaagcttctccttcgatggtctccttttcnnnnnnnnnnnnnnnnnnnnnnnnnnnnnnnnnnnnnnnnnnnnnnnnnnnnnnnnncgcacgagctttcagctccaaatctgatgatttcggaagtattgtagcctctggtgttactggctctggtgatgggaatgggaatgattgggttgagaaagctaaagatgtggtgcagactagtgtcaatgctgttactgagactgcaaagaagactaaagatgtctctgatgagatgattcctcatgttcagcagttccttgactctaacccttatcttaaagatgttatagttcctgttagtctcactatgactggtactttatttgcttgggttgtgatgcctaggattcttagaaggtttcacacttatgctatgcaaagttccgctaagctgcttcccgttggcttctcta

SEQ ID NO: 168149 - DNA, 327 bp, Arabidopsis thaliana landsberg; identical to SEQ ID NO: 74345
  unsure (1)..(327): unsure at all n locations

SEQ ID NO: 168150 - DNA, 501 bp, Arabidopsis thaliana landsberg
ctgtttgggaaaccaagtgagggatgggttacaatcaataccgacggagcctcgcatggaaacccggggaaggcaacagcgggaggtgtgatccgtgatgagtatgggacgtggttaggtagttttgtttttaatattggtgtttgctcagcctattagcggaattgtgggctgtgtattaatggcttgttgtagcttgggagaaaatatttagaagggtggtgttggagatggattgggcgttggttgttggtttaatatagttagatattagggatatttttacgctaacaaccctgatacgcttgtgtcatgactttatctcaagagactggatagtccagattactcatgtgtatatgaaggttgattgccgagttagtttactatgtgtttactgtattgcttggttttcagttatttaatgtatgtttggaggaagtttatctggttatgatagaggatgttagtgagacatcgatcccacataatgtttgaata

SEQ ID NO: 168151 - DNA, 1063 bp, Arabidopsis thaliana landsberg
cttttcttgtgattcaaagagatctaagcttgggaatgagaatccagtgaagaacagagttaatcaacagagcaagaggaaaactgttggagttgaggttgaaagagttaaaatccgagaaatcattcaaagagacaacagagttgctgaacgaagaaagcggaggatcgcagagttagaagctgcaaagacttcaagagacgttccttcactcgaaacccaacaagaagacattcaacaacgagacaacaaagttaagaaactttccgagtcaaaggctgagactttaagaagagatgatgttccattggttaaaactcaagaagacattcaaagagacatcagagttgctgaacgaagaaagaggaaatgtgacgatgctttaataaaagatgttccattggttagaactgaagaagacaagagggttgctgcggagattgatcacgtagagcgagtacatagagttacagaggttaatgatgtagatgagacttcttcaaggagcaaagaagtttttgtagggagaaggaagaagaatgaggggagtgaagcggttgtggataaggattacatgaggtacctcacatggcttgtagattctcttagcgattcgacaactgagccaatggaaaatcttcagaaagatgatatggatgctctaaaagaatcgcccatggtacctgcattggatccactagtagaagtgaaggttgaaccacatgatgattggtctgattatataattgcgatgggtgattccccttttttggatggagaggagtgtacaccgtttgtggcgtccaagaaagtggttgatcttgatgaaggaagcaaagagaatgaaagtagtagcagttggtttagaaaggagctaatggatgttttgaaaaatccatatgatgaaggagagatgaagcagctccatcggtacgtatcaatccataaaaaaatgactcgatgcagagaactacgaaagggaagaggatctgattatgagactgacgaactgggacaatcttatctagaaagtttccctgatttcgaaaaagaatacaagctt

SEQ ID NO: 168152 - DNA, 389 bp, Arabidopsis thaliana landsberg
atggagtatggttatcgtattattgacgggatagagatgatgatggctggggttctttttggtcttgggtccggaaaatggattcctagtatggctctttagagttcagcccagcgtataggtattcatattaggattatgcctaggactggtcgttttatatctaaagtgagtggtgtagtctctcctatggcaagtagggtatgtcccttcatgactgagggttcgggtaatatagccgcttcttcagtgttgagggatgcgagatgggcttggagtcagtatgttgttttaaaatggcccgctggcctcttctcaatctggtcctcttttaaaatgagtgaaaatgcgtttagggtcttgtgttttgaacttcaggcggtcttttt

SEQ ID NO: 168153 - DNA, 918 bp, Arabidopsis thaliana landsberg
tatgtgtaccttcgaagacactacaatttgactcaacaaagcttcgttcttaatattcttcgccaatttggttcaaaaaacaaagaaattagtgttgattcgactcgtacgtaccaatcaggacctgcttcaagccctagcttatcgatatggagacggaagaaagaaatgagcaaagaaggtttaatcgcagccaaagagctcaagcgtctccaaacccaattagtccgacttgatcgattcattggttctcatgtctctcgtctccttaaatccgatctggtttctgttcgtgctgaatttcagagacagaaccaagtgttcctctgtatgaaggtataatcactgaatttggttaagtttcggacctgagttttggatagttatgagcgtttaggttaattggtccggtccggtttggaaattggtgctgaaatggaaccgaaaacctaatttggtttggttcgttattgaaaaattgacatttttcaacattttggttaagatttggtacgtttcggtgattctggttaaatttaggataaatttgggtttagcagtcccgaaccagttttcatgcttcctcttgccgcttggcttcacctaaaaccgaatccgaaccgaattagcctaactggtttggttcagctatttcggtttgattttataagcctagttctaagtttggttatggagtttgttgatggtgttactgttaatgtttatgtttcgcggtatatttctgtgaattcggttatatttagaataaaattttggtaatttcggtttggcaatgctgaaccaaaccagttactgaatttcatacttcctcttgccgcttgatacctaacaaactgaatcagaatcgaattagcctaactggaaggaaaaactatttcggtttggtatatctggagc

SEQ ID NO: 168154 - DNA, 428 bp, Arabidopsis thaliana landsberg
  unsure (1)..(428): unsure at all n locations
ctattgccatccaaagatctggcttcaagatcgtgtttctatatatgcttgacctttacttccgtggaatnttgaactacctgttatctgtcactcctgctggtgttggagaatacatgctggcttcttggtttggaatgatgccaatcactcttgctttggtgtacgttggaacaacactgaaagatctatcagatgtgacacatgggtggagtgagatctcgactactcgatggattctgataatatctggctttgtattatctgtggtcttgatcatctgcgtcacaaaaattgcaaaatcatctctggagaaagcattggccgagaatggagagnnnnnnnnnnnnnnnnnnnnnnttcctgtggtagcctctccctccgatctgcaacaacctcttgtaatcaagattgacacgtcaaatgaa

SEQ ID NO: 168155 - DNA, 898 bp, Arabidopsis thaliana landsberg
tcatcctcatgggccaagagcaacgcaatccaaacccctgcattcggtacttccagaaagcaatggctaacgtcctctacgcaagggagaagaccggaccgattaacaatggtgagatagagctgttggatattaccctaaaagatatcctagtcgacaccaagaacaaagtgcctatgaagggtgacacctacgatgcttcaccatcaatgcgtttattgaatcatctttgtggtttcaggaaatgggcactagcaaataagcagaagagaaccatttctataggaggggtgataacacctacactaatggcttgtggagtgccacttcagtcgactccctttgcccctagatggtgagatgggctttgtttattgatcatcagagtcatgaggggatgcatattctcaagtttcagcatagagcggaaatggatgggaggtttctcctacccaaccaagagctcacaaccatcacaatgaggggtaacatcgatttcaacccgcctaatgaagaactcttcttcatggaacgagcacccccgacgagagaggcttcagacattgaagaaagggttgagagtgaagaatgagctgagaatgaagaaccagaggagatggattgggagaactacaatgctagtaggttccattttgaagaacacaaaccaccaccaagagtgagtaagagtctgactgttgcgcataagaacattggttcgatgagtgcttggaataagtttcaagacaaaatgttggaaaaatgtggtaacgccatcgccgcaattcatgctgtactgagctgtttttcttcagacgccaccatgataagagaaaactgaccacaagaagtggttacaagaaggcacaaagtttcaccgtctaggcagtctgcatat

SEQ ID NO: 168156 - DNA, 469 bp, Arabidopsis thaliana landsberg
aatgtaaagtctgaaaaatgttgcgacatgaagcatcctgtagctggaaactgaaatcacattctcaagagcggcataagtcacttagtagagaagttttgtggttgagccacacacaaataagctgtcttgttatgagtatcattgtaagctccgttgacaaagatatctcttattacatatttgcagggcggtctatcaaatgctattgggaagttaaatgtatctgctgtggtaacatcctctgttcctttcaaaaaatactttacattttaggatcaagcacgagctagctttgcatctatatgaactctaatattatcaatgtttgagatccatctaatggagcattatgataatttgatgaatgcagccaacactgcaattcttcaaaggtggcgtgaagaaagcagagattgtaggcgttgatgtggtcaggctgaagagtgtcatggaacacctctacaag

SEQ ID NO: 168157 - DNA, 1467 bp, Arabidopsis thaliana landsberg
atgtcgggagatcacgccaagaaggagatggaaactggcgaaaagcccactacaagccacgggagcacttcatcggaagagtcccgcactaagaggaaggagaagaagaaggactcctccaaacagaaggagaaaagatcttcctcttctcaccacaaagagaagaaggagaaatcttctcacaagccgcatcggagaggggacaagcacaaaaggatgaggaaagtggtctactacgagaccgacacttctacaacctcgacctccgactccgatgcgccctccgtaacttctaaacgccaagagcgtaagaagtttagtaagatccccctacattaccctcacatttctaaaaatgcacctttactttccgtcccattaggcaaaccaccaactttcgatggtgaagattatgctaggtggagtgatttaatgcgatttcatctaacctcactccacaaaagtatatgggatgttgttgagtttggtgcacaggtaccatcggtaggggatgaaaactatgatgaggatgaggtggcccaaatcgagcacttcaactctcaagcaacaacgatactcctcgcctctctaagtagagaggagtataacaaagtgcaagggttgaagagcgccaaggaggtttgggatgtgctcaaaaccgcgcacgagggagatgagctcacaaagatcaccaagcgggaaacgatcgagggggagctcggtcggttccggcttcgcaaaggggaagagccacaacacatgtacaaccggctcaagaccttggtgaaccaagtgcgcaacctcgggagcataaagtgggacgaccacgaggtggttaaggttattctaagatctctcattttccttaaccctactcaagttcaattaattcgtggtaatcctagatatactaaaatgacccccgaggaagttatcgggaattttgtaagttttgagtgcatgatcgaaggctcgaggaagatcaacgagcttgatgatccctccacatccgaagctcaacccgtcgcattcaaggcgacggaagaacagaaggagggtcaacactaagtagacaaccaatcgacgcctccaagctcgacaatgaggaaatggcgctcgtcatcagagacttccgccaaatcctcaagcaacggaaggggaaggattacaagtcccgttccaagaaggtttgctacaaatgtggtaagcccggtcattttattgctaaatgtcctatatctagtgacagtgaccgaggcgacgacaagaagggcaagaggagagaaaagaagaggtactacaagaaaaggggcggcgatgcccatgtttgtcgggaatgggactccgacgaaagctcaagcgactcctccgacgacgaggacgccgccaacatcgccattaccaagggactcctcttccccaacgtcggccacaacgtcctcatggcaaaggacggcaaaaagaagg

SEQ ID NO: 168158 - DNA, 133 bp, Arabidopsis thaliana landsberg
gtgaagacctgctcacagcggtgcggcctattgatgttttcacgaccaacaacgtctgtcttctctttaagcaagagcctgataggggatacggggctggaatgccgactggcgtttattattggattcaccc

SEQ ID NO: 168159 - DNA, 560 bp, Arabidopsis thaliana landsberg; identical to SEQ ID NO: 25960

SEQ ID NO: 168160 - DNA, 2439 bp, Arabidopsis thaliana landsberg
acaagaaaacacagcggaacccaccactgacgcccatgtcgtccatgaagcagaccaagagacatggaatctcttcacacccactcgatctccacgcaaccccatcttcactcgatttctcctccatcactcgaccttgttttctcctccataacccaataaacttaaccccatccttcttaaatcaacgcgcccgggttcttatttactcgacctcgacatctcctcctcaccacctctcattcatttcgttcactcgacttcgacatttcccaacatcaacaacgtcactcgactccttatcatcatcttcttcatcgcctcatcacactcggccacatctctcttcacctttccatcatcaccgcttgccccctctctgcaaaataacaactcgacctcgccattccgttcacttgacctccgtcaccaagccgccttcaccacttctacctcaccactcgaccaaggtgccatcgttctcccctctctcaagttcatcggccactcgacttccccaagttcactcgattcaaagccaatcctcgtcgttttcaccactcaagctccacggcttcactcggctgtcaataaccactcgaccacaagcccgttttcatttcacagttcactcgactcctcctcttcaagctcaccactcgaccaagcaaaatcactcgatcaaccgaaaaaaaatctatttcaaaacagacggtttactctattaaatcactcgaccggttcacttgattggtttgtgtttttggtttgctattactaacgtattaacgtttatttttgagttttgtccgttttcaggtttcatcatgagtaactacagcggagaatcctctatggaccctgattacaatgtagatgaagctgagtcctgatccgctagactgagagagcaacatgtttaccagagcttcagggatgaattcgaacgctctgcagcccgacgtaatcagaaaagagctgaaatcaccagaggaaagagggcgatgtcaagtagatatgagctgattgatgaggatatcgaacctgagtatgagccagagtcatggcgcaaggagacgaagctgctgaaaaaacccgacgaggttacagtggaggagtatatcagattcttcgagatgaatgacttcagaggaacgcggtatccgtgttatgagactttagcccagctggggttactagaggacgtgcagcatctgttcgagaagtgtcatctggagacactcatgtcttacccttaccctgcctataaggaggagacgatcgagtttctttccacgctgcaagtggagatctatgaggcactcacggactttgagctggataccatggggttaggcttcttgacgttctcagtgaatgaacagcggtatcagctttcgatcaagaagttggaagaactgtttagtttccctagtggaaagggaaccaaacctagatttgacagagaagagcttaaggatttgtgggccactatagggaacaatctatcgctaaactcggcgcggtccaagagcaaccaaatccggagtcctgtgatccgctactttcagagatcggtcgccaacgtcttttactccagggagtctacaggcaccgtgtctaacacggacatggagatgatagattatgcgcttacagggattcttcgccggacgaaggggaagaatgtcttgagaggcgatctcaacaacgcaccaccagtaatgcctctgttgatccatctgtgtggatgcaggaagtgcgcgttgacgaacgggaagaagaaggtgagaggagcactatgcgtgggtggcgttgtgacgccaattctggaagcttgtggagtaccgctcaaggaaccaggtttagcaccgaggatgatggacttggatcatttgcgcagatgtgagttcttggagtttgacatggctggcgactttcaccgctacaggttcgagcattcatcgattaaaatcgccaacattcttctctcctgcattgacgctactaggattcttgagggcaggaacattgacttcaagcctacgcttgaagaactttatttcgagggtagtccgctaactgaggagatcagtcataccgaaggagctacaacagaagatattgatgagacggatgatatagatgatgcggagtttgacacgagcatgtatcatttcagtgagcatatacctcttgcgagggaaagcaggagtttgagcaaagctcacaggaacaacagcaagctgcagaagtggtgcatgaaacaggacaagttactcgccaagtgctcagggctatcaagtttatgaagaacaagctcagctgctcgtcttccactacagctattccgcatggacatctccctcaggacatgcgttcgaggagatatgacacctccccgccaccctcgagcaggcctgagcctagagagcaaga

SEQ ID NO: 168161 - DNA, 613 bp, Arabidopsis thaliana landsberg
tgcaggtaaacagtggaagccctcggccttgagcttcatcgaccgactgctctgttggaccgcagctatgcctaccagctccctcaatcggctaaacgtggggacgatgtccggtcacggctcatcgccctagaggctctccgcatccaccataaaccggcgcatctcggttttccgagcggtccgcaacaccacagtctcatgacgctggctcgatcgtgcgcctcgcatcctgggcttccgtgtgaccaaccgccgcgtccgcttcctcaccttgtgggaagcccggcgccttgtcggatacctccccgaccacctggcggccatggcctccttcaacctcgaaaccggcttgcaccgcaacatacgtaaccgagcctacgaatggtcgcaggtcgacctaccccgcgcctccgcgtggatctaccccgatcaagccaagggccgcagggccatccgtgtaccgctgtcaccctccgccgtcaaggtcctcgaggagcaacgcgggatacaccctccgtacgtgttcacttacaggggcagaagtgtcaagcagaccaatacccgtgcctggcgaaacgctctggatgctgccggcatccagaacttcagg

SEQ ID NO: 168162 - DNA, 767 bp, Arabidopsis thaliana landsberg
tatgggctagttatgccagatttagattattacatttccagaattgtgtcatgtatccaccgaaacataaagagggtgtataaatacaaaacaaaatctggtacacctaaatgtgttctatcgttacagatactattatgctcaaacgcttgcatctgctccatttgaactctacactcccattgttttagtattactgattctatgatttttgtcagtttatgtgattgatatcaccaggcttaagtcaagtatccaccgacacgtttagagggtgttgatgctcgtacaagtctggaaaatttaattgtgtccttcgttacagatgctttattgcttgaacgcttgcatctgctccatatggacactacattcccattgttctagtattactgattctatgattttagtcagtttatgtgattgatatcaccaggtttaagtcaagtttccacctacacgtttagagggtgttgacgctcgtacaagtctggaaaactaaattgtgtccttcgttacagatgctttattgctttaacgctttcatctgctccatatggactctatataatccttaaattgatcattgttagtgagtgtgtatgaaagcaagtattgattctgtgtttttttgttgcacagataatgctggagtcattgtcaaccccaagggagaaatgaaaggttctgcaattactggtcctattgggaaagagtgtgctgatctttggccaaggattgctagtgctgccaatgccattgtctaa

SEQ ID NO: 168163 - DNA, 633 bp, Arabidopsis thaliana landsberg
tctctgattatgaaaataatgtgtaatcttgtagagggacacatatcagaagacagggtgtctcaacctcgagtgccctggttttgttcaaatcactagcgagtttgccattggcagtgcattctctcctacatcttcttacggcggcagccagtacgacatcacgatgtacatatggaaggtatgctcggcccctgaaagttagtggtcacttgcttttttgtgattttttgtaatattttgttttcattgtaggatactaaagatggcaactggtggctgagcattgactcctcagtgattgggtattggccggcgaggcttttcactcatttagctcacgggccggcgacgttggtacagtggggaggcgagattgtaaactctcgtagctatggccagcacactaccacacagatgggctcgggacattttgcagaggaaggcttcagcaaagcaggtttcttccgaaacctgaaaattattgactacctctcgtacatgcaaccagtccaagagttcatcctgcaaacgaagaaccccacatgttataccgccataaagggatacagcgaggagtgggggagtcatttctactacggcggaccgggatataacgccctgtgtctatag

SEQ ID NO: 168164 - DNA, 2107 bp, Arabidopsis thaliana landsberg; identical to SEQ ID NO: 65315

SEQ ID NO: 168165 - DNA, 623 bp, Arabidopsis thaliana landsberg
  unsure (1)..(623): unsure at all n locations
agctttgactcatgaaggttattgatgatatatccaagccaccgcactacatggactactttagagagtgtttctctttgaagggaaacacttactggttgggtatagatagaagcgagnngccacgggactttcgcataaccttgatcaaatttgattttggaacagagagatttggttatgtttctctgcctcccccctgtcaagtgcatggttttgaggcttctaatctttccgttgtcggagacgagaagctttcggtgttagtacagggcggttctacatccaagactgaggtatgggtgacaagtaagattggtgaggccaatgtggtgtcgtggagcaaggtgttatcattgtatccgaagcctgacgttggtttttggcatggcctaagtttcctgctagacgaggagaagaaagtcgtcttgtgttgtaagagtaagggatggatggaggaagaagacgaggagaatgttccagctgttggggaggatactaaattcatactactgaattttggagttcagacaattggaggatattcgccaattattgctaattatgttccaagtttgggtcatatcgagctagctggaagcaaaaggaaaagagattactaa

SEQ ID NO: 168166 - DNA, 774 bp, Arabidopsis thaliana landsberg
ccagatttaactatacttgtcaactcagcaagttgaagagaacttttgaccacaagaagagagttatagaagggttagctcagactgaagatcctacagaagatgactggtatgagatgagaaaaaaaaaaatggcgaagcagagtcatagaggggttatcttcaagggtgatgaagctgaaagatcaactatggatttttgaaaaaattgtttataagtattcaatgggtattgatccagagaagatggaaactacactagctatcaaagaggacaatgatttcgcaacagaatgatttgcaccagaagatcagaaaggagttcatttagaggaaagaagtgtagagagtaagttgttaagtgaggaggaaatccctattccgacttattctccagaagtgcctaaacagcccaccaacccctatgctgaagaagaacacttgattttttattctgttgctgaacaactcttggagctctggactggatatcaaattcataagatggaagagttgaacaacaccattctggaagttcaagaaatggttaaaggctaccccagttttgaaattgaggattggtcaaaggaacctggttcagaaaaagaagactactttcttgatcagaaagaagcttattttgaagaaaaatcaaatgagtactcatcctaccatatgtcaagagaggatgcaaagtatacttcaggaactgaaaattcaaccactaaagatgagggcttctcagctcctctcttcaaccttttttctgactaa

SEQ ID NO: 168167 - DNA, 637 bp, Arabidopsis thaliana landsberg
tatggttttattctaaccgataacgagaaaatcgtaaaagcagaatcataaccaaataaaattacatatgatttctagatggttttaaattaaataaaataaaataaaaatcaaagctgaaagccgtaagcgcacccctaaaaaagagtaaaccgaaagtgttattttagtgtaatttatgaccagtaagatcgcgcgattactcttcccatacattaacagaaaagtaacacttttgtttctttttttccctttttaaagcgatacactagttgaagctgctacgcttagagaagtttgttggctatgcataaatggaaaggtcgacactgtagaactgacaccagagacaaagtacgaggttgtgtacgtggtgaagttagaagatacagcttctggatgggagacaccggtaaatctgaagctgaccttgcccaacaatagggcaaggccacaagagcggagtgtgagcttggaggaacacatagggaaaccgtgggtagatataaaggctggtgagtttatgatgtcagcagaggatactggagaggtcagtttctccctgtatgagaccgaaaacggctcttggaagagaggactcactgtcaaatgtgttgaaattcgtcccaaaaactaa

SEQ ID NO: 168168 - DNA, 1388 bp, Arabidopsis thaliana landsberg
ccagcccagtacatccgcgagatcgcacatccattgatgattttgagatcataaaaccaataagtcggggagcttttgggcgagtttttttagcgaaaaagaggacaacaggagatctattcgcaatcaaggtaaattgtgcttttgttctcttttctgttcgtttgcttcttacaaaatattcttctttttgtagttaggctaagtggctaacgtggtatgcaaaaactttagttagtgttttctctaactattgtgtttaacgttggccttgctccacaggttctgaaaaaggcagatatgattcgtaagaatgctgttgaaagtatacttgctgaacgtgatatattgatcaacgttcgcaatccttttgtggtgagcaggtctagccttttaagcatattctcagaagagatttacttttttaacgtgactttgttttgaccaggttcgtttcttctattctttcacgtgtcgtgacaacctgtatttggtgatggagtatctgaatggaggggatctgtattcgttgttgagaaatttaggttgcttagaagaagatattgttcgtgtatatattgctgaagttgtaagttccgcatgtttattttattaatagttcagtgcacagagctctagaaagtgatttcatgatgagtatctatgccaggtccttgctttggaatatttgcattctgagggtgttgttcaccgtgatttgaagccggataatttgttgattgcgcatgatggtcatataaaggtatatttttccattgtaagaattattctgtgttgacatatgaggcttgcgagatgtagcctttccacgtatgatagacttttaaagacctatggtttctttctttatctgagcagttaacagattgcgggctctctaaagttggtctcatcaacagcacagatgatctggctggtcctgctgtaagtgggacgtctctgcttgatgaggaggaatcacgattagcggcatctgaggaacaacttgaaaggcgcaagaaacggtctgctgtgggtactcctgactacttagcgccagaaattcttttagggacaggacatggtgcgtaccaatgtttaatcttggtggctacttgtctttattcaagattgtttgtgtagtagactcattggtactctgctgggattggtaatttgagtagaaaaataagctactaaaaattcatttctactctactaatttggtgtaagtagaagggttatatgctaagtactctggaccactgactttcataatatattcttgctctaggcttttcttgtctggcaatagtttctgataattctcttttcgtttatcacatgccaagactgcaaaatataatttatacttgcattatcattca

SEQ ID NO: 168169 - DNA, 1016 bp, Arabidopsis thaliana landsberg
ccttctcttccgactgataatggcgtcttcttcatcaacctctaccggtgacggatacaatgaaccatgggtggagaaatacaggccgagcaaagtagtcgatatcgttggaaacgaagacgccgtctccagacttcaagtcattgctcgcgacggcaacatgcctaatcttatcctttccgtaagattttactcttctgttgacactctttgatttaaaccctcctcgaatttgctaaaaagttttaggtttgatgaaaacttgatcaattagggcattttgggtttgtttactgtgtagatttcatgataaagcttagattttgagggtttttaatcaatttctattgtctgccaaagttaatgaaggtttgatttttagaaaatctctgtgtttagtattacttgtggagatttgatatatgattttgtgttgtttggttgtatatccttagggtcctcctggaacaggtaaaaccacaagcattttggctcttgctcatgagctccttggcacgaattacaaggaggctgttctggagttgaatgcatctgatgataggtatgtgatgccaatcttttacctatgggatgttgttctatcttcaatcgttgtttggttagacatcttcaatgttctgttatgtttgtaggggtattgatgttgtaaggaacaaaattaagatgtttgcgcagaagaaagtaacacttcctccagggcgtcataaggttgttatcctagatgaagctgacaggttagtgacttttacttgagtattccttctcaagttgaattgttccagttaagtttttttttttctgactttctgttttcggtttctaaaaaactagtatgacatctggagcacaacaagcattgaggagaacgattgaaatctattcgaactctacgcggtttgcacttgcttgtaatacatcagccaagattattgagcccattcagagtagatgtgccttagttcgattctctagattatctgatcagcacatactag

SEQ ID NO: 168170 - DNA, 1578 bp, Arabidopsis thaliana landsberg
  unsure (1)..(1578): unsure at all n locations
aaaaaatatatgtggaacgtcaataaagaagccataaaacacatnacttaaccatataatacttaccttcatcttctagttttgcttgagaaatcgctttgaatgttttggcttagatttcttgtttggtagaatacaaagtctgaagaaatttgttttcttttgtttcttttcttctcatcaattagtcattgtcgatagttgtgatttcgttttcagtttgttataaagaaaagctaataaaaccataactcttctttctttaaagctagttgctaattcctacagtcttattcacaattctttgtttaaagtatttaaaataaaaataaaaaattactttgttaaaagcatttttttgtgtggtttttggtcaacgtcagaaaaataatacagtactttacaaataaataataaataataaaagaaaatacagtaaacaattattggatatttagatgattgacttgcattgcgtaagctaagagttatgcaagacaaaaaaaaaaaaatttataatcgaagataccaaactaaagtcctgactaagactaatccttatgttatataatacgtggaatgttggaaacttagcacttaaaacatttacaacgacaaattagacaaacctttaaccctttagccagtgagctaagggtgttttcacatatttatttaatttattaactaattttgtatactagctatcttcttctttcatttgggtctaaattttgtaaactctctgtcattaatttaataaatttccaactatatctgctcagctggactgaaatttcattgatttgatgatattgggccaagctggactgagatgtctgtgagaaatttgagtctaactttgatgtcgatgtcttgaaaaaccagtataagtctctgagaagacagttcaacgcgatcaagagtattcttcgatcagatgggtttgcttgggataatgagcgtcaaatggttacagctgataataatgtatggcaagactatataaaggtaacttaatcgctctgatctatgctgtgtggttagttacagtgttttcgtctctgttttgatgtgtgttcttgtctgaattaatcacaggctcatagagatgcaaggcaatttatgactcggccaattccgtactataaagatctgtgtgtgctctgtggcgattctgggatcgaagaaaacgaatgctttgtagctatggattggtttgaccctgaaactgaattccaagaatttaagtccagtggtactacagatttgtctatttcagctgaggaagaagatagcaactctcttttgtttgaccccaagaacaaaagagatcaacttgctaatactgatacaagccctataaacccgaaaaagcctcgagttgatgaaacccaaaccatgtcaatagaggacacggttgaggctattcaagcgttaccagacatggacgatgaacttatattggatgcttgtgatctgcttgaagataaactcaaggcgaaaactttcttggctctagatgtgaaactacgcaagaagtggttgttaaggaaactccgacctcaagtgacttga

SEQ ID NO: 168171 - DNA, 1314 bp, Arabidopsis thaliana landsberg
ttaattttcccattctctatccttgcacataatttctcagtcttcctacgtttccttgtcccgtcttgtaatttcaattcaagtgatgagagtaatagttgcgacctttctctgtataaatctcacagaaaatttccgggcaaggtaattctcaagaggcttttaaatccagaagtttatcaaaacaagaacggaaagagactgtaaatatagctaaaacgggggttaggagacgacgtgctcgccatatgcaggtaactgatgatctttctctttcttccctgatgtcttaaattcaccatagtgtctgaatttgtctgttctctttctggatgtcccatagacttgccaaaacccaataagacgcataacacagtacagcctgctggacaatatttgctggacaatatctgaagcagcttcagccgccactatttttactgacagcagcagtcgtgacatcagtgaaccccagccttctgttgtacaagatgggatagataaagggttagatccagtggcttctttttcaaattcaaccagagcacttaccgagaggtactgtttcgttcttcgtacatctcttttccttcattttttagattttacatggctactttagaagtaaattgttccagtgatagtctactactatctattgctgccattgttgcaatcctggaaatatctcactgtggtcaactatcttttttttcttcctgggcgctcttctgcagtgagaagacagaagtgatatttaaagacagcttccttacaattctatatccagctgatcggttctcggagatgggaccttcttcacggacttatttcagtgatagtggtttcacttgcctgcaaatcttagactatatctacagattttaccaggtataaccatcatattcgaatggccaatttctcgtttcagttccttttagttgctatgaaaaggagagtctttagaatcaatttcttcgtcttagttaggaacttatgagtgattagtatttatactatctctgttgactcactaggcccatgttaccgtttagttcacaataagaagatctcttgtgtctattgattctgcaggagaacttgccggatcatgaaatagaagttgcaattcacacagactcgaggcacgctgaccgtctcagaacagtgtattgcagcaaagagacatcagatgaaggatgcttggttttcccaagaatagagttattaggaagcaggaaaagtttcgaaatgcttaagcgagtgaatggagagaacaacagtaatgtttatgagcttatgattagagcttga

SEQ ID NO: 168172 - DNA, 1180 bp, Arabidopsis thaliana landsberg
  unsure (1)..(1180): unsure at all n locations
ctttggtcggcaagatcaaactttctgatatccatgagcagaaaatcgaacaacggttgaaacaactcaacaaacccgccgttaaatctatccatgtattcacaacaacttttaattacctatggttttctattcccactattttcttggctaaatgcttttatgttttgctttaatttttatattgaatagagtccagatggagatataatcgattgtgtatggatctatcaccaaccagcttttgatcatcctttactcaaaaaccacaccattcaggtttttttgtaatacttgtttttattcactcttcaaaatcatattacctctacgttttgccctaacgcttcttgtttttttcgaggaagatgaggccgaaaagtgactcgacaagggacaaaactggaggtaacaagacagacattatccatcaattgtggcgcacgaaaggtgaatgtcctaagaacactattcccatcagaagaagaacaagagatgatcttctaagatcagattccatcgaaactcatggaagaaagaacccaccaaccatttctccaactacttctcacctccccgatgatcagacagaagttcatgaggtatctatatccccggctcaaagtttttttttttaaaagtgattaaatatttttgacgctttaatttttataattttgagttaaactattaagagctacccttaactattataccttactttggttgtagcatgcgagtgtgtacctggactatggtgaataccatggcagcaagagccgtataagtatatggagaccagacgtttatatgaccgagtttagtttggctcaaacatgggtcgtcggtggagattgggacactgttttgaacactgtggagtctggttggcaggtcagtgctatttttttttatttaggctaacacttctctttgtgtgtggggctttttttgtaaaaaaaaatggatcttaattagaatatatgtgttgcattgttgcaaaatttactgattttataaactcaatttgaatcgataataattggatactcagatataccacattatgcattcagaagttctactatttctaacttcagtgtttgaactccttatgatagatcctacattctatgtacggtgacaataatacaagactttttcgcattttggacggcan

SEQ ID NO: 168173 - DNA, 423 bp, Arabidopsis thaliana landsberg
actccaaggtagttgccggccaagtcgagaaagactatgcagcaaaggaccccgcgctcatgcagtacctcgcggccatccgaagtctcgagaggcaattcaaggggttcaccttgcagcatgtggatcgggccaagaatgaagaggccgacgcattggccaaggctgccgcaaggggcgaaattctgccctccgacgtgtcctttcaggtaatcggaaggcaagcgttcggaagcccgaaggtcccaaatatacaaacgacagcgagggccaccgcatagtcaaccttatcaggaccgaggactggcgagcaccaataaccctgttcctacaggggtattatcatccagccgacatcagtgaggccaagcgcctcaaacatcgaagccgagacttcgcactgattgaaggccgggtacgagc

SEQ ID NO: 168174 - DNA, 377 bp, Arabidopsis thaliana landsberg
caccgatccgcccgagctggccgagcgaacctggagtgggccgagctactgtagatttggccgacatacacacgagcgggaggatagcccaaaacaggacttgccccaagaacaccttccccctcagaccaagcacaaaacggcgaacataacgaggatggccgacgcaacagagcagtcaaccaccaggccgagggccaccagggccataactagactagacacccgactaccacattccgagactccgccaatccgaagtcaaccagacacttacacacaaggaagagaataggactccagctaaacaatcgaaccgattacacaaacaccggggaggaggacagtaataccagcgtcccaataccgcgaaaccc

SEQ ID NO: 168175 - DNA, 1749 bp, Arabidopsis thaliana landsberg
atgaattatcgacgaaaacagagtgctataactaactctgccgttgtctttatcatcatctccgccgtatgttttctctccggcggtgtctctggtttgggagtaaactggggaacaatggcgagtcatcagttaccgccgaagacggtggtggagatgcttaaagacaacaatatacagaaagtgaagttgttcgatgccgacacaaacaccatgggagtctcgccggctccggcgtcgaagtgatggtggctatccctaatgatctgctcctagcgatgggaaactatcaaagagctaaagattgggtccaaagaaacgtctctagattcaactttaacaacggcgttaagatcaagtaagtttgaaactcattgttttgttatttaacataaggtaagaagtttcttaggactacttgattttttagatattgggtagtgatctgaaaaggggaaatcagatattagacccttttggaatattggaatttcacagaacattattttcagttgattatttttgaatttgtattattatttaattttgtatgaacaaaaaaattaaaaatgatgacaaaatgatagaaaataaaatgttgaaaacaataataatagttggattaggaggtctataatagtcttgagcccactagattagacaaactgaggtaaactccaatcctttacacgtttggttttgagttttgaattgtttgacaactcaatatttttctttaactgctattattggacgactattatagttgaatcatttatttttcttttattatatcagttcttgacatgttatttgttgagcaccacatattttcatttatctctatatgttttaggtttttttttttgtatttttgttaaataacataatacatacatacttctgaaagtgaattatttgaatttggtttatgcatatcgcatgtatggaccgtcatatgttatatcccatatttcatctttactcaaatatggaccgtcatgtgtgtgtcaagtatttattgctaatgatctaaacgtattctgacaaaaaaaaaaaagtcggaatctttctttttcaattcctctttattgcaaagatgcataccataccatgtgaaatttcctacataggtacaaacgtaaaaatacatgtatgatgcatcatagccgttatttatcttccacaaacccataaatcatgaaattatcgaaattaaatcataagaataaatttatttggaaattttaaaactaggaactaaagtatgatttaattttttattttaattttgcagatacgttgcagtggggaacgaaccgttcttgacagcgtacaacggatcattcataaacctaacgtacccagcactcttcaacatccaaaccgctttaaacgaggctggagttggtgattttaccaaagccaccgttcctttaaacgccgacgtttacaattctcctccggacaatcaagtcccatccgccggaagattccgttccgacattatccaagaaatgacacaaatcgttaacttcctcgcacagaacaaagctcctttcacagtcaacatttatcctttcctcagtctctacttaagcagcgactttcctttcgaatacgctttctttgacggccaaaacaccgttaacgataacggcgttatctacacgaacgtcctcgacgccagtttcgacacgcttttagcttcaataaacgaattgaatcacggtaacatggaagtgatcg

SEQ ID NO: 168176 - DNA, 797 bp, Arabidopsis thaliana landsberg
  unsure (1)..(797): unsure at all n locations
tagatatccgaccttagaaaatctagcattagcagtgatatcggcggctcggaaactctgaccgtacttccattcacactccatagtagtttttaccgatcagccgctccacacagttctccacaatcggaaccaatccgggagaattgcaaaatgggcaatnnnnnnnnnnnnnnnnnnnnnnnnnnnnnnnnnnnnnnnnngcctcaagtctcaggtcctagcagacttcatgaccgagctatctccatatgtgattgacaaggtccttgaagagaactggatactttacgcggatggctcatcgtcattacaaggctccggtcttgaaatgctacttcaatcaccaaccgaagagatccttgaacagtcgcttcgactccaattcaaagcgtccaataacaaagcagaatacgaagcacttctagcaggacttcgacttgctaaaggcctcggagccaggcacatcaaagctttcagtgattctcagctcgtagtctgtcagttcagcgaggaatttgaagctaaaaatgaaagaatgcgagcctatctttcattagttcacgatctgtccaaacagttcgaccaattctctctggtcaaaattcctcggactgacaactccgcagcagacgctttagccgcacaagcttcaaacacgaaccccgatatgaggcgaacaatcctcgtcgaaagcatagcgaaaccaagtatcgagctaccaagtgtgacctgcgtgattatagatcccgtgacggccatggacgtagatgtagacgcaaccaacacgccaaaca

SEQ ID NO: 168177 - DNA, 971 bp, Arabidopsis thaliana landsberg; identical to SEQ ID NO: 52944

SEQ ID NO: 168178 - DNA, 1438 bp, Arabidopsis thaliana landsberg
gaagaaagagaagaatagaaaaaaaaatgtcaagataaagtgtgataggaggtgagaaaagaaaggagcataaatgagataccaaaagtgttataacgtggtgtgataaataatgatgtacagatcccttcgtctcgcggttttggttccaactcgactttttatcctctaccttcagagatctttgtgagcaagacattggttagactaaagatacagtttcaagatggtgccaacgttaatgtggaaggtgatgtttctcttccgatgcttaagactctccatcttgattatgttaagatggataccagaatgttacagaagcttctttctggctgtcacacgctcgaagaattattgctgatgaatttgatatggaaagaatcttcagaacctgaaccttgctttgtgagtgtttctgtccgaaccctcaagatactaaaattttctcgttttgaaaattttatgaaggctaaaaattttaaaccgatcgtgttattgtcatttgatattccaaatctagtctacttagagtacttggatacaattgcggacaagtatgaacaagtgaggtttgactcgcttgttaaagttagtattggtctttgtaagacctctaaacagattgaaaatgacaataataatgtaacaaagcttttcatgggaatatgcaatgtcacgattctctacttgactgaagatactcttaaggttaatcacatctttctcctaatgtattaaatttctactcagatattgataagtgagtaatcatatatgtagttgatttggtttctctttcaggtacttggttgctgccgtgaaacaatgccggtattcgagaacttaattcacttaactattaggactggagtacatataggatggaaatcattaccacatctactcaagaattgtccaaatctacaaactcttgtcttcgaggtactgtatacatcctttaaatcaaccgatgacatgcttttgaaacacatataattagactttgatattgattcattttatgtttcagggaatgcatcatatatataggaaaggaagagcttgcggggacgtggacgaggatgggacgtgcatgtgcaaaaatctggataatatgagggtgaagaaggatattgatgcttgtctatcgtcaagtccggtgaaggtcataaagatattgaactttggtgaactttgtgggttttgtgagttttgtgatgttgaagaagatgtagcgggtcagataaagcaggtcaagcaattcctagagacaatgccggatcttgaaaaagtgatattgtactacaatacaccagcggatgaagatgtgatgaaggtgttcaagaaacttaagaagcttcctagagtagcttcagccaagtgtgaggtccaaataatctctgataacatcaacttgtcatttactttccgttag

SEQ ID NO: 168179 - DNA, 1892 bp, Arabidopsis thaliana landsberg
ttgtgtattttcgtgaactattccaaggaactcttgctcgatatatgtgacattcttgaggtacagttttacagggttcaggtaagtgtgcaatctccagaaggtgttagcacaatgcgaggaattctgaggagatttaatgattttgtaaagcttttagctgatgtaagattctctcaatctttctcaactcaatgatattcaacataatttgtagttgcttttggtcagtgtgattcaaacaagttaactgcaatgtgttttatggcatatgatttacagctcaaaagagcatttcctaggaaaagttttccatcagctcctcctaaaggatttttgcgtgtcaaaagtagagatatgttagaagaggtatgcattctcttgtggagctatgttgttcttttcaaattttctctctttcacgctttcctgcttttgtggttcctcaatcaagaacattttgacgcaggtttcatgtagaagtatatgtaaagtactgtactcaagaattatattacactcattttaaagatgtggtgttgttgcagagaaggtgctctgtggaggattggatgacgaagttgttatctgatatagaattggcaagaagtgttgtagttgcatccttcctcgaactagaagctactgctaggtctggtatgagcccattatagtattacagttaccgtttgataaagattcttaaaggcagttagttaatctatgtttaagtaaatgtgcttagtctttcactataatttaaagttgatttttttttttgttccagcatgccaagttgtagatcagaatgcttccgattccaatgatgatggaaatagcacaagcttgtcgtctctagttcacccaaattctggtggcagttctttgctctcatctgactatggcagcgatactgcttatgaaacatctgagctcggatcagcaagtttaggtcaggatgatgtttctgaaactgatactggagatctaactttggatgaagatctgacaaatccaacagagaagcttgtaaagtttagcatgtccaacattgacgagggactgagtatgagtcaaactattatcgagcagctagaagattttcctaagcacagagtccatttaggatatgccaatgatatcacagagacgaattcgtacaatggaaaagcttctaaaggtgtatttcgagcaaacaacgacttacggcgtcgctctgaatcagaaactagtcactcagtgatgcatgatcgaaagctttctcttgagagcgctgacggggtttcgttactagccggtgagacatcaacctctagtatcttgagctccattgtagatagccagctggatgttaatcatgatatatctgttggtaacctggagataccgggtaatggacgaatagttctcccgctgaaaatgcatagtaaattaaataggattctattaactatgaatgagagacttctcaattcaaaaacagacatggaggatcttatagcgagactaaatcaagagacagcggtgaaggaatatctgaacagaaaggtacatgattgaaaataatagtacatctgttttcaagtttgttggtaatgaaatctgcgcttcttcctttactcttcatgcgaatgtcatatatgtaatcttggttttcctgttcaggttgatgatctggaagtggaacttgaaactactaaacagagaaacaaagagaatttggagcaagctttgatgaccgagagacagagttttaccaagatgcagtgggatatggaagaactcaggcaaaaaacttttgagatggaactgaagttaaagtcaaaagaggtattgaaatttgaaatagttccatctcaatcacattctttccacaattagcaagttcacac

SEQ ID NO: 168180 - DNA, 1104 bp, Arabidopsis thaliana landsberg
tacggagacaactctctctccctcccgggccgaaatcttggcctttaatcggaaacctaccggaaatactagggaggaacaaaccggtgttccggtggatacattctctcatgaaagaactcaacaccgatattgcatgtatccgtcttgcgaatactccacgtgatccccgtgacatccccgagaattgcaagagagattctgaagaagcaagactccgttttcgccactagaccgctaacgatgggcacggagtactgcagccgcgggtacttgaccgttgcggtggagccacaaggagagcagtggaagaagatgaggagagtggtggcatctcacgtgacgagcaagaagagcttccaaatgatgctacaaaagagaaccgaagaggctgataacttagtccggtacatcaataaccgtagtgtcaaaaaccgtggtaatgcttttgtggttattgatttaaggcttgcggtacggcaatacagtggaaatgtagctcggaagatgatgtttggtataaggcattttggtaaaggaagtgaagatggatcgggaccagggttggaagagattgaacatgtggaatctttgtttacggttttaacccatctttacgcctttgcattgtcagattatgtcccgtggctaaggttcttggacttggaaggccatgagaaggttgtgagtaacgcaatgagaaatgtaagtaagtataacgacccttttgttgatgaaagactcatgcaatggcgaaatgggaagatgaaagaacctcaagattttcttgacatgtttataatagctaaagacactgacgggaagcctactctgtcggacgaagagatcaaagcacaagtgacggtatgcattattatatatggacatatatctttttataatcggcttatagaacatgttcatacgtagagtttttttctttcttataacacgaaagattcgtcttttcatggccactagtgatctagctcttataaaacatgtggtcagtgatgtctacaatagtacatcaattgtacatgaatctagtacttagtatttggtaaaactataaaaaaacttcttaacctcaaagttcatggt

SEQ ID NO: 168181 - DNA, 521 bp, Arabidopsis thaliana landsberg
  unsure (1)..(521): unsure at all n locations
atgaataccgtggtgaaagtcgcgcggcatgtcgatcacgcctccgccttcgggcgcgtggcggtggtcatgggcggcagttcgtccgagcgcgaagtgtcgctggactcgggccgcaacgtgcttgaagcgctcaagagccgcggcgtggacgcgcacgccatcgacggcattccggccttgctggacgccttgcgtgccggccatttcgcgcgcgtgttcaacattctgcacggcgccggcggcgaaaacggtgagctgcagggcacgctggaatcgctcaacgtgccttacaccggctcgggcgtgctcggttcggcgttgtcgatggacaaggtgcgcaccaggcgcgtgtggcagtcgctgggcctgccgacgccgcgttttgccgcgctgacgcacggtggcgacgtgcatgccgcggcacacgaagtgngtttatcgctgatcgtcaagccggcctgcgaaggctccagcgtcggcgtgacgcgcgtgttcaacgaacggatctggacgccgcg

SEQ ID NO: 168182 - DNA, 1866 bp, Arabidopsis thaliana landsberg
tatctcatcaatggttttgctgtgtttgttagctcacaacaggtagtcttgatcatataccatatctctgtgagcttatactatgttatgttatctttatatttccttcattttctcttaggctgagactctttcaagaagaagggaagtagcaaacatagtgttggatttttctgttaggacggcaacaacttatacacctcaattcatgggtttaccaaaaggtgcatgggttaaagaaggtggatatgaaactgctggagaaggaattgttatcgggtttatcgacactggcattgatccaactcaccctagtttcaatggcactgacacttcccagcgtcagtatccgatccctaatcatttctcaggtgtttgtgaagttactccggattttccatcaggctcctgtaataggaagcttgttggagctcgccatttcgcgcagtcagctattactagagggattttcaattcatctgaagactatgcttcaccttttgacggcgatggccatggcacgtaagtataacttcttggtaatgttgaaacattggcgtcttctttatattctgctactaaatatcattatcttgatgaaacaggcacacagcttccatcgcagcgggtaaccatggtgtctcagcagtagtttctggccataactttggaagtgctagtggaatcgctcctcgtgcgcagtaagtaaatagacattagccagatatcatctttttatcattcatattgcattgagtgtactaatgacatttttaaaaatgtaccagtatttctgtttacaaggcattgtataagagttttgggggatttgctgcagatgttgttgctgctatagaccaggtaaatcatttacctttttccttttattgactaattagaatgtatcgatctttccatgacatttttcattggtttatgaatcttattaggcagctcaagatggagttgacatattaagtctatccatcacacctaatcgacgtcctcccggtgtagccacgttctttaacccgttagatatggccatgctttccgctgttaaggccggtatattcgttgtacaagctgcaggaaacacaggtccttctcctaagagcatgtcctccttcagtccatggattttcactgtcggtgctgcttctcacgatcgagactactctaactcgatagtcctaggcaacaatgtatctattccaggcgtaggacttgcacgtaagtcttaattcagtttcaaaccatcagctagtttttgcttatctgtaatttctgttttgttttcttctagttcgtacagatgaaggcaagaagtacacaatgatctctgctcttgatgcgttgaagaacaaaagttcagtagtagacaaagacatgtatgtaggtgaatgccaagactatggcagcttcgataaagatgttatccgtgggaatctactgatatgtagctactctatccgtttcgtcctcgggctttccactattaaacaagctttagctgttgccaagaatctatctgcaaagggtgttgtgttctacatggacccttatgttcttggttttcagattaatcctacaccgatggacatgcccgggatcataattccatccgcagaagattccaaggtgagaatataactagaaacatatcacttattttcttgattcttcttgaagagcaatctaataacgacatgttaattcatatataggttttactcaagtactataactcttctcttgaagagatggaacaaccaaggagattgttagatttggagcagttgcagccattgcaggtggacaaaatgctaacttcagtaacagagctcctaagattatgtactactc

SEQ ID NO: 168183 - DNA, 1221 bp, Arabidopsis thaliana landsberg
tcaatttcctttcttgtttaaacacatcgtttggaaaacggttttgtaactttctggatcatcaactacctcaaggtacacatacaggatgggtcatgagttgatgaatggatcaatagtttggagcaagaatttcactttcaagtcctctccttatcctggacaagactcgttacaacgggtcataatcttcggggacatggggaaggtacttgcttgttgttttctatataaaaacattgccttgttagtgtttcctctcgggacttatatgtttctgtaatatgtatttgaagggagagcgggatggttcaaacgagtacaatgattatcagcctggttctctcaacaccactgatcaactcatcaaggacttgaagaacattgacattgttttccacattggagatatcacttattccaatgggtatctctccccgtgggatcagttcacagctcaagtccagcccattgcttctactgtcccctacatgatcgcaaggttagtcaacaagaaaagattcatcattgtttttcccttatactcctgcaatgctttatgttattccttttcactacagtagcaaccacgagcggattgaccagacactagatctttctatgccggtccagactttggaggagagtgtggtgttcctgtaaagatcatgttctactttcctgctgagaaccgagctaaattttggtgaagttgttaactattgacattttcttgcaagttccagaacaatatctaacgaatttcggttgaatgggcatgtacagaacatataacggaatgttctgtttttgtgtagcagacactgaagaccattggagagaaggcacagagcaatacaaattcattgaaaattgtcttgccactgttgatagaaagactcagtcttgattcatttttatagctcatcctgtcattggttattccaccgatgattggtatggcaaagaaggaacctttgaagagcctatgggaaagagaaagactacaaaaactgtggcagaagtacaaagtagacattgctttctacgtccaagtccataactatgagcaacctgccccattccatcatataccatcaatgtagcattgtctctgagctcttctcttacctttttgttttctattgcacagccaatgtgtgaacaatgaaaaaaattattatgcttctgcgctcacatgaatgtatttgtgacttagtt

SEQ ID NO: 168184 - DNA, 750 bp, Arabidopsis thaliana landsberg
caatgcgttgattgatgcttgtgtgaaagaaggaagggtttcagaggctgaagaattatatgaggagatgatccgaagatctttggatcctgatattgttacttatagtttactgatttacgggctttgtatgtacagtcgcctagatgaagcagaggaaatgtttggttttatggttagcaaaggttgctttccagatgttgtaacttatagtattctcattaatggatattgcaagtctaagaaggtagagcatgggatgaaactcttctgcgagatgtctcagagaggagtggttagaaatacagtcacttacacaattcttattcagggttattgtcgagcgggtaagcttaatgttgctgaagaaattttcagacggatggttttttgtggtgtgcatccataatattatcacttacaacgttttactacatggtctatgtgataatgggaagatagagaaagcattggtggtattggcagatatgcagaagagtggaatggatgctgatattgttacatataatatcatcattcgcgggatgtgtaaggctggtgaggtggtagatgcttgggatttatattgtagtctcaactgcaaaggattaatgcctgatatttggacatacactacaatgatgttaggattgtacaagaaaggactacggcgtgaagcagatgcgctgtttagaaaaatgaaagaagatgggattttgccaaatgaatgttacgtatagtgaggcttat

SEQ ID NO: 168185 - DNA, 920 bp, Arabidopsis thaliana landsberg
  unsure (1)..(920): unsure at all n locations
cacataatctatatacttacaatattttgatcgnctgtttctgccgacgctatcaaatctctcttgctttagctcttcttggcaagatgatgaaactcggctatgagcccagcattgtcacgctttcttctcttctcaatggatactgtcacggtaagaggatttcagatgctgtagctttggttgatcaaatggtggaaatggggtatagacctgacacaatcacatttacagctttgattcatgggctttttctccacaacaaagcttctgaagctgtggcgttagttgatcgaatggttcaaagaggctgtcaaccaaatctggttacttatggagtggtagtaaatggtttatgtaagagaggtgatactgatttggctttaaatctgctcaacaagatggaagcatcaaaaatagaggttgatgttgtgatgtacagcacaatcattgatggtctttgcaagtacaaagacgtgaatgatgcactcaatctgttcactgaaatggataacaaaggtattagacctaatgttatcacctacagctccctcataagttgcctttgtagttatggaagatggagtgatgcctctcaactactgagtgatatgattgagaagaaaatcaaccctaatttagtcacgttcaatgcattgatcgatgcgtttgtgaaagaaggaaagtttgtagaggctgagaaattgtacgatgacatgatcaaaaggtctatagatcctgatattttcacttacaattcattgatcaacgggttctgtatgcatgatcgtctagacaaggccaagcagatgtttgagctcatggttagcaaggactgtttcccagaaaaagttacatataatactctcataaagggattttgcaagtctaagagagtagaagatggtacggaactcttc

SEQ ID NO: 168186 - DNA, 1424 bp, Arabidopsis thaliana landsberg
  unsure (1)..(1424): unsure at all n locations
ttagatttacattcttgtacagaggattccaaagtgaaatcattatgacatgtgtgcaggacatagcatttcttcatcatctgggcattaagtttgttctagttcctggaactcaagtgcaaatcgaccagcttctagctgagagaggtcagaaaaaattaaccttgccacttatcttcttattggcttgtttagatatatatgaagttgcaaccttattgtgataaatagtgaatggtttgtcatcagttagtgatggcgaagttgcaaccttattgtgataaatatgaacatttgagcttgttcagatggagcctaaaggtgtgtgagtttcaggacgcgagcctacatatgtgggtcgttacagagtcacagactcagcatctcttcaggctgctaaggaagctgcgggagcaatatctgtaatgattgaggccaaactatctcccggaccttctatttacaatatacgccgacatggtgatagtagtcgtttgcatgaaacaggtgttagggtagatactggtaacttctttgcagcaaaggtgagtttttcactttcttcatatgttaggttggatgtagattcttgtcatgttcgatctaattaattgtcatggcagagaagaggtgttgttgatggtgttgattttggagcaactggtttagtgaagaagatagatgtagatcgaatccgtgagaggcttgatagtggttctgtagttttattgaggaacatgggccattccagtaccggagaagtcttaaattgcaagtatgctctctttattggtaataatttacttgctaaatcttgacgacattaggtttttgtcaccctgatattgggacattacttctacactgcagtacctatgaggttgctacagcatgtgctttagctataggagcagataagcttatttgcataatggatggtccaattcttgatgagaatggacatcttgttcggttcttgactcttcaggaagcagatacattagtcagaaaacgggcacagcaaagcgagatcgctgccaattacgtgaaggctgttggggatggaggcataagtagttttcctgaaccacttggttacaatggtatggtgacgactcccaacaatcatattgggagaccaatttgggaaaaactcagtcnnnnnnnnnnnnnnnnnnnnggatttgacaacggaaatggtttgtggtctggggagcaaggttttgctattggcggtgaggagagaattagccgtttgaatggatatctctctgaactggctgcagcagcgttcgtttgcagagtgagtccttgagctaacccttgtgcctgttttttacatccagttctccttccctgatttgttgaagggtggtgtcaaaagagatcacttattggatggtactataagtggagtgctattg

SEQ ID NO: 168187 - DNA, 2449 bp, Arabidopsis thaliana landsberg
atttcacggaaaatcgagtatttgatcaatcatgcaatgtgattatgtgaaagcacagagaggagagacttcagactccaaagataaaattaatgggctttgcattagggcccaagtttcatcataaatggtccgtaagctaacttttatttaggcctatactgattttatttgttttttaatctatttatttatttttatataagtcacctaaaaacgagcgtcccattacaaactagactttttttgtagagtgaattttgccagtaatgagcgaaatataccaaaacgatttgatagcgatatttgcttaaatgtagttaaacgtatggatggattaaaaaaaaaaaagttagtgtgatggatattacacacccagtctcgaaaagctgcggtaactagcaaaaattaattttaatgagaatttttctgttttttttttttttggttacaacttaaatgagatattttcggtttaaacgtgaatgaaatgtatgtaagcaaaatccattgaatatagactttaaaattgaggctaaagtaaagaccaaactcaacagtctaatgattatttaccaaaataaaaacctgtaatgtttatgctcaaaattaatctaataccgagtaatttaaatggaacaagcaaacaatagtttctttaaattaatacatagatcatgtcgacattttatccttataatagtataaaggttgatcttttcaaaaaaaaaaaaaaagtatatattggtcatcaactatttaattatgtgatatataaataaatgatatttttgggtctattttaccactttctccgtaaaactttccaacaatattcgctaggcaaaaaagaaaataataataatttattttctccctgcaggcgggagtttttaaccaagcacttgaaaagtttttctccaccggagaaactactgtcgccggcgatgggctgcatttgtttcaaacgttggcgtcgatcgtcttctccgtcgataacatccaccatcaccgtcatcgacgatctaggtaaaatccaacgaattcgccagccactcctcctatgcgttaattagattctgaagaagacgatgatcgagagaactaacctaatagttttggctgcagataataaagaagaagatgaaggaagtacttgtcctaatttcctggagttcagcttggaacagttgagagtcgcaactgacggattctccgccgacaacatcgtgtcggagcacaacgagagggttcctaacatcgtctacaaaggccagctcaacgacggaagaaagatcgccgtcaagcggtttcaacggctttcatggcctgattctttagaattcatcgttcgtgtcctttacccatcaatacttattgattcttctctgtttggttttgtataagatttgactagtgatcgcttattcatcttatttgactttattggttactaactccgtgatacttctcttgaatgttgcaatgttctggattctgatttgttgcagaggaggcaaatttcaagtctgtttgacttagtaaagattcaattcggttctatgcttgatctgttgcagaggaaaatttcttgaatatggcatatttgttattcaggaggaagcacaagctgtagggagatgtaggagtgagcatatggccaatttgatcggttgttgctcagaaggtcacgagaggttgcttgttgctgagtacatgcctaatgaaacacttgctaagcatctctttcactgtgagactcaaacatttcaagttcttgatctcttttggccttaaactttactttagagtttaattattgtgtctaagttgtttttactctaaaatggtttttcaggggagaaaagaccaatgaagtgggaaatgaggttgagagttgcgttacatactgcaacagccttggagtactgtaatgattggggaatagatttgtatcacgatcttaacacctacagaatattgtttgacaaggtaagaaacttcatacgcggtttgatgttatcataagttatttataaaagtgatggaacaggttgggaatcctaggctgtcttgttttggtctcatgaagtgtagccgagagggaaagagctatagtaccaacttggcatttgctcctcctgaatatttacgtctaggtatgtgttttatgtttaattttcttgagagaaaacttcatcagctgaaatctcaaagatgtttttcttttacttttattgttaggtactgtgataccggagagtgtcacatttagcttcggaaccttgttactggatcttatgagcggcagacatattccaccaaaccatgtaactttcttctcacaaagcaaaatgtgtatatacataatgtatctttagcagtttcattgatttttagcttatctgtcatttcaggcacttgatctgttccgtggtaaaaactattt

SEQ ID NO: 168188 - DNA, 1191 bp, Arabidopsis thaliana landsberg
aacttttttatttgttcaaatccggatctagcaaacctgatcgaacaagaatgcagtaaaacctcatgggaggcaatattgagtagaatttggccaaaagcaaaatgtatagaagccgtcattaccggcaccatggcacagtacattccattgctggaattctatggcggtggtcttcctttggtttcatcatggtatggcagctccgaatgtttcatcggtatcaatctcaatcctctgtctaagcctggtgatgtgtcgtacaccatcattccaagtatggggtactttgagttcattgaggtcgtgaaagaccgtcaagaagctgtccatgttccctcagaccctgtggtggtcgacctcgtcgatgttaaaattggccatgattatgaacttcttgtcacaacgttttctggtaagtttcttgtactctacgtttcaaataaatgtagttttagggttttgttttaaaaagtctttatattgcttgcttgagaaaactataaatgatagaattaaatattttcactctcttggtttcttaatgtatctcaaaaatctatatgttggttttctcacaagatgcatgtgtgaattacaggtctgtataggtaccgtttaggggatgttttacgagtgactggtttccacaacaatgcgccacaattttacttcgtggggagacagaatgtagttctgagcatcgacttgagcaagacctacgaagaagaccttctcaaggcagtgaaaaacgcgagtctcctgctcgagccacatgacctgatgctcatggatttcactagccgtgtagatctatcctcgttgccaggacactacgtgctctattgggaacttggtaacaaattcaggaacgccaagctcgatcccaaatctaatgtcttggaggaatgttgcttaaccgttgaggagtctctcgactctatctacagaaaaggacgaaaaaatgataagatcattggaccacttgagattaaggtagttaaacctggcgcttttgatgagctcatgaatttcttcttgtctcgaggctcttctgtgagtcagtacaagactccaaggtcagtgacgcatgaagaagccttgaatatattggaggcgaacgttgtgtccgagtttcttagccagaaaactccgtcgtgggagctacatgagctgcactccagccgataa

SEQ ID NO: 168189 - DNA, 1851 bp, Arabidopsis thaliana landsberg
tcccatcacttcgggaagattcatagagaaaaagaggtgcagatgccagttgtccaaggtcgtgcaagggaatttcaaaaggatcgagatgaaagggtttacccttgagcaaattaacaatttacagggtacaactgaactcatttaggggaaagagttaaatgaggttaaatgggttagcccaattaaactcatatactaaatggagttcacacaaataattgggtacccaattaagccctttaatattagttataattaaaaaaaaaaaaattaatcgctaaaataagagagtaaatgatttaattcattaaaactcaatttcactaaaatcgtaaaaactgttttcagctaaactcctatacccgcattttccgctaaaattgcaaaacttgttttttgtcaaaatatgtaatttgattttccgatcttgcaatttaatcttttaccaacgatgatagatttttggggtaagagtataagtttggttcaaaagtcatttttcgactcttatcttgtttattttgttttcaaaatcacttttctttcgatttgggacatgtgacctatttgataaagcactatttgattttctttcttaagaattgtaataagaggagaagtgtataccaagaagatgaagtaatcgacgaggtgttatatctcagaagtgttgaagaccttcgatgacttaaaacatgctctaacggatattgagaagaattactttaaggagcatccgagtttcaagcacatctaccatctgccatccggatatacctacaagctaatggggatgtggatgcttcttcttcgaacgacaactattgagcagaagaaggaggtttggttcattgttaatggagttcccatccgctatggtattagggcgcatggtttgcctctggtttaaactacaagccatatccagctaattatcagaatgttggtagtaagaacttcgcgaacaagtacttcaaaaccggggtaattaaacgggaagacgtgagaacagagctaatagagatggaaccggctatatcttagaataggttggggatggcggtcttctattttctaacaagcatcattgttgtacttattaagaccgaaaaaagggttagtccaattgatgatttctgtgttagggctgcaagtgatcttacgttttgtaagacatttccatgggagagatattcatttgagtacatgttaaaatcgatctcacacacattggatcattttaacggtgtcgtcccgaacactcagttaccatggcctgttcccggattctgtgtgccgtttgaggtaagtcacatgttttatccttgttacattttcgtaattgaagctaacaattaaatttcatgtgttttgtgtagtttttagcatttgaggtcattccatcacttagggaaagattcatacaagaaaaagagggtgcacatgccggttgtccaaggatgtgcaaggtgaatttcaagaggaccgagatgaaagggtttacccttgagcaaatcaaccatgtactcggaacaattgaggttagtatttcctattattccttgagcaaatatgattttatttctttctaatatttcattgtttattatttccataggtcattgagagtataattagagagaaggctgaagaagtacctcttttggcagaaatcatgggagtagaggatgatgttgataagcacgatgttgtagttgatagttggatgaagcgtcttgatcaagggcgtgaaattagatttgaaaaggtgtacaacgaggatgtgcaggcacgaatggaagccccaaatgaagagaaagttcccacagctgttaagcgggagacccg

SEQ ID NO: 168190 - DNA, 4510 bp, Arabidopsis thaliana landsberg
  unsure (1)..(4510): unsure at all n locations
atggctgggaatacagctaacaacaaagtcccgagtaatcagcatggtccagggaaggagaagcgtgtattaagagtttccccgcggagaaaacgctctgcatcaaaggcaacggaggaactgggttagaatctctaatttaccgtttgttgtctttgggtgtatcagaattgtaaagcttgtttgattaaagtgttagaatttgtcggaatttagcatatctttaggatgaaaaattgagaagtagaattgaaaatctctgtttccgccaaaaatatgattttgagttataatctgaaaaatgtctgtgtacgtacactacttcggtttgcttaacagtatatgacttttaattgcaggtagtccaagtgttgctccgactgaagatcttatagttgaagatttaccaccaagactctttgctctagaccggtacccttccgannnnnnnnnnnnnnnnnnnnnnaaaccggagtacatttctgacatagcaaaagtactaaaggggaaatcagagatgcagtttcttctcgattctccatttggggaactttttaaaatacccaaaaacaaggcatctttcaatgctaagcttgtccttggactaatatgccgtcagttagtgacaaagaaggtgaatgagatgtggattgtattcggcggtcatccaattagatttggattaagagaatttagtatcctaactgggctggaatgtgggaagtatcccaagaagaaagacgttgatgatgttatcagtgtgaaaccctgagtgtgagagtgtttggaagactctgtttgatgagaggtttggggacacggttccaacaattgctgatttggtgagctggctgcaggaggaggaaagcatggaggggtggaagcaactggcactatctcttattattttggttgacggtgtggtagcggccctcagtaaccccaacaggcctacttcgaagactatcgagatgactaagaacctggagtttttctgcaaatacccatggggaagggtgtcctttacccgtactttggggaggatagcaaatttccaaactccttacgatgctcacaaactaataaggggtttacttgtagggtcttatgcactccatggcttcccattagctctccagcttttagctttcgaaacaatcccatcaattgctaagctaggacctgatgatgtacctaacaggacatttgctgagaggtctatccatcgtcttgcctctctgcgagcaatccggacatctcgcattttggagtgtgaggctgctgatgaggtgtgttaaattgtgtatgtacgtacataataagtaaatgtacattatctatggttaacatacttatttgtgtaggttgaggtcaactatattgtgaaaccagctgataatgtttgtcctccatctctttcatgggatgatgaagttgatgatccaagggttgattacattgaggcactgttgatagatgggcaccagtggcaggaggatgaatgggttggaggctatgctagagtaccaaagcagttgcgcccaccacaactagaagagacaggtaagtataagtataaaggttcttacaaatttttttggtattgcacccagaagaaaaccaattaatagcagcaactggtctattgtagatgttaagagaaaacgaaatgcaccgggcccgagccctaaagaacctgctatggaaaaacagaaatctgaaatggactgtgataaagaagagaatgctgaggattgttttggacagcttgtgcctgagaggtttattgttgaaatgaggaggtctttcaaggagctggaagaccaaatgtatcaaatgcatgaagatatgaaagactttgtccgtgaccagatacttgctgtccttgatccaaaaggcaaaaggacagaacaaaccataccttcccatgattcgcgggaaccacctacttctatggataaggcaccggttactgggaagaagccatcgagaaggatatctacaaaaggaagcactggaacgagaaagtcttcaaggctgactcgtgtttctcatgatgtggacactcctgcactttctgttggctgtaattccaaagaggaagatttggatgtccctggagtacataccactgctgtcggcggaagaagaaaaccttcaaagccgaagaaaaatgtttcttttgctgttgacactactgagctacctgattccaataaggaagatatgcaaggattcattgatgaacaggtaagtcatgtacgtacattgctaaatattttataatccatatgtataactgtactgtctgcttcgatacagtatggcgctaataatgaaagtgattttactgcaaatgatggattggattcttcggccgctgaagaagagatattagacactggatttttaatagttccttatgctggatccacacaatcccatctggtatgtcgtctactaatactctaaacaatctgtttaaatggtgtacgtacatattcgcttaagaagttagttaaactatgtttcaggatagaggaaatgttgttgttggtaagactgtcttcttaggttcaatgtttgggactgtctatgttacacaggaagagaggcctgtggaagaagctactgttgacaccgagatggaagaagttccatctaatgagtctgcaagagtttcagaggtagatcttctggtaatcgttatatacagatttccatgactatatgcatatatattacattaatttctccacttatctaacgcttaactctatggtagcctatctttcaggataatggaccaaaggatgttgctgaacctggcttagttggtacccatacaggggccgatgaaatagctgatgctgacatagagatggtagacaatccatcaggtttaccttcaacatctgcacaggtatgtgttagtcacttgttctttttccatatgtgtacgcccataagactttgcaaattatttttgtttcaggaagaagcaagannnnnnnnnnnnnnnnnnnnnnnnaatggcagcgagtcagaagaaacttatgagccttctgatggagatacagctcacgtacctggcacaagtgtacgtacatttttgtcactatgttctgtgtacatatatattgtttcatacattactaaaaagcatacattactaaaaagtttctttccgatgataaattctacaggttgaggcggcaggagaatccaaattagtgacagggatggaagttgaaatacctgagaagacccacagtgatcccccgtcaccatttcaagtagttaacaatgtaagctaactcttgcaacaaataaaatgtactattaactgttcaaatgtataaaatttatattatgcaggtcatacgggagttggataccaaagccgttggtgatttggctgcagccactgatgtggaggtaacaatttgtgtgtttcaattcctattctcggaatagcatacataggattatatgtgtacattatatagacttgtgtacgttaacttgcacaggtagtcatggaagagccttgtattgtcgaggggtctgtaggaactgaggatcctaacccagggtcagatgaagcagacaagaccgatattcctaaaaataatgtatgtacctattttaaacatagaaaaacgtatgaaactgttgttgacaatcatatttgttaacaggatgaatcagacaatgctgctgctgtcgaagcaaaataagaaaaaaaatcgtccccaaaggtcccaaaaaaagtgaagaagcaacttgtctatgaacaggatgatgcccatcctcatggttttaaggcaaaaacagtcttggtgcccgatgtaccaactcaacagatagaggttgttatcagggctggaaatgtctcatacaaccccctggatatggttgacccttcaaaagtagaggaattcagcaatatcattaaaggaccctctgtgtaagtacattatattaaaatggattatttaatatctcaatcatcatttttccaagtcttaaggttgttatcaaatatttttctggatttacaggattcacactcttttcgggtttcgcaaagtgcccaacgagttttttgcgaaccttctaacacctggtgaatgggatgtcctcaaagatgcaaacattttcagcatgtgcgacgatctcgatgacttctacgcggcaggccacgatccaaatgacatcaactccgaaggtcgctattgacccttcgtcaaacggtgcttacaagctggtaaccccacggctatttaccatgaaggactgcgtctcgttacacatgagtctgacattcagggagctatcctacacttagagcgaatcgccccaaggaacgccgctgcaacccttgcatgcgcaattctttacatatgtgctggtaatgctcacatgggtggtgtctaccttcgcctcttcccaagcaaccattatgctttggaataaaaggaagcacgtgacatttgtgcggaggtgc

SEQ ID NO: 168191 - DNA, 1992 bp, Arabidopsis thaliana landsberg
attcttttcatattcacgctttacaacacttcgaaccatttggatcaactaaaggtttgtttcaaagcttttgtctttacttctcagacttctatttgtcttaaactcttaataatcagttatgtttctgactttcaacagttgggagcaagtagtcctgaagaagctgccaaatggatccgatcattgcaggatgcttcacaaaaggttttttttaacagttttaacattttctttacaatgaaagattttagagacttttcttcatgggactcatgttttcattaggggtttccgattccggattgcgaattttttgtatctcatgctgagaagggacttgtgaagcttgatgtatcaaagaggaaccgtcgcaaaaactctgtggactggacaaattattcatcgacaaattactcatcaacatcattgaatgtcgaaacaaacgtagcgcctgatgtcattgcaccttctccatggaaaatcttcggatgccaaaatggtaagaaaatacaaatttccttgcgattcaagaaaccgatggccttatcgagcttttgaatttcaggtttacgccttttcaaagaagctaaagattgggattcccgcggaagggtaatgcttatttggtcatattattgaaatatatgtgaatcataattggtttttaacttattttcttttgctgaaacctcttgcagcattgggatgatcacccagcaatcatggcagttggggtcattgatggtacttcagaggatattttcaacacgttaatgtctctcggtcccttacgatcagagtaagctctatgacttttgataacttgtcctattaggtcgagtctcacttactttgtttaaaagttaggcaatataggtctacatattatgacttctattattaagagattgaaaaattgctggatttcttgcagatgggacttctgtttctacaaaggaaacgtggtggagcatcttgatggacacacagatataatccatcttcagttatacagtgattggttgccatggggcatgaatcgaagagacttattgttgcgacgctactggagaagggaagatgatggaacatatggtatgaatcattcttgataatgttcttgatttgttgagttttcgggtttataaccttcttaaccttaaaatgtcacaggcatactttgtcactctgtatatcacaagaactgcccaccaaagaagggatacgtgcgcgcttgtgtcaaaagtaaagtttcttacctcactctaatttggtttttaccatatgaaaagttagaagggatactaatctagggacatcggaatgtaggtggtggttacgtggtgactccggcgaacaacgggaaacaatcactagtaaagcatatggtagccattgattggagaagctggaacttatacatgagaccatcttctgcaagatccataaccatccgtgtggttgagagggttgcggctttacgcgaaatgttcaaagcgaaacaaggacacggcttcactgagtttgtttcaggggagtttttggacaccaaaccctgcttgtccaagatcaacactatgccccttaaaacagaggccaaagaggttgatctagagactatgcatgctgaggaaatggataaacctacttcagcacgcaatagtttgatggacttaaatgatgcttctgatgaattttttgacgttcctgagcccaacgaatccactgagtttgatagctttattgatagctctccatattctcaaggacatcaggtaattttgtgtttaaccactttgcttgtggatcaaactaatttgaaaggtatgtgtgctttcagctcaagattccaacaccagctggtattgtcaagaaacttcaagatctagccattaataagaaaggctatatggatttacacgaggtgggtttggaggaaaataacactttcttgtatggagccactctttaaaaagatccaagtctcac

SEQ ID NO: 168192 - DNA, 2816 bp, Arabidopsis thaliana landsberg
atgctgttttttctattggtgcggacagggcgccaggttttgatggattcacagcggctttctaccatcaattttgggatcttattgggggtgatatttgcaacatggtgaggcatttctttgaaacgggagagatagatcaaagaataaacaagacacaactctgcctcatccctaagataacggaaccaaaacatatgtcagatttcagaccaatcagcatttgtactgtgaattacaagattatctccaaggtccttattaagcggttgaagcagtgtttgggtttagttatttctgattctcaggctgcctttgttccgggtcgtaatatctccgacaacgttctggtcgctcatgagctgttacattcgctaaaatcaaggagaaattgtcaaagtgcttatatggctattaaacgagatattagcaaagcctatgaccgagttgaatggaacttcttggagaaagttatgcttcagttaggattcaatgctcgatgggtacaatggataatggagtgtgtcaaattagtttcatttgaggttctcattaatggatctccgtatggtagcatacatccaacgagaggacttcgtcagggtgatccgttgtcgccttatttacctttgttttgtgctgaagctctcagccatatgctccggaaagcagagagggatcgtttcatacatggtatgagattggcagacgggtgtccgtctatatcacatctgctttttgccgatgactccttgttcttttgtcgctccacaacatccaattgtgaaaacttggccctcatctttaaaaggtatgaagaagcttcagggcaaaagattaattatactaaatcctctgttatttttggtaccaaaatcacagcctcgaagaaacagagactccaaaggatcttaggcatcgagagagttggtggaggtggaaaatatctcggactaccataacagtttggacgaaaaaaagttgaactctttgactacattgtcaaacgggtcaaagaaagaactcatggatggtcttgcaaatatctctctccggcaggaaaggaaattttgatcaagtccgttgctttggcattaccggtgtcctcgatgaattgttttcttctaccatcaaccatctgaggtgagatcaacagtgttatatctaccttttggtggggcaaagataatggcaaaagaaagctaccttgggttgtttggaatcgtttatcgctaccaaaaagagagggtggactgggattcaaagatcttcagaaattcaacaaagcgctcctcgcgaaacaggcttggcgaatcctgaaaaatccctctagtctccttgctcgcttgtacaagacgttatactatcctacttccagttacttacaagccttgaacggttctgctgcctcctatggctggagatcaatccaagaaggtaaaactattctacaacaaggattacgagttcgaattggtaatggtgagatcacaaaaatttgggaagacccttggctgccatgtttaccaccgagacctgctcatgggccgattttggatgaagaaatgaccgtttcggatttgtggaaacccaacataagagaatgggatccaatagttttcgatggtgtgctaaatcccgaagatcaacaactagcaaagacgttgttcctttcaaaacatgcagaggaagatacatatgtctgggcatatactaaagatgcccaatacacggttcactctggatattgggtaaccacccatgtcgacgtacaagataatgagattatccaacccccacatggatccgtagagctgaagcaaaaaatctggaaattaaaggtcgtcccaaagatccagcatttcttatggcgatgtcttagtgatgctctatctactgctaccttattacggacaagaaatatcccagctgatccgacatgtcaaagatgctgccaagaggaggaaactgttaatcacatattatttacttgcacatatgcccagatggtgtggagatgtgttaatatcaactttggttctctcctagtatcagataatttggaggacaatctcaacaggctgatggaacttcagaaggtacaaaatatccccctcagtaatcgattattacccttttggataatgtggaggatatgaaaatcaaggaatgctttcctatttcaaaagaaagactatgatcctgcttgtgaagcaagaaaaggcacttatgatgttcaagaatggattgatacgaatgcgactagtcctgaggcgaatcatgatccccctttgtcgtctggtcactccaatgagcatactcgaagccgacaatggatacccccactagcgggatgggttaagtgtaatttcgatagcggctatgtgaggggacgttcttttacaaatactggatggatagtcagagataatagaggcaaagttatccgtttcggaggtgcaaaacttcaggaagcacattcagcgctacaagcagaggcaatgggattacttcatgccttacagatgatatggactcatggtctcaggtttgttacttttgaaggtgataattgggaattaatcaagctggtaaatacgatgggagatcacaatgaaatcggtactcttctcgtcgacattcgattttggatgaaaaagctgccatacatgtctttgcgtcatgttaaccgggagagaaatgcagcagcagacgcaatagctataaaggcttcttctttaaattctctgtctcaaactttcacaataccaccacaatggttggtgaattatttgtattacccctatacgatctaa

SEQ ID NO: 168193 - DNA, 540 bp, Arabidopsis thaliana landsberg
cgtcgatgagtactttgaggagtttgagaagctcatgaacgccttgaagttagaggaatctgacgaagctctcatggctcaattcatagtcggattacaagagaggattcagcgaaaggtggagagagcccaatataatggactccatgagttgctacacctagcggtacaagtcgaacagcaaatcaggcgtaaggcatccttaagcagccgatccagaaacaacacgccttggaatgcaagcaacaaccgagccatggacaaaagcaaggccgtagagagtgatcataggttcaagaacaagtctaatgaggcacctaaaacctctaggcccaaactaggtaagttccctagtactaatcaatctcgttctcgttacattacttgtttcaaatgtcaaggtagaggacacatggcgagagaatgtctgaaccaaagggtgatgatcctcactcctagtggtgactatgagtcacaagataagaaagaggattctgatgagcatgaggacgttgagtatccggatgtaggagggcttct

SEQ ID NO: 168194 - DNA, 342 bp, Arabidopsis thaliana landsberg
cctgatcatgacaaaccactcgacccagaggtcgagtagtgtctgcaagatctcaagagatcactcgaccaccagacactcgagcacaaggaagaaaagaagactccagctattcactcgacctctcactcgaccacgtgggtcgagtacagttcttaacccgtccaaatacttcgtcgttttgagtattagggtttcgggatatttggctataagtagcatgtacttctcatttttcgcaaacaagaagttttttatctacttttatttccgcagaccttgtgttctagactttttgtaatccagatttctctttatctattcagtattcagcttttgttc

SEQ ID NO: 168195 - DNA, 570 bp, Arabidopsis thaliana landsberg
  unsure (1)..(570): unsure at all n locations
cattcccttgaaaagttattgcagaaaatcgatgaatgcataaggtctgacaatgttttccgtcaaggagagaaaagttccacacatacaccaaagtcgccatgaacttcgaaggaagattccatccaaggcatgtccgaagcatccataacccatcacaaggtgaggaaagaatgacccagtcataggatcaattaggacaaatggcaagctctcaatagcaatcttcgcaaagcacattccgaccacctgctctgagagcaagcggatgacaaagctctagtggcagatttggtgcgcctccaaggaagccattctatttgtgttgtggtgtggacaaaggccacactatnnnnnnnnnnnnnnnnnnnnnnnnnnnnnnnnaannnnnnnnnnnnnnnnnnnnnnnnnnnnnnnnnnnnnnnnnnnngtttagtacatcttcatattgttcaccctacatcccataatacatccaaactcagttacaggagccaaggccaagtctggcttcagcctcaaatgcctcaagcaacccagtgatgagtacatggtcaccagctgcatccg

SEQ ID NO: 168196 - DNA, 649 bp, Arabidopsis thaliana landsberg; identical to SEQ ID NO: 33376

SEQ ID NO: 168197 - DNA, 525 bp, Arabidopsis thaliana landsberg; identical to SEQ ID NO: 12536

SEQ ID NO: 168198 - DNA, 1270 bp, Arabidopsis thaliana landsberg
  unsure (1)..(1270): unsure at all n locations
atgatattcgatgacagttcaaataaacgtcacgtagtttgggttcttcccggtttagtttttttcaggcggtcagtagtcagtcctcctccgcggattcgtttgatcggcgattgcgttgaaggttgaaaatacgatattaatgggttcccggagagatnnnnnnnnnnnnnnnnnnnnnnnnggatggcgtcgaattcttttacttattcctgtgctctttcttcttcctcatctctcttcacttgttgatttttcttcggattcggctacgaggaacgacgcgcgaatcattcctaataagaaattggatcaccttgtgctcggtcctgtagctggacaaggcttgtctgatcgatttcattgccgaggttagattttgcgtattcttctatttttaggtttgctacaattaagcacttttgtataggcacagatctgagcaattttgtccagcaatttgaacacaatgtctcgtctctgtgaatctcaggaacttttgttttaataaccatttgaatgagatacatcatacacttagccattgttctgcttcacaaacattgtagcattgttttcatgcaacttgacgcaccattagaatggtattgacaggtgttttacaatttcatatttgtttaggcacgaaggctctgaacaagactcatggttcaacttctcatgtgtctggtgctggaaatggcgtttcttttgtgacggtgtttactgtttataatacgtcgctcggaaatgtgaaatcctccaatccggtttctgttgttgggaatgttacctacagcaagccagagaggtcaatggctgttctaaatgcattcgccaacttcattcaggtaacttgctgagttttcctctgtatttaacaattttggtgtttcttagctgctgcgtttgctatctcatagactgattactactgaaaaatctgtttttaggtgactatgcccaagagcaatgttgtcatattgactgatccagcttctgatctctccatccaacaaagcaatgtgatattacagcctgttcagggtgattattcacggggtaacctgatgcttcaaagaatcaggtcttacattgtaagagcaaactcgcactgatacctaggtagaatatatttgttgcttttacctatctatctctttggcacccatttctttaagagcccatctaattttcttttattcatttcttagaaagtgtttagtgaagtagctgaattgttagagaatatgaatgccatgggtcatct

SEQ ID NO: 168199 - DNA, 2167 bp, Arabidopsis thaliana landsberg
  unsure (1)..(2167): unsure at all n locations
cacatcatctcatcaccaatccacgactctactctcatcattcactactcgaccttgccgtccgactcactcgaccgcagctcctgcataaccttgtcgttttcacaactctatctccatcacttcactcggtcctccttaaccactcgaccaattacctacaaaacgaaaaaagaaaaatttcaaaaccgggttactccaccagtttactcaacctgtttttggtttgtggtttgtgttcctggttttgttggaactaacgtattaacgtttatctttgagttaaatttgttttcaggtttcgtaatgagtaactacagtggagaatcctctatggaccctgactacaatgtggatgaagctgagtcctggtccgctagaccgagagagcaacatgtttaccagagcttcagggatgaatttgaacgctctacagcccgacgtaatcagagaagggctgaaatcgccagaggaaagagggcgatgtcaagtagatatgagctgattgatgaggatatcgagaccgagtatgagccagagtcatggcgcagggagacgaagctgctgaacaaacccgacgaggttacagtggaggagtatatcagattcttcgagatgaatgacttctggggaacgaggtatccgtgttatgagactttagcccagctggggttactggaggacgtgcagcatttgttcgagaagtgtcatctggagacactcacttcttacccttaccctgcctataaggaggagacaatcgagtttctttccacgctgcaagtggagatgtatgaagcactcacagactttgagctggataccgtgggattaggcttcttgacgttctcagtgaatgaacagcggtatcagctttcgatcaagaagttagaacaactgtttggtttccctagtggaaagggaaccaaacccagatttgacagagaggagcttaaggatttgtgggccactatagggaacaatctaccgctactttcagcgatcagtcgccaacgtcttttactcnnnnnnnnnnnnnnnnnnnnnnnnnnnnnnnnncatggagatgatagattatgcgcttatagggattctccgccggatgaaggggaagaatgtcttgagaggcgatctcaacaacgcaccaccagtaatgcctctgttgatccatctgtgtggatacaggaagtgggcgttgacgaacggaaagaagaaggtgagaggagcactatgcgtgggtggcgttgtgacgccaattctacaagcttgtggagtaacgctcagggaaccagggttagcaccgaggatgatggacttggatcatttgcgccaatgtgagttcttggagtttgacatggctggcgactttcaccgctacaggttcgagcattcatcgattagaatcgccaacattctcctcccctgcattgacgctactaggattctcgagggcaggaacattgacttcaagcctgcgcttgaagatctttatttcgagggcagtccgccaactgaggagatcagtcacaccgaaggagctacaacagaagatgttgatgagacagatgatatagatgaggcggagtttgacacaagcatgtatcatttcagtgagcatatacctccagcgagggaaagcaagagtttgagcgaagctcacaggaacaacaacaagctgcagaagtggtgcaagaagcaggataagctactcgccaaatgcctcagggctatcaagtttctgaaggacaagctcagctgctcctcttccactacagctattccgcagggacagctccctcaggacatgccttcgaggagatatgatgagcggacttggcctgagcctagtgagcaggagattccacatgtccatgcgaggcattcatcattcgagcctcgtgaatcttggaggaagaggagaaccacactcactcgatctagtagcaggagcagacgacttttgcagtctcgtagtttacatgaccgcggtgctggccgcagcagaagaagagaggtcgaatatcctcagagcggtactggccgccacatatctgataaggtcgagtacccacctgctggagctgatactgaacagggcggctcgtctatggcctgggagcaatcacaggcagccattgacgaccaactccgttcattcttcgactga

SEQ ID NO: 168200 - DNA, 558 bp, Arabidopsis thaliana landsberg
  unsure (1)..(558): unsure at all n locations
ggtattcccagagatttcgcaaagcgatatggtttgaacataggtaggcatgagatagttttgatggacgaagaaggaaatacatgggaatcagaagttaaaagttacaagtctggtcgggtttttatagctggaggttggacaagtctctgcactgcaaataaattagaagttggagattcttgtacatttaaactgctccgcaacccgaaaattcccgtgtttcggctctgcagccgcccaaaggctggagcagaggctcggccacacaagagatctcgagtccaaagtagcagcggggggagtagacagaagcatgacgtgaggcagaagttagatgaagaaggagggccatctcgttgcactcggtcatctaacaaggctactggtgatcaagaaaagttgcagcaaacgcaatcttgctttatctttgatcatgtggctaaggtgaaacagagcgttgaagatactttaaatagtattagacggttcnnnnnnnnnnnnnnnnnnnnnnnnnnnnnnnnnnnnnctttgttacaggaaacgaaaactaagtta

SEQ ID NO: 168201 - DNA, 3940 bp, Arabidopsis thaliana landsberg
atcttcgtcaccgcctctaccgtctcttccatctccaaggtaaagtcttcagacgaattagggttttgtttggaccctaatcccttctctcgattatctctctagttctagctagtatttctttattattcgattcttaattagggtttttggttcttaatttatgttctattcatttctctaatcgtttgattttttaaggatgtcattttctgggaatgattgttcaagattccggtcgcaccaacagcaacgtgtacctttgcctcttagtgaagggaacacctcagcggttcatggtagaagccttccctcctctcctccgacgccaaccaatcagaactctcaagcgcatgggacttctcctacacagcaaagtcaatcgcctcaagcttttggtaatcattctaatcctatatctgggcgtttcaacaacctaacaattgacaagttgcttgatgtccttcattctaacactaattaggtttctattctggttttagggttagttgtgtagatgtattgtttggtttagcataacaatctattaaagtgttttggttttagatgattatactaattagtccaattgaatcttttttttaggtttaacgaaagacccttctgttgctggcactgtccgcaacatctttgaaagagatttcaaagaaccacatgctaattggacaatgacaccgcaaccagtgatcactcgttggtttgaaacgtttgcggtaagtgcaatatgtcttgttttctagtgttaatttattgacttaacttttttgttttgtatttggctgttgtgtcaagatgatgtgattatgttttcttgtgttaatatattgactttgttttgtagcaaggatactgatataacccgattttcaccgattttatctatgttttaggtataggattttgaggctttatgttatttctcgaatctttttagtgtcttttcaggtattctatgcaatgggacaacaatggagataaggagacattttggagcaaaagctaaggaaaatgaagctaaggacgattttggttcaggaatcagcgaggagtgtcgaccgatacactcttggtgtcgatcgacaccagtttcggcccagcaaaaaccctagatgctttcgagtttccagaagctcaagtttgctggagaagacttccctatttgcattattagtccctggacgtttttagggtctatatatattgtttttagacctaagtttcgtttattaagtcttttatcaagttctttgcaaaaccctattgtgagagacataagctattcatcccttgttcttcagagtttcattcagatctatatacagtgaagagatccctctttcccattctctatttactgtgtttatgctttttaactcaatcatgttgtttgcttcatccagtatgtctgagtaatctgcttgttaggaatagggtttctcattaaggattcatatggtttagtagattgccccctttgctaggttatctatagaattcttcatctttgattgttcttaatgctaaatctagagtaattaactagatcttgaatccagacaatagatatgccctccataggtatctgtagttggatctattatttgatgagtctggtttataggtgtgtaataagaatcggcctatttactaagatgaacaattgaactcgttaagaaggcatatttaggttgacagtctctcggtttctccgctcactattagctatagatatagggagtttggcggcatgcccaccagttattccataattagagtttgagtttaagaatggtttgataacaacctagctttcattagatctactaaccaatagtttcctgagaataccctgttcctaactctttattatattgtttacaacacaatcaatctgctgtctttttactttgttctctttttttttttactgataccatgctagctgaatctcgacatttaactcattgtttgaacaaaagaactccgtgaattcgatcctaaaatactgcaattgatctcttatttgagagagtagttctaggtaatttgaaccataccaaatttggcgccgttgccgaaattcttgggaatcatcattgagttttgtttagagatttcgtctagtttttacttctattttgttactcacacatttcttgttttcttcttttctgtgtttcaggtgtatgcctaggcaaacaaggagcacaagacagaaggagcttatcaacttgtctgttctggacttgggaaaacttgaacgcaccaaccgaaaaactcataaattagcaatggctgatagagtcatcagagctgatgcagaaggagttttgagagatgaggatgggcaagcctataatgaggctgggcagagattggatgatcatggactcatcctacctgaggacgccaatgaggatcaggaacgcctcaatgcgcaattagctgctagagacaccctcctgtgtcgatcgacaccatacgggacccttttctcagagacgactcaatacgacggtgtcgaccgatacccatccattgtcgatcaacactggatccggactgtaccttgtgatgtgcaaatacctatgcagcccgagtctgtttacactcttcctgtcccatatccgaggaagcgtcgttctaagcaggagattcatgctgctaagtgcacagccataatggagaagatgctctatactcttcctaaggatgcttcagagacatcttctgcttcactcaacaagtatgtcaaatgacttgttgacaatgaaattagctcagatgaagctaagctgcttaccagagacattagtgcaatcatgctgcctaatgccaagaaggagaaggcacaaagagtagacattgctgagtacatccgcaccatcactcctggtcagaccactgagaagcttcccgatccaggtagctttgttcttgattgctctatctccacaagcaggttcagccgttctttgtgtgatttgggatcaagcatcaatctcatgcctaagtctgttgctgagagactaggcatgactcactacacgctgactcgcatcactctcgtcttcgcggattgttccaaacaaatccctgaaggaatccttgaaggaatccttgaagatgttcctgttaaggttggtaattccttaatccctgcttattttgtggtcttggattatggaaaggaacccaaggatcctcttatccttgggcgagctttcctaactacagctggtgctaggtttgatgtgaagagaggaaagatctctcttaacatttgtgatttgaagatggaatttggtatggatggttcagagatcactagggctatcagtagcattgcttccagccatgacacatctccttagactgctcagaatccccaaacaaagctacacacaacgctcccatcagctcagctcgccaatgagagttgcagagcaacggtgtcgatcgacaccatccctcatgtcgattgacaccctcaggtttcacagacagatgattctgcacattctcttcagcccacaccacctgaggatctttgtgataagttctcttctctctcttctcctgctttatcttcaattaattctttagattattcgaagactgcttcactagataacaagcctagagttcctcgaaagcttgtttctcctgttgtttttgcaggtgacgagatgagtgtcgatcgacacacccctgagtgtcgatcgacacatgcagctgctccagaccggttcagtttacacaccgccatggagggggcggaggcaacaacaatcctccaccaatctacccacatcctgaactccgccaagtcaaactattgactcaaaacaagcacttagtgggaggtaacccactggtttgattgttcttttcttttcttttatttttgatttatttt

SEQ ID NO: 168202 - DNA, 1147 bp, Arabidopsis thaliana landsberg
atatcaatggtttcgagattgcgacatgacaatgttactgcacttatgggctattgtgttgatggccctctccgtgttcttgcttatgaatttgctcctaaaggatctcttcatgatactcttcatggtgagtgattaaatgtgaaccgttgcttagatatggattagtcactcaatacttaactatctagaaagtaagatacaggaggaagaaactaatgaaacgtggtgactctttggtgcaggcaaaaaaggtgccaaaggagcacttagaggtcctgttataacgtggcaacagagagtcaaaatcgccgttggtacggccagaggacttgagtacttgcatgagaaggtgagccctcaggttatccaccgagacatcaaatccagcaacgtacttctgtttgatgatgatgttgccaaaattggtgattttgatctgtctgatcaagcccctgacatggctgctcgccttcactcaactcgtgtgctaggaacctttggctaccacgctccagagtaacgtctttttcaagattttctttaccttgaaaagatttttttcagtttctttcattcagactaaaccatgggttacatgtcttcattcaaaaatgtttggttctcatgctctaatgttatgagtcactttttcattcacatggatttcgttcctcttatcactttttaattacccttatgtgtctattgcatctttgacgaatctatgcttacacctttttgtgtaatgtatttcagatatgcaatgacaggaacgttgagctcaaagagcgatgtgtacagttttggcgttgttctgctggagctcctaactggtcgtaaaccagtcgatcataccttaccgcgtggacaacaaagtctagtgacatgggtatgtttagtgcgatcttctctgcttctaattctggtttgccgcatcgataagagaggcttttaagaagaccaaatttataataaactcatttagtctgttgaaaattacaaaaattgggtcaaaacctcagaagaacttggaagaaaaagccctccataattaggcctatagaattgaaacttgggatgttataacaactgaagacgctggaaaaagccagaattttgtacgaatagattaatgtgactctaa

SEQ ID NO: 168203 - DNA, 1641 bp, Arabidopsis thaliana landsberg; identical to SEQ ID NO: 21353
  unsure (1)..(1641): unsure at all n locations

SEQ ID NO: 168204 - DNA, 1690 bp, Arabidopsis thaliana landsberg; identical to SEQ ID NO: 30466

SEQ ID NO: 168205 - DNA, 1351 bp, Arabidopsis thaliana landsberg
aaatatccgataaagtcccgactaaccaaagggttaaatggcgagctgattctggcctttctcatggtgcatcagctaatgtaaaccaactatattcataaacatctctctatatatgtatatatatgtcttccgaaatggaaccttatttcataagttttggcaatatgctatctcttatagactgaaccaaatttatgggtgtttttgatttcctaggtgaatttgattggaggatattatgatgctggtgacaacgtaaaatttgtttgactaatgtcatttaccacaaccttgttgagttgggctgcacttgaataccagaatgagattacttccgttaaccagcttggttatctccggtctactatcaaatggggaactaattttatcctccgtgctcatacatcgaccaacatgctatatacacaggtaaactaacttttcccctcggtttacgcgtctaaaccaagccgaactgtcacagtttggtttgttttgaggtatactagtatagagaattattccaaaatatttcatttcatgttaaatgtcccaaatagtatatatctcgtatcttatatactatatacttctacaatattcaacaaattcactatcgaaattcaattaattatttttggttctgttttggtaatggatgtaaataggtaggagatggaaattcagatcatagttgttgggagagaccagaagatatggacacacctagaactctctatagtatctcttcctcttcccccggttccgaagccgcaggtgaagccgcagccgctcttgccgcggcctcacttgttttcaaactggttgattctacatattcatccaaattactaaacaatgctaaatccgtgagtgtaaattcatattaattaattaagtctataaatatcattacattagttcaatcataaggtaacgtataaattatctattttgtggtagctatttgaatttgctgataagtacagaggttcttaccaagcttcttgccccttctactgctcacactcaggctaccaggtaatcaaactgatatacatagatatattttcacgttgacgtaaatgagttacttaacaagacattttatgttttaaaatattttgggataaaaataggatgaacttttgtgggctgcggcttggttatacaaagcaacaggggaaaagagttacttaaattatgttataagaaacaaagattggagcaaagccatcaatgaatttagttgggacaacaaattcgccggcgttcaagctttactcgcatcggttagtatatatagcattataactaaaccaatttcgctaaattccacattagtttt

SEQ ID NO: 168206 - DNA, 974 bp, Arabidopsis thaliana landsberg
  unsure (1)..(974): unsure at all n locations
gctagctgccctaatcttgaacatttggtcctgcgtcgaggtttcttctttgatgctgtagtgaatttcatcattgatgcgccatctttgaagacacttttgctttccgatccctttagtgcgcgagagagtagtaggggatatgtgataaaagctccttctttgaagtacttgggaattgaaagtgtagaaggttttgagtattttctgattgagaatgtaaccgagctagttgaggcaaatattagaaacgtttctaagatagtcaatgagaatattttgggatctctcaagtcagccaaacgtctttccttggacttatcacctttgaaggtaacttcgcttttatcgcacttgacttgtttgttgtttctgtatatactaatagttgtctcatgaatagattacatatcctactgaagttatgtaccatcagctggtatatctggagatgcatacacataaagtggagtggtggaatctacttacgcacatgcttgatagctctcctaaactacaagtcctcaagctcattgatgtaagacatttcattattagttagctagctattgttgatggtctctcgttggggttagttttgaaggactaattctaatatacatttcatttcccttttggtagcgtgagactcgtcatgaaaatctagaattcgacaaaaaatacaaggaccaagggaaatggaatcaaccaaagtatgtccctgaatgtctcgaaacgtttatgtggagaaattgcaattggggaagagaagaagagaaagaagtggcgacgtacattctaaggaacgcaagacagctgaagaaggcaactttctctacggatcccattgaagcgaagaggctctgtaaattggccaaagacgtangatgcgcgaggaattggatggtgtggtcatgacttccaattcatgccccttgtttttgaattcgatgatcttatatgtgtagaatctc

SEQ ID NO: 168207 - DNA, 503 bp, Arabidopsis thaliana landsberg; identical to SEQ ID NO: 80738

SEQ ID NO: 168208 - DNA, 1069 bp, Arabidopsis thaliana landsberg
acacggaagttccgaatatttctgacgcataatcttattatttgactttaacgtatgaaaaattttcatgcggcaattctaccgtgtgagcccttcctttaatgggcacttacgtggtccatcagccattcccggcaccgccggagggtctaaaactgttggtcgttggctgaaggaccggcgagagaagaaacgagaagagacgcgtgctcaaaatgcacagcttcacgcggctgtatctgtagctggtgtggctgccgcggtggctgctattgctgcagccacagcctctcagtcgagttccggaactgacgagcaagtggccaaaaatgactccgcggtggcttctgccgcgactttggtggcggcgcagtgtgtggaagctgcagagattatgggagctgatcgtgagcacttggcctccgttgttagttctgcggttaacgttcgttctgccggagatatcatgactttgaccgccgctgctgccacaggtatgtttctcccgttacgtgatcatgtcattagtgaaacgctaaaaattgccacgttcataaaaacttatgtatatgaatccgttttttagattatgtcataatattcctttatttacccaagaaagactaaaaacttgatccctctattttaaaaacattcaattatgaaccataatataaaagtgtagtagttcttcataaacctatataatagtccgtcaatttaaatgtaacaatggccaaccatgatttaaaatcttttccaaactttggcctaggcctaaacaaccgcttgaacactatgaattagttagaagtcttagataatggttaatcacttaacctattttcgttttgtgatgtagctttgagaggagctgcgcaattaaaggcaagagcattgaaggaggtatggaacattgcggctgtgattcctgtggataagggtacaccaagaggcggtggtggtggttatagaggtggcgagttagcccctgtagataattttcttgggatttgcagtaaagaattgctagctaaaggttgcgaattgcttaaacgcacccgcaaag

SEQ ID NO: 168209 - DNA, 256 bp, Arabidopsis thaliana landsberg
atgccccactctcatggtcgcaagcgcgcgacgcgctacatgttcgggaagccgttccgccagcacggcatggccccgccgtcgcggacgctgatcacctacaggcgaggcgacgtcgttgacatcaaggtcaacggatcgcaccacaagggtcagccttacaagacgtaagatgaggttctaattggttctcgtttcgggagggggacggtctgcttgcatgccgatcggacgtaaacgttcttcctttgttggg

SEQ ID NO: 168210 - DNA, 536 bp, Arabidopsis thaliana landsberg
gaaaataaagttgatctttctttggttgaagaagataatctctggaaaccaatgatgatgcttgatgattacatagcgaaatcgaagctcagtgagagtttaacctctacggtttggttagcgaagcacaagttaaccggcgaagaagcagtgatgaagtgtttcgacctctggaagctcaatcgcaatctccgagactgtttaaacaacgaactggagtttctatcttctgttgatcatcccaatatcattcgtctcctccatgtttctcaagtactaacccaaaactgagtttttcaatatttcttgagtctatgaagaatatgattgatttgttttcttcaattttgcaggatgatgattttctcgttatggttttggaatattgtgatggaggaactttatcatcgtatattcaacgttatggtagagttgaagaagatatcgccaagagatttatgaagcaaattggtatctattgttatataggagaatgatttcactgcatttgcttcttcttgactaatagtgtcatc

SEQ ID NO: 168211 - DNA, 1962 bp, Arabidopsis thaliana landsberg
cagggttggctttttagttcagactccaaattctggaagccgcctcagttgaaagtaaacatccaatttagtgtatatgatgaatgctgattgattcaatatcacagcctcgcttgctttctgcaggcactcttacattcagttccctttggcaaaatgatagttcttgacctatatgctgaagtcaaaccgatatggaacaagtccgcccaattttatggaactccttatatctggtatattgttgtctcagtttccttcttatgcctgagtcagttgtatttttacgtgtttttattataatcggatgaattccaggtgcatgcttcacaattttggaggcaacattgaaatgtatggtgctcttgattcaatttcttcaggaccagttgatgctcgtgttagcaaaaattcaaccatggtaactcataactacgacattcacaatatgtttcacattttttatcttatgtctataggtgagactattttctccgcttagaaatggaatcttgttatttatgttgcacataggtcggtgtaggaatgtgcatggaaggaatagagcagaacccggtggtttacgaactaacttctgaaatggcatttcgagatgagaaagttgatgtacaggtaatgcatatatagtatgcacccttgctgtgacacttgaaagtgtttgcacaatcagtttcatacatttttaatattcgtgtacatagaaatggttgaagagctatgcacgcagaagatacatgaaagaaaatcatcaaatcgaggccgcttgggagattctgtatcacactgtctacaattgcactgatggaatcgcagtacgtttttttgttttggttactaccgcagcatctctccttagatctgctctataattcattagaaacttgcttttaaaattctctgttttaggaccataacacagatttcatagtcaagcttccggactgggatccatctagttctgtacaagacgacttgaaacaaaaagattcatatatgatctccactggcccatatgaaacaaaaagaagagtcttgtttcaagataagaccgctgatttgcctaaggcccatttatggtattctacaaaggaggtgatcgaagctctcaaacttttcctggaagctggggatgatctgtcaaggagcttaacatataggtagatgcaagtagagatagattatctaccattttagtggttacagattcctttgggttttgcttgcaggtatgacatggttgatttgacgcgtcaagttttatcgaagctagcaaaccaggtgtacaccgaagcagtgacagcttttgtaaagaaagatatcggaagcttaggacaattgagtgagaagtttctggagcttataaaggacatggacgttctacttgcttcggatgataattgccttctggggacatggctggagagtgcaaagaagttggccaaaaacggtgatgaaaggaaacaggtgtaacatcattcttgttcttggaacgtgcgggtagaagaagtagattacttgctcactttgtttctctgtgtacagtacgagtggaacgcgagaacgcaagtgacaatgtggtatgactcgaacgatgtgaaccaaagcaagcttcatgattacggtaagatataaacttaaaaaaaaagattctcgagtggatagagctttttaaaaaactgttatgttttatgatcatcatcatcagcaaacaagttctggagtgggttacttgaagactactacttaccccgagcgaggttgtattttaatgaaatgctgaaaagtttaagagataagaagatattcaaggtagagaaatggcgaagagaatggataatgatgtcacacaaatggcaacaaagttcatcagaggtctatccagttaaggcaaaaggagacgcgttagctatttcaaggcatctgttgagtaaatacttccca

SEQ ID NO: 168212 - DNA, 1068 bp, Arabidopsis thaliana landsberg
acatatgtggaggagacgacatatgttcggtcgggtatgtacaagtgggaaggagacgcatggggtttcgacaaaaagggtccgtacatcgagctagtgacgtcacctaataaccctgacggaaccatcagagagacggtggtgaaccgtccagacgacgacgaagccaaagtgatccatgactttgcttattactggccccactacactcccatcactcgccgtcaagaccatgacatcatgctcttcactttctccaagatcacaggccacgctgggtcccgtattgggtgaggctaactaaacacttaaacaacgttgctgccttgtttgttttgtagacaacaactaaatcatgccgttttgcaacaactaaatcatgctcgtttcatatatgttgcaactactaaatcatgtttgttttgacacggctatagttttaagcaaatgataactaaattaaaatttacttatccttcaacttctgtaagttttctctttagattttgttatagaattgtaaagtgtatatgtttcgttttgtgggtgaaggtgggcgttagtgaaggacatagaggtggctaagaagatggtgcactacttaacaataaactccattggtgtgtcgaaggagtcacaaactcgagccaccacaattctaaacgaactgacaaaaacatgtaggacacaatcggagagcttcttcgagtatggctacgagaagatgaagtcacggtgggagaggctacgtgaggtagtcgaatccggtgacgcattcactctccctaattaccctcaagacttctgcaacttctttggcaaaaccctctccacttctcctggtacgtactaaacaccacgaacgcaattatgtgttgaactttgttagcggttctggttgttgttccagcgtttgcgtggttggggtataaacaggaaatagatctcgtaagtctcttgaagcataagaaggtttttaccagaggaggagacccatgtggttgtagcaagaagtacgtccgtgtgagcatgcttaaccacgacaatgtgtttgacgtctttctccaa

SEQ ID NO: 168213 - DNA, 2143 bp, Arabidopsis thaliana landsberg
  unsure (1)..(2143): unsure at all n locations
atttagggttattcctattcggggccaaacaccttagtacgtcaaagccagaaccgaactaaggatcaacgacgcataacatctggaggccgagaaatggatacgactctaccgcctcctcaacacatggaacgtgaacctttgaagagcaagagtagtcttcttccaatgactcgccgtggcaacggttccaaaggacagaagattcttctgctcactaaccacttcagagtcaacttcagaaaaccaaacagtaataatttcttccattacagcgtgcgctttttgtttcccttcctgttcctgttcctgtttccatgacttgatttggaaaacatactttatagtgtgctttgtctctttggatacaggttactatcacatatgaagatggtagtccacttttagccaaaggttttggcagaaagattcttgaaaaagttcaacagacttgtcaagctgatttgggttgcaaacattttgcttatgatggcgacaagaatctttatactgttggtcctcttcctagatccagtctagacttctctgttgttcttgaaaccgcgccttctaggagaaacgcagacaaaagactaaagcttcctcaccaatccaagaaattcaatgttgcaatcctttttgcgcctccagaaatcccaatggaagctattgcaaatgctcttcaaggaaagaaaactaaacatcttctagatgctatcagagtgatggactgtattttgagccaaaatgcagctagacagttagtgaaccttttttagtttttttttcttagatatattcttggatatttgatgttcttgatgttcatgttgtgacacatttctattttgcgcagaggttgcctcctagttcggcaatctttcttccacaatgacgcaaagtactttgcgaatatcggtgaaggtgtagattgttgcaaaggatttcattcaagcttcagaactactcagggaggcttgtccctcaatattggtaatttcttttcttttaacatatgttttttcatgtggtattaaaaacattctttgtaacatttcagttttaatttctttcatcagatgtttcgannnnnnnnnnnnnnnnnnnnnnnnnnnnngttgattttctttttgcaaatcaaggtgtgaacgatccattctctattaactggaaaaaggtatttacaagaatttcaaatggtgttttagcatatctttgaggtgaagtacttcattttctgattttttttttgtttctctctcgtataggctaaatatactctgaaaaatcttagagttaaagtcctcccttcaaatcaagaatacaagataaccggactaagtggactacactgcaaggatcaaacgtatgttgtgagttgatatttattttaagttttcttgttttgcttctcgtttatctctttttcttgtgtgatttaggtttacttggaagaaaaggaaccaaaacagggaatttgaggaggttgagattacagtgtccgattacttcactaggatccgtgaaatcgaactgcgttactcgggtggcttaccttgtatcaatgttggtaagccaaatcgtcctacctactttcccattgaggtaatatttgttttttgttttgtttttcttccacataatctcatgtttaatggcttatgatacttatgatactttcccatcttttgttttataaaatattttgcagctctgtgagcttgtatctctacaacgctatactaaagcgctaaccaaattccagaggagtaaccttatcaaagaatcaaggcagaatccacaacaaagaattggtgtgttaaccagagtaaggactttaaattttccatttatcctctttttatttgcatttttatgtatactaagttccatgttttgagggctctcaagactagtaattataatgatgacccaatgttgcaagaatgtggtgttaggattggctctgacttcactcaagtcgaaggcccagtgttgccatcaccgaaggtgatgtttcttccataacatttttggttatggaaggttcgattttattattatacacccgccatctcttaatcccttatggtcagcaaaaagcaaacagagaacatgaaatgtatccccaaaatgggagttg

SEQ ID NO: 168214 - DNA, 5508 bp, Arabidopsis thaliana landsberg; identical to SEQ ID NO: 31263
  unsure (1)..(5508): unsure at all n locations

SEQ ID NO: 168215 - DNA, 1090 bp, Arabidopsis thaliana landsberg; identical to SEQ ID NO: 53261

SEQ ID NO: 168216 - DNA, 409 bp, Arabidopsis thaliana landsberg
  unsure (1)..(409): unsure at all n locations
ttgcacagtaaatccgtagcagctataatggggcagtattatataattgatttcgacagtacatttacacaggttgaggcgttggacgagctcgcccgcatatcattaaaacatcatccggaccgggaaaaaatttatgaaaaaattgaggctttaaccaatgcttccatggaaggacggttatcttttacggatagcctggccgcgcgtgttaaactgctggaagccaaccgcgatcacctgaaacaactgatcagccatttaaaaaagaaggtttccacctcattttcgcgcaacagcattttttttaagaagcatgccaatgaggtacttattgtatcgngcggttttaaagaatttattatcccccgtgttacccgatatcatattaaaaaggaaaatatttatg

SEQ ID NO: 168217 - DNA, 1465 bp, Arabidopsis thaliana landsberg
  unsure (1)..(1465): unsure at all n locations
agattagtggtcttgtcgctgccaaggaatgtctttctcgttttccataatgcgttatggattgtttgtcattaacttgaagcttaagcacatgatctttgtgtttactcagtgatatttattaagcctacttttctttgcattctcttgacgttttggtttctgtcaatgttgtaggaaagtccanatccattcgattattgcgatattgttacctcaacaacacacaagtctctccgtggccctaggggcggcatcatattttacaggagaggcttgaagcccaagaagcaaagcataaatcttaatcactgtgagagcaatatccagtatgattttgaagaaaaaatcaacttttctgtctttccatcgttgcaaggggggcctcacaataaccatatagctgctctagccattgccctcaagcaggccgcttcaccagagtacaagctttacatgcgacaggtcaaaaaaaatgctaaggctttagcatctgctttgataagcagaaagtgcaagctgataacaggtggcaccgataatcatttgcttctctgggatctgactcctttgggcttgacaggtatgtgattagttcctcttattcttggcagataaggaaattactcgcactatgtgattcattgccttacataagctattggcagcattgcaactgtgtctgattttccatggtgttagatctgcttaaccatgtgtcatgggtctatagcaaaattttaccagctatttgagacaatggctgagtttcttagcgtatctcttttttctcatctctctaggttgtggatagcctacattactagcttgatggccaatgatcagtctgaaatctattataaaaattgtttgagattgtaactaaacttatatgtctaatttaccaaaatcaaagtctcacttttttgacgtctgtaccatgcatatggtgtagctgtgtgtccaaagacgactcaaatcttccgccttgtgattttttcaggcaaggtgtatgagaaagtttgcgagatgtgccatatcacggtcaacaaagtggccattttcagcgaaaacggtgttatttcccctggaggagtgagaataggtaagcaaattaaattctcaaggaaatctcaacactttggacttagaatgaaactcagtgtgctttgagttcttttttcttgttgtctgattcttgacaatgggctcatgtatcaggcagtccggctatgacctcaagaggttgtttagaaccagaatttgagacaatggctgattttctatatagagctgctcagatagctagtgctgcacaaagggaacacgggaagttgcaaaaggaaccgctcaaaagcatctatcactgtaaagagattgcagatcttcggaaccaagtcgaagcttttgctactcagtttgcaatgcctgcctttgacatgtgagtcagcctgaagaacgagac

SEQ ID NO: 168218 - DNA, 342 bp, Arabidopsis thaliana landsberg
atggacaacgacaccagcgcccggcggaggctcactcccaagggcgagcgcacccgggcgcggatagtggaggaggcggccgccctgatccatgagcgcggggtggcgggcaccttcttggaggacgtcaaggcggcggcgggggtcagcggctcgcagatgtaccactacttccccgacaaggacgatctcgtgcaggcggtcatcgactaccaggccgacgccatcgtcaatcgcaatcggcgcgcactcagcagcgcaaacggcgtcgagacgtggcggaacatggtgctcaccgcggcgaagcgcaccaaggccaaggggggctgcgcacttggctcg

SEQ ID NO: 168219 - DNA, 890 bp, Arabidopsis thaliana landsberg
atgttcaaatgttgatgcagatgattatgtacttgtggacaaattttgccttaaggattacaagtttgcgcgtggtgatgttgtagtgttcaggtatgttccctataatgccacatttgagtcatcctttgacaagggaagattatagctacataatacttaaatacatgttgatctcttgtttaaaccttttcttggatgcttacagcattcacaattttattaaatctaattccctaaaaccttacaaatgtttgttgtcctatttgtggtgctgaaccatgaaattcgtgcatattcaatctctggtacatttgatataatgtatttggtcatgaatacaaactctttggattctattcttgctttttgcttcctttagctcagctttttcaggtctcaaatctgttttataatgttcatctgacattgtgccgtatgtgttctaagttgtatattttgaaatacatcattaagctcctgacgatgtgaactgcatctctgtggcagctctccgacacatttcggagatagatacataaagaggatagtcgggatgcctggtgaatggataagtagttctcgggatgtgatcagagtcccagaaggtcattgttgggtagaaggagataacaaaacttccagcttagactcaagatcctttggccctgtaagttctctgcttccaaaccccagcacatagtttcatagaattagaacgtagatgatgcacatgatattcttttcaaggcctgtcccatgtgactgatctggataaacttgttttggcagattcctttgggtttaattcaaggaagggtcactcgtgtcatgtggcctcctcaaagaataagcaagatcggtcgataatgctaatggagaatgaaaag

SEQ ID NO: 168220 - DNA, 2194 bp, Arabidopsis thaliana landsberg; identical to SEQ ID NO: 63763

SEQ ID NO: 168221 - DNA, 616 bp, Arabidopsis thaliana landsberg
ctaaaagtgtctcaccaaagatgatgcgatgaagaagatcatatctgagaatattccaatcaccaaggttattaagctttcgaaactgaagagtgattacaaggcgttcgaagcgaagaggaaactctgcgactcttacgacatgtttttcactgatcggaggatcattcctctgctgccgagggtgattgggaagaagttctttacgagcaagaagattccggtggcgcttgatttgaagcacaggaactggaaacatcagatagagaaagcttgtggatctgctatgttcttcataaggactgggacgtgtagtgtcattaaggttgggaaattgtctatggatattagtgaaattactgagaatgtgatggcgacattgaatggactagttgagttcttgcctaataagtggacgtacgttaggtctttgcatttgaagttgtctgagagtttagcattgcctatatatcagtctgttcctgatttgaagcttaaaatcgatgcttttgggtctggaaagagtgttgttcaggaggagaaggaaggtgaagttgaagaagttgttgctgttgatggtggagagaagagtgtacagggaagggaaaaaaaaaag

SEQ ID NO: 168222 - DNA, 1795 bp, Arabidopsis thaliana landsberg
  unsure (1)..(1795): unsure at all n locations
ttcagaaaaaagagcgtgaaggggatgtagcgcgcaagttcaataggtatgatanagccatgcatgatattggacaatcagatagaacggtttatggggaggctgggaaaaaatgggaagaggatgccagtacaacagaggctttatgcaaggtaatactcttattcgtttctcagttattataattgcaaaatagttctcaaagtgatagtcttggtccatttctgctagttgtaatcactaatcagtgcatcatgttaccacatgaaaaaataagctttacataaaagaaatatttcactggggatttgtagattgctagcattaggtactgaacttcttcagttgatagatcgatgtgtgtttgtggttatacattttgctgtcaaagagctttagttgaatacttgatgcctttgctggagaatcttaagctgctgcctgctggcatgtccaactcgtttctcccggcttgaatatttttttttgtcatgccacaggctaaagctttggaaggcttatgcattaaggagtcgagccaaagaaagagattggaggaattgctggaaaaggaaaagcttgaagtaaaaatggtaatagagcaaaacaatggattcatgaaagaacttcagatggttcagggtcggaatcttaagttggagagccagatgaggaaactacaagacttggaaaaagaacatggtgagaaatttgatacagctatggagctcttgaaaagtttcagacagaaaagggatgagatccggatcgatcacgagaacgcagtaaaggaagtgaacgcactgagaagactggttaaaggagagaccggagagtcttctgggtcggaaatgcttgactactcttttatggaaatcaatgaggctactaacgaatttgatccatcttggaaacttggagaaggcaaatacggaagtgtctataaagggaatcttcaacatcttcaagttgctgtaaagatgttaccctcatatggatccttgaatcactttgggtttgagcgtcgggtaaaggatcttatgtatatggaaaaataaaattgaatatagacatgtatacatgctcgagtttgttaacgaacaggttatgtgttttggatttcaggtggagattttaagcagggtaaggcatccaaatctggtaacactgatgggtgcttgtccagagtctcggtctctcatttatcaatatattcctaacggaagcctcgaagactgcttttcatctgaaaacaacgttcctgctctttcatgggaatctcggataaggattgcctctgagatatgctctgcccttctgtttcttcattcaaacattccgtgcatcattcatggaaacctaaagccgtctaagattctcctggattccaatctcgtcaccaaaatcaacgactacgggatctctcagctgatcccgattgacggattagacaaatcagatcctcatgtagatccacattacttcgtttcaagagaaatgacgctagaatcagatatatacgcgtttgggatcattctcctgcagcttctcaccagaaggcctgtatctggcatactgagagatgtcaaatgcgctctggagaacgataacatcagtgcggttctggataattcagcaggagactggccagtcgcacgaggtaaaaagctagctaatgtagccatccgttgctgtaagaaaaacccgatgaatcgaccagacttagcagtggttctacggtttatagatcgaatgaaagcaccagaagttcattcatcagagacatcatcagacg

SEQ ID NO: 168223 - DNA, 543 bp, Arabidopsis thaliana landsberg
gtggtctctggtcttccagcgtcaacaagcgttgagatactggaagttctttacgaagagaaacgaatcttgagttctcgtgttcttggaggagaacaccggttaaataattaccggtcggctacatcggtccacgagttcgtcgtcttggaccaggataagaagaacagagtgtatagtgtggaattgcagtcttacactgttgatataccgcaaggtaacacggaagaagattcaaggatgtttgtgcatacggtcgttaagttgaatagacagaatctcgcggtcatttccagggcttctcggacctcaaagtgtttgtgttgaaaatgtcatgtgtggtgtatataatgggccatacatgggccgattatttgttccacggatgtgtttgtgtggaatgtcaggtgtgtatatacaactatgggctataatgggcttagttattattatataaggaaatccctgaaatgatcggacccaactatatatatttgtttgctttcggcagctatcccaaatttatatactatcggcatctga

SEQ ID NO: 168224 - DNA, 1442 bp, Arabidopsis thaliana landsberg
tatggttctctctcgacccacaacaatggatctcagagattggctttccctgtgaaaggcatgagaagcatgcgcaaacgccccacaacactgagacttagctaccttttcccctctgaaccccgaaagcccgagaagtcaaccccgggcaaacctgaatccgagtgttacttttcttctgagcaacatgccaagaagaaacgcaagatccacctgaccacccgcacggtctcttccactctggaggcaagcaactcggatgggatagtccgcaaatgcactcattgcgagacaaccaagaccccacagtggagggaaggacccagtggaccgaagaccctctgcaatgcttgcggagtgaggttcagatctggtcgcctagttccagaataccgaccagcctcaagccccaccttcatcccagctgtgcattcaaactcacacaggaagatcattgagatgagaaggaaggacgacgaacagtttgatagcagcatgattcgggcagtgatatccagagggtaaagcagttttttttttaaagtttggtctctgatccgcagaaatgggaagtcagtggaggaagaagatggtataaaagttagggtttagtgactgttttcaaatctgatgaagagagtttagtggtttagttcaagttagggatatgaaatattttgttgttttattatgtgtttttatctttatctcttggctgacatttgtgtatcagaggaaaacaggtgaagccaaagtttgctctctttttttcgctatttcaaatctattctttttattcttcaatcccataatcttcttctttttttcatctgttttactattttgcattagttgaaaaataaacgcccatcaaatccagtcatggaggctgcttgcttatgtacgtatatgattaatgttcaacagaaggaaactgaagtgcaaaagagtttctatgtaggttaaagacggacaccttggtggtaagctaagtaacaacttcctctagctgacaacaacagaaacttaatgataacagagaaagattagaaaacaaaagcttttttcacagagacgagagactcacctacaagaaatttcaactaaaaccaagttttgtttcattacgctcatacaaaatcacactgtacaagatgctgactctaaactccaacttcatgatccactttccagtaattgttatcgttgaactctttcattcctcagtctttaggtcctcagccatctccttgttcatcttcatcgcttgctccatgcctttctctgtcacttgtgcttccactcccacaaattccacgtccttatcaaagaaggatctttctgaaccgtttggaatcaaagattcggttttgacgtcaggcattggtaatgtcgaggctcattatgttcttggtgtcatcatcatcgataaagaacattga

SEQ ID NO: 168225 - DNA, 557 bp, Arabidopsis thaliana landsberg
  unsure (1)..(557): unsure at all n locations
ctcccgtcccgcaacccggcccgcacgaggtgctgatccgcgtgacgcacaccgctatttgcggcaccgacatccatatctatatctggaatgactggtcgcagaagaacgtccctgtcccgatgatcaccggccatgagtttgcgggagagatcgtcgagatcggcgccgaggtgacgcggcccttgcgcctcggccagcgcgtttccgccgaaggtcacgtcatcgacctcaattccgaggcggcgcgcatgggccgcttccatctcgacccggacactaaaggcatcggcgtcaaccggcccggcgcgtttgcggactatgtcgcggttccggccttcaatatcgtgcccctgccggagcgcgtgtcgaatgaactgggcgcggtgctggacccgttcggcaatgcggtccataccgtgcagcagaccgacatgctgggccagaacgtgctggtcaccggcgcagggccgatcggcgtcaaggcggcgggcgtggccaggttcgcgggcgcgcgctcggtgaccctgaccgacatcaatccctatcgtcnggcc

SEQ ID NO: 168226 - DNA, 984 bp, Arabidopsis thaliana landsberg
cgtgcgatgttctgtgtcgattttccgcctctatatcacttactctgatgtgagaatctgtctcagtcttgaaatgaagaactcatgaggacctcttaaagcattagctgcagcaacgatcattaacggtcttggcgatacaatcctatgcttgtttcttggacaaggtatcgctggagctgcttgggcagcaactgcttcacaggtaatattaattatagtatcatgaagcccaacacttgaaatgtaaatgcagaagatttcattacggatttatgtgtttgtgtgttatgttatagattgttgcggcttatatgatgatggattctctgaacaaagaaggctacaatgcttactcttttgcgatcccttcaccgcaagaactatggaagatctctgcactcgctgcacctgtttttatctccattttctccaagattgctttctactctttcatcatctattgtgctacgtccatgggaactcacgttttagccgctcatcaggtacattacaaaacagagatctttatgcctagccatgttggtgttgtatatttataattctggttttattacaggtgatggctcagacgtataggatgtgcaatgtatggggtgagccactctcccaaacggctcagtcatttatgccagagatgttatatggtgcgaaccgtaatcttcccaaggctagaacgttgcttaagtccctaatgattattggagccacgcttggattagtcttgggagttatcggaacagcggttccaggcctgtttcctggtgtctacacacatgataaagtcatcatatccgaggtctgttttggtttttcaaatcaacatttgtttcctgtgtttttgtgtttaacttggtctaatctgattcttgatatgttcgccagatgcatagactgcttatacctttcttcatggcgttgtctgcattgcccatgacagtatcactcgagggtacattgctg

SEQ ID NO: 168227 - DNA, 851 bp, Arabidopsis thaliana landsberg
gaagctccacgacctcaacagagcactcgaccccctggtcgagtagatgacttcaccaattcaagtcaccactcgaccccatggtcgagtaccaccctgagagtcactcgatcacatcactcgatcacatcacgcgaccacctggtcgagtatcttcacctccaccacctgaccatcactcgatcacagcactcgaccaatcactctaccaacgtggccgagtcccacaatcatcgttcactggaccaatcactctaccaagaggtcgagtatcaccatcatcattcactcgaccaatcactctaccaacatggccgagtcccacaataatcgttcactcgaccaatcactcttcctacaggtcgagtcccacaatcatcgttcactcgaccaatcactctaccaacatggccgagtcccaccatcatcattcactcgaccaatcactctactaacaggtgcagtatcaccatcatcattcactcgaccaatcactctaccaccaagtcgagttccaccatcatccaccactcgacatcatactcgattgccagcagagtcagaacaaaccttttgttccctacaatcaaggctttgctcccgaacagcaatttcaggagaactaccagcaaacaccacccaggtttgccccacagcaacaccaaggtccttctgcacctgatgctgacatgaaacaaatgctacaacagctgctccaaggacaagcatctggctccatggagattgctaagaagatatctgaattacaccataagcgacattgtagctacaatgatctgaatgcaaaagtggaggccttgaattccaaagtccgatacttggagggctaa

SEQ ID NO: 168228 - DNA, 746 bp, Arabidopsis thaliana landsberg
gtgttccttaagttccggcagttaaaaatactctatatccaaaggtaaaggtcttggataatgtgtatattcaagtttaaagggagcaggatcaaaggatgcggcgtacgactcctgcatgtgtctccatatgcgaatgatagtgatggaagctctaaagcagagtacaaccaacagtctggagaaaaatgtgatgctgtagagaatgagagtagtagcaagaagcggatgcgagtaagccttttgccataatttgaactgaaaactattaaagctatctctcgattttctttttaatatttcaggaaggccactatctaaaagaatcgatagtttggtttattatacagatgtcattaggaaactctgaagaagatttcaacttaccctgtggccaaacagtaacagacacaggattgaccgctccaaatctggagcttccattagggcggggaggaatcgtcatcaatttcatatccatgtctggagggtgaagctttctctgttgattccatgataactaagcaacagctaaagaaattcccatcgcatagggccgaagattctgaggcatcatggtaagtgaaacatcttactattctgttttgttttgttgcagcataacaagagaagcaatctttattgatctatcaaataacttgcattacaatgaagagaactgcagagtttcaggctctgaaacacaccaattcaatgattggataatcgatctctcacagaattag

SEQ ID NO: 168229 - DNA, 602 bp, Arabidopsis thaliana landsberg
  unsure (1)..(602): unsure at all n locations
ctggttggaggaagcttatcaccggcgtttacgaggtcatacatcaaagctgtgaaggaagcatttggggctgatcaacctgcaaaatatggagagtttctcgacatcatgctggatttcttcggtaataggtatgtttggtttgctcttaaacagtctacacatgtgagagattgattctcatgttatttttctctttgtagagtcgatttagctaccgtcgttccaaggannnnnnnnnnnnnnnnnnnnnnnnnnnnnnnnnnnnnnnnnnnnnatgccttccttccagctgaggctaaggaaacatttcatgatgtacgttcatacatctattctgtgaaggaaacatttcatgatgaacctgcaaaatatgctcagtttctcgagatcttgaatgattatagcgcccgtaggtatgaattagtttctccatgttatatttgattttctcctaatttttgcttacaaaacaacacacacatgtgaactgaactgattctgatgttactaagtctctctttgtagagtcgatgctcctagtgcccgtgcaaggatgacggaactcatgaaagacccaccggatctggttctttgtttca

SEQ ID NO: 168230 - DNA, 2979 bp, Arabidopsis thaliana landsberg
tctcttgtaaaaacaaaaagggtccttttcttttctgatcaacaatggtgaaaaaagaaaatccaagaaatctgaacgacaacccatccgtgaacctgacctttgctgacaactctggtgccgtgaattcccatcccttgctgaaagggaataattacgatgagtaggcatggagaatgaagacatcactatgctctcgaaagaaattcggcttccttgatgggatgatttaacaaattgaagatggatctccggatctggaagactggtggaccattcaagcacttcttgtgtcttggataaagatgaccattaattaagccctctgatcaaatatctcgcatagagatctggctaaggattattgggatcatctgaagaaatggtcctttattataaatgagccaaagttgcagcaaattaaagcgtagttggcttgttgcaagcaaaggggtcttgcgattgagaactactatggcaagttgatgataatttgggacaatatggtaagtttttgacctctacgtacatgtaagtgtggaaaatgtgaatgtgatcttggaactgtccaagaacaaaatcgtgagaaagacaaggtttattagttcttttttggacttgatgatactttgttttgaactgtgcgatctagtctcatctctcgcgtgccggtgcagccattggaaaagggtacaacatcgtaaggaaagaggatgatttgattcgcaatggtgctaacgtgggtgatgaacagcgtaaagtgagtgttggtgctgttcatatgcgttcacgttagaaccagtttcaaatgcgaagcgatgaaaaggagattggagtgatgtgtaagcattacaatcgatgtggacattcatccgacaattgctatggaaacccagagtggtagggcgagagatctcggagttggtatataaaaggtcgctatcgtgaagtagctagctctagtggaagaagagaacgttgaaacacgacctatgaaaatcgtgttcatgtgttaaatcaggacacaatagagcaggcatttcatgtggtgatggaccagaaactatgatggtgtgagtggtatcacggacaatcaatggcattccatccatcatattcttcatcttggcaaggagttcataacggacaaattagcgggtaagcctagtttttccaattggattatggatacatgagcatctcatcatttgaaagaaaaattagatatactgacaaatgtgagagatatggctccagtttcgattatcttggctgatggtagagaaatagtatctgttaaagaaggaatggttaagcttagttcgaagttaaaattgaaatcagtgtttttttgttaaagagtttcagtctcatttcataattgatggataaaaatcaatgtgtgttgcaaatatctgattactttcttgtggtgcaggaccacattacgaggtctttgattggagcgggaacaagatagtaggaacatttcactttcgcagcattagtcacaacaaaagaggagaatcattatgagttgtggtatagttggacgggtcatccttctacaaaaattgtcgggttactagctacaatttttgtttgtttcttcttccaatttgaatatggcgtgtgatatctttctccgtgccaaccaaacaagatattcttttcttttgagtatgaataaaatttaacgagtttttgaattaattcattatgacttatggggacttatcgtacaccattacattcagagaaacattagtttttaacaatagtggatgattacttagagaggggtttcattatatctgttgacggataagactgaagctcctcatcatttgaagaatttatttgctctaattgagcatcaatttggagctaaagttggaacagtcagaagtgatagtggatcttaatttatgtgtttagccacattctttcaagagcaaggaattgcacatgaacgcttgtgtctatcgacgcctgagcagaatggacgagtagaaagcaagtaccgacatattctcaatgttgcaagagaattgagatttcaagccaatcttccgattgatttttagggtgagtgtgtgctcactaccactaatctgattaatcgaacttcaagttcagtgctcagctacatcactctgtttgagcgcctgcataacaaacaactcatatttgatcatttaagattggggggggagcttgtgttatgcacatcatcatagacggaatagtgataagtttgaatcaaaaagtagacggtgtatatttgcgtggttatctatatggtcaaaaaggttggcaattatataatttagagacattaaatttctttgtgtccagagatgtggtcttctgcaacactaagtttccatttcagaaatatccatcacttaaaccttctgtcgtcgaagaagcagaaaaagagtggtggtctccaatttcaattggcccattcgaagataatggggacatcactattacaggcccgatacttcatcaaggcccaacaaatgtggtttcagcccaaggaaagatgcaggctatacaagatctcgctttgtcatctcttccctccgatattggtccgatcgtccctgagcttaatcaaaattcaattatagaggtttttccttcacctttgattccctcaacctccacagcgacgtgtccgactaatcgacctaccgtgaaaatgaacttcaaaagctgtcgcaccgataaatcatcctccgactcgattaagaaaaagaaagagagaggctcatgtaacattgcacgattatgtgttcaattccgcataattccgcattcaaccttgacatgttgctacgacttctcaactagctgttatcttcataaaacctattggcagggatggcttcacatcgtttcgagtcaagctggcataaaaaattctgtatgctccacctagagggggtaggggggcacacatctgtttag

SEQ ID NO: 168231 - DNA, 290 bp, Arabidopsis thaliana landsberg
ctgccaaagtatgttgttcggccttcaaggactgtgcttgcccattcgcggaagttcttaacgatgaaaagacagattgtgcctccacaatgtttagctacatcaatctctacggtcgttatcctcctggaatattcgctaacatgtgcaaagaaggcaaagaaggtctcgattgcaccgacgtcacccctacatcatcttcccatgcatcgatccctcttgtttccacacacgttttgctaatcaccgtttccatcttgtttcacctcttctaaagacttgtaaatgtt

SEQ ID NO: 168232 - DNA, 1411 bp, Arabidopsis thaliana landsberg; identical to SEQ ID NO: 9086

SEQ ID NO: 168233 - DNA, 1470 bp, Arabidopsis thaliana landsberg
agggagtccggcaacaagtacaaggaggaatccttttcctccatcaagtcacatcggaggggtgacaagaaaaagaagaagatgaagaaggtggtctactacgagaccgactcttcaacaccctccacatccggcaccgagtcgtccactacttctaagcgccatgagccaagaagtatagtaagatgcccctacgctatccccgtatttccaagcacgctcctctactttccgttcccttaggcaaaccaccatattttgatggtgaagactattgtatgtggagtgataaaatgaggcatcatctaactcactccatgaaagcatatgggacattgtcgaatttggaccgcatgcaccacaggtgggggacgaggactatgactcggacgaggccgcccaaattaggcactttaactcccaagcaacttctatactcctcgcctccttatgtcgagaggagtataacaaggtgcaaggttgaagaacaccaaagaaatttgggacgtcctcaagaccttgcatgaaggggacaaggtgaccaagatcaccaaacacgaaacgatcgagggagaacttgatcgattcgtccccaacaaaggagaagagccgcaagccatgtacaaccggctcaagacaatggtccatcaagggcgcaacctcgggagcactaaatgggatgaccatggaatggtcaaggttattctaatatcccttgttttttgtaatcctacccaagtacaattaatacgtggggttcctagatacaagctaatgtctctcgaggaagcgatagacaagtttgtgagctttgaggtaatgatcaaagactccaaacacatagtcaacttggagcaaggcgccacctccaccgaggtgcaacccgtcgcattcaaagcgacggaagtgaagaaagaagagtctacatcgagatgctccccatcgacgcctccaagcacgacaacgaggagatgtcgctcatcatcaagagctttcgtcaaattctcaagcaaaggagggggaaggactacaaaccccgctctaagagggtgttctacaagtgtggtaagcccggtcattttattgcaaaatgtcctatatctagtgacagtgacaggggcaacgacaagaaggggaagaagaaggagaaggagagatattacaagaagaagggcgcgatgcccatgtgtgtcgggaatgggactccgacgtgagctccaccgactcctcttccgacgaggatgccaccaacatcaccgtcaacaaaaggtttcctcttccccaacgtcggccacaagtgcctcatgacaaatgacggcaaaaagaagaaggtaaaatctagagcctccacaaaatatacaatatctagtgatgagggtagctctagtgaagatgaggatgatttgcttacactttttgccaaccttaacatgcaacaaaaagaaatgggatcctctagagtcgacctgc

SEQ ID NO: 168234 - DNA, 698 bp, Arabidopsis thaliana landsberg
accgtttattcccttgtagcaacaacaaatcccttgtgtatcacattatagagggtcggtttattccgagcgccactctatactcggctaaagaccaagggacctcgactcaattgggcctagccacgccggggctcaggcctgagtttccatataaacattttctcgcaaggcctagattcaacgcctcacaaagtttccttaggctcgacgctgatggaaatcttaggatttactctttcgattccaaggtcacgtttcttgcatgggaagtaacgttcgagcttttcaaccacgacaacaacaacgagtgttggttaccgtccaagtgtggagcgtttgggatttgtgaggacaatcaatgtgtggcttgtccgttgggagtgggcttaatgggctggagtaaggcttgtaagcctaagaaggtgaagagttgtgatccgaagagttttcattattatagacttggaggtgttgagcatttcatgactaagtataacgttggtcttgcgcttggagagagcaagtgtcggggtttgtgtagtggagactgtaaatgtttggggtatttttacgataaaagtagctttaagtgttggattagttatgagcttgggactttagtcaaagtgtctgattccagaaaagtggcttatatcaaaactcctaatgtgtgatcagtaacgtgtagaaaaggc

SEQ ID NO: 168235 - DNA, 411 bp, Arabidopsis thaliana landsberg; identical to SEQ ID NO: 57766

SEQ ID NO: 168236 - DNA, 454 bp, Arabidopsis thaliana landsberg; identical to SEQ ID NO: 23188

SEQ ID NO: 168237 - DNA, 675 bp, Arabidopsis thaliana landsberg
gagatcgttcctttaaacgccggcaacgttttaagcaccgaggacaatggacccgccaggaaatgggtctctctcatccgaagaaccttaaacagtcttcccggcggaagctgccagactccttctcctgttccccacccggtcgccgagctcgactctgactttgaaggcgactcagccgctggtgctaactcgttattctaccatcggagcaggagcatgaggatggacgcgtctgcatcatccctgccacagcagtttgaccgcagattcagcgtctgtgaccgtttcatgctgggcgacacacctgacgacttctacgaccagagctttaggtattgctcctctgaagacgagccagcagattctccttgtcatgatcactattcccctgtctcgaggactggttcctttgtggcagacgacagagacaaaggaagagacaagtctaagtactgtttagtggccagtaagcagatggttgggatattcttaaccgtttgggtcaagagtgatctaagggacagtgtcaacaacctcaaagtgtcttgcgttgggagaggcttgatgggttatcttggaaacaaggtcaaaattccacattcccaaatcccctgttttgatatacgcccaataatatctttcggcttgtcaaagtttggatctttttaatct

SEQ ID NO: 168238 - DNA, 1710 bp, Arabidopsis thaliana landsberg
gacttcgtaaccgaccgcccaacaccaaatttgctcctaaggctgtagaaggctttttactaggatatgattcaaacacaagggcatatagagtctttaacaagtcctcaagactagttgaagtttattgtgacgttgtgtttgatgagactaacgactctcaagtagagcaagttgatcttgatgagataggtaatgaagaggctctgtgcgtcgcgctaaggaacatgtccattggggatgtgtgtcctaaggaatccgaagagccaccacatgcacaagatcaaccatctttctccacacaagcatctccaccaactcaagatgaggatggggctcataatgatgaaggagaagatcaagatgttgagccacctcaacaagagagcaatgatcaagggggagatgctcatgatcaagatgaggaagatgaacaagttccaaggccgccacacccaagagtccatcaagcaatccaacgagatcaccccgtcgacaccatcctatgcgacattcataagggggtaactactagatctcgtgttgcacatttttgtgagcattactcttttgtttcctctattgagccacacagggtagaggaagcactccaagattcggattgggtgatggcgatgcaagaggagctcaacaacttcactaggaatgaggtatggcatttagttccacgtcctaatcaaaatgttgtaggaaccaaatgggtcttccgcaacaaacaagatgagcatggtgtggtgacaaggaacaaagctcggcttgtggccaaggtactcccaagtcgaaggtttggatttcgtgaaacctatgcacccgtagctaggcttgagtcaattcgcatattattggcctatgctacttaccatggctttaagctttatcaaatggacgtgaaaagtgccttcctcaatggaccaatcaaggaagaggtctatgttcagcaacctcccggctttgaagacagtgagtatcctaaccatgtttataggctctctaaggcgctttatgggctcaaacaagccccaagagcatggtatgaatgcctaagagatttccttattgctaatggcttcaaagtcggcaaggccgatcctacactctttactaaaactcttgaaaatgacttgtttgtatgccaaatttatgttgatgatattatatttgggtctactaacgagtctacatgtgaagagtttagtaggatcatgacacagaaattcgagatgtcgatgatgggggagttgaagtattttctaggattccaagtcaagcaactccaagagggcaccttcattagccaaacgaagtacactcaagacattcttgcaaagtttgggatgaaggatgctaagcccatcaagacacccatgggaactaatgggcatctcgacctcgacaccggaggtaaatcaatagatcaaaaggtataccggtcgatgataggttctttactctatttatgtgcttcacgaccggatattatgctttccgtatgcatgtgtgcaagattccaagccgatcctaaggaagttcaccttagggctgtgaaacgaatcttgagatatttagtttatactcctaagtttggcctttgataccccaggggatccacatttgatttaattggttattccgatgctgattgggcaggttgtaaaattaatagaaagatcacatcagggacttgccagt

SEQ ID NO: 168239 - DNA, 562 bp, Arabidopsis thaliana landsberg; identical to SEQ ID NO: 76082

SEQ ID NO: 168240 - DNA, 2567 bp, Arabidopsis thaliana landsberg
  unsure (1)..(2567): unsure at all n locations
gtcaacggaagatcaatctctattccttcacgttgcatgcttcttcagcaatcaagaggtcgattatgtgtcagccctgctagctgacaggaagttggatgttgtaaatggtttcaatatcctagccgatagatctctcgtgcgtatatctacctatgatggtgggatatctgtgctttctgatagtaacttggatgttgtaaatagttttaagaccctagcagataaatttctcatgcatatacttacctacggccgaatagagatgcaccatctactacaacaattgggtagacagatagttcttgaacagtctaaggagcccgggaaacgtgaatttataattgagccagaagagattcgtgatgtactgacaaatgaaacagtaagtttaagttcttacatgtataattctagatattgcctatttttagtgataacaatctcatcagtcttctttgggaatattttgtagggtactggatctgtcataggtatatcatatgatacatccaatatcgaagaggtttcggtaagtaagggggcttttgaaggaatgcgtaatctccgattcctaagaatctataggagtttccaggaattggaggaatgggaggtagaacaaatgagatataggttgaaaaaaatagaagttaataatttttcttttctgagttacctagtgaaggtattttttgaatctttcttttctgagttacctagtgaaggtaatttgcaaataccagaagatatggagtatttacctcctcttaggttactacattgggaagattacccaagaaaaagtcttcctcagagattccacccggaacgtctcgtcgaaatttatttgccacacagcaagctcgagaagctctggggaggaatccaggttggtatttgattattctatctaatgattcaatttaaataatattatattttctcatttgttgtgtttaacatgcagccccttcctaatatcaagagcatacatctgagcttttccattagattgaaagaactcccaaatctttcgaatgctactaatctcgagacattgaaccttactcactgcaaaactttggtggaacttccctcctctatttcgaatctacacaaactgaaaaagctgaagatgtcagggtgcgaaaagctacgagttattcccaccaacatcaacttagcatctcttgaggtagtcagaatgaattattgctcgcgattgcgacgttttccagatatctcaagtaacatcaagactcttagtgtcggaaatacaaagatagaaaatttccctccatcggttgctggatcttggtctcgtcttgcgcgccttgagattggcagcagaagcctcaagatattaacacatgccccacaaagtataatttcgctaaatcttagcaacagtgatataaggaggattccagattgcgtcataagtctcccgtatctagtagaacttatcgtcgaaaactgcagaaaactcgtgacaattccggctcttcccccttggctcgagtccctaaatgcaaacaaatgtgcatcactcaagagagtatgttgctctttcggcaacccaaccatactcacattctacaactgtttgaaactggatgaagaagcaagaagaggaatcatacaacgatcagtgtccacgtacatatgcttaccaggtaaaaagatccctgaagagttcactcacaaagcaacagggagatccataaccatccctctggcacctggtactctctctgcttcctcaaggtttaaggcttccattctcattttgccagttgagagctacgaaactgaaggtataagttgtagtataagaaccaaaggaggtgttgaagttcattgctgcaagcttccatatatctttttgtgttttcggtcagaacacctgtttatatttcatggtgacttgtttccccaaggaaacaaataccatgaagtggatgtgactatgagcgagattatatttgagttcagctgcgatttcggcgatgacaagattattgagtgtggtgtacagatcatgacagaggaagctgaggataacagcagcagcgaattggacatctttgaaactgagagtagcagcagcgaagcggactactatgaagatgaaggtttaaagttctctcaagttgaaagcaccaaaaccagtaaacatacaagttgttggagttggtttacgaagcatggtctgagaaagaagaagatgaataaaacaagagcgaattctcgtggaatctcatgagaccaagccagttctagtactttgttagcaccttctccatctcataaataatagatggagatagagattatnnnnnnnnnnnnnnnnnnnnnnnnnnnnnnnnnnnnnnnnnnnnttgctggatttagtttgggaagcttaatctggggtagaagaagtacaaaaccctgcatcttacgtcgttgggaatcgtcaaggggtccaagatatatatcatccattatatgttcaatttattaatttttagagagactggatattatatgatcatagaatttactagtctgatgtaaaatag

SEQ ID NO: 168241 - DNA, 3729 bp, Arabidopsis thaliana landsberg
tgaagacactcgacctcatggtcgagtgaagtgatcgagtgatgttctagtgaaggagatgagggcactcgacctcgtggtcgcgtggtgaagtaaagtggtgatgtcctctactcgacctgggggtcgagtggtctcttgagatcttgaagctcctactcgacctctgggtcgagtggtttgtcatgatcaggtccgcttcttccagatagctcgtcaacagctccaaatcacctgaaatcaacgcaagtatgcaacatgcatgcaaaactatcctaaacatgcaaagtgataacaaatgatgtgtaatggtataaaacagtgatgatatgatgctaaagtgatgacaaatggatgctcaaaacatgcaaaatacacacttatcaactcccccaaacttagtctttgcttgccctcaagcaaacaatcaagaacaagctggaagtgaggtttgaaagcggggactcaaagccaactcaccagatagaccagatgaaatcaatgtccaagttgaaagttctaagctgcaagatcgaattctacttaaaaacgttagccatgcctcattatcaatcaatccgactcatatgctcgaccaacacatgttttcaaatctaccaatccctttaacattcattagttttggaacgtgaatcaagcaatgcatcatcaatgaactcatttggctaaggtaaaggtaaagagacaaagatggtcccttacaaaataggcttaagtaacaggggatctctcaagaatgattgagctttagtagaatgctaaaggtaagtcccaagttatgcatacagagataagatcccatctacccagagtataaccaatgaagctctaatggtaatcccaactcgagtcccaatacaagaacttaactctaccctttgcactcatgaatctttcaaactctttttcatatcagtcttttcttttctcttaactctaggagaagctttctcaacactctgatacatctagcggatttgaatttctttaacaactaaggttcctgtttttaatctttaaaaccaaaggcttttaacccttcttctttagctaacaagaacctcattcttttctttaacattcccaaaacctttactagatttttttctaacttctttagcttacttcccctagaattctttccctttccttctcatcaatgaattcacccttttcttttagacacatcccaacccaaagtataaccgcccatctagtcctttctagtccgaaaaatgcgaactagaactacatgagacactatctctgtcgttacgaacctaacactttctaccaagcttaatcggaataagacctcacaaacactcacaagtgatatagggcttgaaagaaagtctaggtttgagttcgggttaactgctctaataaggagagtcagctacttggattaacaagagtgatcaaaatgagtaagaaaatccaagtattttagggtatccatgagttcaaatttgatgcagacatgataattgaaaatcatacttaggttcaaattgggtttgttacactatgagacactttcggagaaacataatgcacttaagacactttaaaaactagaggcactttgccttattttttgagtaaaaaaaaacatatatatccccacaatttcgattgagatatcactgcaaacaggtttagggttccgttggtgttggtttaaaatatacggttataacgttcggtttagcaacaaacggttattgcgtgacgccgagcgtgggatttaaatagatgagacggccgagattaaacaaaataacttcccctgcttttcgagtaacaaaaaactgaataggagatcctttgaaacacataagattctgggtttcaatcatcgatctttggcaaactgtcgtgtccaaggaggtacaattattgaaaactgatatcatcaaactaaaacgaaattacgtgcattctatttgattggggaatcagaatataaccaaatttttatttttttttaatatgtacagggatcgatggacgactatatcatggttatttgtggagagtggttttgttcttcgactggagagtggaaattggagatatgtaaccaacttttctcaagggttgtaccaattcatgagggaataacattgattgcgttgaacgaagcaattttacaggtgtttggcgtcaagggttttaatcctctgttaagttactctacatcgaataagaacatgtttgcaacaaaggataagactccatcggttctggttacaagcgaggttggacttctgaagaatcatactgctatctggctgaatatttgcatctaatgaagctaactaatcctggaacaataacacatatagaaaccgaaagagatgttgtagatgagagcaaagagaggtttttgtatatgtttttagcttttggtgcctcgatagcaggatttaagcatctgagaaggatattggttgttgatggaacacatttgaaagcaaagtacaaaggggtcttactaacagcgagtggtcaggatgcaaacttccaagtctatccacttgaatttgctattgtggacagtgagaatgacgagtcttggacttggttctttatgaagttggagcggattattgcagacagcaaaactctgactatattatcagatagacactcgtcaatccgtgttgctgttaaaagagttttttctgcaagcaaatcatggggcttgtattattcacctttgtaggaatatccaagctaagtacaagaacaaagctttgacgcagttagtaaaaaatgcaggatatgcgtttaccggtacaaagtttaaagagctttatggtcaaattgaatccacgaaccaaaattgcggtaagtatcttaatgatatagggatggctaattggacaaggcattatttcaggggacaacgtttcaatctgatgactagcaatatagtggagacgttaaacaaggcgttaaacaaaggtcgatcgtcacatattgtggagttgataagatttatcaggtctatgttaactagatggtttaatgcgcgtaggaaaaagtctctcgaacataaaggtcccgttcctccggaagttgacaagcaaataacaaaaaccatgttaacaactaatgggagcaaggttgggaggattaccaattggagctacgagataaatggcatgttaggtggaagaaatgttgttgatcttgagaagaagcaatgtacttgcaagaggtatgattaaactcaagatcccttgcagtcatgctttggtggctgcgaatagttttaaaatttcctacaaggctttagttgatgactgtttcaagccccacgcatgggtttcgagttaccgggaagcagtattccgtgaagctattggaagagacgaagaaataccataagagcttgaacaccgatcgatgttgccaccatatacaaggagaccatcagggaggccaaaggtagccagaattccatcaacaggggaatacaaggttaggaaaaatttaagataaagtattgctttctaattgattgttaaaacctaatgcataatgtggtttgtacatggtaaatgtagaaacctaagactggaaggacgcagcagaaccggtgctcgaggtgcaaaggcacttgtcataaaaggacaagttgtacaaatccaatttgaacaagttgttacggtggatgactttgagattgctatttag

SEQ ID NO: 168242 - DNA, 2439 bp, Arabidopsis thaliana landsberg
aacattctgggctgaggcgaccaacactgctgtgaccttgatcaataagacaccatcttctgcaataaacttcgaagcgcctgacaagaaatggacaggtaagtctcatgtctatagttatcttcgaagatttggctgtgttgtgtttattcatgcagatgaaggaaaactggtgccaagagcaaagaaaggtgtatttctcggctatctgaatggagttaaaggatacaaggtgtggatcctagaagagaaaaaatgcagtatcagccgaaacgtgttgtttcaggaaaatgcagtctacaaagatgtgatgcagagaaacaaagagcatgattcaagtcaacatgatacatcaagcggctccctggatattgatctcggtgactcaggagatttgagcttaggtggagaagtctcagaagaatctgaaaccttagaataccagtcaccagttacagaaaatcaaaaatctgaagaagatgagatcactgaagaaatggagacaaactcaccctcaagttaccatttggccagagacagagtaaggagagaagtaagagctccaagaaggtttgatgttgagggttacttcagtgaaagcactgagtatgaagatgattatgatgcagaagctctagtcattacagttgacgcagaagcacttgtcactacagttaatggtgatgctcgggaaccagaaagttatcatgaagctcggagagatgctgattgggtactttggaaggaaggaatggatgaagagatggactctctacttaagaatcacacttggactgcggtcacgaagcctaaaggacaaagagtaataggctgcaaatggatattcaagcgtaagcttggaattcctggaattgagaaaccaaggtttaaggcgagactagtggcaaagggctactctcaaagagaaggtatcgactatactgacatcttcgctcctgtggtcaaacacgtctctataaggattctgttagccattgttgcacaagaagactatgagcttgaacagctcgatgtaaaaactgcatttctccatggagaattagatgagaagatctatatggaggttccagaaggttatgaaagtcagtttgagtcagatcaaatctgcctgttgaacaagtcattgtatggtctgaaacagtcaccacgcaagtggaaccagaagtttgacagtttcatgatcgaaattggttttgtaagaagtaatcgggacagctgtgtttacaccaagtctcttgatgatggctccatgatttacctgctcatctacgtcgatgacatgcttgtttccgcaaaagacattaaggtaatctcagacttgaagctaaagctcagtgagaagtttgaaatgaaggacttaggtgcagccaagaagattcttggtatggaaatcatcagggacagagaaagaggaactctacagctatcccaagaagattatttggaaaaggtgctggaagtttacaacatggaacaggctaagcatgtagagactcctcttggagctcacttgaagtttcaggcagctacagaacaacagttgctcgcagaagaagaatacatgaagtctgtcccatatttaaacgctgttgggagtatcatgtattccatgattggcactagaccagatttagctcatcctgttggcgtcattagtcgatacatgagtaagccaacaaaagagcattggctcgcggtgaagtgggtgttgcgttacgtaaaaggaacgcttaaaaggaagctgtgttacagcagagggtctgagttcattctgaatggttactgtgactcagactatggtggagatttagacagaaggaggtctacaagtggaatggtattcactctcggaggaagtgccatcagttggagatcctgtttacagaaggtagtagctatctccaccactgaagccgagtatatgtctcttacagaagcagtgaatgaggcattatggctgaagggactggtgaaagattttggctatgaacagaacacagtagaaatcttctgtgactctcaaagtgccatagctctttcaaagaataatgtgcaccatgaaaggacaaagcacattgacattaagttccacaaaatccgggacacaatagcggatggagaggtggaggtaacgaagatatcaaccttgagcaatccggttgatattttcaccaagaccgtgccagttagcaagcttcaagcagcattgaacttgctaaatgtcacttctgagtagtaaagctcaggtccgggaccggaatccagaaactcatctctcagctcaggtatcacgtttttatttcacatgttttgttcttgtttccctaggtagagtttgttgggaaattagtgaaacaaagaagcaatgtgaataaggaagcagcgagaagagcaagtattgccagctcatatcgatga

SEQ ID NO: 168243 - DNA, 2803 bp, Arabidopsis thaliana landsberg
ccccccccgagcaaaacaatgtaggagaaacaaataaagatccacaagaacgaaatcaagttcatgattattttgattgcaggtatttttcattattttatttcagtttatggtaaacatacttaggagactatttttaagatgacacttaatgaaaaataactcaaaaaatcgttttaccgatacgtatctgcatgtgaagcgatgtggacgattaaaggctatcctatagattaccgacaaacatcagtaactaaacttatgttcaatgagaaaggcaagcagcctgtttttatgtcaaggacggtgagactactgaatctgttttgtataaagtgaacatgatgacacacagtttatggcatggttggagcttaataagcgttatcctgaagcagcaaaatttttatatgaacaaatacctaatttctatacgtggaatgggaaagataaggagtttcgcagaaggttgaagccaagttttgctgttagaagaataaattatgtacctgcagggatagatgatgcatatcatcttcggatcctgattaacaacaaaaaggaccagtcagttttactgatatcaaaaccgtcgagggtgttgttcatgcaacatacagagatgcatgttatgctgtaggtttgctgaatgatgactaagaatatatccactgtattgaggaggctaatttttggtgttcttctaactatgtttgaaagttgtttgttataatgcttatttccgaaagcttgagttccccagccattatatgggaacacacttggaagatactgtctgaagattttaagaggaagctaagaaatcagttagaacgtgcaggttagttaaattattatttttaaattaaatatacaattttatagatgtttttagaaatattttagtacattcaatcttatattaatttatatgtagaatacatattgcctgacgaagacaggattcgattatgtttacaagagctgcaaaaaatattaaaaaggcatggaacagatctttggaggtataagatgttgcctcagcttgaaccaggcgatgaacctgcctttaatcagttgatcctcgatgagcgcaactacaactgtgagtcattgaaaacaaaacatgataattggttaaagatgttaactgcggaacataagaaggtatatgatgaaataatggatgttgtccttaatgacaaaggaggtgttttgttcttatatggttttggaggaacatgaaaaacctttttgtagaaggttttatccgtagcgataagatctaaaggagatatttgtttaaatgttgcataaagtggcattgcatctccgttattagaaggtggccgaactgcacattctaggtttggtattcctctaactcctcatgagacctcaacatgcaacatagaacgtggtactaatcttgttgaattagtaacagcaactaagttgatcatttgggatgaagctcctatgatgagtaagtactgttttgagtcattagataagagtttaaaagatattctatcgactccagaagataagccgtttggtggaaaagttattcttttcaaaggtgattttaggcaaattcttcctgccatccctgcagccggtagggaactgattgtcaaatcgtcactcaattcgtcttatctttggcagcattgcaaagttttaaagttgacgaagaacatgaggcttctccaagatatagacataaatgaggcacgtgagattgaagaatttttgaaatggatccttgcagtcggcgagggaaaactaaatgagccgaacgacggagtaactcagatacaaatactagatgatattcttatacctgaagggaacaaccctatagaatcaatcattaaggcagtctatggtacaacctttgttcaagagagagatccaaagtttttccaagatagagctattttgtgtcccaccaatgatgatgttaactcaattaacgatcatatgctttccaagctaacaggttagtgaattaactttggatattactcaaaattatacatataactttatcggttgttacttataatagagtagatgacaatgaactactactctttgcaggtgaagaaaggatttatcgaagttctgattctattgatccttctgacacacgtgtagataaaaaccccgtatatacgcctgattttctcaataaaatcaagatttctggattacctaaccatttacttcggttaaaagttggttgcccagttatgttgttgcgtaatattgatccgcatggaggtttgatgaatggtacaagacttcagattgtaagagttggagataaactagtgcaaggacgtatattaacaggtacaggaattggtaaactggtcattattcccaggatgctcctaactcctttggatcgtagattgccatttaaaatgaaaaggaggtagtttcctttatctgttgcatttgcgatgacgatcaataagagccaaggccagtcattaggcaatgttggtatatatttaccgaagcctgttttctcacatgcacagttatatgtcgttatgtctagagtgaaatcaaaggcaggactgaaggttcttattacagacagtaaaggaaaacagaagaatgaaacaacaaatgttgttttcaaagaaatattccaaaacctttagtagattatttcttcaggtatgatttatttattttgattattataaactaaatatcattgtacaaaattatataacatgttaacttagtcgtttttatatttgcaggttggaataattattaa

SEQ ID NO: 168244 - DNA, 896 bp, Arabidopsis thaliana landsberg
tttgtttataccaatgggtccaacagagcttagagaggctagaatagaaattaccaaagattttataaagagagctgctctaaggattcagcgtgaaaatcggcgaaggaatgatccagatgaagataaaaatgctgagactaaattggctttaaagcattgtaaagacatggttcttggttctagtaaatttggggatgatcgtcctcttactggttgctccttatcacgagatggaaaaatactcgtcacatgttctcttagtggggttcctaaattgtgggaggtgcctcaagttacaaacaagattgttgtcttgaaaggtcataaagaacatgtaactgatgtagtgttctcgtctgtggatgatgaatgtctagcaactgcttctactgatcgaactgaaaagatatggaaaacggatggaacacttctacaaacttttaaaggtcattcagatcgtcttgcacgcattgcattccacccgtcatagtcgtagtgttgagatgcctccggacaacgagttttgataaaacatggagattgtgggatataaacataggagttgagatgctttaacacaagaaggtcatagtcgtagtgtctacggaattgcatttcaacaagatggatcattagtagcttcttcgggttttgattcgcttgcaagagtttgggatcttcgtacggctaggaatattcttatcttccaaggacatatcaaacaggttctctcggtggatttctctcctaatggttatcatttggcatctggtggtgaagataatcaatgccgtatttgggatctacggatgagaaagttgttgtatattataccagctcatgtgaacctcgtttctcaagtaaagtacgaaccacaagaacgctatttcctg

SEQ ID NO: 168245 - DNA, 591 bp, Arabidopsis thaliana landsberg
  unsure (1)..(591): unsure at all n locations
aaagtttgattcatatatgggggcttttttccaaagattgggtttcctgataggcctttggagggagaggtactttcggacagcagaacaaaaccctttttattgtttttgcggttcttgaatttttttaacatttaacatgagagaagtttaacacagacctgctggaaccaaagttacgaatatgtatggtggaacacgannnnnnnnnnnnnnnnnnnnnnnnnnnnnnnnnnnnnnnnnnnnnnnnnnnaatctaaaatctttcctgatcagaatcatgttgtgaaaaagaagattgatagattgtttccataacgaatctgatctgttcttggcttattccatagctgaaacattgcttataatgtggactttgtgtaggtatcggtgaatggaacattgtaccacaagagctgcttcaagtgtacacatggaggctgcacgataagcccttcgaattacatagctcacgagggtaagctatattgcaagcatcatcatattcagctgatcaaggagaaaggaaacttgagccagctcgaaggaggaggagagaatgccgccaaggacaaagtcgtcgctgcttaa

SEQ ID NO: 168246 - DNA, 520 bp, Arabidopsis thaliana landsberg; identical to SEQ ID NO: 79865

SEQ ID NO: 168247 - DNA, 1973 bp, Arabidopsis thaliana landsberg
gggtaaacacatctcttgcaaattgcgacgtaattacgctgtagcaatgttgcgacttatttgcgagtcttcgcgggttaggtgaccacgttttaaattatctcaccgaactggttggtaggtgggattccctcgcaagttcctagcaaaagagctttttccctagcaaatccgtcgcaacgtgccttgcaattctctcgcaatatttttttggacatctataaatagccaacgtaacgtctaagaaatcataattcaaatcacaacatttacctacaaaaaaaaaaaaaaatcaaaaaaaaaaacttcttacaaaaataataatgtcttggggtggagaacatgagatttacacattacgaagttggatgtacaatcatagagatcaagcgaccggtgaggtgacgagagagtattatgacgggctgcgcagtttcatgtatcaagcgacaaacgaaccatttgctcgtgagaacggtacaatattctgtccatgtcgtaagtgtctcaatgagaaatatttggaatttaatgtagtcaagaagcatctttataatagaggatttatgccaaactactacgtctggttacgtcatggggagggttgtagagatagcgcaggaactagtaatacaaatttcggtgtcgagcaacctagtaattttaataatgatgcgaattatggtcagcatgtacctgatcaatttggttatgggcataatcaagaaaatcgatttcatgatatggttacggatgcatttcatgaaactattgcttcatttcctgaaaatattactgaagaacccaacgtagatgctcaacacttttacgatatgttagatgctgcaaatcaaccactctacgaaggatgtagagaagggcattctaagttatctttggcatctaggatgatgactattaaagctgataataacttaagtgaatactgtatggattcatgggcagaattaattagggaatatttgccaccggataatatatcggctgagagttattatgaaatacagaagttggtttcgagtcttggattaccatcagaaatgattgatgtatgcattgactattgcatgattttctggggagatgatgtaaatctgcaggaatgtcggttttgcgggaagctgagatatctagactactggcggaaggacgcgagtgccataataacggatgtggtacttgtcaataactgatagattgaaacgcttatatcaatcagaaagatctgcggcgagaatgagatggcatgtcaacatacaactgcagacggagaaataacgcacccatcagatgcaaaggcgtggaaacactttcaaacggtatatcctgactttgctagcgagtgtaggaatgtgtatcttggcttatgcacagatggatttagtccattcgttttgtctgggcgacaatattctctttggcatattatcttgaccccatacaatcttcctccagatatgtatatgcaaagcgaatttttgttcttaagtattttagtacctgggccaaagcatccgaaacgagcgcttgatgtcttcttgcaaccgctgattcatgaactcaaaaagttgtggtatgaaggtgttcatacgtttgattactcgagcaaacaaaatttcaatatgcgggcagtgctaatgtggacgattagtgacttcccggcatatggaatgttatcggggtggacaacgcatggaagattatcttgtccctactgtatgggtcgtacagatgcgtttcaactaaagaaaggcagaaaaccatgttggtttgattgtcaccgtcggtttcttcccctacatcatccgtatcggcgtaacaaaaaactttttaggaagaataaaatagttcgtcttcctccgccatcttatgtttctggaactgatttgtttaaacagatcgattattatggtgctcaggaaacctgcaaacgtgggggtaattggctcacc

SEQ ID NO: 168248 - DNA, 570 bp, Arabidopsis thaliana landsberg
acagtttttgagatgccagggtttggagaagatccaccctagcatgtcagtcatccacagtccagcagaatgtgaaaaagaagtagcttcagagccacagtcacctcacagtcctcgggcagcagaaagttcttcagccgccagctccaagggcagaggcccagggcttcgaggaagatatgggatcagcccaggaaaatctattgcttattttgtaatgaggacaagggccatattacaagaatgtgccaaatcactattctgaagcaaaaggagatcgcagaagccgaagctcgacagaatcagccaaagcaggtcttgcacactgcttcgtgccactctccctacataccagaacatgtgggcaatcatcctacagcttctgttgcttcggctagccattcacaggcttcttggcctcagctcccaccgccaccaccactgcaacctacctattcccgaagccagcagccagaagggcaccagcactctcgacagcaacgtgaatttagggaggaatctgaagctcgtacagtcaacagtactgtgccagaatcaaagcacatttat

SEQ ID NO: 168249 - DNA, 887 bp, Arabidopsis thaliana landsberg
ttccgcttcattctagggttacaggatctaggtatccgtatctatggatgagtgtggcactagaaaatgggtggcatgtaatgatcgatgcatgcggtttgggacctaaggatatggatagtttcgggctttctatatataaccccgatttcatggtgtgttcgttctacaaggtgtttggagaaaacccttccggatttggttgcttgtttgtcaagaaatccaccatatcgattcttgaatcttccactggtccaggtatgattaacctcgtacctaccgacaatccgatttcattacacgcgttggaaatcaaccgaacacaaacagattcggaagaaacatatagctttagctctagtgtcgaatacaaaggcctagatcatgtagattcactagggttggtagcaacagggaacagatcaagatgcttgataaattggttggtaagtgctctctacaaactcaaacattcaacaactagtcgtctagttaaaatctacggtccgaaagttaatttcaatcgaggaccagcggttgcgttcaatctattcaaccataaaggcgaaaaaatcgaaccttttatcgtgcagaagttagccgattgcagcaacatctcactcggtaaaagtttcttgaagaacatcttgttccaagaagactacgaaggcgtgaaagatagagtttttgagaagaaaagaaacagagacgtcgacgaaccaaggatctctgttctcactgctgcgttagggtttcttgctaatttcgaagatgtttataaactttggatattcgttgctcggtttttggattcagagtttgttgataaagagagtgtgagatgtggagttcatgtttttgaacataagaaccgtgaagtagtctag

SEQ ID NO: 168250 - DNA, 3146 bp, Arabidopsis thaliana landsberg
  unsure (1)..(3146): unsure at all n locations
agggatgtgcaatacccggattggatggcaaacaacgtcgtggtcaaaaagaagaatggttaggattgggtatgcatcgactttacggacctcaataaagcttgcccgaaggatagtttcccactttcgcatatagatcgtcttgtggaatcaaccactgggaacgagttactaactttcatggacgccttctctggttataatcaaataatgatgaatcccgaagatcaagagaagacatcatttatcaacgatagagatatttattgttataaggtaatgcattttggttttaaaatgcaggagctacttatcaacgattggtcaacaaaatgtgccacgaatatcttgggaagacgatggaagtttacatagatgatatgttggacaagtcgttgaagaaaaaggaccacgttaagcatttagaagaatgttttgagattctcaatcaatacaaaatgaagctgaacccggcgaaatgcaccggggaattccttggttatattgtgacgaaaagaggaattgaagccaatctgaatcaaatcaattcctttctcaacatgccgtctccaaaaaacttcgaagaagtacaacggttaactggtcggattgtagctttaaactgttttatttcaagatcaacaaataaatctttacccttctatcaatttctaaagggaaacaaaggatttctttgggatgagaagtgtgaagaggcatttggacagcttaaggcgtacctaaccacaccacccgtattgtccaaacccgaagtggatgaaaagctcgacttatacgtttctgtatcaaaccatgcagtaagcggagtcttgatacgggaggatcgtggagaacaaaaaccaatttactacatgacagatccagaaaccagatatacaatgatggaaaatctcacacttgcggttgtaacctctgcccagaagctgcgttcgtatttctagtctcatcaaatcgaagtttgaaccaaccagccacttcaaaaaatgcttcatagtccaagtcagtccggaatattagcgaagtgggaagtggagttaagtgagtataatatagagtaaaagagccgagtcgccatgaaggcccaagttttagcagatttcttgaccgaattatcagtacttggcgcactagagcaaccggagagtcaaacttggaaattgcatgtagacggatcttcatcaaaagaagggtccggagtgggaataaatttcgaatctccaacattggaaattcttgaacaagcattccgattttatttaacgctactaacgacgaggcagaatatgaagctttaatcgcaggacttaggctagcacaaggaattggagccgaagtagtagtcgcttattgtgattcgcaactagttgttaaccagttcaatgttcaatggagattatgaagccaaagattcaagaatggaagcatatctcaatgtagttaaagatctgactaaaagcttcaaaaagttcgaactcattcgcatacctcgtggagaaaatatgactacggatgcacttgctgctttagcatcaacatcggatcctaaggttaaaagagtcatcccggtggaatgtatttcagagtaagcattaaagagaaaaaaagaagccctcgtcatttcaaagctgctatacgtgatcgcggtgaacccgagatagagttgccacctgtcaaatgaagaaagtcaaatggttcaaccatacccgggcccggcgtgtcaaaagaaaatagtagcgaggagcccatcaatccgacagaagatgcagttccagaaacaattataagaaccgagccactaatcgaggaagatatccttgagccaaatgagcatcccgaaccagaactatgaatatttcacgagatcgaccaaattctggctaaagattggagggctgatttgagggagccaataaagcagtacattgtgacaggcgagctcccaaaaaataagtggcaagccaggaaaatgagaatcgttagcgcgaaattttgtttgtcaaaggacgcattgtataggcgaggtggcattgacccttacttattatgcatctttgggcccgaagaggaaaattgtcatgaacgaagtacacgaaggtttgtgtgggagtcattcatcaggaagggccatgacttttaaaattaaaagaatgagatattattggcccactatgattacggattgtgttaagtacgcccagcggtgtaagtgttgccaacttcaatcacctctaatccaccagccttcagaattattttcctccatctccgccccgtacccgtttatgaggtggtcgatggatatcattggaccattgcacagatcaactcgaggcgtacaatatctcatggtcttaactgattacttttcgaagtggattgaggccgaggcatatgtaagcatcaaggattcagcggtaaaaactttcatttggaaaaatatcatatgccggcatggtgttccatacgagatgnnnacagacaacggaccacaatttatttcacacgaattcgaagttctctgttcggattggagaatcaaagtcagttattccaccccgcgatatccacaaggaaatggtcaagccgaaaccgcaaacaagacaatcctaagcaatctaaaaaagcgcttgaatcatctaaagggaggatggtacgacgagcttcaacctgtcttatgggcttaccgcacaactcctagcgttctaccggggaaactccgttttctttagtgtatgggatgcaggcagttgttcgagctgagctcaacgtgcctgacttcgccgaatagaggctcccctaaatgaagatgaaaattctgcaatgctcgatgattcgttagataccatcaacgagaggcgagaccaagctttaatccgaattcagaattacaaacaggcagcaacttgatattacaattccaagatcaaaagcagacctttctttgtaggtgattacgtcttaaagcgtgtttttgactataagaaagaagaaggagcaggcaagctcgacattaattgggaaggaccttacaatgttatcgaagtggttcagaatggtgtttacaggttaaaagatctagaagacaggccagtccaacgtccttggaatgtggtgaatttaaagaa

SEQ ID NO: 168251 - DNA, 3765 bp, Arabidopsis thaliana landsberg; identical to SEQ ID NO: 1848

SEQ ID NO: 168252 - DNA, 407 bp, Arabidopsis thaliana landsberg
tgatcaggtttttaaaccaaagattaactcaaactttgttgcccgtgtatttacaattagaaactaatatggtaaacgatttttttccacagccacaactcatgttagagaatagccacgacacatcagactccggtactccttcttccaagcgtatttacgcaaacacggatggtactgctgatgaatctttcacctctaagaagatatatgttgaacctattgacttggaaaagtcaaacccagaattcagactcacttctcaacacgcacaactaggagatcctagcggaaaggatagggatgagaaaggaaaaggcgtggagactggagtaccaagtttgaggagcagcaatcagtatgaaaagaagaatgtggctgtgaaggtcaaagttgagaaggagtga

SEQ ID NO: 168253 - DNA, 888 bp, Arabidopsis thaliana landsberg
ggagccattcttcccatctactcgacccgggggtcgagtaacctcagctcaggccactcgatgacgccactcgtcccccctggtcgagtatacctttgccacaccacctgaccacactcggccgttcactctaccacgttactcgaccccctggtcgagtatcatcactcaccaccaacaccatcactcgaccgggcactcgatcacatcttcatagtctactcaaatccgcactcaaccaaacaagctgagcacaaggaagagaagaggagaagacaaagtgttttgaagcggcctggacctccatcggatcacgaagcccatctcggcccattatcattctatgggccgggcgattaggttattggctcgtctactattattttatttcgttttgtataaatagatgtcttaggattctgtaccaggacatctagtcgacattgagtttttttgcttcagttttattttctgttttctctcgtgcgccgcttttacttctgcaacctgtaattcgagatttttccaagttattcagattccgcatttgatttcatttgtcatcttgtttccctacttttttctcttacttatgcaatattatcatttatctgcgtttatgtctttgagcatgttgtctgagtagtgacttagaattcttaaggatgggatagagtagttgtggaattcgtagtctgtagaatggttaagttttagaattgattgaatcccttcaggactagttgtgtttactgcttatttctttctaatcaactggaattcgatcccaagcattcccgcacccagaaggtgttcgatggaatgcttgatccactagttcctgagatatttgtctctatcccaagggattggccgtttagagcgttt

SEQ ID NO: 168254 - DNA, 1893 bp, Arabidopsis thaliana landsberg
aggaggaagagaggaacaaagagaaagattgaaattgagaagcggttcacaaaagaacaacgatccatagcttgcagcaaacgccgtctaactctcttctccaaagcggctgatctatgtcttctctccggagccaacatggtcgttttcgtaacttctccggacgagaactcctacgttgtttactctttctcttctcaggctactcttctgcatctgaaattgttcattgttatctcaacgacaagtctcctcccaagattactcaatccaacgagttagggttttggtgggaagacctgatagtagaggtgtcagacgggccggcccgcgcccatctagcccgccccgcagtgggctttcttttttcgggctgcggcgggttggcccgtttaggaccgcggacaaaattatcagtgtccaagcccggcccgcaaagcccagcagatatacgggtcggcccgcgggcatttctctgctacgcatcaaggattcttcagctgtggcattgtgtgtacaaggcaatatctcgtccagagccgtattgcttgatggtctctcaacccattcgctcattgccacacatgtgtctgcagtacaaatcgaagaaactgcagcaaaagaaatgataacaagcatgacgattgaaactacgataagcgccactctcctacgagtacagaaatgactattatacatttgtttttcaaaatccaaagattctgtaacatatagactgttaggaggagtttgttacacagaatcaaggaaatgtcttatgtgattggagttactagtcgatttctcagtgataatagctatagagaaatccagtttcgctccgatctgatcgatttcagtttgtacatttgcaggtaaaagaacctgaagaactgcagcctgcttggctgaagcaagataatctgagatagctctaagctgcgaaatcgtgctatcagaaccttaacttaaactcaaatccaaaatatcctaaaaggaacaatgtcgtgtctcatcttgcaactcatttgtaaaccttaatctgaacttaaactcatattcaaaccttaattgtaacaagttaaactcaaatgtgaaacagaaattgaacttaagtcaagagaaagacctgcaacttcttaaacgcaaacatgataactgaaacatgaactaaaactcaaatccaaacatgaatatcaaacttaaaataaaatctgcaactcaacatccatctacatcatccacaagcgactggaagaaaggtagagtctcatcttcagcatcaaatttttcatactcctctacaagtatcacacaaactaacaatgttcattcatagactaagattgtgtgactataaaacttatgaaaaacaacttacttaccattttcataagattcaaaaccttttaaccaattgcgactgcatattaatgcttaaatcgttccagacttttgagtattgccttctcttctttggtttcgatgactttccattgtcctcatcatcatcaacatcatcagctccattgtccccatcgtcatcttcttcatcatcatcatcttcgtcttcatcactaatctcaaacactttttttggttttttagatgctttagcttcagacttttttcttctctctgttttagaggcagaagcttcatcacccttgcttcttctttgggtttttgatgcttctggttcacacacttttttcctctatgtcataggtgttcctgtttcatctctcagttttcttttcagctttttagatcctcctgcttcatcattagcttgttgttattcatatctagcttgttccaactcaatgactctccgagattccacgtctaatgatctcaaatactcagcatcaacagaatccaacggatcct

SEQ ID NO: 168255 - DNA, 173 bp, Arabidopsis thaliana landsberg; identical to SEQ ID NO: 56979
  unsure (1)..(173): unsure at all n locations

SEQ ID NO: 168256 - DNA, 377 bp, Arabidopsis thaliana landsberg
gagggtttacaacacaatattgaaaagatcaggcgtcgcatagacacagcctgtaaaaacagtagccggaagccgacagacgtaaaattacttttagccacaaaaacagtatctgcggatagaattaaagcagccattacggccggttgccgtcttattgcagaaaataagattcaggaggtaaaagaaaaatttaacgacctacaggaggtagcgcatgaaagtcattttatcggtcacttgcaaaccaataaagtaaaagaactcctaaaatacaatatcacctgcctgcactcccttgaccgtttggaacttggcgaaaaactgcaacatcgactggtcttggaaaataaatacctggacgtgataattcaagt

SEQ ID NO: 168257 - DNA, 432 bp, Arabidopsis thaliana landsberg
tcttccatcttgcgcatgacaataattaagaaagcctctccaaaatgacgttttctcgtagcagctcgatttccttcttcatcctcactttattcgccatctaaattaatcctactatctcttcacgcgtctcatgcttcatcaatctccccagctcagtcgaatctcgcttttccgttgtttcctactgcaagggctggagattggttccgtctcaatgcgaaaactacgttagatactatatcaaatgaggctagttcgacaaagattatattacgatgtactcgctagttacgccatacggtaaaacgatcaatcttgccggaaacggtacggacgcgtgggtgtttgatatcgatgaaacttttctctcgaatattgagtactacaaggctcatggttacgggtaatgcccatgcacactctattatt

SEQ ID NO: 168258 - DNA, 455 bp, Arabidopsis thaliana landsberg; identical to SEQ ID NO: 9744
  unsure (1)..(455): unsure at all n locations

SEQ ID NO: 168259 - DNA, 370 bp, Arabidopsis thaliana landsberg
ggagaatggcacaatcgtggcagttagctcaaaacgagttttataacaaaaatcatggttttcaaatttagaaacttggaatcgagtgaggaatatctcaaacgatatcaattgttcaagaaatcgatgctatatggatgaatcatggaaagaaagagaagttcagtggaacatgatgatattgtacatcattaaatggagagacgccacaatgggaactggcaatcccagaagaagtctatctctactacattcagaagtgcaagctcttctctgggcgataaagtgtatgattaccgatgacaattaagaagcagtttttctaacagactgtttagatctggtgaagatagtgtcttccccaccagat

SEQ ID NO: 168260 - DNA, 481 bp, Arabidopsis thaliana landsberg
atcatggtgggcggcaggcagcaggtgttcgaccaggtcaagccgctgttcgagctgatgggcaagaacatcacgctggtgggcgacaccggcgccggccagatcaccaaggtggccagccagatcattgtcgcgctgaacatcgaggcggtcggcgaggccctgctattcgcagcaaaggcaggcgccgatcctgcgcgggtgcgccaggccctgatgggcgggttcgcctcttcacgcgtgcttgaagtacatggcgaccggatggtcaagcgcaccttcgatcccggcttccgtatcgtcctgcacagcaaggacctcaatctggccactcgcaaacgcccggaaaatgggtatttccctgcccaacacggccacggcgcaggagcttctcaactcctgcatcggcaatgttccaggcggcaaggaccattcggcgctggtagcggcgcttgagcgcatgggcaaccacaaggccccc

SEQ ID NO: 168261 - DNA, 460 bp, Arabidopsis thaliana landsberg; identical to SEQ ID NO: 21345
  unsure (1)..(460): unsure at all n locations

SEQ ID NO: 168262 - DNA, 242 bp, Arabidopsis thaliana landsberg
tatagacccaaggaagataagggatggctgccaatgtcagcgccgccgtcagtgcgagtaatgtccgtatcgtgccttacacaatggtgacgaatccgtacatatctcaggcgtatgaccagatgacgccaccaaacatggttcggtaagtctccgacacggcctcagtaaacgagaccacagtcgatgactcttacactattatgtttagcgacgagaaccctaattcttgcgctatcatg

SEQ ID NO: 168263 - DNA, 949 bp, Arabidopsis thaliana landsberg
ggtaagacatgtcattttatttctcaatgtcctgataatgaaaatgaccaaggggaagaaagacatgggaagaaggagaagaagaaaagctacatgaaggttaaaggagaggcgcatcttggcaaggaatgggactcggactgctcgtcatccgactccgatgatgaaggactggcagcctcagccttcaacaaatcttctctcttccccaacgaacgccacacttgcctcatggcaaaggagaaaaaggtaagcgttcaagaaacccctaagtatactacttcaagcgatgatgattctagtgatgatgaagtagattattctagcttattcaaaggtttagatagagcaaaggtagaaaagatcaatgaattgattgatgctttaaatgaaaaggatagactgctagagaggcaagaggacattttgtatgaggaacatgacaaatttgttagtgttcaaaagtctcttgccttagagatcaaaataaatgaaatattgtcttctgagttatcacttgccatgattctatttctagtctcaaaactttgaatgatgatttaaatacaaagctagaaaaatttaatgtggctagttcatctgtagcgcatgttgttatctgcaatagatgcaaatattttaatattgatgcttgcaatgaacatgcttctaccattcttaagttaaacaatgatgttgtaagtcttaatgctcaacttaagacttgcaaggataattatgagaaactaaaatttgctagggatgcctacaccattggtagacacccctctattaaggatggacttggtttccaaaaggagaccaagaacttaacaagccaaatgactttcagtctcaacaaagggaaagggaaggctcccatggctattagctctaaaaagaaccatgcccatctttatgacaagagaattactagtatttcaaatca

SEQ ID NO: 168264 - DNA, 495 bp, Arabidopsis thaliana landsberg
tgtcacgctcaattctggctatgaaacgattgcctcgaccgaaatgcccatctatatgtgggacagatcgtagtggattcatggccagtgtatccttgcgttggctgttccagcaacatgcgacgctaggttcaacattgcccagagggaccatccagcaatcattcgtgctcgaaacaattctcacggcgatcttgatattcgtcgtcttacgagtcgccataggagctaaagagaaaggagtcaccgcagcaattgccgttggtgctgtggtgggactggaggcgttgttcgccgggcccatctgtggcgcctccatgaatccgattcgatcgttggcaccagcggtcgtgtcaggcacgttaaccagcctatgggtatatttaacggcacccgtactcggtggacttgtcggtatcggcttgttcaagctgtgcccaagcgatctcattcaacgcgatcaggtattgtcctaagtacaaaactttcactgaa

SEQ ID NO: 168265 - DNA, 623 bp, Arabidopsis thaliana landsberg
atcatacagaactacataagttctcactttgattcatctctgattatgaacagcttacctttgcatctcctcgaccaaattcttttcagattggaacccaaatctctggcgatgatgaaatccacaaatagaactatcaattcgcatatatccgacccgctttttgaatccgaatacttttcccggttagaatccagtttgtataacctttcccccggtggcgccagatacgtcatgtgccagcctttagtctcttcatgcaaatctatgtcaatgggggaaaaagcaattcaaggtaatttccgatgttacatgttggggtcatgctctggccttctcctactgtacatcggtggcctcttcgtcgcaaatcccctcacaaagaggtttcgatatttggatccttctggctcaaagtttatacctacactaagtggtgatcgctggatttatttggcacatccggagagagcgatgtgcgttggttttgcggttgatcgaaagagattcaagatcgtctgcatacttgagatggagacgaggtatgaattcgaaatcaacgacggcgattcatggagactatcaaaaacgactatcaatgctgactcaaaaagtgatctcac

SEQ ID NO: 168266 - DNA, 1025 bp, Arabidopsis thaliana landsberg
agtcgttcaagcacccatctgggataacccatttgagatcatgtgtgacgcatccgattatgtagttgcaggtgtcctaggacaaaagattgatggcaaacttcacgtcatctactacgcgagcagaacgatggatgatgcacaagtaaggtatgccactacagagaaagaactgctagctatggtatttgcattcgagaaatttagaagctacctagtaggttctaaggtgacagtctacactgatcatgctactttgaggcatatatatgctaagaaggataccaagccaagacttctaaggtggatcttattgcttcaaaagtttgacatgaagatagttaataagaagggaattgaaaacggtgtagctgaccatctctctaggatgagaattgaagataaggtccctattgacgactccatgccagaagaacagctaatggctattcaacaactgaacgagagtgctcaaattttgaaatcactcgatcaagtatgtgccataaaagataagctttcgtggtatgctgatcacgtcaactacttggttagtggtgaagagcctccgaatatgttgagctatgagaagaagaagttcttcaaggacattaaccatttctaatgggccgagccttatctctacacactctgtaaagataagatctacaagtgatgcgtctcataagaagaaactgatggcatcctactgtattgccatgggtctgcctatggtggccactttgcaactttcaggacagtgtcaaaaatcctgcaagcaggtttatggtggccgataatgtttaagcatgctcaggaatttgtctcaaaatgtgaatcatgttagagaagagggaacatcagcagaaggaatgagatgcctcaaaatccgatcttggaagttgaaatttttgatgtgtggggaattgatttcatgggtccatttccatcttcttatggaaacaagtacatactggtagcagtgcactatgtgtcaaagtgggtggaagcgatagccagtctga

SEQ ID NO: 168267 - DNA, 942 bp, Arabidopsis thaliana landsberg
aaatatcattaaaaaattttggatattcgaatcttaagatattcagtatttttcggatcaaaccaaatcataaaattaatcattcggttaaaacaaatcgaataccaaatattactaatttttaggatatttgctttgtgccgactcctactaaacgccctcacatattgcttttccttttcttttctttttgacaaaaacattattcccgtttttgacaaaagaccaaacatatataaaaaatacgtggagtactgaaacttaaatctaaacccaaaaagttagggcacagttttctccacttccaaacttcgtttatacacttcaagtaatatcgtttgctgaagagagggacgaaggcgtacgaacaaatacaaatcgcctataattgttacacaatccgctgtcgggctttgaacccggaatgtgcaaggatcaaatagattgttagagcatatagccattgtgctacagcagagtttttgttattatataagcttacactaatgatatagatttttgtaaagatttttataataaatttatttgtttaacaaattttaggggtaaatttgcatatatatttttgaatataattgtatttttccaataatctattaaattattaggatacaattttagataaaaagctcatacaaacaatatctgattaaataggatttctacacctcttgtcgttgtcacacacaacatagtaggcaagaagagatttaatcagctcagaggaaaagccattgccttacactcataggtttcttaagaactagttagagaagcaaagtccataagttttgtggaaatgtatttttgttctctcaggtgatcactgacttttgtaaatcgattggttttctcagtcacataggtacatgttaagtgatatttttaacatattatggagtgttttttaattgttttatt

SEQ ID NO: 168268 - DNA, 1188 bp, Arabidopsis thaliana landsberg
  unsure (1)..(1188): unsure at all n locations
ataccaattgctcatactccacatatataatagggaaaaaaaatttcgttcgtgatgtgcgtgggagccctgaaactagctacaagttattgttcgcttatctgcacattttaaggcctgtgaatcatgggacaataacggaagcggaattggatgcagatgacaggtttaagttcctattcatcgctttgggcgcaagcattgaagggtttaaggcaatgaggaaagctatagtgatcgatgcannnnnnnnnnnnnnnnnnnnnnnnnnnnnnnnnnnnnnnnnnnnnnnnnnnnntcctaatcatcatcattaccccattgcgtttggtgtaattgatagcgagaatcatgctagttggaactggtttttcataaagttgaattccattatacccgatgacccggaattggttttcataagggtcagacatggaagcatcatcaagggagtcgcggatgtgttcccgaaggcatcacatggacattgtgtatggcatttgtctcaaaacattaagaaaatgctggcatgtgcaaaaaagcaggtatggccaaatttatggaattagctcatatttatacagcgactgagttcaacattaggtatgcataatttaggagaatggatcgggcaattgggattgagaaatgggctaggtgctattttcagggagacaagtacaacatagatactagcaactccgcagagtcaatgaacgcagtgttttcagaagtaaggaagtaccatctgttaccgatgatagatgcgattttggagaagttttctgagtggttcaacacacatcgcaaagattccgcgtcttcatcgaacacaaggcaagtggtgcatgttgtggagaatatattacacacgcgctgtccaattggtgcaaagctaaatgcaactgaactaaacagcttccgacaagaatacaacgtaattggaattgatgtttttcttatttggtggacttggaaaggaatacttgttcttgcagagaatttgatatagacaagtacccgtgcgtccatgctatagctgcagccataaagcgatctaatatggattggaatagccgttcaatcttgaatgtaagtatctatggtctttgctcgaagtattacttgatcgagacgtgggcattggcatattacagaacgatttatatggtgccgcatcaggctcac

SEQ ID NO: 168269 - DNA, 356 bp, Arabidopsis thaliana landsberg
  unsure (1)..(356): unsure at all n locations
tgttttttggtcccggttgctcggggttttgctttgtctttttgttcccgtccncccgtttctgggggcttttgcttctgttcccttgttngtggctgggcgtcnctttggttggttngtccgntcngttcntcgatggtcggcgtgtgtgttggtcctngtggtggtcctgcncgtctttcgtgtgtncctcnccggtggttttctggcccctcgcggtttcncttgggttnctggtgtggttctgggtgtnttgtccgcttcttttggtgtngcnggttgttctttcccttgggntcttttgggttgttgggcggtcccccttgtttctgtgtgtccctccccgcttttccggt

SEQ ID NO: 168270 - DNA, 595 bp, Arabidopsis thaliana landsberg
gctgaccgaaggcctgtcgtcgatttttgccgccgtggtgctgctgggcgtgggcctgtggatgcaccaaaagagtattggcggccgctggcaggcctacatcaaggccaagatgaacgaggccatgggacgcggctcgctgtggttcctgtttgcgctggcgttcatcaccgtctaccgcgaaatcttcgagacgattttgttctacaccgcactgtggaacgaaggccagcaacactggatgctggccggcatcgtggccggcgcggtggtgctggcggtggtcgcctgggtgatgctgcgcaccagccgccgcctgccgctgggcgcgttcttcaaggccagctcggcgctgatcgccatcctcgcggtggtgctggccggcaagggcgtggccgcgctgcaggaagccggctgggtcggcgtagacccggcgccgattccgcacatcgacatcctcggcatcttccccagctggcagccggtgctggcgcagctgatcgtggtgctgttgctggtagccggcttcgcgttcaacagcgtgcgcgacaagcggacggcactggcccgggcgcactgaaaaccgctgccacct

SEQ ID NO: 168271 - DNA, 1449 bp, Arabidopsis thaliana landsberg; identical to SEQ ID NO: 29880
  unsure (1)..(1449): unsure at all n locations

SEQ ID NO: 168272 - DNA, 1934 bp, Arabidopsis thaliana landsberg
  unsure (1)..(1934): unsure at all n locations
tctccaatgtaaacctctattttattttgtttttcttctaaaatagtgcatggttttgggtccaatgtatgagtatcactctaatcctaccatttcctctattttagaagtatgtatagagtggggttggagatgctcttaattgtgtcattaaactaatcaaccattgatagattaaaatcaatgatcaaacctattttgaaactacattgaactctatagctaccaattgaacacaaacatgatcgatgattaggttttttaaccttttgattggatgaaaaagtcgaaaacagtggcgacggtttcgttggctttggcttgagagtctcggccgccccaaccgttttcgacggcggctcgcatannnnnnnnnnnnnnnnnnatcaagccgattccttcttttagtatatccctagcctccaccgtcaacgaccccggtacacgaatggcgttttgattcattcttcgttcttcttctcgctattgatcaatcaagatattacgaaattgaatgatttctccaaaatggatacaacaaagataattagaagattaaatcacaaattcagagcaatagattcaaatagagccagcactgattctgattcaattgaaaaccctaatttgatccatcgtgagatgtgaaacagggagagaagaaaaacctttgattgtcgaaactccggcgagacggtgagctaagtaaattggttccggcgactttgcggcaagagaacgaagttttttttttttgtgaatgaaagaagaagtgagagagactgaaactttaaaaccctaattaaaagaccctaaccgattgattgagttagctaaaccggatagtatttaactggttcaattatcggtttgattgttctaaccaaagcgaaatcgattggatttcttcggttcagtgaaaaccgaaccgaatcattcatatgtttgattgttattggctaaattaagagggaaaatcagagaaagtcgaggagagccgttgttgttgtttatgtaagatagtcacagaattgaatggctaatgcaaaacttatataaattctgaacattacatttatagatattgcctagagaaaaaaaggaaaagagagaaagagttacccaaaaaaaatgagcgaagaacagctgcagaaacctatagattgtgctgatgtaaaaggagaggcagagaagatttcgacaacggagggaggcgttaaggcggccgaggacaaagagaaaggtgttgtagccgaggcctccggtgaacaggttgatttgtgactatataatctagtggtttgtgctagtgtcgtcgctgttgtgttaatatccaaattaaaatttgaataattagaatgttgcatttgtaggcggagggagaagttaaccagaaaaaggtggtagctaatcctctgaaatcggaaggaaccataacaattggagaggctctagaggcagcggttctcacggcagggaataagccggtggagtggagtgacgcagccgccattcaagcggccgaggttagagctacggggcggaccaatatcatgcccggcggtgttgcggcttcagctcaatcagccgccactcttaatgctcgtatcggctctgacgataccaagactacgctagccgacgttctcactgtaagtaatagcacataagacgtgatacataaaatgcttgaatccaatatctagttttatttctttcattttcgggttctaatgttttttttcgattttgggaaacaatgattatgaaagggagcgagtagcaaattaccatcggataaagcagcaacgagaaaggacgcagagggagtgactggcgccgagatgaggaacgatcctcatctcactacatacccaaccggtgtggctgcctctgtccgtgccgccgctcggatcaatcagtccaaatgatgc

SEQ ID NO: 168273 - DNA, 424 bp, Arabidopsis thaliana landsberg
tttcttgttcattcttaaaacttgcaacgatctatgatctttatggcttccgtgaatcatctctttttgtcaacttatgtatcaaactatttatgctttccttatccttttcaatgatcaatagggtgacacaaagggatcagcaaaaggtggggatccaaatgcaaagaaagatgtgcaatcaagccaaaatggccaggtatatgtctcaaatctcatgcctttgaccattttttcgtcttcgcattcatctgcacgtattctctcttccgctttagctaagttagtctgacattcatggggtttgtttaccatttggcagttctcgcagcttgctcaccaaggtccttatgggaactctcaagtaaactttcctctcttctcttcacactcaagcaatacgcatcattctcttctaatttgt

SEQ ID NO: 168274 - DNA, 514 bp, Arabidopsis thaliana landsberg
  unsure (1)..(514): unsure at all n locations
tcccctaccaggacctgaagcgcccgctgcagcgggtcggtgcgctgctcgaggcgcgcgccgtgcacccgggccgcagcgcccgcaaccacctgctgttcctcgcccagacgcagggcctgccggcccgtcgcgtcgatgaggtcctcgacctcgtcggcctgcgcgacgtggcgaaccggcgggcgggcggtttctccctcggcatggggcannnnnnnnnnnnnnnnnnnnnnnnnnnnnnnnnnnnnnnnnnnnnnnnnnnnnnnnnnnnnnnnnnnnnnnnnnnnnnnnngggcatccgctgggtccgcaccttcatgcgccagctggcctccgagggccgcaccgtcttcgtgtccagccacctgatgagcgagatggccgtcaccgccgaccacctcatcgtgatcggccgcggccagctcatcgccgccagctccaccggcgacttcgtcgcgcgaagctcaaagcggtcggtgctggtccgcacgccggaccgcggccaccggcg

SEQ ID NO: 168275 - DNA, 745 bp, Arabidopsis thaliana landsberg
  unsure (1)..(745): unsure at all n locations
taaaccaacggtatacccgattgggccgctggttaacacaagttcatctaatgttaacttggaagacaagttcggatgtttaagttggctagacaaccaaccattcggctcggttctatacatatcatttggaagcggcggaacacttacatgtgagcagtttaatgagcttgctattggtcttgcggagagcggaaaacggtttatttgggtcatacgaagtccaagcgagatagttagttcgtcgtatttcaatccacacagcgagacagaccccttttcgtttttaccaattgggttcttagaccgaaccaaagagaaaggtttggtggttccatcatgggctcnnnnnnnnnnnnnnnnnnnnnnnnnatccacatgcgggtttttaacacactgtggatggaattcgaccttagaaagcattgtaaacggtgtaccactcatagcgtggcctttattcgcggagcaaaagatgaatacattgctactcgtggaggatgttggagcggctctaagaatccatgcgggtgaagatgggattgtacggagggaagaagtggtgagagtggtgaaggcactgatggaaggtgaagagggaaaagccataggaaataaagtgaaggagttgaaagaaggagttgttagagtcttgggtgacgatggattgtccagcaagtcatttggtgaagttttgttaaagtggaaaacgcaccagcgagatatcaaccaagagacgtcccac

SEQ ID NO: 168276 - DNA, 807 bp, Arabidopsis thaliana landsberg
gctcattcgcctggttcacattatcagcagtagatagtgtgtattgaaagttccaaggaacttgttttgatttacgcaattaccatgcacaataattcagctaattgttgtgaacctgttataggatcttctgattgttatgagtgtatgcactaaagaagtacctcatatgaaatatgcatatggtagagttatgttaatgttacattcagttccctagtttgagtagacatgattctgtaaagtggattcaaatctgatagtgtaaaccatctcaaaatgaattggttctatagttctcttttttggtaacttttgttgttcttgtatcatatcatgttgaccaataaaaacatttgcagactttcaatgctgtgcaaaagctactcagcaaaaccaatgggaagcttgttggagatttaatgacaccagctccactagttgttgaggaaaaaaccaacctggaagatgctgctaagttactgtctttcctttttttcagtgccgtcatttcttttctcatctctatctaaattcttctctaacttaaagcttattattctattttccactagaatattgcttgagacaaaatatcgccggctccctgtggtagattctgatggcaaattggtaagagaagagagattttacatttacacatctcgcattgaacttttaaatacaccatgtttcgcatcgcttatctatttttatatttccttttgaaaaaaggttggtatcatcacaagaggaaacgtggttagagccgcgcttcaaataaagcgctctggtgataggaatgct

SEQ ID NO: 168277 - DNA, 597 bp, Arabidopsis thaliana landsberg
  unsure (1)..(597): unsure at all n locations
agatccagccctttttatccctcatgaggcttatgtgatggtgaaagctaccaatagacttagtatgatagctagacctctgaacccaagggtccagaannnnnnnnnnnnnnnnnnnnnnnnnnnaagaacatggggtttaacaaatcaagttcatggcagaatacttgatgctacttatgttcagtttctttttcaaaatgaaattgatctaatgatggttcaacgcaaggagccttggctttttaacaattggtttgttgcagctactcgatgggaggtggcaccggctcataacttcgttactacaattgatctgtgggtgcagattcgtggaatccctctgccatatgtttctgaggagacggttatggagattgctcaagatctgggggaagttcttatgctagactaccatgatacaacatctattcagattgcttacatacgggtgagagtgcgctttggtattacggacaggctaaggttctttcagcgaattgtctttgactccggggaaactgcaacaataagatttcagtatgaacgtctccggagaatctgcnnnnnnnnnnnnnnnnnnnnnnnnatcacagc

SEQ ID NO: 168278 - DNA, 693 bp, Arabidopsis thaliana landsberg
tcttctctaccatggaaaaaaccaaaatcgagtcgaatcttaagattcatttctgagtttcaacaatcaccgttcgttgaaactggctttccaacttctctgatcgatctcttcttcaagaatcgcgatcgtctaaaaaaatctccatctaaacgcttccaacgaatcgaacgccagattcgaaccgctccaaacgcttcttcgttgagtaatcaagatacgatttttgaaaagccctcgaggattaaaaccgttcgaagtaaggtcgagaaagttaattgcgttaaaggtaaatcagcggcgttgaataagaacgcgattaaaaatagcgttttcggcggtagcggtcaggtcgttttgatggcgtttaaggttttgatagtagcgttgctcgccttgagcacgaagaagaagctcactttaggaatcactctctctgcattcgctcttctcttaacagagctcgtggcggcgcgtgttttcacgcgctctaataacaccgacaaagacaaaaacgcgattgcccgcgagaaaatcgaaacttttgatgaaactcgagttcccaaagcgattccatgtcctgaggaaaaagagcatgtagtatctgaaacagaggcttcgaagttgaaaggtttatcgataggtgatatgaatcaaaggaaaagaaatcaacaagtaaaagttggagactaa

SEQ ID NO: 168279 - DNA, 2247 bp, Arabidopsis thaliana landsberg; identical to SEQ ID NO: 32461

SEQ ID NO: 168280 - DNA, 873 bp, Arabidopsis thaliana landsberg
gtcccaatcatttctgctaggctcgagccgcgagcaatggatatcgagcacctacgtcactgcgaattcctggagtttgcaatggttgacgatttccacaggttcaggtttgagcactctacagataggagagctaacatccttctccctagccctgaggttacacggataatagagggagataacattgattttaggcctgaggttggacgcctctactatgagaacgctccgccattggatgagaatgatcttcttgaagaagctgcttcggatgggatggatgaagatagggcagtggagttcgacactagcatgtatcactttggtgaacatgtacctccagcgaggcagagcaagagcttgactgaagctcataagaataacagtaaattgcagaaatggtgcaagaagcaggacaagctgatcgccaagtgtttcaagcttctaacagataagctgagttgctcttcctccaccactgctattccacaggtacagcctcctctggagatgccattgaggagatttaatgcacctgcgcacaggcctgagcttagcgagcagaaagtcccacatgtccaggctaggcattcgtcattcgaatcccgggaacacaagagaagaaggaaggctacactcactcgatctagcagcagatcacgcctcattcactcgaggagatcactcgaccgcggtgctggctgcagcagaaggagagaggtcgagtttcctcagagcggtgctggccgccacagagctgacgaggtcgagtacccacctgctggagctgatacagaacaaggcggttcgtctatggcctgggagcaatcgcaggcagccattgacgagcaactacgttcattcttcgac

SEQ ID NO: 168281 - DNA, 1458 bp, Arabidopsis thaliana landsberg
atgtcgggagatcacgccaagaaggagatggagaccggcgaaaagcccactacaagccacgggagcacttcatcggaagagtcccgcaccaagaggaaggagaagaaaaaggactcctccaaacggaaggagaaaaggtcttcctcttctcaccacaaagagaagaaggaaaaatcttcttcccacaagccgcatcggaaaggcgacaagcacaagaggatgaggaaggtggtctactacgagaccgacacttcatcaacatcgacctccgactccgatgcgccctccgtcacttctaagcgccaagagcgcaagaagtatagtaagatccccctacgctaccctcgcatttccaaacatacacctttactttccgtcccattaggcaaaccaccaacttttgatggtgaagattacgctaggtggagcgatttaatgcgatttcatctaacctcgctccacaaaagcatatgggatgttgttgagtttggtgcgcaggtaccatccgtaggggatgaggactatgatgaggatgaggtggcccaaatcgagcacttcaactctcaagcaacaacaatactcctagcatctttgagtagagaggagtataacaaagttcaagggttgaagaacgcaaaggagatttgggatttatcaagaccgcgcatgaaggtgatgagctcaccaagatcaccaagcgggaaacgattgagggggagctcggtcggttccggcttcgcaaaggggaggagcacaacacatgtacaatcagctcaagaccttggtgaaccaagtgcgcaacttcgggagcaagaaatgggatgaccacgaaatggttaaggttattctaagatcacttgttttccttaaccctactcaagttcaattaattcgtggcaatcctagatatacactaatgactcccgaggaagtaatcgggaattttgtgagctttgaattgatgatcaaaggctcaaagtagatcaacgagcttgatgccccgccacgtccgaagcacaaccggtcgcattcaaagcgacggaggagaaggaggaggagtctacatcaagtagacaaccaatcgacgcctcaaagctcgacaatgaggaaatggcgctcatcatcaagagcttccatcaaatcctcaagcaaaggaggggggaggattacaaaccccgctccaagaaagtgtgctacaaatgtggtaagcccggtcattttattgcaaaatgtcctatttctagtgacagtgacaggggcgacgacaagaaggggagaagaaaggagaagaagaagtactataagaagaagggcgcgatgcccatgtttgtctggagtgggactccgacgagagctccaccgactcctcctccgacgaggacgccacaaacattgccgtcaccaagggtcttctcttccccaacgtcgaccacaagtgtctcatggcaaaggacgaca

SEQ ID NO: 168282 - DNA, 835 bp, Arabidopsis thaliana landsberg
cgatttgacagattctagaaacctgaaggagcttcctaatctctcaatggctactagtcttaagaatttaaaccttgaaggatgttcaagtctggtggagcttccttcctctattggaaatgcaactagtgtccatgacttaagactttttaaatgttcaagtctggtggagctccctttttctattgggaatttaactaatctttggaaattagatcttcgtgaatgttcaagtcttgtatcactcccgcagcttccagattccataagggtcctaaatgcacgaaattgtgagtccctagagaaactagattgctcgtttcataatccagatattcttctcaacttcgttaactgtttcaaactgaatcaacaagcaagagatctcatcatccagacatcaactcgtgaagttgcggttttacccggtggagaagtgcctgcctactttagtgaccgagctactggaggtaccatgacggtgaagctgactgagagacctcttcataaatccttgagattatttaaggcttgcatcgtgctggttgataagattgacgatgaggctggggttattcacatgttgtatgtgtcatataggatcatggacaaacagaatggcctcattgtcccatgcataccgggacaccgcattataccgctcgctttaactggacatttgtacacctttggattagaagcagatgtgacttccaacgagatttgctttgagcttcaagtcggagattacaaatggggtataaaagaatgtggggtactccaactctcataagtctttttatgttgtaatgttttataagtatcattaagttat

SEQ ID NO: 168283 - DNA, 451 bp, Arabidopsis thaliana landsberg
  unsure (1)..(451): unsure at all n locations
atcccgagcattacccgtgcgacgcgatcgcgctgnaagacaccgtgttttgnnnnnnnnnnnnnnnnnnnnnnnnnnnnnnnnnnnnnngcgtgccgatggtgcagcagcacgtgttccggttgctcagcaaggagctgggtgccgccacgttgctggccgacgaccacagcgcggacgagcgcatggcggcgttcctgctggatctgggccagcgctacgcggcgcgcggcgcatcggcgaccgagttccatctgagcatgtcgcgcgcggacatcgccaactatttgcgcctggcggctgaaacggtcagccgcgtgctggggcgtttccgcgcgcagggtttggtgcgcatcgaagggcgcaaggtagagctgctggacgtgccgggcctggaagaactggcgcgctgcgtgttcaaccgctgaggcggcgcctgacttgcgtcagc

SEQ ID NO: 168284 - DNA, 428 bp, Arabidopsis thaliana landsberg
atgccaatgactccatcggaattcaaaaaccgattactcttcggctcattacctcggtcatcctccgatcccacagacctacaatctacggagcctaacgtaccaccgtctctgttttctttaccagaacacaacgacgacacagctactgatatggctcctgaccaggaaacagagcaatcagtttcgaaatccattgcaagacaagcacttgctttgcttgttgtgtatctctctttaggtgtgcttatctattggctgactctagatagcgacaatgcgtatcagactcatcctgttgctgttgctttgtacttttttctagtaacattttgtggctttttaattgtgcattttgttttgcgaatcggatggttggattcgttttgtttccttggttttgtatagattccacagtagggtttttg

SEQ ID NO: 168285 - DNA, 504 bp, Arabidopsis thaliana landsberg
ggtccactaattatatccagaacacatcgctccaccacaccactccctattcattaatccagagaattagggttcccatttcatcactatatcaaatccgtttcccttcagcctagttcgtcctctttaattatcggttagggacccccaagcgcccttgcccctgttaggggaaatcaatttgccgtgtagcctattcgtcaacctttggttcattttaacctacaggtaatgtttactcaaaaacaatttcaatcgaattgaggcactcattttatatagacttaaattgatccaaaaattgcaaaatttagttttgaattggtatatagcctcacaaatttggtgttaacgttggtacgcattttctttcagcctcctccgttccctgatttcaacatgcctgatcacgtagcagctaaaatagtcagcttagtttctgaggacggtgtagatatgttaaaggcttggattcaatcaggtccagatggactggattcgatc

SEQ ID NO: 168286 - DNA, 236 bp, Arabidopsis thaliana landsberg
tttgctctgatgattgcttcaaatcctgcaaaaagttggattctttcatggttaatttactggagcattctctataactatttcacgtatatgcacttggagggtttcttgtcctgaagtgggcctgggcaagatggaatgaaaggaactagagaagtgacaaaaaggaggcgacggatgatgatgatcaaaaagatgatgatgaggatgatcaatcatctgatgggcatgaagac

SEQ ID NO: 168287 - DNA, 607 bp, Arabidopsis thaliana landsberg
tgtggtgtgcctcatcagtcgtttcatggccaatccgacacaattacacttcgctgctgtgaaaaggatcatgcgatacttgaaaggtactatggagtatgggatttggtataggaaagagggaagaacagggctcatcggttacacggatagtgattatgcgggcgacattgatgatagcaagagcacttcagggtatgtgttcttgttgggtggaggagccgttgcatggtcgtcacgaaagcaacccattgtgacgttgtcgaccactgaggcagagtacgttgcagcagcaacttgcgcttgtcaagctgtttggatgggaagagttctaaaagaaattggatacgatcaaggaggagaaatggtgttgttatgtgacaatacttctaccatcaagctgtccaagaatgctgttttacatgggagatccaaacacatcaaggttcgttatcattttctaagagacttggttaaagaaggagtcattaagctcgtttactgtaacacggaggagcagctcgcggatatcatgacgaagccgttgaagatggtaacgtttcagagaatccgtgaagcttttggaatgagaattttgaactgagtt

SEQ ID NO: 168288 - DNA, 922 bp, Arabidopsis thaliana landsberg
gatggaagaaaaaggtgtgtttcctgatatctttacctataacacgttgatctctgtgtactgcaaaaagagtatgcatttcgaggctttatctgtgcaagataggatggagagaagtggtgttgctcctaatattgtcacttataattcactcatacatgggtttagtagagaaggtagaatgagagaggccacaagactgtttcgggagattaaagacgatgttacagcgaatcatgttacttatactactttgattgatggatattgtagaatgaatgatattgatgaagctttgaggttacgtgaggtaatggagtcaagagggttttctcctggagttgtgacatataattcgattttgcgtaagttatgtgaagatggaagaataagagaagctaaccggcttttgactgagatgagtggaaaaaagattgaacctgataatatcacctgcaatactttgatcaacgcatattgcaaaatcgaagacatggtatctgcagtgaaggtcaagaagaagatgattgaatcagggctaaaactggatatgtattcatacaaagcattgattcatgggttttgtaaagtgttggaactggaaaatgcaaaggaggaactgttctctatgatagagaaaggcttctctcctggatatgcgacctattcttggctcgaggatggattctataaccagaacaagcaagacgaaatcacaaaactcctagaggagtttgaaaaaagaggtctttgtgctgatgttgctctatacagaggattaataagaaggatttgtaagttagaacaggtggattacgccaaagtgttatttgaatcaatggaaaagaagggtttagtgggagatagtgttatattcacgaccatggcgtatgcatattggcgaacagggaaggtcactgaa

SEQ ID NO: 168289 - DNA, 209 bp, Arabidopsis thaliana landsberg
gtcacaagtctgataatgaccacatcattcccaggttctgtcactacatgtaagaaaacaaataaccagtctgttcagagagcctttagggtgacttgtatgaggagctatacaatgttaaagtggaaaggaaagttttagaaaaacggttggaagcggatctttttttaacgctccttatattgtttcaagcctattgtgatgattga

SEQ ID NO: 168290 - DNA, 568 bp, Arabidopsis thaliana landsberg
  unsure (1)..(568): unsure at all n locations
ctccgaaatagccaggggttcggaggaggcttcatcctagacatgtcagatcgattcattccacctagaatgatgacagggaggccagcagcagaggccgcaatattcctcccaggcttcccaggcttcggggcagcagcagagttatcctcggcctccagctccaaggggcagaggtgccaggggcttcggaggaagatttgggatcaaccaaggaaaatttattgcttattctatggtgaggacaagggccacaccaccaggatgtgccatgtcaccattcagaaacaaaaagaaatagcagaagctgcagcccaacagacccagccaaagcaagtcatgcatactgcttcgtaccactcgccttatatcccagagtatgtgggtaaccaccctgcagcttctgttgcttcggcaagtaaatctcaggcatcttggcaacagcttccacctccaccaccaatgcaacgannnnnnnnnnnnnnnnnnnnnnnncatactcaacaccaacgagacttcagagaagagtccgaagctcgcacagtcaatagtactgtgccagaatcga

SEQ ID NO: 168291 - DNA, 521 bp, Arabidopsis thaliana landsberg
attttcggttatatgatgttcctgattacttgtacatcaattcctctgtcaagcaactcgtccttgggacagaatcttctgaattgaatcccagatgctctgtttcttggagttccctcacgaagctttctttatttctctgatgagtccattgctaagattctttctggttgtccgattatcgaaagcttaacattgcatttttgtgatcaactgatggttcttgatctcaccaaatcaccgagtttgaaaatattggaaatccatggtagcatttggggttcggggccaaagcacattgtggcaccgcatatccattctctcacattgaaaacctctcagttctttatctacttttgttgatatctcgtctttaaccgaagctaaagtagacatttgcttttgctcacttaaagagataaagggtaatttccttctcgacacggtgctcaagtgtctttacaagttacagaatgtagtcaagcttacctttggggcaagctttcttaaggtatgttttt

SEQ ID NO: 168292 - DNA, 805 bp, Arabidopsis thaliana landsberg
gcagaaaacccaataaaaaaagtaagagtagaaaagtacttcttggagtttctaaaggtagatgacacatctagattatgactcataaataaattactagatgctctaaagtctcttactcttgatgtcgataatgtaaggtgtgcattgataatgctttaaaacaattggaaggtgtgcttttgtttttttgagaagtacagacatgagggtttagttctagtttgagtatagctcaaattatgctcgtgatatagacattgatcctatttttccaaaagagcatcgtatatttaggaaaaaaacaatttggtgaagctgattttggtgaagaagtacaatcaagtgaggatgcatttagagttgactatattttttagttgtggtggagatagcaataacttcggttaagaattgatttgatcaaatgaaaaattttgaaagtgtatttggattcttgtttggttcgataaaattgaaggcattagatgaaagtgaactacaagaacattgcactcattttcacaaaacgttttctcatggtagttcttcggatgttgactgtaatgatctttattcagaattgactttacccgatttacctatgggacctagtaaagttttcgactttgttgaaaatgtgggtttttatccgaatgtttccattgcgtatcggattcttttgactacaccgatgactgtggcctcagccgaaagaagcttttcaaagttaaagttattgaaaaattacttaagatcttctatgtctcaagaaatgttgaatggtttagatatttttttgtat

SEQ ID NO: 168293 - DNA, 901 bp, Arabidopsis thaliana landsberg; identical to SEQ ID NO: 14377
  unsure (1)..(901): unsure at all n locations

SEQ ID NO: 168294 - DNA, 527 bp, Arabidopsis thaliana landsberg
aatcccatagccataatcacgaggagtgcaacctcaaccatttccatcattctgatcaccaacctggaaaaagggaaaagaaggagcatcgccacattgatcacaatatggaaggaatctttcttcatgttttagcagacacaatggggagtgttggagttgtgatatcgacactcttgattaaatacaagggctggttagttgcagatccagccagctcaatctttatctccatcctcatcatcgcttcagtcattccgttgctacgaaactctgcggagattctactgcaaagagtccctagggctcacaggcaagacctgaaagaagctatgaggaacatacttaagactaaaggtgtttgcagtatccaaaggctgcatgtatggagtttcaccaacttagacgtcttggctaatctccatctccttgtatcagctgattcagacaagacggatactaagttgcaagtttcttagatgcaagagttatataatttgactttgcagcttgtatcaacttatagc

SEQ ID NO: 168295 - DNA, 969 bp, Arabidopsis thaliana landsberg
ttttaaaaaaaaatgcatagtaaaaaaaagtagtgttccgaaaatatatatataggtaacatggagaaacccttaatgggcacgtaaagtagtgccatgaggatataaatttgaattgctaaaaatagtagtgatccagcgccagaaatagtaagagacaaaaaatgttgaaaccaaaagtgtgttaaatgagttgtaacaggacgaagatagcgatgagacagagagcttagagaaagtgagaggacaagaagaagaagataaagaagaggaagacaaggaacaatgtagccctgtctctgtacttgaccctcttgaggaagaggaggaggacgaggaccaccaccaacacgagcctgatcctcccaataacctctcttgcagctttgaaattgtacaacgtgagtatccaatcttccatcacatcaaataatgggccaaagtaattgaatacaaactggtcccggagatcgttttaagggttttaatgttgtatgtgttgactaaacaggggctaaaaggcggttactcaagaagcttcgtagattcgagaagttagcggggctggatcctgtggagctcgaagggaaaatgtcggaagaagaagatgaagaagagcaagagtatgaggagagcgaggaagatgataacataagtatttacgattcagatgaagaatatgaggacgtggatgaagcgatggcacgagagagcagatgcgcggaagatgagaagaggaagaagaatgatgagaggcaaaagaagtggaggatgatgaatgcatggagggtagggttgggagctgaggaagacgtggacgcggtggtgcggaaagatttgagagaggaggccggagaatggacaagacacggtggagaagtggaagaggctgtgtccgatctcgagcactctatcttcttcgtcttgattgatgaattttcccgcgaacttgtctcttcttttctatga

SEQ ID NO: 168296 - DNA, 543 bp, Arabidopsis thaliana landsberg
agcggcggcttggaaatgatgtcatcttcagcaatcgtagcgtttaatttgaaggagggtaagaattggtggtgggatgtgaatgaatctccggtgtggcaggatcgtatcttccatgttcttgctgttctatatggaatcgtttccgtcattgctgtggtaccgtttacttgtccttctggttttgaattgggattggaattacggaatgtgttgatttggaatcggaagattaggcatttaaggatctgaaattgaggaaatagttgttgtatggagtgttgattacagaaaaaaaccctaaattgattaaagttccatttgtttttctgtagattcaattggtaagaatacaattgagagttccacaatatggctggacgacccacaaggtctttcattttctcaatttcatggataacggaggtgggtaagtttgtctcttgaaagtttttgagtctgttttgtgtatcttttgacgattggctcgtctttttctttgtaaatccagcttctggttttctcttccggcgagaagcacat

SEQ ID NO: 168297 - DNA, 984 bp, Arabidopsis thaliana landsberg
tttcgtgtgtcgtatgaagaggccattaaatatggcggcaaggtgatacttggtgatcgccctgtacaggttataatgatatgtttgtccgtagcttcaaaacagtctttcaataatgttatgcatttcatgagcgtatattctttcaaaagcgttcctcaatcctcagtatactcattaattttgtatttctcgaagcagattacgttaaagagaacatgggccaagatgcctctatggcacaaggttaagtttttatactccatactgtttcaagctgtcttcttgccgggcgctgaggaactcgagaaaatggtaagtcttactgtattattttttttccttttccgcacatctaataattaagtgtgatttgtcctaacaaatatacattgattctaactatcgatcaatggtaaattggactggttcagctgaaagatatggacaatgtggatatggtgactttggtgattcaagaaatgagcaaggaatttccaactctcatggatacaattgtgcatgagcgagaccagttagtattctctattccctctatgtagtttatcagattcgtaaactaaaaatagaaatgctggtagtagcaaatatagagaagaattaacaaattatcatcgacttcacatcctgataaatgaaatgcgcaggtacatggcatcctctttgctgagagttgcaagtgaccatagttcggttgtagcagttatcggaaaaggacatattaatggaatcaagaagaattggaagcaacctattacggtttgttgtcgtttcaatatctgaatgaaggagcttatttttgtttcggattgtgatttatgttcgttttcacggaaattgcagatgaatgatctaatggagataccaagcgacaagtcagtgtttacgttaaagagaataatatcatcagtggcagttgcagttgcagggacagctatagtttcgggtatacttctttcaaaa

SEQ ID NO: 168298 - DNA, 1674 bp, Arabidopsis thaliana landsberg
caattccagcttaaattagacctttatggattggaggggatctgatcatagaccggtgattataaagctcattaaatctcaagacacttacaggggtcagttcaggtttgacaagaggttgctcaataagcctaatgttctagaagctatctccttggcttggtctaatggtccagtgacgagggtttcaagtgtttctgacagtttgagggcttgtaggaaatctcttagtcaatggaaaaaggttaacaacctcaattccaaagacaagatttcccagattgaacatgcgttagaagtggaacagtcttcttcctttccccgtcttcaggtggtttgggaaatcaaacaagatttggtttcagcttacaaagaagaagagatgtattggcatcagaaaagcagaacagaaacatgaagttctttcatgcctcagtcaaagacaacaggtcaaaaaagagaatagagatgttgttggatatcaatgggaatgagcaaaaatctgaggcagcaaaaggggaagttgccacttcttactttcagaaactcttcaaatcatcaaatcctccaagtttcactgattggttttctgaaatgttgccaaaagtctctggggaaatgaatgagagtttaataagtcctgtctctgaccaagagatcaaagatgcggtgttctctatcagaccttcaagtgcgcctggtcctgatggcatgtcgggtcttttctttcagcattattgggatactatcggtcctaaggtgattactgaagtgaaagaattcttcgtctccggctcctttccaaaagaatggaattacacacatctttgtctgctgcccaaaattcatcatccatctctcatgacagatttgagaccaataagcttatgttctgtaatctacaaggtgatatccaaaattttggtgaggcgcttacaacctcttctgcctctaatcatctctgatcagcaatcagcttttgtttctgaaaggctgataactgacaacatcatggtggcgcacgaaatggttcactctctcaacaccaatgcctccttctcctctgattacatggctgttaaatcagatatgtctaaggcatttgacagagttgagtggagctacttaagagcattactgattgcgctagggttcaatttgaagtgggttgactggatcatggtttgcgtctcttccgtaacctattcggtcctcattaatgatcaagcttttggtatgattgtccctgaaaaaggtctgagacagggagatcctctctctccctttcttttcgtgatgtgtactgaaggtctgactcatttgctaaatcaagcgcaacatcttggaagattgacaggtattcagtttcacaatgaagggccgatgatccatcccctcttatttgctgacgacagtctattcatatgcaaagcaaatgcagaggaatctcaggtcctgttagagactttagctgcttatggtgcaactactggtcaggttgttaacccatccaaatcgtctatctcctttggtgtgaaagtggatgaggttacaaagaagttgattcaggataagttggggatttttaaagaaggcggggctggtactaacttgggacttccagaatgtttctctggctcaaagattgaccttttaaactacttaaaagatagg

SEQ ID NO: 168299 - DNA, 467 bp, Arabidopsis thaliana landsberg; identical to SEQ ID NO: 20260

SEQ ID NO: 168300 - DNA, 623 bp, Arabidopsis thaliana landsberg
gctccgcaacggcctcccggcgatgccccgcggcgtccccggcaaggtccgcgaggagctcggcatcgccgccgaccaaccggtgatggtgacggtcgggatcctgcggccggagaaggcccactcggtcctggtcgaagccgccgccgagatcgtcaagacggtcccgaacctgcgcgtcctcctcgtcggcgacggcggcgaacgagagaggctcgaagcgctgatcgcgcgcctcggcctcggcgacgtggtcacgctgctcggtctgcgccgcgacatcgccgacatcctcgagtccgccgacatcgcggtctgctgctcggacttcgagggcggcccgctctcggtgatggagtacatgtcggcggaactgccgatcatcgccaccgaggtcggcggcctgccggagctggtcggacccgagaacggcgtcctcgtcccgaagcgcgaccccgccgcgcttgccgacgcggctctcggcctgatcgccgaccccgatcgccgccgtcgcctcggccgcgccggccacgagctgcgggaggccgagtacagctccggcgtctacatcggccggctcgaagcgctctacgagaagctgctcaaagccgcgggagaacgcg

SEQ ID NO: 168301 - DNA, 515 bp, Arabidopsis thaliana landsberg
  unsure (1)..(515): unsure at all n locations
tatattatcttgatcaatggttggtatttcaattagctagtttttggggagaataaagtatggaagaatagggtgcggttcattagagagttagctaaggaggtattgtaggcaaaagctagtacgagaaaggcaacacaaagggctggtcgggttgagaagctgataaattggcttatctcgtctatgggctggtttaatataaatactgatggggtattttatggcaattcgagactcgcggctggtggtggtctgatacgtattgagaagggtgtatggtgtggaggctatgcgctaaacataaggatgcttatttnnnnnnnnnnnnnnnnnnnnnnnnnnnnnnnnnnnnnnnnnnnnnnnnnnnnnnnnnnnnnnnnnnnnnnnnnnnnnnnnnnnnnnnaatggtggttgagattttgaagaccaagttatgggactctcttctgaaatcgataaatagaaggtattgcgctatagttttttatagattaacgaatttggccgtgttt

SEQ ID NO: 168302 - DNA, 950 bp, Arabidopsis thaliana landsberg; identical to SEQ ID NO: 54037

SEQ ID NO: 168303 - DNA, 585 bp, Arabidopsis thaliana landsberg
  unsure (1)..(585): unsure at all n locations
atgggtcaaacaggtggatcccaacatatagatcttgacaatacacgctacaactatgatcatgatctctctctagggttggaacttggaaatgctagtcacagcagcgtgtctttataacacgaactgaatccttgctctattttgatttttcaactgagaaatcccacctttatttgcctcttccctatcaatgtgataattatgatgccaaggttctctccgttgttggagaagagaagctttctgtgttataaaagcggtgtagaaagggttccaagactgagatttgggtgtcaaataagtttcatgacaccaccaaagctgtttcttggaccaatgtcttagcattgaaattggacaaagagcttaagtttcttgctcgacgaggagaagaaagtcgtccaaatttnnnnnnnnnnnnnnnnnnnnnnnnnnttcaataatactgacatgttatatgttgttgggaagagtaaacaagacttgataatcgtacctgtgatagcggttggtattggccagctattctgaattatgttccaagtaatcaaactagctggaggcaaaaggaaaagatgtcac

SEQ ID NO: 168304 - DNA, 961 bp, Arabidopsis thaliana landsberg
cttagtcattaagaaatcgacgtcatcatctgacgtatcaatcctcctgttagcttctcgcagggtgcattgaaacaagacaaagacgaagagcaagcgcttgtactttaaatctaataagagtgctcacagtatcgttagttgttcctgtactggtagtgacctggataagacgagtggcacctgtgaacataagaagaattacaagaatgcaatgggtgtggcacatattggaaaggagtgcgattcggattgctccacgtccgactccgacaacgaaggactcgccgccatcgccttcaacaagtcatccctctttcccaacgagcatcacacatgcctcatggcaaaggagaagaaggtatgtactcaaaacaatactacttatgcttcttcaagcgaggatgagtctagtgatgatgatgaaatagactattcatgcttattcaagggcttagatagatctaaaattgataagattaatgaattgattgatgctttgaatgataaaaatagattactagaaaaacaagaggaccttttatatgaagagcatgataaatttgtagaagcacaaaaatcccatgctttagaagctaagagaaatgaaatgctgtcttgtgaattatcttcttgccatgagacaatttctagcttaaagaacataaatgatgatttaaatgctaagctagaaaaatctagtaaattaacatcttgtgtagaacatgttgtgatttgcactaggtgtaaagactttaatgttgatgcttgtagtgaacacctagggtgcatttctaaattaaatgaggaagtagctagtcttaatgcccaacttaagactagcaagagtgattttgataaactaaaatttgcaagggatgcctacacaattggtagacacccctcaattaaggatgggcttggcttcaagagggaagtcaagaacttgacaagccataag

SEQ ID NO: 168305 - DNA, 518 bp, Arabidopsis thaliana landsberg
  unsure (1)..(518): unsure at all n locations
cgaaaannnnnnnnnnnnnnnnnnnnnnnnnccttcgaaggaccggaagtgcttaaaatgaaggaggtgcccgtcccccggcccgctgccggtaaggtgcttgtcaaagtnnnnnnnnnnnnnnnnnnnnnnnnnnnntggaaaatacgaaaaggtgcagctcaaggcaagttcccgatcgcgctgcccttcacacccggatgggatctgtccggcgttgtggaacaagtgggaagtaaggtgaagcatttcaaaataggcgatgaggtctacggacgcccggatccgaccaaaaatggcacctacgctgaatacatcgtggtcagggcggatgaagtgcattttaaaccccaaagcctggatcatgtacatgctgcagcggtccccctggcggggctcacggcgtggcagggattatttgaccacggccggttaagggaaggtcaaaaaatattaatccaggccgcatccggaggcgtgggtaccttcgccgtgcaattcgctcactggaagggtgc

SEQ ID NO: 168306 - DNA, 1093 bp, Arabidopsis thaliana landsberg
aaaacgagccctaacccgccccgcaaagcccagcggttagacaagccggcccgcaggcatatatgaataagggagtcatatatatgccaagagaattgtcaccttgacatctatcggaaagaaaattgtcaaaacatatagttagggccatcacatttctctgcgtttacatgtccagcttcatttgatccacgagcattttgatctatacttaaaaggcagcatgtgttaaaacagtgtacagaccacagtagttaactagatgtaaactccaagacacttaaggtttgtgttaatggcaaaaatataatgcctcgaatactgatgataaaaacagttcaacatcatcactaggttggtataaagccagccacataccaggttcatgtgacttctctgtgacttctgctatagcaccatccttttgtttcttagcctcgctgacaatagccattgctaaagctatatcagacttctttagcaagatggttacgatttgcctacgttttgggggtaactgttgatataggtcaaattgccttaagaccactctctcaaataagagatcgattgtagcacttaagggtcgaattctacaaagctctcggatcacacaatagaccaaggttttgaattaagctaagtaagatactaatgaaagtgatagcaaattgtgaagttgtaagacaagaaagtaaaaacgtcaggcttagggtatcctcaggaaactattggttagtagatctaataatagctaggttgttatcgaactattcttaaactcaaactctaattatggaataaccggtggtgttccgcgaaattccctatatctatagctaagattaaccggagaagccgagagatctttaacctaaacatgcattctaaacgagttcaattgttcatcttagtagataggccgattcttattacacacctataaactagggtcatcaaataatagatctaactacaaatacctatgaacccgcttggatcacatctagacaaatagaagcagggcgacgcgcaatgacaaaaaatgtacgacgtggtggaaaaatttgggtacgtatatttctagacaaac

SEQ ID NO: 168307 - DNA, 492 bp, Arabidopsis thaliana landsberg; identical to SEQ ID NO: 67797

SEQ ID NO: 168308 - DNA, 452 bp, Arabidopsis thaliana landsberg; identical to SEQ ID NO: 67596

SEQ ID NO: 168309 - DNA, 317 bp, Arabidopsis thaliana landsberg
gatacggccagtccatcggatggagaaaaagaaatgctcgagcctctagtccttagtgactcatcccctgcaaggccgagagacctaaccttattggatcaagaagaggctggattggtgtctacctttattaataggccttctattgacattttcaaaattttgccctctaaagatgatcctgactggccgtccttccaacagattctttccaaatttccagacacgtaagtttcacttccccctttcattttctttataaatatcttaatagtaggatctaaatcctttatatagggagcatctttgtcctgatg

SEQ ID NO: 168310 - DNA, 810 bp, Arabidopsis thaliana landsberg
cttctcatagaatctcttagttcattcatatttatgcttctctctgacctgtgtcttgtacaggttgatggcaagatggagccacagcagtctgtgtctggatacttgatcaaaaggtatgactgtgatggggtctctggaattcaatatttttactctctagataaatttcataaaataactcgaccttttctccagtattcacacccataaactctcatgctttataggtttttgttgccaatatcggtgatgctaaggctgttttggcacgatcctctactaccaacgaattggggaatcatacagaagcaggtaatccactcaaagcaattgttttgacgagagagcacaaagcaatttatccacaggagcgctctcgcattcaaaaggttagtttttgatgagccagacagagacttccaagtaaatgtgagcacaccatgctctgttgataacttgctatgagtttcacagtcaggtggtgttataagctcaaatggacggttacaagggcgtcttgaggtttctagggcttttggtgatcgtcattttaagaaggtaatgatccggtggcttcccactttatattgagcccattatctgtgacattttagctctcgcgtgcaatattctatcgacatgttcttgaaccttgctccatatcattttgcaacttcgaatgcctagaatctgtaacttatcctaaaatcttatggtttattcgcatctaacgcaagttattgaatctagtttggtgtcagtgcaactccagacattcatgcttttgaattaactgagagagaaaac

SEQ ID NO: 168311 - DNA, 3748 bp, Arabidopsis thaliana landsberg
aaacacgctcagcgccaaccggtgaatgaggggcaatacttgttaaagcatcaaccgaaccaagaagaagatcacacggaagaggctaggattccggagaacaaactccccgcccccccaaaaagatggaggggacagcaaccccaacgagctccaaaccatcctcgtggaagaatttccatgattatggccagattgttcgacgacgaagattcggtctaagccttgaagaaaagagcttggcaagtatgtagcgttagaaccgcccctgaagccgaaccattaagtcaggaacccatcatttttacttcgaaagatgcgaatggtattcagcatcctcacaataatgcactagtcgtcgaactggtaatggaggacttcgacgtagaatgggttttgatcgacaccggtagttcggtcaacttaatgttcctgaagactctcttgaagatggggatctccgaaaggaagataactcccaaggttcgccctctgacaggatatgatggagaggcgaagatgtcgataggagagatcaagctccagttccaagtgggcagtatcacacaaaagactaagttcgtcgtcattgactccgaaccaatctataatgctatctttgggagcccctgggtctattcgatgaaggcgattccctcgacataccacctttgtctgaagttcccgataacgacggggatcttcactctgtacggcaaccaaaaggtctcccggacatgctacatcatcgaaaagaagcagcgaaggagggagatcttatcgcaattacaggacaaagagcgagctacgccttatgaatgactggctcgcaaatcaataaaggcaccgcgctgcaagatcatccaagagaatatcgatgaaagacagttatcctctgccacacatagatcgcctagtcgaggcgacagcaggaaatcagcttttgtccttcatggacgccttctcgggattcaatcagatcctgatgcataaagacgactgtgaaaagacggccttcatcacggatcgcggaatatattgctacatagtcatgccctttggtgaaagaacgttggggcgacttaccaacgactagtcaacgagatgttcgccaaactgcttggggtcacgatggaagtctacatcgacgatatgctggtgaaatctttacgagccgaagatcatatcaagcacctcaccgcgtgcttcgatatcctcaacaagtaccggatgaagctaaatcctactaagtgcacgttcggagtgacatcaggcgaattcttaggatacatagtcaccgaacgaggaatcgaagctaacccaaagcagatcgatgcaataatcggattgccatcccctcagaacaagagggaggtacagaggttgacaggtcgtatcgcagccttaaatcgcttcatcgcccgctcgatggatatatgtcttcccttctacaaacttctacgtggcaacaaggattttcatttggacgataagtgtgaatccgctttccaagagctcaaatcctacctcatgagtggggcgatcttagccaaacccgaagtcggagaaaccctatatctctaagtctcgctgtcaagtttggcggtgagtggggtattggtgagatatgaccgtgggaatgagaaacctatcttttacaccagtaaggccctgaatgacgccgagactagatatccgaccttggaaaaagctaacattggtagtaataacggccgctcgaaagctttggccttacttccagtcgcattccatagtggttttcaccgatcaaccacttcgaacagtacttcacagtccgaatcaatccaggcgaatcacgatatgggccatcgagctaagcgagtacgccgtggagtaccgatatcgctctagcctcaagtcgcaggtcctagaagatattatgaccgagctatatccggatgtgatcgacgaggtcctagacgagaattggatactttacgcagatggctaatcatcattacaaggtttcgatctcggaattttactccaatcaccaaccggggagatcctagaacagtcacttcgagtccaattcaaagcatcgaacaacgaagtagagtacgaagcacttctggtaggactttgccttgcgaaacgtcttggagccaggcacatcaaagccttcagtgactctcagctcgtagttagccagttcagcggagagtttgaagccaaaaatgaaagaatgcgagctaatctttcattagtccacggtctgtctaaacaattcgaccagttcgcgctggtcaaaattccctgaaatgacaactctacagcagacgctttagccgccctagcctcgaacacgaatcctgacctgagacgaacaattcttgtcgaaagtatagcgaaaccaagtatcgagctgtcaagttcgacctgcgtgatcgtagatcccgtaacggccatggattcgaacattgacgcaaccgatgcaccaggaatagaagtcgacccagaaccttcatattggctagatcccataaaactctacatcgcctacggcgaagtcccggcagatcgatgggaggctcgccgtctaaagacaatggcggcaaattacatcatggtggatggcgggctgtataggcgaagtgcgacaagagttttcctcacttgcgtggatcaaaaggaagccaccacaatcatgaaggaaacacacgatgaggactgtggtaatcattccggcggacgagccttgcctctcaaaatcaagaaagatggtcactactggccaactatgttggctgactgtgaggcctacgcggcgaagtgcgaacagtgtcagcgacatggcctgatgaagaatgttcctcccgaaatattgcactcgatcacaacgccataccctttcatatggtgggctatggacatcgtgggactaatgcccccgtcagggtctaaaagatttctgttagtcctaaccgattatttcaccaaatgggtcgaggcacaggcgtactacgaggttaaatcaactgatgtcgtcgcattcatttggaaaaatattagctgtcgacacgatcttccctatgagatcgttacgaataatgggaagcagttcgtcttactcatcaccaggaacttccttgctaggtggaacattcgcatgagcaattcgactccacggtatcctcaaggaaacagacaagccgagaccacaaataaaacaatcatagccgagatcaagaaaagactcggtcccaagaaaagaaatttggcaaactagctggaaggcgtgttttggtcataccgaactacccctcgacgacctacgtcattgtctcttttttccttagcttatggcatcgaggcaacggctccgagcgaagctggaattccaacgttacgcagatgcatgatgtcggaggaccctggactaaacaatcgactgctatgagatcacaacaacttcgccgaagaacatcgcgatcaagctatcatccggatccaaaactaccagaatgcggcgacaaagtactataatcgaaacattcgagaacgtcgcttcaacgtgggtgatctcgtacttcgagaagtcttcagtaacaccaaagaaaagaacgccgaaaagctccgagctcaatggaggggaccttacttgatttcaaaggtactttgataatagatttttagtcaattatcctaaaacaccaatcatgttgttgtagtattttaggttgtcaatccaaatgggtgtgatgcg

SEQ ID NO: 168312 - DNA, 820 bp, Arabidopsis thaliana landsberg
tctgactctagactcagtaaggatgtcttgatgcagttgatttatgctcggagaaagatcgttgaagagaggaagaagagatcatcagaggaagaagaagagaacaaagagtatgtgcaatcatatgttgatactctgctcgatgtggagcttccagatgagaagaggaagctgaacgaagatgagattgtgagtttgtgctctgagtttctaattgctgggagtgatacaacggccactgtgctgcaatggatcatggcgaacctcgtgaagaatcaagaaatccaggagagattatacgaggagatcacaaacgtagtaggggaagaagcaaaggtagtggaggaaaaagacacgcagaagatgccatatctaaaggcagtagtgatggaggctctccgacgacaccctccgggtaaacactgtgctcccgcacagtgtcacggaggacactgtcttgggagggtacaaagtaccgaagaaggggtcgattaacttcttagtggcagagatagggagggatccaaaggtgtgggaggaaccaatggcgtttaagccagagaggtttatgggagaagaagaagcggtggacataaccggaagcagagggataaagatgatgccgttcggagcgggtagaaggatatgtcccgggattgggctagcgatgctgcacctcgagtattatgtggcgaatatggtgagggaattccaatggaaagaggtcgaaggtcatgaagttgacttgactgagaaggtcgagtttaccgtaatcatgaaacatccgcttaaggctattgctgttcctaggagaagtcac

SEQ ID NO: 168313 - DNA, 1075 bp, Arabidopsis thaliana landsberg
  unsure (1)..(1075): unsure at all n locations
aaaaccttttgtaagggcctaagaggtttacaagagtattaaaatggttcaaaaattattaaaaggttaacaaagggttttaaaagatttttaaatagtttacatgttttaaaggatttacataaagtttttaaaagatctttaaatagttcacgagaattctgatcttctctccggccgaattttaagtgtcttaacaatgcgccttcttccttctgatcttctctgcggcggtttcaagatcgacggcgaaagatcgatgattttaacttaattaggaacaagagaaaaacagagattgtgtgttgagttggaggcttttaagagaagaggcgtaaacatgccacatgagattgtataagagattctggttaaggttccggttaaatcactggttagattcaaaggcgtgtcgaaagaatggatagaaaccatagaatgaaagatgttcgtagataagcacacgaaatctccaggagaaggacaagcgcgaatcgtcacggttgtatcattctttgacagagaaacaactctaggcaaacgtatcaatctattagaaaatctnnnnnnnnnnnnnnnnnnnnnnnnnnnnnnnnnnnnnnnnnncgactcattaggaatctttgctttcgtccttaacggttttaagatcttcgagccttgcgacggtttgttttgcatctacaccgcaggacatggtgaatttagtctggttaatcctgccaccactagccgtcgtatactccttgttcttgagccctcttataaggtcatcttcccatggactttggtagagatggtaacaagttttaaagcctcccggacgtggcgcaacgaccttcggacaggggtgggcacatgggtccgagtgatgacgtgagacccactggtaggggcggtcggggcgttacacctgatataaacagcaaggactttttcttcaacatcttgggtctagacataaacaagagctcatggggtacttatgtatttccaccatcctttcttgattgcacgttcggatacaggttaaagattaaaaaaccgctacattttcttttcaaattatgttcgt

SEQ ID NO: 168314 - DNA, 1095 bp, Arabidopsis thaliana landsberg; identical to SEQ ID NO: 52900

SEQ ID NO: 168315 - DNA, 839 bp, Arabidopsis thaliana landsberg
atccgactgctgctctgttaccagtatctccacctctacctgataattgtggagaatcatttctatggcgtgagctcgtaaacggaaccataaacttccgggacgaattttatctcggcaaaggcaacttcggcgaagtccatcgctgctatttctcaagacttaatgtggtatatagacccaaaggtcatgtcctttatgcttaataatcgaaacccagtttctaaagtctgaaacttttgatttcattaggatggagcggtaaaggttcaaaatccacagaatccaactggtcatgttgagttcttggcagaggttacaacgttacgtgcaactaatcatccaaatgtgattagacttcttggcaactgttacggccaaaggaaccgtgctataatttacgaattcatggccaacggagatcttgagcgtcacatctttggtaaagaaaactcaatcaaaccctaattgatgactctgttttagcttctaaacctaattgattctgttttttgtagcacacaaaacgatggtggagggtccgcgacctaagggtctaacactaccaattagggttttggattggtacacgaggatgaaaattgctgtgggtgtagccaagggcctggtttatctacacgaggagctgaaagtgattaacagagatgtcaaggccggaaacatattacttgatgcagattttgttccgaagctgacagattttggattggcgactaaaatcgttgtagatgaaaacggtgttgagcagcagcaacggatcattccgatgaaggcgactatgggatacattgcaccggaacgagagatttcatggttgg

SEQ ID NO: 168316 - DNA, 404 bp, Arabidopsis thaliana landsberg
ccaagcaaggatacacccagtttggtggtctccgcccgtttggagtttcctttctttttgcaggctgggacacgaaccacgggtttcagttgtatatgagtgacccaagtggaaactatggtggatggcaagctgcagctgttggagcaaataatcaagcggctcagtctattcttaagcaagactataaggatgatgcaacgagagaagaagtggttcagctcgctatcaaggttttgagcaagacgatggacagcacgagcttgacagctgaaaaactcgagcttgctgagttgtatctgactccttcaaaaagtgttaagtaccatgttcactcgcctgactcgctcactaagctcttggtgaagcatggtgtgactcaaccaaccgcagaaacttcctaa

SEQ ID NO: 168317 - DNA, 1715 bp, Arabidopsis thaliana landsberg
atgagagagaagtgggaaatgaaaagagatgaaatgggacatcgatgttgtggaaaacacacagtgaagagaggtctttggtctccagaggaagacgagaagcttcttcgttatatcaccactcatggtcatcctagttggagttccgttccaaagcttgccggttttgtatcttctatctctacttcccttttctttttactattttttgttcatgagtctaaacatacaacatgtgaaaaaataatagtctttcaattcaaaactaattagcaatgagtgaattagcctatgttttttatatactatatgctcgatgtggattaatcctaacagtatctatatgtgtgtatagggttgcagagatgtgggaagagttgcagattaaggtggataaactatctaaggcctgatctgaggagaggttcgtttaatgaggaagaagagcagattatcatcgacgtacatcgtattcttggtaacaaatgggctcagattgctaagcacttacctggacgcactgataatgaagtcaagaacttttggaactcatgcattaagaagaaacttctttctcaaggcttacatccttctacacataatcttatgccttcacacaaaagatcttcttcttcaaacaataataatatccccaagccaaacaaaacgacgtccatcatgaagaaccctactgatcttgatcaatcaaccactgctttttcaatcacaaacatcaatccacccacttccactaaaccaaacaaacttaaatctcctaaccagactacaatcccatctcaaaccgtgatccctatcaatgataacatgtcaagtactcaaaccatgatccctatcaatgatcccatgtcaagtcttttagatgatgagaatatgattcctcactggtcagatgttgatggaatggcgatccacgaagctccgatgttgcctagtgataaggcagtagtgggagtggatgatgatgatctcaacatggacattttgtttaacactccttcttcttctgcttttgatcctgattttgcttccattttctcctctgcaatgtctatcgatttcaatcccatggatgatcttggcagctggaccttttagcttttactctacaatattttcattttctcaagtgtatatatatgaataattgccactttctgcttttcactagttttgaaaagctgagatttttccaaatcagtgtctcatttttttctccatcaatcccagtaagactttgttatgtgcaacttgaaattttcaccatctaataaaggctttttggctaatctatacttgcaccgcccatattaacatgcgcctaaatgggctatgttaattgtaaatatgggtgtgagattcaaccaataaagaaagtagcccactagaggcccaatagattcaataagtgtcttgcgttcgcgcgctatgattgatgagagactacacggcggtattccattgaaataataatgctagtttttaatgaaacttcgtgggaagagcgaaggcaaagaggggacatgttacattgccacaccacattcttctaattaaattgcgggcgtacacttgtacatgaatatgcatacaggtgttgaaaaggtcaaattatagttatcagaagaaaagattcacaaaatgggaatccaaatattacgtcccgcgttaaattgaaatgaacaatacggatgaag

SEQ ID NO: 168318 - DNA, 434 bp, Arabidopsis thaliana landsberg
cgtcggcatcggtgagcagctggactgtacggggttcaacgccctctacggcaaccggatcgacggcggtgacgcggcagcccaggacgacctcgctgccgagaacatcgcgctggcagccaagggtctcgagcgcatcggtggcaccgtgctgatcgagccggtcagcggctcgcccgcctacccgctgctgacggcagccgacgcgctcgccgtgatcgaccaggtgcagcagggttctggcgcgagcaacatcggcttgctggcggacctctatcacctcgccgtcaacggtgaccacgtcgacaaggtgatcgccgatcacgtcgaccgcatcgcgcacgtgcagatcgccgacgcccccggccgcaacgagccgggcacgggctccctgccgatcgacgcgcagctgaccgccctggagcagggcgggt

SEQ ID NO: 168319 - DNA, 376 bp, Arabidopsis thaliana landsberg
gacgtgcaacgacgtggccacgttctgtactgccgccatcgtcgtctctggctttggtattccgctggtgttgctgcacgagggcacggtcagtcaaagcgtctctagaattcggatttgcagctgaccactcctttgagataagcctatcctgaaacgttcctgtcattagattgagaccggcgcgtgctggttgacgtttgcaggcaacggcgtcatatttctctgcattgctgcatgtcagttgtcgccatcacacctctacgtccttgacctgtacccagcctttcatttcttgttttctctcttcatttccaattttctctcttcatttccaatagatttccacctcttcaccgaagacaccggcctgtag

SEQ ID NO: 168320 - DNA, 507 bp, Arabidopsis thaliana landsberg
aacgagcccggacctgttggtgggcgaatcgtgggaggtctccgtggagcccgattttcccgcgcgactcgaggacgggacgcggctcgatgagttcatcgccaaagcgcccgaagcgctgctcggggacgagcggcggcgcggccgctccggcacggcgctgctcgtcaagctgattgacacggacgagcccctgagcctgcaaatccacccgagcgacgactacgcagggctggaacccggcgagtgcggcaagccggagagctggtacgtggtggaccgggaaccgaacgccggcctgtatctgggtttccgcgagggcacgcgcgcgcaggacgtgcgcgaggcgctggaaggccgtggctcgttgcgtgagctgctgcgcttcgtgccggtggagcccggagacttcttcgtcatcgaagcgggcaccccccaccccatcggccggggcctgacgctgaaagaaccacagcacgtgatgccggggttgcgcggcgtgacctc

SEQ ID NO: 168321 - DNA, 527 bp, Arabidopsis thaliana landsberg
caaagtactagtcagtagcatgatcgtgtacgctttcattttcaccagggagagacattggagtacctcggcatcccagggcttcatgtagctgaaagccaaggtgtcattgtaattgccatctgccaagtactcttgatggtaatatacctcgagacttgctttccttatctcatacatttctcttataccaaaaacgtttttttgctatacaggtaggaccggaatacgcaagatactgtggcattgaggccttagagccactgggaatatacttgccaggagacattaactatcctggagggacgctttttgatcccttgaatctttccaaggatcctgtagcttttgaagatcttaaggttaaagagattaaaaatggacgattggcgatggtcgcgtggcttggattttatgcacaggctgctttcactggaaaaggtcctgtacaaaatcttgttgaccatgtctcggatccattacataacaatctgattgccatgcttcagacatgacaatgtgtgaat

SEQ ID NO: 168322 - DNA, 781 bp, Arabidopsis thaliana landsberg
atcgctctgggcgccgcaatgggtcttgaatacttgcatgacaaggcaaatcctccagtgatctacagagatctcaaggcagctaatatccttctagacggtgaattcaatgccaagttatccgatttcggtctggcaaagctaggccctgtcggggacaaacaacatgtgtcttccagagttatgggaactcacggatattgtgctccagagtatcagagaaccggtcagttaactacaaaatccgatgtttatagcttcggagttgtgttgttgcagttgataactggacgaagagttattgatactaccagacccaaagatgaacagaatctagtaacttgggtgagtttctctttttcagctaacatgaaaaccttttggcttcaattgtttaaaagatctaaacttttgtactttggtttaggctcaaccggtgttcaaagaaccgagtagattcccagagttagcggatccgagtctggagggagtgttcccggagaaagctctgaatcaagcggtggcagtggcagcaatgtgtttacaagaagaggcaacggtacggccactcatgagtgacgttgtaaccgctctcggtttcttaggaaccgctcctgacggctcaatctctgttccacactacgatgatcctcctcagccgtcggatgaaacgtccgtggaggattcagtggcagcggaagaacgggaaagagccgtggctgaggcaatggagtggggagttgcttcaagagcacattcccggaacccaagtgcttcttga

SEQ ID NO: 168323 - DNA, 368 bp, Arabidopsis thaliana landsberg
ccgttgttggagaggagaagctttctgtgttattaaagcggtgtagaaagggttccaagactgagatttgggtgtcaaataagattgatgacaccaccgaaggagcagtttcttggaccaaggtcttagtattggatttgagcagggatcttcaagccttgtttacttcaaatttcttggtagacgaggagaagaaagtcttcatttgttgtgtgagttggaaggaagacgaagacgagaacaagtccaagaaagtatacattgttggggaagacaatagagtcaaagaaattgattctggagaagatgcaaccagtggatgtgagccaactattcttagtttgtatgttccaagtttggtctacatg

SEQ ID NO: 168324 - DNA, 2028 bp, Arabidopsis thaliana landsberg
aaaattaaagaaagtaagtaaataataataaaatatgatagttaaaaataaaaaaaaatataaataaaaaaaataaaaaaaaaaagagaatatatttattttaaaaagaaaaaagatggattattgtataaaaagaagggaagaaacttttataaaaataactcattgaatataaaataaaaataaattgtaatattaaaaaaagaaacttaaattgtataaattatctattagttgtgacaataataaaaataaaaggggttttgttattgtttatcatctaaattaggtagattcctttagttagtgtttgtttttatgtcttgttgagcgagtcatcaaggcttcgaacttgtattgtatcagagtcttatcattactctgtggtgcacctcacctcgtcatcctttcccctcatttgattccacaagaagtgaccgccatcgtgttagatttccaccttcgaccagatttccaacttaagtatggaacccttgtatccctccaaggccagttagaagaagctagaaagaaccacacaaattctagaaagcatgaacattctctagcccgagaataagtaaacagcttaacatagcggatatagtaagcaagtgacctatattccactgtccaatcttcagcaatcagagagagaaaagctagtcatgttggaacaaatactccacgagagaataattgctcaagacttggatgtagagtcagttgccgatgctatcccttgttcaaaggctggtatttcagtatcctaaccgccctatagctagttttatgttcatgggaccaacaagtgttggtaagaccgagcttgccaaggcactagctggataccttttcaacaatgaaaacacaatagtgaggatagatatgagttagtacatggaaaaaacgtcagtctcacagctcgttggtgcatcacctggctatgttagttacgaagacggtgggaaatcaactgaagttgttcgaaggagaccttattcagtggttcagtttgatgagatcgagaaaccgcaccttgatgtcttcagtatcttgctacaactactagacgatggaagaataactaattctcatggtaggacactaagtttcacaaactgttttgtaataattacgtctaatataggcagggccggcccatggctacagcccatgaagcaagggctttaggcatcaataagtataacactttttaaaaatgttgcagtggtctagtggttgttcaaacatttttaaagtaaaagtcacggttttgattcccgaggtttctaaaactttgtgtgtgtgtttttaacagttttcgttagtgggctaaatgtttttgctttaggcagtcaaatagtttgggtcggccctaaatataagatctctacatatacttattgagactattcgcaacaatgaagatatcaaagaagcagtttatgaaatgatgaagcaacaagttgtggagttagcaagaaaaacttttaggccaaagttcatgaatagaattgatgaatacatagtttcccagcctttaaattcaagcgaaatatccaaaatcttggagttacaggtatcttactcttgttttttcctatttagttttcacaatctttatttttcaatctatagattgttaagtttcatagacgtccaactcaaaagcaattggtaatgagtagattatcccatgtccatcatatactacttaagtctcttctcatatttcttcacatagattagtttgttcaagtatactccgtacccattgctattgacaatgagtggatattgtctcatgtccctttgtaattgtattgttaccttatagaggtggtgcagatgagacaaatgaagaagaggttggaacagcctaacaacaaactggagatcaccctcaacgttttgaaaggagattttgcagaggatggcactattcttatccatgctgaccagcctaacaacaaactggtcatcaagaagatggagaataatgctcatgacaaacaaaattagaag

SEQ ID NO: 168325 - DNA, 554 bp, Arabidopsis thaliana landsberg; identical to SEQ ID NO: 70765

SEQ ID NO: 168326 - DNA, 510 bp, Arabidopsis thaliana landsberg
gtgcggctggatcgactcaagtacgtgttgaaggaaggattattcgaggaggtcgataacgacatgactcaaggagagacaaacgatttcttgcgtgacatcactgagctcaagaagcgggagaggagtagtggtctcatgaatgataggaagaggaagacgagtaatgatgatgagctcattggtgctgagaaggaggatttgaagcttttggaagaagctaatttcgaggatttatgcgacgaggacaagatccttgtgttctgcaagaagctgttgcttgaatggaagcaggaacttgaggctatggaaaacactgagaggagaactgctatagggaaacagatgctagccacttttaaccagtgtgctaggtatctaactcctctcttccacttatgccggaacaaggtaaactaaataaatctttttttttcttttagttccgtgcaaagcaagcaatttttatcttttgtgtcttattagggttaatatatataagcaaaattt

SEQ ID NO: 168327 - DNA, 568 bp, Arabidopsis thaliana landsberg
caccctccgcctcgatgccgcgcagccactggtgctgcaaggagagcgcggctacagcaagaaatccgagcgcggtcaggcctcgtattatttcagccagccctatttcaaggccaccggctacatcgtgctcgacggcaagcaggtggatgtctcagggccggcgtggatggatcgcgagtggtcgagccagccgcttgcctcggaccagaccggatgggactggttctcgctgcatctcgcatccggcgagaaggtcatgctgttccggctgcgtcaaaagaacggcgagaattatttcgccggcaactggatcgggattgacggccgctcggcacagcttgcgtccggatccatcgtgatgacgccgacggcgaccaccgagatcgctgaccgcaagctgccgacacagtggcacatcgccatcgccgaccgcggcctcgctatcgactgtatgccgctgaatgcacaaagctggatgggcaccagctttccttattgggaaggcccgattgattttcacggcagccacgccggcgtcggctatctggagatgacaggatattga

SEQ ID NO: 168328 - DNA, 907 bp, Arabidopsis thaliana landsberg
attgatgtcggcaatgataaccacaacatcatgctcgtcggagatggcgagagaaaaacaatcatcacaagtggccgaagcgtccagcatggctacaccacctataactctgcaaccggcggttaaaactctatcttaaaatcttggctaaatccaactttaagacttctaatggtactaataagtcttttttcccaactcttttgaaggctttggaggccaaaggtttgtagcaaaagacatgacattcatcaacacggccgggccattacgtgggcaagctgttgcggttcgatcatcctctgacctctctgttttctaccgtgtcggtatccatggattccaagacaccctctacatccattcacaacgccagttctttagggaatgttatatctcaggcaccatcgacttcatcttcggaaatgcagctgttgtcttccagaactgcatgattctcgtccggcgccctcttcatggccaagccaacatcataacagctcaaggtcgtggtgacccttttcagaacacaggaataacaatccatagctcaaggataattgcagcttctgatttgaagcctgtgatccgagcttacaagacctatttaggccgaccgtggcaagcttattcacgcgtcacaatcatgaagacctatatagataactcgatcagccccttgggatggtctccttggttaagaggatccaattttgctcttaatacagttttctatggagagtataaaaattttggaccggggtcttccacaagatggcgggtccggtggaaaggattccacgccataacgagcaccgcggttgcttctcggtttacggttggaagccttatagccggcggttcatggttgccagccactggcgtgcctttcaagtcagggttgtga

SEQ ID NO: 168329 - DNA, 880 bp, Arabidopsis thaliana landsberg
aaagttcctatttttgtgatttcaatttatgtcggcttgtgtttgttttgagttagatcagttctatcttttctttgtctacagaaatggaaaaatggtttgatcaaaaactttttctctctgggtatcaaatgcttctccttaccaaacttattgccaagaaaggtggatttcttgtgaacaatgaagtcaagattgttgtggaggttgatgttcttcaagttattggcaacttagatgtctctgaggaatctctagaggtaaaccaacctatgaaaaggataaagctaaatgatgatggtgcttccgtaaaagaaagcattgatgtcaatgggtttctagttcttccttcacaggtaacaagttcataaagatttaaactttttagataggaactgattttataactatcggtttcaaacttatgagtcttaccatttccttctttgttgttgctgactttggattagaggtggtctctttttctgtttagaaattatcagtagaacactaagacaatgtagggaataaatggcatctttataatctaaccattcagtttgtggatatgtatacaactatacatgagtttatactttatccatctttttttttacaactgcaggcggaatctctgaaacatatattcgaaaaacacccagaaatggcactaaagttccgagcaaagaaccaacgtatgaggacatcatccataaatctcctccttaacataatcgagacgatgtgccagtcactgcaagacctttccattgatgacctgggccaagcagagcaagcactaacatacctcgaaaattctggctttaaggtggattggttggagcgtaaactggaggaagtaaaggaaaagaagaggtag

SEQ ID NO: 168330 - DNA, 483 bp, Arabidopsis thaliana landsberg
atggtggacgttccgtttttccggcgaaaagacaaggttgttttcgtcatgggagccaccggaaccggcaaatctcgtctagccattgacctagccactcgttttccggcggagattgtaaactccgacaagatccaggtctataaaggtctagacattgtgactaacaaagtcactcctgaggaaagccttggcgttcctcaccaccttctcggcaccgtccacgacacttgcgaagatttcacggcggaggattttcagcgtgaagcaatcagggccgtcgagtcaatcgtccagagagaccgtgtcccgatcatagccggtggttccaattcttacatcgaggctctggtcaacgattgcgttgacttccggttaaggtataattgttgcttcttgtgggtcgacgtctctagaccggttttacactcgtttgtctcggagcgagttgataagatggttgagatgggtctcgtcgacgag

SEQ ID NO: 168331 - DNA, 647 bp, Arabidopsis thaliana landsberg; identical to SEQ ID NO: 24203

SEQ ID NO: 168332 - DNA, 1475 bp, Arabidopsis thaliana landsberg
attactcctacccgaaattggctcatttttggaactcagtgccggaaacactttgatccctttcagggccgcttatatggcgggcttgaaaaacggacttggcttattcagtttcctccaagggaagaagtttctaatcactggctcgaccggtttcttagctaaaggtaaaaaaaaaaaactccatgtatatatattcattatattccacaattatccgtctctaaatcatttctttcgatatatctagtactgattgagaaagtcttgagaatggctcctgatgtcagcaagatatatctcttgattaaagccaaaagcaaagaagctgcgatcgagcggctaaagaacgaggtaagtccctttcatttggattctttgttagtcaagttctttacttgttatgtgcataactctggcctcctttacaggtgttagatgcagagctttttaatactctaaaagagactcatggagcatcttacatgtctttcatgttaactaaactcatccctgtgaccggaaacatttgcgattcaaacattgggttgcaagcagattcagctgaagagattgcgaaagaagttgatgttataatcaattctgctgctaatacaaccttcaatgaaaggttggcaactgtcagattatgtgttttgagttctcttgtttagttatctagatatttactaatcttgttatcattttggcggagattgaagatacgatgttgctctggacatcaacacaagagggcccggtaatctcatgggattcgccaagaagtgcaagaaactcaaactgttcttgcaagtatccacaggtacgtgaatgtgacaaaacataaacagagctaaacagtcttttctgaatgttccggtttcttgtgcagcttatgtgaatggacaaagacaaggaaggatcatggagaagccattttctatgggagattgtatagcaacagagaacttcctcgaaggaaacagaaaagcattagatgttgatagagagatgaagttagctcttgaagctgctagaaaagggactcaaaatcaagatgaggcacagaagatgaaggatctcggtctagagcggtactaatctctaaatattcagcttaactatcaaatatttgcaacaaccttaaatacacaaattattgaaacagggcaagatcatatggatggcaagacacttatgttttcaaaaaagcaatgggtgagatgatgatcaatagcactcgaggagacgtacctgttgttattataaggcctagcgtcatcgaaagcacttacaaagatcctttccctggatggatggaaggaaacaggcgaagctatattctaatgctgcttatatgtatataggcgggggagaatctgtacgtaacaaaactgactcttctacaattgtgctacacgatacctaaaaatcaggatgatggatcctacaggctcatgctaccgggaaggggc

SEQ ID NO: 168333 - DNA, 273 bp, Arabidopsis thaliana landsberg
agcatcctgttcatatacgggccgcgtgcatcgggattaatctagatatggtttatgctgaaatgaatatatggtgcgccatgcatgatttgcgcatatatcagtctgatgcagatatggaacatgctcagcctgccattgaaagtgatcgtgaggaagaaggtactagcggtataggttttgtcacagcagaaggagcgcctacggcatctgtctaaaacagcagatgatgacaatgacgtggcatggacaaagatgaatgcaccgatcgca

SEQ ID NO: 168334 - DNA, 1986 bp, Arabidopsis thaliana landsberg
cacaaagatcaaaaaacactttcttacgacaaatctaataaacccttttattcttcttcttcatctccatgttccttcacggccatcgtcgtcttcttgatcttcgtctcatatctcttatactcattcagtttcatttcttttctaaacccatattcaccttctaaatcccccaattctctcctcgtacccgttatccgtctcgggtcgggtcaaacacctgaggaacaaacggagctcaaacacatagtcttcggaatcgccgcgtcttcagatctatggaagcatcgtagagaatacgtgaaaacatggtgggaaacctaacggagtcatgaacggcgccgtttggctcgacaaacccatcaacgacaccgtttcttcttcatcagctttgcctcagatcagaatctcttccgacacgtcgagtttcaagtaccgttaccgtaacggtcacagatcagcgatcaggatcacgagaatcgtgtccgagacggtgaggatgttaaacggaacggaagcggagagaaacgtgaggtgggttgtgatgggtgacgacgataccgtgtttttcacggaaaatcttgttagggttttgagaaagtacgatcataaacagttttattacatcggagctccgtccgagagtcatttgcagaatcttcatcagttttcttatggaatggcgtacggtggaggagggtttgctataagttatccattagccaaggttttggagaagatgcaagatcggtgtatcgagagatactccgatttgtatggatccgatgatcggattcatgcttgtatggctgagcttggtgttcctctcactaaagagatcggttttcaccaggtaaagaacttgactcgtgttggtcaaatttttgttggacatttgttgattttgggcagaattggtagtaatttctggtgttgtaagaatggaattatagatttcttgaggtcttaattaagtgggaattgatgatgttgagtctagagaacttaagtttgttagctttgattgtttttttgtttagtgtaagtataagcaagtttgatggttggtggcaaaataggtgtttttaatgattttgtgacatgggtattgaaagtgttgatctttggaattggaatttactcaacaaagtttaagactttaagagttttgtttctagttttagaaggaatgactttgacttccaaacttttaaagtttgtagctttgtttgaagttacaacctttaatgtttttaatgatcttctgagaaagctttggtttaaaatctgaagctggtggtccgttcatgacttcaatttcgtctcttagctttgttctgttttttgtttggatgctattttgccaaaatttcctgtggtttggtaccgacaaatgggcgcgtgagtagctcaatgtcccttcatttacttgcgaatttgctaattgtaatgagtgggacccgcttttctgtttttaacaaattaaatgactcgttcctctcattgtttctacgcgccatgtgagcgactgatatacacgttccttctatcatcttgtgttctgtttctttgtttcagtacgacgtttacgggaacctctttggccttctcgctgcacacccagtaacaccgttcgtctcaatgcaccacctcgacgtggtggaaccgattttccctaacatgacacgtgtccgcgccctcaagaagattaccgaacctatgaagcttgactcagccgggcttctccagcagtcgatatgctacgacaagcacaagagctggaccatctcggtctcttggggctacgcggttcagatttttcgcggaatattctctccccgagaaatggaaatgccttctagaaccttcttgaattggtacaaacgggcggattacactgcttacgctttcaacactaggccggttagccggaacccgtgtcaaaaaccgtttgtgttttacatgtcgagcacgaaattcgatcac

SEQ ID NO: 168335 - DNA, 354 bp, Arabidopsis thaliana landsberg
gttcacacacacctatgtccgttcttcggacacccaaacccaccagcaccatgtgcctgtccactccgacaagcgtggggtagtctggacgcactcattggccgtcttagagctgcttttgaagagaacggtggttcaccagagacgaacccttttggtgcacgagccgttcgactctacctaagggaagtacgtgactcgcaggctaaagcacgtgggatcagctatgaaaaaaagaagcgcaagcgacctcctccgccactaccaccggctcagccggcgatttcaagtagccctaattaacattaagtcatgagtaagatgtttcaatgaactacgtttgtttacaaattt

SEQ ID NO: 168336 - DNA, 566 bp, Arabidopsis thaliana landsberg
ctgccaacgccggattgtcgaccttcctggccgccgccagcgccgccaagccgaagatcgccgactatccgttcaccaccctcacccccaaccttggcgtcgtggacctgtcgagcagcgagcgtttcgtgctggccgacatccccggcttgatcgagggcgcgtcggaaggggcgggcctgggcacccgcttcctgggccacgtcgagcggtcggcggtgctgatccacctgatcgacgccacccaggacgacatcgtcggggcctggacgacgatccggggcgagctggaggcctatggcgacgagctggccgacaagtcggaaatcctggccctgaacaagatcgacgccctcgacgaggagaccctcgccgaaaagatcgccgaactggaagcggtgtccggaaccaagccgcgcctggtctcgggcgtctcgggccagggcgtcaccgaacttttgcgcgccgcctatcgccaggtgcgcatccgtcgcggcgacctcgaggaagagatcgccgaggacgatgatcatgtcgagggagacccccggggctggacgccgtga

SEQ ID NO: 168337 - DNA, 1644 bp, Arabidopsis thaliana landsberg
atgatggatgatgatcataagtttccaatgacattagttacttcccgatcttatttcgattcttcctcgccttttactagtatcgaattcgattcatcgatttgtgatctcctaaacttggaaaccggtggagatacaccaaatcttatacctgaccataatccgttttttgattctttcgatggacttcaagaagaagaagaagattcacattttgttgttgaaccagagtctccaaaggtgtatattgcaccaagagtcatgataaaccatcaagactcgttttcgctagactctcgaaacgatgaatatatcgaagatgtaaagatattgcctggctcacctggaggaattcaagatcttggtctttcacgtcttaaagttcctggctcaccaagagcttttgtgcatccgagatcatctggatccccgcgtttcgtgtcaccgacaagtcctgtcttgatcgataccgctgcaccgtttgaatcggtcaaggaagtggtaactaagtttggtggaatcacagattggaaagcacataaaatccaaacaatagaggtacaaaaagtgttttttcctacattttcatttcttagtcaggccggtcttgttcttagtcttgtgttttataattgtctctagagacggaagacggtggatcaagagcttgagaagatacaagaagatatgcctgactacaagaaacaagcagttgtagcggaagaagcaaagcatcaggtggtgatggagcttgagaggacaaggaatgtcgtcgaagagctaaaactggagctagaaaaggctgaaaaagaagagcaacaagcgaaacaagattctgatctcgcgaagctgcgtgtggaagaaatggagcaagggatagctggtgaggtaagtgttgcagcgaaatcgcagctcgaggtggctaaagcgaggcatttgtcagcggtgtctgagctaggaaccataagagaagagatagaaatggtgtccaatgagtatgaatctcttttgacggagaaagatttggctgctaaaaaagaagaggactctgttttgaaagctaaagatgtagagaaacgaatggagggtttgactatggaggtcattgcaaccaagcagttattggagtcagctcatgcgactcatcttgaagctcaagaaaagaaactcgatgcagccatggctcgagaccaggacgtttataaccaggagaaggaactcaaaatggtggaagatgagattaagaggtttagacaagatattgatgcggcagatgatgtcaaaacaaaactaaagactgcttctgcactacaacaagatttgagagccgagatagctgcttacaaagactcaaacatgggaaagagaaacaatagtgacatacaagcagcggttgactccgcgaggaaggagcttgaagaagttatatccaacatagagaaagcaaattccgaggtgaaaactttgaagataattgtcggatcattgcagtccgaactcgcgagagagaagcaagatttatcggaaaccaaacagagatacagagaagacacaagagaggagaaaggcacagagataaccaagaagttgcaagaagctaggagggaggcaaaggaggcaaagtcacttgccataactgctaaa

SEQ ID NO: 168338 - DNA, 936 bp, Arabidopsis thaliana landsberg
cattctctgcagtcatatgtcgtttgctgtgaggctggtcgcttttgcatgtgtcgaaggaatcttcttctcaggaaggtatgacgtctttgaaatcataggcattgagaacttatcctatataagctctggtgtataagaatttcatgtggtttggtcagcttctgtgccatcttctggctaaaaaagaggggtcttatgccgggtttgaccttctcaaacgagcttatatcgagagacgaggggctccactgtgactttgcgtgtctcttgtacaggtaagaataggtctgtatggtaacagcaagccatactgtgtttattgagccatctctattatccattcactccttatcatacattgtgcagtttgctgcagaagcagcttccattggagaaagtttatcaaattgttcacgaggcagtggaaattgagacagagtttgtctgcaaggctcttccatgtgatctgatcggaatgaactcaaacctcatgagtcaatacatacaatttgtcgctgaccgtcttctggtaaaattgttttccctctagtttctggcattttgaaacatgaattagctttttattcgaacctatggtttttgtcttggtttctgtaggttaccttgggatgtgaaaggacatacaaagcagaaaatccatttgactggatggagttcatatctctgcagtaagtagtcgatatatatcgctgagtttctctcatctctaggatcacaatgctaagataacatatcaagaacagtagtgtatcttcattgactaagttggttttggtacttttatgacaaatttgcagaggaaaggcaaacttctttgagaagagagtgggagagtatcagaaggcatcagttatgtcgaacctccaaaatggaaatcagaactacgaattcacgactgaagaggacttttga

SEQ ID NO: 168339 - DNA, 2289 bp, Arabidopsis thaliana landsberg
  unsure (1)..(2289): unsure at all n locations
aaatcttggcatatcaggttttgcattttaggtaattattttgtcaattttttggtttcaggattactttgtgaaatgcttaggccagaaagaaatggaagctctaaattaacttggaaggtaatttttatcttaaaatcttggttttactttgttgtttttgattctatgggtttgttcattgattcactgaacctatgaatgtattatttaggtacttgttatggacaagttcactgtgaagataatgtcatctgcttgcaaaatgtctgagatcacacaagaaggcatttcttgtaagaaagatcttgttcagaattagaaatgttcttttatcttctggcatttgatgttttgttatattnnnnnnnnnnnnnnnnnnnnnnnnnnnnnaggcaacctatgacagcaatggaagtcatatactttattcaaccgaccgaagagaagtaacaattcttccatctttgacatcaatttctcgccaatgaaatttttatgattttctcaagtttctgtttttgtttttgcagtgtcactgcgtttttatcagatatgactggaaagtcaccactttacaagaagtatgtgaacacttccttcctgtttcagaatttctttatatctatggactgtcttttctgatatgattaatccttttcattattgtggcttcagggcttttgttttctttagttctcctgtttcgagaagcttagtgaatctcattaagaaggacatgagagcgataaaacgaattgggggattgaaagaggttgcttctatatgccacttttatatattttctccctttcggtgtcggcctgccatctcccaagatagttaagataatgtaaattttctatattatgcagatgaacgtggagtacattagcatggacatccaggtatcttatacgtttaaaatccagatttagttgtgtctgttcctcaagattggcatagtttgatgattgtgatatctaagaatgagtttcatgcttgccctatcaagttattggtggtttcttttcttgaggccaaactcaattcagctttcacgtcacttataacaacttagaacatgcctaaaaattcagcagtttgtacgcgtatattaaaagcaatttgtctgtagcaatgcatgtgttttaactacgtttccagtttgttgtttctatttacttaattgctcctatgtattatgtctcggcaggggtttgttacaaataatgaaaatgctttagaagaacttttctgtgacgacgaaaaccatcaaagagcagatgcttgcttgaatgtggtagctaaacgaattgctactgttttggcctcgctaaaggtacgaggcacaaattgctacagcttgtttattgatttggcatttctatgacggttaatctttaaattcttctgatgtacaggaatatccctttgttcgctaccgcggagccaaagctcttgatgccacaacaatgnnnnnnnnnnnnnnnnnnnttcctacaaagcttgctgctagtgtatggaattgtcttgcaagatacaaacagacaatcgaagattttcctcagactgaaacatgcgaactacttatcttggaccgatccatagaccaggtaaggaatttcactgagacaattagttctgcttgatatgtcatagccacttaataacagaataaccttcttatgcttcttagatcgcacctctcattcatgagtggacatatgatgcgatgtgccacgatttgcttaatatggaaggaaataaatacacacacgaggtgacattttggtttagctttccaatcttgtaaaagttagttgtagcttatcactacagcatatggtaatttcccttttatttcttagtgtataggttccgagtaaaactggtgagacacctgagaagaaagaggttcttctagatgaggaagatgccatttgggtggagcttcgtgatgctcacattgcagatgtatgtcttgctatatcatcttgcctcctcttttcagcattttaagatttcaaatggtcatgtggatatgtttggtagtaatctgtttttctttttcaggcaagtgaaagattgcatgaaaagatgacaaacttcgtgtcgaagaacaaagctgcgcaattgaaacacagttcaaagtagttactatttttgtgttaatttcttgtttcaagtgatccaccaaaactttgctgattaatttagtgatttcctgtatgcagagactttggtgacctttcataaaaagacttgcagaagatggttcacgctttg

SEQ ID NO: 168340 - DNA, 738 bp, Arabidopsis thaliana landsberg
  unsure (1)..(738): unsure at all n locations
ctatgtcccgaatcaacgaatctcaatgcgtctttgtgaagactagtattgatactcgtatggggcttctccttgacagtgatgatagtgtatctgctttcaaaggtgactcttcataatctcctccttttttgtactttggtaactttttgtagtaactaaacgtaacagctaatgtttattgttgtttgtttattatacagacaaaatctgcaaagaacatgaacagtgtttcccaagtgttggcaacatcactatttctgccttgaaggtaacaacactttctctaacaaaacgtttttgttttggaaacaacaacttaaggaaggagtactggtttttggtttgtaggttaacttgggtggtaatgattatcacttgtcggattgtatgattttgaaaaccgctcttcaaggcctcagtaacaaggactggtttctatctgtccacctcgtacgtgtcgaggagaaggaaatgagaaaaagtaaatcagaaagtgacaacaaaagtagaaagaaaccctcctcatcaaaagcaaaaggtaacctctgttttttttctctgttattgaatagtatatagcagatctgccgatgttattgaagagtatcagttgatttaccgttgtgttgttatatctgtttatcttaaggccttgaaagtggtgagggaaatgtcactaggatggnnnnnnnnnnnnnnnnnnnnnnnnnnnnnnnnnnnnnnnnnnnnnatgga

SEQ ID NO: 168341 - DNA, 1020 bp, Arabidopsis thaliana landsberg; identical to SEQ ID NO: 12124

SEQ ID NO: 168342 - DNA, 2086 bp, Arabidopsis thaliana landsberg
atggggttaggtcgcgaatcaggagtcaaagcggttgacatcgaacaagcggcagttatacactacgatggggtcatgaagccgtggttggacattggaaaagagaattacaaacgttactggaacatacacgtcccttaccatcacacctacttgcaacagtgcaatcttcaagcttgatacgaaaaaaaaaaaaaaaaaatctggcaacttaggttcagtttcagattctttttgttaaacaagctactcaagcatgatatcaatgttatgattagcttcattctttatcccacatcagtgtatatcttggttcttcttgtttcacacttttcatcagagcttaatattacttagactatagtgacaggctgacagcaacagattgttgtcttaccttcgacttggcccaatttccttgtttggaaaaaaggtatgaataaaaagaagtccggttttcagttcggttcggtttataagcgtaacgatgacaaaccgatcggtttgttttaattcttgactttaataactaaaccctaaatcgttcttcttcttccgcatcttcctcactcgattagtaggttctctcttcttccaatctattcccaacttctcacttttccgtctaatcgttgtcttcatcaccatctctccgagttcccttcgagaccatcttatcttcaatggtttaggtattgcccgattttagatagttttgttctctcgtatagttatgacaatggcagatttttgtacgctctgcacatgcttaatcttgaggattgggctattattacgtactatgatttaatgaattttagatttgaattttggaacttttgatgatatgcatgttaatgaccaagaatgctccgaatttgtctgattcgttattcgaattctacttctttgattgtttgtttccaattttccatgcatctgacttgtgaattttgaacaaaattttcagaaatgttttatcttagcgagctagaacattcactaagagtgcctccgcatctacttaatctccctctcgaagatgccattaagtcagtgcttcaaaatgtgttcttggacaaggtttgctcattgccctttttctttcacttttatggtatccattgtttgcttatttatatacacacctggctaattttatcaaagtggatttttgctatgaaaggttttagctgatttggggctttgtgtatctatttacgacattaaatcagtagaaggagggtttgtgttacccggtgatggtgctgcgacctataaggtatatccaaattgctgatcttttctcatctctattcttttatcagttgaacatggttttttatatcaattttatggcctcccaatgtcactgttagtggcatcattgttgacctatcaccgtgtattgcagactttctgcactgtattgagttacatctttgtagactcatcattaccgtactagagtttcaaaccattctgagattttggttcttcggaatcgttatctgttagtctaactttcactgtacggttttggttaagaattttattttcaaaagttttatcttgccttgattcaatatctcatgtcgtgttgttaatactttgtttgtgtgattgtaggtaggtcttagaattgttgtgttccgtccatttgttggtgaggtcatagctgcaaagttcaaagaatctgacgccaatggcttgcgctgtgagtactttattatactgttccctgaagaattccaatgttgtgcactgtctgcatcctgctactctagtacattgttagcttattagctacttatgaattggattaatactttgaaatcatggatatggttaatcatttacatgcttacggtacctctatacttggcagtaacacttggattctttgacgatatttatgtgcctgctccacttatgccgaaacccaaccgctgtgagcctgacccttataataggtaagaatatgtgtcctgcagtttatgtagtactaccagctctccaactatgagtaggagattgcacccacatctttatatatcatttgatcaccaaagataatgttttttgg

SEQ ID NO: 168343 - DNA, 990 bp, Arabidopsis thaliana landsberg
atgccatcgtcggagaatacttatgcacgatataggtcacagcagcgagacccgttgcatgtcaattctcctgtcagtgctgagaatatttcaggggttcaaggttcacgccatccaccatcgcctctaacgccaaccactcagccttctgtcaatcattttgattctcaagctgagcgtctcaacaatctcacactggaggagcttcttgatagtcctggtcgtgctggcttgacaaggctagacccaaagcgtcctccgggaactctctggtaaggttaaattcattgtccatagaacagcttaggttgtggtgccttagaactttgtagtgccttagagcgtaatggaattaggttgtagtgccttagaagtttcaacaagtagaacaacttggttgtacttagcattgtagtgtcttagaagtttaaagacatagaaatccttatgtgtgggctggttgctcttcttgtaggtttgacgatgactctacagatgcagcaacagtccgcatcatctttgaaagagatatcaaagaacctcatgccaattggtcacagacatcaaaggctacaatcgatcaatgctatgaaacgtttgcggtaagttctgtgctcttttgatgtttatgcttgttttgtgtatggtttcatttctgatgttagcttctcttttgtagcaagtaaataactgggaccgttcaattaacaaaagagtaagggttgagtttgaagcaaagctaaagtctaggatgactgatcaagtgtcacagtggaagggaaattggaaggagaagggtgatgaagccaagccaaaatggattgatcctgatgtgtggaaaggtctagtactgttttggcaagatccaaagtcagaaaaaagagtaacaacaacagaaatgctaggtatcatgatccggatggcaaatgcatctataaacactgttcaggccagacctcatacaaagctcgtgtaagaaaacgggtaaga

SEQ ID NO: 168344 - DNA, 2289 bp, Arabidopsis thaliana landsberg
aacactggcggttctttgaggtagcagaaatggaggatcgtcatcgttatctttttttcatatttgccattatacattatgttcaggctcaacaaggtaaccacattttattgcattgttgcacacgtcttttgtctgtttactgattaacctaaagcaatatttcgtggatgaaagtcaatcattcataactatatttcctctcaccaggattcatcagtttggattgcgggttgccgagtaacgagcctccatatattgaaccggtaaccggattagtattctcatcggatgcggatcacatccatagtggaataagcggtagaatccagaagaatctggaagcagtacacataaagccgtatttgtttttgagatactatccagatgggctacgaaattgctatactgtagatgaccttcagaaccgaagattcatgatcaaagctgtgtttgtgcatggaaattacgatggatataatgattatccgagttttgatctgtatctaggtcctaataagtggatcagagttgacttggaaggaaaggtcaatggcagagttgaagagattatttacataccaagttcaaactctctgcagattagtcttgtcaagacaggtaattctttgccgttcatatgcgccctggaactgaggcttttgagaaacgatacttatgttgtccaagacgtttccttgaagcatttatttcggaggtactatagacagtcagatcggttaatccggtaagtgttgcactatatcataatctgtaatttgatgttgatatacaaaatttccctaaacttagcaatatatagatgcatgaagacaatacaagaaaccttcaaatgtctgaccaacatcaggaagtttcctattaatgctcttaccaatgaactttgacttatataatagacgtattgaaattgtttttaatgatcgtaatgtctttcatagaccagttgtttgtgaactggtgaattagtgatgcatggtttatcaatccatgtagatgtgttttctgatgtccgcaggtatcctgacgatgtctatgatcgtgtttggtccccattcttcttaccggaatggacgcagataactaccagtttagatgtgaataactctaacaactacgagccaccaaaagcagcattaacatcagctgccacacctggagacaatggaacgcgattgaccattatttggactttggataaccctgatgagcaaattcacctgtatgttcactttgccgagcttgaacctgttggggaaaacactgacgaggccttgagaactttatttacaaggaccttttactttgtggtgaatggaaagattagttatgatgagagtattactcctttagacttggctgtaagtactgtagagactgtggtgaacaaatgcgatggcggtaactgcagtttgcagctggtacgcagcgaagcgtctccgggagtacgtgtacctctggttaatgctatggaggcattcactgcaatcaagtttccacattctgaaacaaatcctgatgatggtacgtacgtatatatctcaactacttttactaaaattttgggatatatgcctcaaactattatatggaatgctattccattagctcgaccagttttctgtagtatcatattaattttctacagatggtaaagcaagttaatgtgaaccaaattattgcactttatctaacagtagtccacatacgagacatgagtgatgatgatgaggttatgtaaattagttcatgcgagaattaatcaagaggaatcatcatagtatcaaccacaagaaataatttgttttgaacatattacctaattcttgtttttaatatgttttaagtatggtatatctttaactctatgacagttatatctatcaaggttatccaagctacctatgaactgagcagagtcgactggcaaggagatccgtgtcttccccagcagtttttgtggactggcctaaactgcagctacatgaacatgtctacgtcaccaagaatcatttccttgtaagcacttaaaagtgtgatattgttgttataaattagttacgtttctagatttcttactgctaaaatgtgttatgtgaccagagacctgtcctcacataaattaactgggaaaatagtgccagatatacaaaatctgacccagctacagaaactgtaagtatggcctctaataactgcgctgtttgagcatcaataggtttttcaagtttagtatggtttttgtacttctattgactatatatacca

SEQ ID NO: 168345 - DNA, 1073 bp, Arabidopsis thaliana landsberg
aacaaagatctaggatctaatatatatttgataactcttatgtatgatttttttatgtgtgatttatcataaaacaatgataaatctaatcaggagattgatattttacccggctggaaaggtagaagatggtggaaaagaccatatttcgatttatgcgaggatcgaaaatgatggtgcttctgagatgcagattgatgtagaactcaagttcttcatctacaatcacaacgccaagaaatactctgttttccaaggtatgaacatatttataaacacacttttttttttaaagatatagcgatttattgtgatcaattttgctggttttagtcaagtctcttaaaccaaagaagatatcttacttgggacagaattatatatgtttatgatgtgtgtatatatgtatgtagatggaactgtgaaacattatagtaaggagaaaaaagagtgcggatttgcacaaatgcttcttcgttcgaagtttaacgacccaaaaaatgggtacaccgatggagatgcttgtatcgttggggtggagatattcgttataaagccgattgagaaggtggagagggttgtcttcacacaaaacccaccaacgaacaaattcacatggaaaatctctgatttctcaaaactaggagacaagaaatatcattactcggatgaatttgtggtcggagatagaaaatggtgagtattgattcattaatataatgcttaatcactagcttttgatactgattacttgaaaatgtttattctatgctattatgatattttcaaggagaataaaaattagtccaaagggagacaaaaaggtaagagcactttcagtctatgttcaagccatggaatatttgccaaatgcggtagcttctaccacttacgcaaagctcaaacttcagctaatgaatcagaaaaacactaaccacattgagaaacgtggtacatatcaaactagttttttttttttatttgggtagaaattaaatatcgatattaccattcgtaaagactgacttatatgtgatgtttttgtatagtttttcatttttactcgagagaga

SEQ ID NO: 168346 - DNA, 2570 bp, Arabidopsis thaliana landsberg
atgtcgaggatcttcgccattcttcctctcgctgctgtttttcttctcctccttgtttcaccgattgtagccatcgatgtccattactgtggtacgtgtttcaacctccgtttctcctcgtgatggctttgaattcaaattgagttctaaagttcgatgctttttgcttttggctcatattggtcggtgtaaaaattcgattttttttcagggaaattttgtttttgtctgactggcttttggattctgcttgatttgattgtagaagagaacgcagagtatgaagttaaagtgaaagaggttgatatatctcctaatcctatagcaccaggcgagccagctactttcaccatctctgccaacacaggttttgttcattactgtttccagtctttatcttaagattttgggcttatattgataccaatgatacaatgtggtttctgcttaggatgtttgtactcatgtgtcttgattcgtagtagagttgaacaatcactgtttatgattatgattcttttgtttcattgttttgggggaatttaaaggccgtgagatttcgtttgggaagctggtgattgaagtttcatactttggatggcatgttcactctgagactcatgacctctgcactgagactagttgtcctatacaaaccggagatttcttggttgcacactctcaagttcttcctggttatactcctcctgtaagttctcataattgctttgttttgtggaatgtgttgcattcataatggatggccaatatatatataaggattacctttgtatcgagagatataagatggcttaggttgaatgtcttaatgttgcatattactgtcgaaaatctggtacaaaaacaggaagataacagattctaatcttacctttcttgtgcagggttcatacttgctgaaaatgaagatgcttgatgcaaagaagaaggagttaacatgcatcaaattctcgttcgacattggactcagagcatctgtggctgacatttagagcagcttcacctgtattggtgattgtatagatagtttaggaaaattgttaattctttctatatcagttatgtcagaccctgaatgtgaaggtgatcttattttttggacaccaatgtgaatgtgctttcttcaccataagatgtatcaccaggtcttatggcaatcagtcaaatgcttggaacggtataactgacaaggtctcaaccatcatatgtaatgcgaaaaagtaatcagaataaagtatatgattaaatagaaaattttgactaattcgaatttgcaagctagctaaagctaagcttctttaccaatcttacatcattgcacgtttctggaattgtaaaagacaagacaggctaaatcaattgatgactcttaccagaaagatttatatttcttaaagctccattataacatcttccttttttgtttttagccttctggcaaaattgggttgattgggtaaaatcattactcatgtcatgagtgtcttttgtcttctgtaattgaggtgtgagttttatcatcacatcttacattattgtagcaatgacccatcaacacaaaaaaaaaacaaagactttttttctttcttttttcattctgatgaaaacccatcaagaaagacttttgaaagctaaaccagaaagtagcttttgaaactttattcatcaaaattgggtacccacacgttaaccaaagaagaaacctgaaaacgaagaacccattagccactaagttttgttttgtttttgttctcgtacccgatcttatcttgatcagaattcttctctaaatcctcttttcagatttttgaaagatccaagttttgttagcaatgaagggaatgaaggaaagattggtgaagaaaatcaaactcatcaccactgtcaagacgttgaagcaaagcttaactcttcataagagtaccattgatcgcacaatccatcatctaagagacgaaatagtcgctgaatctggtcaaagcaaaggttgtgttacaccaacactactagagcttgaggatgcagaggaacataatcttgaagaagaaagagggattcttctggagtttaaagagaattgcccacccggaggagaagattcggttgtattctacacgacgggcctgcgaagtgtgaggaaaacatttgaagcttgcagaagagtgagattcttgttggagaatcaccaggtgatgtatagagagagagacgtttccatggattcagagtttagagaagagatgtggaggttgcttggtgggaaagttacctctccgaggctgttcattagaggtaggtacattggtggagcagaagaagttgtggcattgaacgagaacgggaagctgaagaagctactacaaggaatctcacaggttgattcaccttgcgagtcttgcgagaacgaaaggtttttgatatgttctagctgcaatggaagcacaagattgcttgcagagcatcacgatgaagagagtagtaatgataatatgtggacaagatgcagagaatgtaatgagaatggacttgtgaaatgtcctctttgtacg

SEQ ID NO: 168347 - DNA, 1411 bp, Arabidopsis thaliana landsberg
gagttgttggagaagcctttttgaccaatggcccttgcttttcatttgatgtttctagctacaagaaatgggagtacccgggctctcaccacgcgactatgtttggcttacatggtacagtcgcgatacgcttacgctgtatccacactggctcagttgatttcgtcttggagttctttttgcctaaaaattgtcgggatatagaggaacagaggaaaatgttgaatgctctttcgactataatggcgcatgtacctagaagcttaaggacagtcacgcagaaggaactagaagaagagggagattcaatggtgagcgaggtcatagagaaaggagtgacattgccaaagatagagaatacaacagaagtacatcagagtattagcactcctcaaaatgtaggattagtattcgatggaggaacaacggagatgggcgagttaggttctgaatatggcaaaggtgtgagtgtgaatgagaacaacactttctctagtgctagtggtttcaatagagtgactgagaaaaagcgaacgaaggccgaaaaaaacataactttggatgttcttcgccaatatttcgcagggagtctcaaagatgctgccaagagtattggtggtaagtaaaacattgacattctcattcttggaatttgaattcatcagagattctgttattgatcttggaatttgtttcagtttgtccaacgacattgaagaggatatgcagacagcatgggatacagagatggccttcaagaaaaatcaagaaagttggtcattcgcttcagaaaatccaaagggtcatcgactcggttgaaggtgtttcgggtcatcatcttcctataggctccttctacgcgagtttcccaaatctagctgcttcaccagaagcatcatccctacaacagcaatccaagattactacattcttgtcctattcacattcaccacctgcaaagtcccctggttcctcgtgtagtcacagctcaagctgttccagtgaaacacaagtaatcaaggaagatcccacggataagactagactagtctcaagatcttttaaagaaacgcaaaccacacacttatcaccatcatcacaagaggatgattttctgagggtaaaggtaagctatgaggaggagaagatccggtttaagatgagaaactcgcataggttaaaagatttaatgtgggaaatagcaaaacgatttagtatagaagatgtgagcagatacgatctgaaatacttagatgaagacaatgaatgggttttgttgagatgtgaccatgatgtagaagagtgtgtagatgtttgcagatctttttcaggacaaacgattaagcttttgcttcacctctcttcttcttatcttccagaacgttcttctgtcagaggatgtctttcatga

SEQ ID NO: 168348 - DNA, 971 bp, Arabidopsis thaliana landsberg
acatatgtcgatggagagattagagctggagagcttctcacaagctctaaccatacttcgccatatatctctccagtttggctccgccggtatgaatataattaccaaaatatccctcaacaccggtatgagccactatgtccttgtcgtctaccgccatgcaattgccactgccgttattgcaccctttgctctcttcttcgaaaggttatatccatttaattattttcattacattctttgaattttattcgccaataatcgatagattgttaatggattctaactacgtatattccgttttacaggaaggctcagccgaaaataacgttctccattttcatgcaactattcattctcggccttcttgggttgttacttaatcactgtctctatttgactaccttgtctttgcaaaagcaaattagaaagagagttaacatttttttctttctataaacaaatttacaggccagtgatcgatcaaaacttctactacatggggctgaaatatacgtccccaacgttctcatgcgccatgagtaacatgcttccggccatgacctttatcttggctgtactattccggtacgtaaataaatgtgcaaatctaaattatgtggctttcaactaaaatacgattattgttttctaaacgttacaaatggttttaaatggtaataaattcttctattaattttgataataggatggagatgttggacctgaagaaactgtggtgtcaggcgaaaatagccggaacggtagtgacagtggcgggagcgatgctaatgacaatttacaaaggacccatcgttgagctattttggaccaaatatatgcatattcaagactcttcacatgctaatacgacgtcgtctaagaactcatcaagtgataaggaattcctcaaaggctccatcctcctaatctttgcaacactcgcttgggcctccctctttgttctacag

SEQ ID NO: 168349 - DNA, 2774 bp, Arabidopsis thaliana landsberg; identical to SEQ ID NO: 7360

SEQ ID NO: 168350 - DNA, 3085 bp, Arabidopsis thaliana landsberg
gtacgctaatatttcttaaaacatgtagtccgtggtgcttactttaaccttatatgcaaaaatccagctctgatgcaggtcgacggtgctcttgatgatcttgttattgatgtgcaatttaagcattgcctgactttttgctgtgtcatgttcacagatggagcaagaacaagttgcaggtcattgttggaacagtacgtatattctctgttatcattccattatttagtggtacaaggatctacgttaataaactctaattagtaaaataattgctttgcaggttgcgtttggtatgggaatcaacaagcctgatggttagtacttagtagtgctaatttttgtttagttgatatttgatataccttcactttcagttttccttagtgcagatttctttctcttggaagctattattcttccgattacataatactagtagctactgatttcttaaaatcattatatttctaaaaaccaccatccttcgcgttttattaatcaccattcttactatcttctctaactgatacatggggcattgctgtagtcaggtttgtcatccaccacagtttgagcaaatcaatggagacttactaccaggttccagtctcttgtccactaaaactcgatatagttataaggctgcctcttataacttaaccataatattgtaggagagtggccgtgccggtcgtgatggcctcccatccgaatgtatcctcttttttcgttcggctgatgttcccaggcaggtatgctgcaatgttactgtaccctggttatctgtcctgtgtatatatctatatatttcttagatttagttgatgctttccttttctcctcaacagagttccatggtcttctacgagtattctggtctccaaaatctctacgatatagtaagatactgtcaggtacgctgattcatttccatttcctgaagcattatcgttattgcacctgtaaatatctggagcaagctgtggcaatcagcaccaacttccgagagaattgtgtaccttgctaaggcttctttagactgactaaattgttttactctttatcttgtcacgttaaagaatcatgatcttgaaatattctaaattgtacgctatcttatgaaaccttggtttctgaactaccttcttgcagtctaaaacaaaatgtcgtcgaagcgcatttttccgtcattttggggaaccatcacaagattgcaatggtattcttgtttacagttagttgtccactactgatagattttgtactaggcctattgattctagattttctgatgtgctgatcgttttggtaaggaatgtgtgacaactgtgccttgtcaagtgaggtcatggaagttgatgtatcgggtgcgtccctacattcgcttgttgtttatttgaaatacattcccttgcaatttgtttggaatcagcttgaaagtttcatcttctgccaaaacaatttcagcttattttgtttaaaggacttacagttcatttcactttctcatcaactatcagagtatcagccatatgtcgataatatcataattattttcggtgtcatgatttttgcagacctgtctaagctcgtggtttctatggtgcaagaaacgcaagccaaggatcaaagagtaacgatgttacagttgggtgacaaactcagaaataagcacaaggatctaagttagtcgtgtttttttcttcatttccattggtgtcaactgcattaaaaattttgttgttgatttttacctctgtggttgactttaggtgctgagttaaagagagacgaggtagaacatctcgtgataaaactgattgttgactcggtattggtaagatcattgtccatgtttatagttctctgttacaatctgacacgtgataaacccagctcaagataatagcatgtcagacaaaaactctagtatctagcaatgccttataatctctgtgattgtgccattagtctctttaggctgtaaatgagtttttattttttgctgcagaaagaagaatttcagcacacaccatattcgacaaacgcttatgtaacaatgggaccattggccaaccaattgttgcaaggtaaggagaaaagaaataccttctcttcacgatcaaatgaacactatgtaggcttcgggatatggaatacccttttttctcggtttggacgaagtcaaatcaaaagaagtcatagaagcagtaaatattagaagcatcatttatcggtttagtgatggacaaaactctgaaaacaaaaaatacctccttgtattctggaacaggaagaaagacaatcaaaatggaaacctctagcaggcaaaccaagaaattgaaaagaagtattacattttccgggttggaactcaagctcgacgagctacggaaagagatatctgcagctgatggaagcatactccctcacacagtcctctcaacccagcagattggctcgataagttcccaaaaaccagtttcattacaagaggcgagtttgtgctaataaaattgggtttcattattatatgtctataggctttcctttaatctttatttggttggatttgcagttggagagtattataggaaaattgaaaacagaaaagtatggagacaggattctagaagaagtgatgagacacgaagcagtctctgaacaacttgttgaagatccaacaaaggaagagacatgtaaaagcagattaagaaagagagctaagacacagaaggatgttgtattggtagagagcagcggagaagaagaagcttgatggatcaattatcttctaatccaatcatcgtagctgtcaaggttccacatttacactattcttatgtcagattttaaccaattctaattaagaaattcctgtactaccattttctgcataagcttcattgtctctaatcaagaaatcatcatcaacatgaatagcaacaagtgcaataaaagaaacatagggaaacctcaatgagaacaagtctcttgatgttctacaccaaagagtaagaggactctgttttcaaaactaaaactaaaaacaaacagactagaacaccaattagatccaaac

SEQ ID NO: 168351 - DNA, 2216 bp, Arabidopsis thaliana landsberg; identical to SEQ ID NO: 23311
  unsure (1)..(2216): unsure at all n locations

SEQ ID NO: 168352 - DNA, 1235 bp, Arabidopsis thaliana landsberg
tctctctggttattgaaatatgattgctttttcgtttatacttttgttatattttggaacatgctcatagtgagctacttgctgaactatgaacctactgattttgatcacccttacaaactttgatctcttgttctgtaggatcatagagccccttgcttccaggtgtgcgaagttcaggtttaaaccactttccgaagaagtcatgagtaaccgtatattgcatatttgtaatgaagaaggtctcagccttgatggagaggtatgagcaaatgcttcaatgttttccgtattattttagttttgtgaaagctgattattgtagccgtttcctattcaggctctttcaactttgagctccatatcacaaggtgatctccgtagggccatcacatatctgcaggtaagataaaactatctgaaatatttgttactagacgaaatcgaccatagaaatgtgaaacactctttctacctgaatattgcagagtgctactcggttgtttggatcaacaataacttctacagatttactcaatgtgtctggggtaaggatgaagttaacccaatatttgcataagtgtatggtaggttcagccatgtcagacttgctgatgtttaatatggatgtctaacgaatctatcaggtagttcctctagaggtagtcaataaactttttactgcatgcaaaagtggtgatttcgatattgcaaacaaggaagtggataacatagttgcagaaggatatcctgcatctcaaatcatcaatcaggttttctattttcctctcttatttttaccccatttaagtcatgcaactgtggctataaccccttctatacaacactctttcagctattcgatatagttgcggaggctgacagtgacataacagacatgcaaaaggctaagatctgcaaatgtttagctgaaactgataaggtaagactttcccgtactaattttccttacttgtgtctcttttagagcctcaagtgagatcaattaccaacatcttgactcaattatattacgggttttgagtgaagttcacatcttagatttttgccatttgaatctgtagatatgttgcaatcttgctaaggatgtctctgttacctctagtgataataaaatatctcacatcttttatttttaatgtatccagcgacttgtagacggggcggatgagtacttgcagcttctggatgtggcaagcagtacaatttgtgcc

SEQ ID NO: 168353 - DNA, 1648 bp, Arabidopsis thaliana landsberg
atgagcaccacgagctactcaagtggttccagctctgggcgtcgtctttgtcccattggtgtgccctcgaaatgctggtgtggggaagagataatcacatttacatcaaagacaaaggataatccataccgtagattttacaaatgcgctattgcattacaagtatgcattttgattggttaaaattgttgattaaacgagttaatgttgattggaaattaagttatgttagagggaaaatgagtcgcacttgttcaaatgggtggatgaagcgacgtcgttttccttatgtttcgaagagttaaaaaaatgagaaaacgacgtcgtttctcaatcggatcatgggtgattacttggattaatcgcaatcgcggtacaacgaacgcgggtttatggttaatcccggtttaatcactagttcaattggaggcgtagtatttcacatgaatccaaaagtacatttagttattttgagaatatattagttgatggtgatatttcaaggagccaaaagttcaggggggaatgttgagattgtaaatagtagagggtggaaaattcggccaacccaatgatttacaaggaattttaaaagctttgaaaaggggttaacatggtttacaatcatttttaaagcataagtaattggcatagaatgatttacaaggaattttaaaagctttgaaaagtggttaacatggtttaaaatcgttttaaagcataagtaagtggcatagatctatcacgaaagcataagtaaaggggtaaacactaaatcataaccaaaatctatcacgaaaaagtataacaaattcacataatcaaatctatcacgaaacagtataacgaattcaaaaggtgttaacgaattcacataatcaacccaaaaatcgaaagcaaaaaaatataacgaatttacaaggattttagaaacaattcaatcattaaatctcaaacaaaattaaatttgaagctgaagcaaatgtcaaactgtcgatggaatcaatatcacgaaacagtataacgaattcacataagcaaatctatcacgaaacagtataacgaattcaaaaggtattaacgaattcacataatctacccaaaaatcgaaagcaaaacagtataaggaatttacaaggattttagaaacaaattcaatcatcaaatctcaaacaaaattcaaattcgaagctgaagcaaatgtcaaaactgtcgattgaatcaggattcaaataacgaattcacataagcaacaacaaaaatcgaataaaccaattcaaaatctgacatttaagctaacattacaaattcaaatctgggaaaacaagagattcgacgacgacacatttcactacttccgacggcgaagatgggattcgacggcgacaaacttcactatttccggcggcgaagatgggattcaacggcgacaaacttcacaatttccgatggaggaataacataaagagattcgacggcgacaaacttcactatttccgacggcgaagatgggattcgacggcgacaaacttcactatttttgacggcatgggattcaacggcgacaaacttcacaatttccgatggaggaagaagagagagagaggaaatgaattaggttagaagtgtgtgtagctcagtaagggta

SEQ ID NO: 168354 - DNA, 561 bp, Arabidopsis thaliana landsberg
  unsure (1)..(561): unsure at all n locations
ggataaataatctggaaaaagagcagatagataaccgaacgcttatcaattactattgccagatggctccctttattttaccctatttaaaagaaggccgccaatccgtaaccggtttaacgaatggggtcacgggacaaattttttatcaaaaggatgttaccggaaaggtgccggactgggcaagtcttttttaatatcacagtgaaggtaataaatcggataaacactttttggtagcaaatggcatggcagctttgttatacatggcatcactgggctgtataaaaatgaatccctggagcagcaccattaaaaagccagaaaatcccacctggtgcattattgatttagatcctgataaaaacaaaaaaggacaaaaggcctttgaagaagtcatcatagcagcccaggtaacccatgaagtacttaaaagtatgggtgttgaagactatcctaaaacaagtggtgacagtggcatgcatatttatatacctctgggtggcgagtataattaaaaactatccaaacnaaatgcaaaacttattgtcnccgccgtac

SEQ ID NO: 168355 - DNA, 1297 bp, Arabidopsis thaliana landsberg; identical to SEQ ID NO: 28621
  unsure (1)..(1297): unsure at all n locations

SEQ ID NO: 168356 - DNA, 1808 bp, Arabidopsis thaliana landsberg
tcagccatcaaacctcatacaagagctctagactccattccaagacacaaacaaagagatcaaatcctctcccaagtccggaaccactccaaacaaattagtgactagagagagagacttttgtgttcttttgagctcttgcgcttggatcgcttttcttcttcctctattcttgtgatcaagatcattgtaatcaaagcaagagacaccaattgtgtggtggtccttgtagtggactttgtgtcccgtttgattgagaagagaagctcactcggtctaagtgaccgtttgagagaggaaaatggttgaaagagacccggtctttgtgaccacctcaacggggagtaggtttgcaagaaccgaacctcggtaaaacaaatccttgtgtctcactctttatttgcttacgatttgtttttcgccctctctcacggactcattaatatttctaacgctaacccggcttgtagttgtgcttgtatttgaaaatttcagtttcgccctattcaccccccctctaggcgactatcaataacagagaggagctcgtggttgacttgtctcaagaaatggtggagaaggacttgcaggtggagcagctatccactgatattcaggagttggaggagctggtgggcaccagggagaacaccatcgaggttctagaggatcagctccttaacactcagcagcagcttgccgaggctaacgagcacctggacatgcatcaccaggagatccaggaccaggaggccaacgaggacgtcgacattgagggaggagatgagcctgcctccagtgtggacactgctggctcgggaagaccaccttcccccgagtcgagtgttgcttcgttcgctcactagatgtccaggatagggttagaagttggatggtaggactcctcgtagctagcttagcttttgcacccttggggtactaggctagatagagttgagtctttttgggacaattgatgtaatcgtgctaaactctcttggaagcatgttgatggatactgttatcagttttaaatttggaaggagaaatttatgtcttttaaaatccttttgttgaagtcggagtctatcatgttgtttttgactcttttcgccgcgataaaatcttgaacttggaaatgtggtgttaagtatgtatgtggtttttcagatggccgggaggcagcgtcgggccagaacgagcgcgttcctccaccgccgccaccacctcccactctgcaggagctcatggctcagcagaacgagatcttgagacagctggctcagcgtcagccaccacctcagcactatggtggtggagaccatcagcgtcaccccgcggcggctacctatcaggagttcctcagcacccagcctccattgttcacaagggcagaggacccacttgatgcagatgtatggttgcgggtggtggaatccaaattcccgctactccatggagcttgttcagaggtcactaaagtcaggttcgccacccagcagcttcgcggacccgcaaggacttggtgggatcattttcttgctatgcagccagagtaccgagaggtagagtggagggagttcaaggcagctttcagaggacaccatataccagccgggattatggaccggaagctcaatgagtttttggcactcactcagggcaacatgacagtgttgcagtatgctcaggcctttaatgatttgtgccagtatgctgggtatcacgcagatacggatgagaagaagagagacaggttcaggagggggctcagcactaagctccgtgaccgtctcaacatcgtccga

SEQ ID NO: 168357 - DNA, 1301 bp, Arabidopsis thaliana landsberg
  unsure (1)..(1301): unsure at all n locations
ttctgaggattctgcgactccccgcgaaacttttttcgatatttctaaaggtaaacgggctttcattgaggctgaggaagctgaggagcttctcaaacctttgaaggaacctggcaatgcctacactaagatatgctttagtaataggagttttggcttgggagctgctcgtgtcgctgagcctatcttggcgtctttgaaagatcagcttaaggaagttgacttgtctgactttgttgctggacgacctgagcttgaagctcttgaggttatgaatatattttctgacgcactgcaaggtagtattctctcgtctctcaacttatcagataatgcattgggtgagaagggtgttagagcgtttggggcactcttaaaatctctgagctcctttggaagagctgtatttgatgaatgatggtatctctaaggaagctgcgcaagcggtctnnnnnnnnnnnnnnnnnnnnnnnaatttgagggtctttcattttcataataacatgacgggagatgaaggggcactcgctattgcagaggttgtcaagcgttccccactgctggagaatttccgttgttcttccacaagagtcggctcaaaagggggaatcgccttgtcaaaagcacttgagcattgtactcatatggagaaacttgatctgcgggataatatgttaggcacagaagccggagtttctttgagcaaaactctttcaagcttcaaacacatgactgagctttacttgagttatctaaatctagaggatgaaggtgccatagccatagtaaacgctctaaaggagtctgcttcgcccattgaagttctagagatggcaggaaatgacataacagttgaagctgcttcagctatcgcagcctgtgttgcagcaaaacaagatctgaacaagttgaatttgtctgagaatgagctgaaagatgagggatgtgtccagattgcaaattgtatagaagagggtcactcaaaactgcaatacatcgatatgagcaccaactacataagaagagccggagcacgagccttggctcatgttgttgtgaagaaagaagctttcaagctgttgaacattgacgggaacatcatatcagaagaaggcattgaagaattgaaagagatattcaagaaatccccagagttacttggagctttggatgagaatgatcctgatggagaagaagatgatgatgatgaggaagacgaagaagatgaagagaacgaaggtaatgggaatggtgagctggaatcgaagctgaagaaccttgaagttaatcaggaagattaa

SEQ ID NO: 168358 - DNA, 1761 bp, Arabidopsis thaliana landsberg
atggcggtggaagattcaacggcaccaaaatttaaggaacaagacctccagttgtggcagttgatgattgcaggttcagttgctggttcctttaagaacatgacgatgtttcctgttcgcaccttggatcaacgtatgctgcatcgttcgtattcgcaaagacatgtcggaatccggcaggctctgcgttcggtaatccaaacggaaggaccatcggctctgtaccgtgggatatggtatatgaggcatggagccatgggacccgctcaattcgtacatttctccttctacgatgtatccaagaatttcttgtctaccgggaatccaaacaaccccgtggtgcacgtgatttcctgggccttcacggttgtatggagttatgccgtttcaactcctgttgatatggcgaagctgaggtaccaaaatgggttcggtaactacaaaggcgtctgggattgcgccaaaagggtgactcatgaggaaggaatcagtaagttttgaaattccggatgaaccaagaatcgtattccccaaactcagaaccactgagtatcactttattagaaatctgattaagaagtttacaactaccttaattggttttacacaagatctaaactactttaccttgtcacctgagatttccctaaacacacaagagcagatcacaagaacacactctttgatctctctagaattccaatcagactaaaccttagtctctaataatgaaaagtgttgcactagcttttcactcacaatcacggccaagtctaacaagaaccttagcacctctatttatactatcgaggtctttggtcttctaggttagccttcgagatcttggatcactccaaatcttcgcgtgaatatctcctctccaaactgaactcatcctgttgtgatctccacgtcattcgttcatttagcggcatatccacgtcagcatcaattacttgatcttcactttagtaatctgaaacagcttccagcttgttccagcaaacagcactccttctggtttgtcctgacagagggtgcactaacaatctccccctttttgatacaatttgttaattcaagcaatcctgcaagaaacccctcaaagaaaactcacaagcacacatcaagtcatagagataataagcagcggaaataaccaatagagggtctcatcatagattgcataaataagtttttaaggttcaaaatacatcatccagtacttagaaacaaaaacctactaaaaccaaaaggacatgattaacaaacacagcttaaaaactcccccttaatcctaaactcccccacaactagatctagccttcttcgttatcaacatctagagagtttacaaaggaattagagttctcagggactagttcataatctccccctgcttgcatgacataattgatcaaaaactctatctagacactctaccaattaaaccagacactgagtacaggacaaggacaccataccttccatacgtgtcgttattgtcgtcaacaaagtagagacatatctcaaatctataggtaaggatgtgcgaaacacatactctagattaaacatctttcgcatacgccgggcattgctgcgtgttctcccatcgctagggtttcggcgtgagagctcaattttctgggttttctcacttgtttcattcgatagatccctttatgcaaaccacagaaactcaaaaccaaaaatcagtgctaaccggattttggtccgggtcaatctcataaaacacaa

SEQ ID NO: 168359 - DNA, 3666 bp, Arabidopsis thaliana landsberg
tcacctgcatgacctagtaccatttcaaacttatacactacagctaatccggttacaagtacttcttctgtacctgttgctaaacaaaaacgagctactagagctccatcttatttgtctgactatcactgttcccttgttccatccatatcatctttaccacctacaaatactttaccatctataatatcgcctcctattactttgtctgctattgatactcctacacagcctaaaagaacaagtcctcatcctctttcaaacactatttcctatgataagctaactcctcttttcaattcatatatctgtgcttataatctggaaactgagccaaagacttttgttcaagccattaaatctgaaaagtggactaaagcagctaatgaggagcttcaggctcttgaggataataagacttgggttgtgaaaactcttcctgagggtaagaatgttgttggttgtaagtgggtatttaccattaagtataaccctgatggaagtgtagaaagatacaaggcacggttggttgctcagggttttactcaacaagagggtatcgattacatggatactttttctccggttgctaagcttactagtgtgaagtttttgctaggctgtgcttctgcaaagggatggagtttgacgcaaatggacgtatccaatgcttttcttcatggtgaactggatgaagagatctttatgcgtttgcctcaaggttatactccacctgtagatactgttttgccacctcaaccggtatgtagacttctgaaatctctctatggtcttaaacaagcttctagacagtggtacaagaggttatcatcagtgttattaggcgcaaattatattcaatctcctgcggataacacattatttgtgaaagttgattcacatataatggttgttgttctagtctatgtagatgacttgatgatagcaagcaatgatgatagtgcagttgaacatttaaaggctttgttgagatcagagtttaagatcaaggatttaggacctgctagatttttcctaggattggaaattgctaggtcatctgaaggaatttcgttgtgtcagagaaaatatgctcaaaatctcttggaagatgcaggtttgactgaatgtaaaccaagctctattcctatggatcctactgtgcatttaactaaagagatgggtactttgttgcctaatgcaacgaaatatagagaacttattggacgtttgctgtatctctgtatcacaagaccggatatcacatttgctgtgaatcacttgagtcaatttctttcagcacccacagacattcatcttcaggctgcttacaaagtgttacgttacattaagagtaatcctggtcaaggattgttctatccagctgataatgagttgtgtttaaatggttttgcggatgctgattggggtacttgtaaggatacacggaggtctgttacaggtttctgtgtttatcttggtaactcattgatttcatggaaatcgaagaagcagaatgttgtaagtaggagtagtactgaggctgaatatcgtgctcttgctcaggctacttgtgagcttatttggttacaacagcttttgagggatttacacattacagtcacttgtactgccaagttcttttgtgacaataaatcggctctgcatttggcgacaaatcctgttttccacgagcgtactaaacacatcgaaattgattgccacactgttcgggatcagataaaggcgggcaaactcaagactatacatgtccctactggtaatcagctagcagacatcttaaccaaacctcttcatccaggacccttccatggtttgataaagaaaatgtccttatcaagcctctatcttcctaaccagacattacggagataaaggcttgaggggggtatattggatacatggttagatccggttaacaccggttattaaggtgttggtttaatgttggttatttgttgtatatataagtttaagatcacattagattgttgattaagttgtaacaaacatttttcagttgttaataagaagtcgttatatctccgatcttcttctccgttacaccggaacttcaccggtgttaataatttatttttgattcaacttccatttttatcaaccttgatgatcttgacaatgggtttgctgatggttttcaagtttattctcaatttcaatagagccattgaacacaccgttttatacccatcaaagtacaatgtcatgtattctataactctagaatacaccgttactacggtataatcgttgagtacacccgtcttgcacatcctgtaccccacggagtacaacgtatgtactgtacggagtacaccgtctcataccacgtaaagtacatcgtcacgtatcccgcgaaatacaccttcatgatattttaaggttatatcaaatattgagtcatagatatgtcatacatatatagtaaccatattatcaaattaatgtgatcaaattgtggaaaaagactgaaaagtgaaaacaacgcatcaaggtttgtgtggtcgcagatctagactaccgttaaccttttactcgactcctaggccaagagacatttattccaatggaatgacttatacttatttatacagttaaaatatatctttaaaacagttagttagttacatcaaatattaatttaatgttttaaattaaattaatagatttttcaggttatatataaaaagtagcttttgacagaaaaaagtattctcaaacaaaaactcataaaggaggcatttttccaaatctactcttaaagaaaataattttgtaaatttataagatactaagataataatttttataagatctaagataacaaaaaattataagatactacgataaaaaaaattagaattaattatagagaaatataaacccaataatatcataaatgaataatgattaatattaagatatacaattaagaaatttagtacattctagtgtttttttaatcttttttaaatttgaagttataatctcgatagaactcctctataatttttcttattgcgccagaaaacagagttttaaacagatcaaatgagcccttgtcaaaaaaaaaaaaaaaaaaacagatcaagtgagaaaagaagcaaaatgaggaaccgtggaaatgatgaaaaatgtctttcttctttaatcactaaacaacgaatctgaacttaaagaaaagttctaatgttaaaatcaaattatgttttaagcgattacagactggatttattcaaaaaaaaaaagattatagactgaatataatatcttttcaattttttttattgaatgaaaataattaaataaagtaatatcatgtaaatttataaacttttaaagtcccaatatattaatatatagaggttttactgtatacttttacatattttgatataacataataaaatttaattaacacgagcgatgtcaatcaaaatacttggtcatctctctagactccttaacacgaatacaagaagttgaacaagatattaatccaaaacattggaaaactattttgtgttgacaacgcttctcacaaaatgagcaaataggtcttgacatatgatgattgttgggtagaacgcctaccttgctactgcggtagaaccaaaatgaacc

SEQ ID NO: 168360 - DNA, 529 bp, Arabidopsis thaliana landsberg
gctcgcgccttcgccgccaggcgcgccattacggcacccgcgtcaaggtattgccggaagccctgcgccacggccagatcaaccagacgctgggcctgccatccggctataccgccacggtggacgcctttctggccagcctcggcccggcatgggccgcacggctgcgctgagccgccgccatcgcattccccgccatgcacggcataatgtcggcctttgtttcgttaccggcacgaccatgcgaatctgcgtctactgcgcctcgtccaaccaatccgaccagacctaccgcgacgcggccttcgaactgggcgcgctgatcgcgcaggccgcccacacgctggtgttcgtcggtggcgcggccggctccatgggcgcggtcgccgatggggcactgtccaagggcggccaggtgcacggcatcatgccgcacttcatggacgagctccaatggggccatccgggcatcaccaggctgagatctggtcgacaccatgcgcgagcgcaagcacctgctgctgaacac

SEQ ID NO: 168361 - DNA, 615 bp, Arabidopsis thaliana landsberg
cgcagggcaagtttgatgcaatttttctttttacttgggctttcgtacacgtcagcaactgtttcgatggctctagttagcatgttacctgctatcacctttgcgttagcccttattttccggtaatgcaactaatttaattagtaacatatatatatacatcaaaattttctcgttttttttataaatacttttgcaggatagagaatgcgcaaaacctaaagagcaaagcaggcgtgctcaaagtaatgggaaccctaatttgcataatgggagcaatgttgttgacattttacaaaggcccagagttatcaaaccctcattctcatccacaagctcgtcacaacaacaacaataacaatggtcacgaccaaacaaagaaatggcttctaggctgtctttatttagtcattgggacagtgttgttgtctctatggatgttgtttcaagggaaattaagctttaagtatcctggaaataaatactcaagcacttgtctcatgtcagtcttcgcatcatttcaatgtgctattttgagtctttataaaagtagagacgtcaaagattggatcattgaagataaattcgtcattttggtcaccctttacgctgtaa

SEQ ID NO: 168362 - DNA, 387 bp, Arabidopsis thaliana landsberg
  unsure (1)..(387): unsure at all n locations
ctttttnnnnnnnnnnnnnnnnnnnnnnnnnnnnnnnnnnnnnnnnnctcactcgtctcttccgtttcgatctctgagacttttgtagcgaaaaaaatggagaaaaaggaagaagatgacacgccactcgtagggatattctgtctgaaaacaagacaagacatgaaaaggttcgaagaaacagaggattgctttatcctcgatttcgatccttttgattcgttcgacgctaaaaaactcacctttaccgatgatgttcgtgaaggtgacaaagatttatccatcatccatgaaacaggccaggtttgagatttgaaattcaaggttttgaaattagggtttatttcaaaaatttatgttttaatggaatttgatatgattcaatag

SEQ ID NO: 168363 - DNA, 742 bp, Arabidopsis thaliana landsberg
atgacgattattttggcgattctctttcggctaataaaccgctctttgttcgcctttttggcgacggctccttgctttttctccggagacatggctcgaaatcgacccacctctccgacggttatctccatgacgcccacttgtcctcttatggaccccactattccttcttcaatttccccaattctatataaacacacacctgcaatttccacttctacagttctcgaacaattaattccccttgcgttgctttatccttctcgattctatcatactcttctaaagatggctgataatttgcgacgagcggtccaagatataaaccttggtgtggatgatgtgcctgtagcactctcggctgcggtggtggcccaagcggccgcagaaaatcgttttatcttaatgggacatccggtgatgcctcgtcgacataacctccgatcgattgtggcttccatgcctcgtgtttggggccaagcagggttagttcacgagagaattgttccagggaatcagttccaattcatcttcccctctgaagaatcattggagacagtgatacgccggggaccatgggcgttcaacgaccgcatgctgctcctccaacggtggacaccacttgagaacccgcctttactcaatttcatcaatttctggatccaaattcgtggaatcccttttcactttctcagccgtgaagtcataggtgaaattggtcgtgctattggtaatgttctga

SEQ ID NO: 168364 - DNA, 3637 bp, Arabidopsis thaliana landsberg
tcacctggacgagtttgataggctctacagcttaacaaagatcaatggagtcagtgaggatggcttcaagctcagattgtttccattctctcttggagacaaagatcatcagtgggaaaagtcgcttcctcaaggctccatcacctcctagaatgactgtaagaaagccttcctggctaagttcttcgcaaactccaaaactaccagactccggaatgatattttcggtttcacatagaaaagtgttgagactttctgtgaagcatgggagcgcttcaaaggatatcaaacgcaatgtcctcatcatggtttctcctaagcttcacttctcaacaccctctacagaggtgtccttccaaaaatcaggatgcttcttggtactgcttctaacgggaacttcttcaacaaggacattgaagaagtatgggagctggtagagaatttggcatattctgatggcaactacaatgaagattacggtggaagcatccgcaccagctctcattctgatgagaagcaccgcagggaaatgaaagccatgaatgacaaactggacaagctactccttgtgcaacagaagcacattcattttctgggtgatgatgagacgttccaagttcaggatggggagactctgccatcagaagaagtcagctatgtgcagaaccaaggaggatacaacaaaggtttcaacaacttcaagcagaaccatcccaatctgtcttacagaagtacaaacgttgcaaacccacaagaccaagtctacccttcacagcagcagaatcaacccaagccgtttgttccatacaaccatggtcaggggtatgttcctaagcagcagtaagggcacctatcagcagcaacttccaccacctgggttcacacagcagcaaaaccaacaaccttcaccaattccagatacagacttgaagaacatgttacagcagattctaaagggacaagcagtaagagcaatggatctcgccaaaaagatggcagaaatccacaacaaggttgattgcactttcaacgatctgaacatcaaacttgaggcactcacctctaaggttagatacatggaaggataaactgcgtcgacctctgcttccaaagtaacaggacttccagagaagtccatacaaaaaccgaaagaatacgacactcctcacgctatcactatcacacatgatcgagagctgccaactcgatatgtccctacatcaaacactaaggacagtgtaattctagagggggaggatttttatcaagatgatgttttagctgacaacccaatcgaagaggccatactcaccagtcaacccactcgaccacaagctcccccagctactccctttgccaaaaaaactgaagctgcaaagaccaaagacatagactttgtgccaccgccttacaaacctctgcttccattccctggtcgtttcaagaaagttttggtctataatttgcatgacttaggcattcattcttcaccactttgtcattgtttcatccatatttcatctcattaggagtcgttttagtgtgttttacatacttaggacgattttacattaggattgcatgtgcatggcatatttggttgttttcaggtactttggatgcttttggagttcaaacagaggaaaaacagaacatgaagtcagaatgcccaatgacgccttcagcaaaagtactctatcgcagcctcggagccctgccagggcaaatcactctatcgcaaccccggagaagcaagcagctcagtttcactcaatcgcgaagccggaggaatcaccccatcggaaccactcgatcaccactcgatcaccaggaagcctatctgctcattctgcactcaaccagacaagctgagaacaaagaagagaagagaagccgaagaaaccactcgatcaccatctcatgactattagagtgtatgaagaaaggagagagaggccgatgaggccgagccatctccaagaaagagaagaagaagcagaaaggagtcaaggccgaagtcatgaaaacaaggccgaagatctcctcatcaaacgctgaaaaagccaagtaaagagccgtgaagaacaagtctcggcctaagagagtgtccatacggttttatgtggataaggccgagactatacctcaagatgaaggcttgagcttgtgttaagacccaaaggaaataaaagagagcccaaggaagaggcccattcgtttgagacaagaatagggaaacaatgtgtgtgtgcaaccatgaggggctgtcactatccacgccttggggatgcttatggacgttggagtatgcaaacaagggatgatcacatgttctattcaggatttgaatgttaggacatgtcactttcagtcttaggattcaacctctctctcttcacgtcgctttctctctttggtctttgtgtagagtttgaactctcctctttgcctatttaaaggctgtgtttctctttgtaatacaacaagaataatagacaagctcttatatcattttgtgtagctctctcttatttacttgtgtttaactaaagagttacaatgtagagagatagtgttacacaatttaggactgctttaaggcagcctattgcttgtcatacacactcttaaatacactctaaactcttctttagttagtacttattctctagcttactgatcctaaatcctctttatcttaagtacacaaactctaagtgttgttgttgatataacccgatttgaaccgattttatctatgttttaagtataggattttgagtctttatgttatttctcgagtctttttagtatcttttcaggtattctatgcaatgagacaacaatggagataaggagacattttggagcaaaaactaagaaaaaggaagctaatgacgattttggttcaagaatcatcgaggagtgtcgatcgacacactcttggtgtcgatcaacaccagtttccgcccggcaaaaaccctatacgctttcaagtttatagaatatcaaatttgccccagaagactttcctatttgcattattagtccctggacttttttagggtctatatatattgtttgtagacctagttctcattatcaagtcttttatcaagttttatgcaaacactattgggagagacataagctattcatccattgttcttgagacattcattccaagtcttaatacagtgaagaaatcttttctaactcttatctcctttgttgtgtttatgctttcatcaattatgttatttgtctcattcaatatgtctgagtaatttgcttgttaggaatagggtttctcattagggattcatatggtttagtagattgccccctttgctaggttatctgtagaattcttcatctttaattatgcttaatgttagatctagagtaattaactagatcttgaatccagacaatagatattcccgccataggtatctgtagttggatctattatttgatgagtctggtttataggtgtgtaataagaatcggcctatctactaagatgaataattgaactcgttaagaatgcatatttaggttgatagtttctcggtttctccggttattattagctatagatatagagagttttgcgcacgcccaccggttattc

SEQ ID NO: 168365 - DNA, 1533 bp, Arabidopsis thaliana landsberg
aacagagagaaaatggaagatggtgtgacgcctccgcttctgatcacagagaaagacacgacgatgattcgtgtgaaggaggaggtgaagaagcagctatggctttctgctccactcattggtgttagccttcttcaatactctctccaagtcatctccgtcatgttcgttggccatcttggctctcttcctctctctgccgcctctatcgccacctcctttgcctccgttaccggcttcaccttcctcgtacgtttcttcgtcccatctctcacgatccagtcaaaaaaaaaaaaagagtgcattcaataacataaccttagttatcctctgttttgtaactttgttcaaagtttgtgtgtatgtgaaacagttgggaacagcaagtgcattggagacactatgtggccaagcttacggagcaaaactatatggaaaattgggaattcaaatgcagagagcaatgtttgtacttcttatactctctgttcctctctcaatcatttgggctaacacagaacagattctcgtattggtccatcaagacaagtccattgcaagtgttgctggctcctacgctaaatacatgatcccgagcctcttcgcctacggactgcttcaatgtatcaacaggttcttgcaagcgcagaacaatgtgttccctgtctttgtctgctctggtatcactacatgtcttcatttgcttctctgttggttgtttgtgttgaagactggtttaggatacagaggagctgctcttgctatttcggtctcttactggttcaacgtcattctcctctcgtgttatgtcaagttttcgccttcttgctcgcatagttggaccgggttttcgaaagaggcttttcaagaactttatgatttctctaaaattgcttttccttcagcagtcatggtctggtaagtcatcaaacataaaatgctgcattgttcaggttccagtatctgcattttaatcaaattctgtttgaaacagtttggagctttggtccttcgagcttctggttcttgcctcaggccttcttcctaacccggttttagaaacttcggtgctttcaatctggtagatttcggttatctttgtcttatggtactcagagtttgtgtacttcttctttatatttgatcaacctcatttctgcaacttttcagtctaaatacttccctaacaatctggcagatttcggttggtcttggtggcgctgcaaggtcagtaacaaaatgtatccaagagctcataaaaagaaaatctcatcaaaccaacctatctcactttgtgtgtttctgttaacttgcagcataagggtctcaaacgagttaggagcagggaatccacaagtggcaaaactggctgtatatgtcattgtaggcatagcagtagccgagggaattgtggttgtaacagttttgttgtcgattcggaagatcttaggtcatgcttttagcagcgacccgaaaatcatcgcatatgccgcatcaatgatacccgattgttgcatgtggaaacttccttga

SEQ ID NO: 168366 - DNA, 1138 bp, Arabidopsis thaliana landsberg
gattttgcctttggtaatagtaagattatcatgataaaatatccttgtcagcgttgttgtcttactaaacacaagctcagagtcgaggttgaaggtgatttagtctgttatgggtttctaccttcatatacaaattggtattttcatggtgaggaactagattttcaggatcagacaacaagagtagaacaagaatctaatgtagatcattttgaaaacccaactatgaatatgcttggagatatttttccaagtatgagtaatagttttagtgaagctcctaatagtcctagggaggatcattccaagtaaaatgaggcatttgatgatttgttattagactgtcatgaacctctgtacgaagggtgtcacacgttcagcaaattatctttcatgatcaagttgtttcacatcaaatgcatatcaaggataagtgacaaagggatgtttatgataattgatctcttgaaagaagcatttgagcatgcaaagctgctaaattcgtttaatgatatgaagaagttaggatttaactatgagattattcgtgtgtgtcccaatgactgcatgttttattgggatgatgatgcatctagacacacatgcaaagtctgtgaaagttcaagatgaaaaacacaagctgctgatgaaaaacacaagttcaagttcaagaaaaagaaacgaaagccacaagctgctaaagtgcttagatattttccattgaaaccaaggttgcagcgtcttttcatgtcatcaaaaactgctaaatctatgaggtggcatgctaattctaagaataaagatggtttgctaaggcatcctagagatggaaaagcttggaaaatatttaatgaacaatttccagagtttgcaacagatccaaggaatatcagactaggattggcaactgatgggtttaatccgtttggttctatgagtacaaactatagtgtatggcatgtgctattatttccttacaatcttccgccttggatgtcaatgaagcaaacatcaatgattctgcattgataatccttggaaaacacatgccgggtaatgatattgatatctatcttcaaacccttatactagaactaaaagaagtatggtatgatggtgttttaacctttgatgcctc

SEQ ID NO: 168367 - DNA, 3184 bp, Arabidopsis thaliana landsberg
atggagattctcaaagcgatttctaagcggttatttcatcggtttatcctcacctttttggtgacggttcacagcgttttcgccggcgaagtggttcccaaccccattttccctcaggcggttatctccatgcttgatcccacgatcaatcgtgatgtttattctgtggttcccaaacaccttcatctatttaagcaacgaattgtcgattgggaaatggcactttgtcttctcatcaaattctcaattttttacccacttcgattctataaaaacctctcaaaaatggcagacaatctcaggcgtgcagttcagaacatcaatctgggtgcagacgaagagcccatagcgatcccaaaagaaattgtgaatcaagcaattgccgacaatcgtttcatcctgattggcagaccggtgatacctagacgtcagaacatccgctccatagttgcttctttaccgcgaatatggggacaagcagggctagtttcagttcattttcccgacagaggaatccatggagacggttctgaggcgtggtccttgggccttcaacgacagaatgctcatcatccaaagatggactccacaactgcctctcctcgacttcatccctttctggatccaagttcgtggcatcccctatcaattcctcaaccgtggcgtcgtcgaacacattggtcgttcactcggtcaggttctcgatgtggattttgacgttgaagccgtggctagaatggactttgttcgcattctcattcactggaacatcactcacccacttcgcttccaaaggaatttccaattcacgcttgcgaccaatactctcgtccgcttcagatatgagcttcttcgaggtttctgtgaagtctgtggatgctcacacacgattccggggcgtgtctatacaggaatggtggagaagagcagcacgacaatgatgatgaggaggatcaggatcgcgttcagaatcatggtgtcatcattagggagatcaatgatgaggaagcaatggagttggcaaacaatcaggacatcaatgtggtggtaaatgaatcagaagatagagagaacggaggtgatgcggttaacactcgttcacccgctgattcagatgaggccaggctctcagatattgatccacatcacgatgcactgattgactacgaacatactgatatgttcagtgaagaacgaaacgatagtgaactcttaaatcccatcccgtgttttgagaactcttgtggtgatattcctggtaatcctagccacaacatttattctcaaattcacccactggcgcttatggattcagcaatcgtcatcaatccttcaactgaagttgcaaatgagtgtgggaagcgcaagcgggaggacgtgctggatttttctaaggaacagggaaacaccaagttcacggtgcgtgaaaggggagaggggagtggaagctccggtgaacacaaccaaggcggaggcgcgatgggcccgaatccaccacttccaccatgaagacagcctgctggaactgtcggggttaggcaatgactccacagttcgacgcctaaaggagatcaatagattgcatctcctggacatcattgctctttcagaaacaaaacagcaggatggttttattcaagaaaagggtttggaaatgggttttagtaagtttgtaacagtcccgcctattggtttaagtgggggtttagttgtgttttggcgtgatcatgtagatatgtcaatttgcttcagttctcctaatcttgtagatcttttcgttaaaagtaatgaaggtgatttctatttatcttttgtctatgggaatcccaatcctaattatagaaatcacctttgggaaagattagaaagaacatatactgtgagaaaagactacccttggattataatgggagacttcaatgagattatgagtaatagtgagaagagggggggggggggcgtagagtgagaactgaagcttcctttcaggatatgagaagaatgttcgatgctgtaactttacagatttgaaatcaactggagataggttctcttgggctggacaaaggggagatcactatgtcacatgttgtcttgaccgcacaatggcgaatgctgaatggcacaaccggttccctgcctcagagacagagtttttggagttcggcgaatcagatcaccgccctctagttacatatatttcagaccagatagaggaacgccgaggctgcttccgctatgatagtagattactttacaaagacggtttcaaggagatggttacttgagcttggagaggcacaagatgtcatgatgaggggactttactctccaaaattgttcactgtcgtaagagtatttcagcctggaagcgaagcaacaaaaccaactccgagactagaatcaaatctatcaaggctcaactggactgggctattgcaaccggaaatacatctacccatgatatcgcaaccttacggagaaacctgaatgaagcgtacttggaggaggagacttattggaaattaaaaagtcgaaatcactggctacatacaggagaccggaacacgtgttactttcaccacactacaaaggcaaggcgtaataagaacatattactttcggtccagaacgatgatggtattcttaagaaaggggacaaagaaattgcagaggtcgcgaccaactattttgcagagctttttacggccacaccaacttctgaggagacgtatgaggctgtgtttcaaggatttcaaagcaagataactgatgagatgaatgaagacctaacaaaaggagtcacaatagaagaaataagagaagccgtgttatctattggtcctacaaaggccccaggccccgacggttttacgggagatttttaccaacaattttggaatgatatcaatccggcaatcgtcaatgaagtgcagatgtttttcaccactaaccaattcgatctagctcataatcatacaaatctctgtcttatccccaaagtggttcccccaacaaagatgtctgactttcgaccaatcgccctctgtaatgtcagctacaaaatcattttaaagattagtggcaaccggctgaagaaacacctttcgggaatcatatcagaaaatcaggctgctttcattccaggtcgcatgatcacagacaatattatcattgcccatga

SEQ ID NO: 168368 - DNA, 389 bp, Arabidopsis thaliana landsberg
  unsure (1)..(389): unsure at all n locations
acggacaaagcttctttgctagcggaagtgatccaacacatgaaggagctaaaacgacaaacatcacagatcaccgacacgtatcaagtcccaacagagtgcgatgatctgaccgtagattcgtcttacaacgacgaggaaggaaacttggtgataagagcatccttttgctgccaagacaggactgacctcatgcatgacgtcatcaatgccttaaagtctcttcgtcttcgaactctcatagctgagatcgcaaccgtaggtggtagagtcaagaacatcttgttcttgagccgagaatacgatgatgaagaagatcatgannnnnnnnnnnnnnnnnnnnnnnnnnnnnnnnnnggaggattatgatgaagagaggatgatgaata

SEQ ID NO: 168369 - DNA, 510 bp, Arabidopsis thaliana landsberg
tcttgaactctacacctcttaatatcgtgtttctacaccaagattctattgatcatcaacacttagacattattttcttgttatcaaagcacaaccgtgtttcccaaggtggtcgatctttgaagaaagtgttcaaaccaactaatctttttgaaaaacctacttattatattgattttgaagaagatgaaaaaaatgatgaggatcaatatgatggtcgtacgcatagtctaccatatgaaaaatacggtccatatacatgtcctaagtgtaaaggtgtgtttaatacttctcaaagttttgctgcacatatgttatctcattacaatcgtgagacgaccaaagaaagagaacataggcttcgtgcaagaaacaaaaaaaactatcgtaattacacggaaaatctcaaaagatgaaaacagaagttaggatccgtattagtgacataattatcacataagtgactatgaaattttcaaaaatcttataatcgtaaaagaagagcttgct

SEQ ID NO: 168370 - DNA, 443 bp, Arabidopsis thaliana landsberg
atgaaaaccctgagcgccgtcgccgctctgctggccctgaccttacccgccgccctgcccgccgccacgctggcccaaaccaccttggcccaaaccgtcgccctgccgcaaggcgcggtggagggcgtcacccagtacgatgtcgagagcttcaaaggcattccctacgccgcgccaccggtcggggatttgcgctggcgcgcgccgcaggcggcgccaagctggacgggcgtgcgcgtcgccgatcattttgcgccggactgcctgcaaactccgtggccgggcgacgacgcgccgcttggcgtcaagccgtcggaggattgcctctatctgaatgtctggcggcccgccgataccaagccgggcgcgaagctgccggtcatggtctgggtatatggcggcggctacgtgtcgggcggaacctcgcccgccatctataatgg

SEQ ID NO: 168371 - DNA, 497 bp, Arabidopsis thaliana landsberg; identical to SEQ ID NO: 78024
  unsure (1)..(497): unsure at all n locations

SEQ ID NO: 168372 - DNA, 475 bp, Arabidopsis thaliana landsberg
caatggcttttttctgacacaaaatttgatattgtgtggtaggtaaatctaacgggtattccacatggacttagcttcgaagagacaaaagagctatgggtccgagctgatcttgatggaaatggtgtcttcgactatgaagaacttaaggtaaataaaactaaaccaattggtacataacagaaatcacaaaccggtagctttgtttaaaacgtcaatcaagactctgatgtgttgtgttatgtaatgtcagaaaatttggaacatgacgatggtaaatcaacctggaaactgcaaagagagtgtgatggagagtaagaaagaagaaggagaagatgaagcaatcggattgaaagtgaataaagcaattttgtttccacatgaagcagagaaaggattgtggccggagaattacaatatatccgatcatgcttgtctcaccgtacaattctctccagtcaaaatgctttgtagc

SEQ ID NO: 168373 - DNA, 385 bp, Arabidopsis thaliana landsberg
atggtgagagctgatgatcaattcaatggtttgcagggagacaacagagcgttagatattgtacgtctcgaggataataagagagagagaacgaaaagagtaattaattacaatctaaggagcacaacgatgatttccagcttaagcaaatgactgaagattgatgagtgcaagaatcaagacccggaacaaaaccctaatcgtgttgcttcttctccaagtttgtgccatgtagagtccaagaggcctcaaaaaggggtttcaaacaaaccggtaaaaaaaagaaagccgcttaaagttatagtgacggatgaagataggacaccgacggaatgactgattaacgtgatgagagaagtgaacggtgtggattgcaagctgatat

SEQ ID NO: 168374 - DNA, 563 bp, Arabidopsis thaliana landsberg
  unsure (1)..(563): unsure at all n locations
ttgctatcaagttacatggcgggaagaagtgaccttacgtattaacaaaaaaggtccaggcatagtagcagcaggttacattgaagcagagcacgatgttgaaatcgtgaatcctgaacatgtgattgcacatgtcaatgaaaccggtacattaggaatgtcaatgaaggtcgcattaggtcgtggttatcaaaccgcttcttcacgcgaatcgtcttctgaagaaaagcattcgataggtgttttacacatagatgcaagcttcagcccagtgcgtcgcgttgcttacagtgttgaagcagctcgtgttgaacaacgtactagcttagataaattggtaattgatctagaaaccaatggtactttagnnnnnnnnnnnnnnnnnnnnnnnnnnnnnnnnnnnnnacaacaacaattggctccatctgttgatttaaaatcttcttttataacgaaagaaattagcgaacaacaatctactaaccctattttcctacgcccagtagataatttagagttaacagtgcgctctgcaaattgtttgaaagcggcaagggtttttg

SEQ ID NO: 168375 - DNA, 513 bp, Arabidopsis thaliana landsberg
gatttgaaagtgaacttgatagtgacggattattctatgccgggactaacaggatatgaactcctcaagaagatcaaagtaaatttctattttgtgtcatttattagagcaagatttgaataagctcttctcgtgctttccttacaaaaattctgttgtatatttaccaggagtcttcagcactccgagaaatcccagtagtgataatgtcttctgagaacatacaacctcgtatagaacagtaagtcactatagttaaaagatacaaaactgaatcaatggatcttaacactgtaatctaattatgtgtctatcctctcttttgttgttgttgtttttgtagatgtatgatagaaggagcagaggagtttttgctaaaaccggtgaaattagctgatgtgaagcggttaaaagaacttataatgagaggtggtgaagctgaagaaggaaaaaccaaaaaacttagtcctaagagaatcctacaaaacgacattgattcatctccatcatctt

SEQ ID NO: 168376 - DNA, 278 bp, Arabidopsis thaliana landsberg
atgacgttcttgttctatcttgctatgttctttctgctcttaaacgctttcacaattgcacaatctttgatccaagattcttgcaagaaagctgcagataaaaacccgaagattcattacaacttctgtgtcaagtctctcgaagagaatccacagagcaaaactgcacgtagtcttgacaggttggtcatgttatccacgaaaaatgcagtgtcgaaaacaacaagcatgaaaggaattgtggacaagattctcaaggagaatagatttgaaatgta

SEQ ID NO: 168377 - DNA, 2629 bp, Arabidopsis thaliana landsberg
gcagcgtttaactggaagggttgcagaccttaataggttaatctcccgatccaccgccaagtgcttggctttttacgatgtacttcaaggaaagaaaaagtttgagtggacggctcggtgcgaggaggcttttcaagaacgcaagagatatttggcgagcccaccaatcctcgccaaacccgtgatcggggagccactctacttgtatgtcgctgtattggacattgtggtcaacagatttttagtccgagaggacaaaggtgaacaaaaacccatcttttatgtttcacagacatttaccagcgcagaatctcgctacccgcaaatggagaagctcgccttagaagtcgttatgtcggctcggaaattacgaccatatttatagtctcactccatcgtggtaatgcgatctatgccactccacgccatcccaagtcttagccgattttattgtggaactaccaacaaaggaagctcgggaaaagccgctcgacataaccttgctcttgcatgtcgacggcttgtcatcgaaacaaggtttaggtgtggacatccgtcttgcatcacccacatgcgaggttcttgagcagtctttcaagctaaatttcgaagcaaccaacaacgtagccgaatacaaagcactcgtggccgggctaaaactggctcgcatgctaaaaataggaaacattagagatttttacgactctcagctcgtcgctaatcagtttaacggggagtatacgacgagggatgagagaatggaggcttatctagctcacgtccaagatcaagcaaagtagttcgacgaattggaactaataaggaacaaggattccccgaggagaaaacacattagccgtcgctctagctgtgctggcttcgacttctgatccaaacttaagaagagtcatttcagtcaaattcatcgaaaaattgagcatcgagtttgaaaaggaagaacaggcctttcccgtgcagaatgtcacggatcacgagggcgtgttggaaccaaatgatagcttaggttgcgactttgagtggatagaacccatcaggagttacatatctgaggggaaagtgccctccgacggatgggaagctaggaaattgaaagctcaggttgcacgctttgtcctagtcgaggaaaagttattcaagtggcgtctatccggaccactaatgacttgcgtagaaaaagaagcagctcgcaaaattatggaagaaatccacagaggcttgtgcagaaattactccggaggaagggccttggccatcaaaataaaacgccatagttacttctggcaaaaaatgatcaaggactgcgaaaagttctccaaacgatgcgaaaaatgccaaagacacgcacccacgatccgtcaaccggtcgagctcctttcatcaattgcctcgccatatccattcatgcattggttgatggacatcatcggccctatgcacgcctcaaaaaagaagaagttagtcctcgtcttaaccaattacttctctaaatggatagaggccgaatcatacgccagcatcaaggacgctcaggtcaagaattttgtgagtttctgtgcctctatacacatgggctggatgctctcttctagggcccaatcaaatgtctcgtagttgttacttgtataacaaaagaaacaaaacaagaagagtatacaccacacacttcattgatctaactagtacttatactgaaacagtcacctcaacgtcaaatcttttacaaacagaccacaaagaacatatcggtgtcttaccaaacgagatcacagtgagcactgagcagagaacaaaagaaaaagaaaaaaattacagttggttctctgtatttacatcactcatgacaaagaaaccgatagttttgcctttaggaaagttatatccatgtattggtactccaatgatactgagaaaaccatgaatcaagtgaagggataaaagtttgacaagagcaaagtaccaagaaggatataggctgcacaatatgaacatatcaagtacccccatttactatgttttggagatccaatcaaagacgatgcaaaccagtaaagtggagggcttgctgacaagaaccttgttgcaacctgtaattaccacaacacaaacgtgaggacagtctcactaaaaccttaatctcatctaaaattatgtatattatattctgtttatgccattgaggattgtaacctggacatgcatgatgaagaacgccgtggttaccataaaactcaagtgtacgataaatgggaaaacatcagctgaaaggtatcctgatttttctggagccactttggtcccagtcacatccttcttactgctaggtttccgctgcctaatgtcatggtttcctactcaggaaaacagagagaatcactcaacgtttaattttggaactattatataacaacgatgaaactgataccttcatttgttgaagttttaacacttggttcaactgcatccttcagagaataaagtctggcagcagatctcttttctttctcggtggcttgaaaccccagcgatatgaagagctcaggccgagacttcatgtaactcataatcgaacacacagctaaagagagaattggggatgcgagcagaaagt

SEQ ID NO: 168378 - DNA, 290 bp, Arabidopsis thaliana landsberg
accataaactcttcttgagtttaggacaacgacgaagcggcagatccaacaaagcaagccatgagagaaatcgcacccgaaacaaaaacagtaaatatgaagaagcaaacggcaaaaaagccgataagaagccgaccatcgccgctttgaaagccatcgatgacggacgagagctggctaacaccactaaaagagtgaggagctgccagacgataagcccgcatactcgggatatggaaaccggaaaaaccttcggacgacaagagaattcatcaactttctctctctaa

SEQ ID NO: 168379 - DNA, 480 bp, Arabidopsis thaliana landsberg
atgatcggagccgccctgcgggcggtcaatcgccacgcggaccttgacggtgccttcagcagcgggcattcagcctgacccgatgagcacgcccttcgacgttcccccggatctgcttgcctggcacggcgacgtggcccgcgcacgccagctgcagcaagagttggccgcccgcgtgcgattgcaggacgacgccccgccaccgcgcctggtggccggcgtcgacgtcggcttcgaggaggacggcgccatcacccgcgccgccgccgtgctgctcgatgccgccaccatgcagccgctggccgaggtggtgacgcgcctgcccacgcgcatgccgtacattcccgggctgctctcgttccgcgagctgccggccgtgctgcaagcgctggcgcagttgcccgaagtgccggagctgatccttgtcgacgggcatggcgtggcgcatccgcgggggctggcattgccgcgcacctgggt

SEQ ID NO: 168380 - DNA, 777 bp, Arabidopsis thaliana landsberg
atgttgaagccttcgtgtcatgtaactgaccatatacacaaccttttctccaactctcgccggatttttgttccggtgcatcggcaaaccagacccatctcttgttttcagttaaagaaggaacctttacgggcaattctctctgctgatcatggaaacagcagcgtccgtgttgctgatactgtttccggtacttctccggcggatcgtctccggttggtcgattgatggaagatgggttttcttataaggagaagttcattgttagaagctatgaagttgggattaacaaaactgccaccattgaaacaattgctaatctcttgcaggtttggggattttgtgtcttgtgtgtactcaatatactaaacactattcttgtgtgttgcaatgtttgtttagttggttatgtctttgtgtgattgatgtttcgagtatggatttgtgtaggaagtggcatgtaatcatgttcagaatgttggattttctactgatggatttgctacaacacttaccatgaggaaattgcatcttatttgggttactgcaagaatgcacattgagatttacaagtatccagcttggtaaggctttgagtggtttgaggattttgtggtttggagttgaaagttttaagctttcttgttttggttataggagtgatgtggttgagattgagacttggtgtcagagtgaaggaaggattggaactagacgtgattggattttaaaggattgtgctactggtgaagttattggacgtgctacaaggttttg

SEQ ID NO: 168381 - DNA, 342 bp, Arabidopsis thaliana landsberg
ctctcagatttggtaaagttaccaacttcaaagaactcgaagagaccgtctctatagaaaaagctgaaatctttggcttcgttttcatcaattcgaaactcaaagttgtgaaaatccaaatgggtaatcattttctaacgttatctctgcttctcgtaacagtctgcgtttgcgtttctttcatcaccacgaagctaaaccctaaagaagcaatcgtatctgtctcttccgattctgagattcctactgaaattcatggtgtcaagatcttgcgtcaagcttcagataccaaactagctcaattaggcgttgcctaaagcccccagtcagtagctttctcat

SEQ ID NO: 168382 - DNA, 667 bp, Arabidopsis thaliana landsberg
  unsure (1)..(667): unsure at all n locations
aaagtgttaagatcattgattgaataacgcatagttaggattagatttcagaaatcaacaaaagttatttattttctganaaatgcaggacggaagctaccctggaacagggaaaatcagtgacataggtaaaggaaaaggtgaaggtaccactctaaatttacctttgcctggaggttcaggtgatattgcaatgagaaccgtttttgaagaaatcattgttccatgtgctcaacggttcaagccagatattattcttgtttctgctgggtgagtgagtttataacgtttttcatctatttttgaactgaatatatcatcgtattcttacaaacacttctgcttcattgctttaatctgcttaaggtatgatgctcatgtcctggatccactagcaaatttacagttcacgaccgcaacatactactcattggcaaaagatataaagcggttagcaaaagaagtatgcggagggcggtgtgtgtttttcttggaaggaggatacaatcttgaatcactttcatcatctgtggcagactcgtttcgagcattgcttggagaagatagcttggcatcagagtttgataacccagcttacttgtacgatgaaccaatgagaaaggtgcgagatgcaattcagagagccaaaagcattcattgcttataa

SEQ ID NO: 168383 - DNA, 920 bp, Arabidopsis thaliana landsberg
tgggatgcacatttgatcaccgtatagcagatgcttattccatgaacatgttcctcgtctcgtgggccgagatatctcgatccgatataccgatttcgtatgtacctttgctcaaaagatccctcttaaagccacgacgacccttgatcatcgactcttcaatagacaaactgtacatgcctataacgtccttgaccgttccacaagaaatcactaatcaagataatatcctaacaagccgtatctattacatcaaagcagatgtcttagaaaagtttcaaactctggctactaatggtaagaggaccaaactcgagtctttcagtgcgtttctatggaaactcttggctaaacacgctgcaacagagtcggtactcccgactaaaacctcgaaacttggcatcgttgttgatggaaggaagaaacttatggagcaagagaactgcaattactttgggaacgtcctctcagttccatttggagagcggagaatcgatgacttgatccacaagccattgtcttgggtgacagacgaggttcacaagttactggagagtacaatgaccaaagaccatttcttgaacttgatcgattgggttgagactagccgtccgataccagttatatcaaggatctacagtacaggatccaacgatggacccgctttcgttgtttcgtctggaaagagttttccagtggcccggattgatttcgggtggggctcgcctgtttttggatcgtaccatctcccacccgggagcagagctggttacgtaatgacaatgccgagtccggtggaaaacggtggctccggagattggacggtttacttgcatcttacgaaaggacagttgaggtttattgaacaagaggcttctcatgtgtttaatcctgttgacaacgactatctcaagatttaa

SEQ ID NO: 168384 - DNA, 3982 bp, Arabidopsis thaliana landsberg
gactattattgcttgtccttatggcttatgtttctttgttcaacaaagagtcgcaacgcggaactaattcccaactgaaccaatcacaattacttggatagggctggagtttttctgttcagctgaaagagattaatggtgttgggctttgttcttgatgtccgttcggcttggataatgcccattatcgattttagaggaaaggtcatcaagcccaatgcccaattttatttaacaaatttgaatccttctcaacttgttcttgttatttctcatcttgagtttgttatcaattcaacctttagtacaacaacgttaataaatagaagaaggaaatttccgatctttttcccgttggatttagtttctataaagaagttttgggcaatttataaaagaaataattcctaagatagaacacatttgtatgtttattcctagaatagaacacatcttttttttattacttagatgttttcagtaattatataattacaattaagactcctaactagttttaattaattattattatttaattcgtttttaactaaaaattaaatgaaaaaatagtgattatacatgtcatcattccatgtcattactataatctacgtcattaatcatcttcaaaccacataacgtttgggtttcttatttcttggctttactattcatcatctccaaaaaaaaaaaattgtcgctttcttcctctttctctctcgacggaacgaaatcgatttctttcgccgttttgctcttttctcgtctgttccggccgaaattcagacgccggagtcgcatttccgttagcgcgaagtcacatccgacatctaagttccggtgagtatgtttccattaagtaagactctgacatctaagttcaatcgcaagtgattcccgtcactgaaatcgttttccgatgcgtaacgatggtttttaaagctgggttttaacgtcgtcgttgattgacatatggtggtcgatttcttagatctatttgatttgacggctgagttactgtttgtttgccgactgatttatgatttatcaattcatccgtctctgagtttgttttatgctgtgactgagttatggtttaaccttacatcgatgtctgagtttctgttatatgacggctgagtttgtttatgttatggctgagtttctgttttgatatagctgagtctggtttatgttttaactgagctgttgttatgttatggtttgactgagtttctgttaaaatatggctgagttagatttatcttatggctgagttatgttatgtgtggctgagataggtttatgttatgactgagttatgttatctatggctgagttagatttatgttttgcctgagttatggtatctgtggatgagtttgttttatgttataactgagttatggaatgcttacggctgatttatggttatacagatgtctgaagaccaagcaagggagtaccctccaagactttaccaagagggggattctaatctggagggtaaaggcattaatcataatataaagctgggagagttccctgcaattagagaatcaataggaaaagaaatatgggcagaactgacagagacagagcttagattaattgctaagcttgttgatagtcattttctatggtctggtaagaccgtacattatctactatgcagacaactgagaatactgaagaaggagctttggtgtatcgtggctggtaaacccatccggtttggattgaacgaatttcatcatatcacgggtttaaatatagatgaactgcctacagaaaagtttgagcctgaagctgactacaaagcgttcttcagtgaattgcatgtgccaaccggtgaaggtcctaatctagatgaacttaggcagggcttagtaacgtgcagagcttggcctactgaaaagcgtagatggtttgggttattgactcttctatccattagactttttggcttgcatactaactctaggataccatttgagagtgccaaaagagttttcgacgacaaagccatgaagacttatccatggggtcgggcagcatatgaagcccttgtcgtctctataaagttgctgaggcctattggcaagacgtacaccgtcagtggtctggttttcgtgttgcaggcttgggcgtatgagtcaatcatcaccatcgccgagcgttttgggaacgttgttaacgcagatgagattccgttgcttagatggggtggcagccgtacccgtgcaactacagaatcggtcattgctgaagatatcaaagcgaatggtggtgaggtacgatttcggacaagaaagatgcagaaaagaagaagaagaagaagaataagaagaaggaagtagctgtcgaatctgatgaggacgaggatgttcgttctcgtgagcaggatggtcagggagaacagcagtcgctcgtggatgtggtgtccaacttgatctctcccttaaactcaaggtttgacaccgttgatactagcataaaagaaatgtcctcccgtctggatgtgattggagttcaagtagaatcgaggattgatgcaaagtttgaaaaaggtttgcatctattgagaacgaggtcaaacagattaaagagcatctgaagggcatagcttagtcagaattaaacactactagttatattagagctatgtttttacccaaaacacagctaggctaccctaagccccaaacccaacagacaccagaaggtccaaacaaacctacaaataaccaatctgctactagtcctcctccagtaagctaatcgctgagttattacttttatttagttacgactgacttatcttcatattatacgaccgagttataacctttatttagttatggctgagttatcttcatattatacgactgagttataacttttagttagttatggctgagtgatcttcatattatacggctaagttataacttttagttagttatgtttgagttatatttataaataggtatgagttttcattatttaatgcctgagttttctttacgtttatgcagtcgaaagaagttgtagtggtagagaaggatgctgatattgcagaggttggggttagtaggaattttgatggagaatttgctaaggccactgaaggaaacaattttgatattgatttcattgagaagtctcctggttcccgccgtttacgctctacgacggcggcgaggagaatttccaaagcaaaaacatcaccaaagaagaaaggcaatgttaaggagaaaatattaaatgagctaatcgtgaaagagccagccaaaagaggaagaaatgctgctacaaagccacctacaaaggtgcctccaaaggtgcttctaaaggtgacaataaaaaagccaaaatcacttgaggaaaaagccaaggaaaaagctgactgtggtacttcttctggccccaaaaataagcctgaggaagccaaggaaaaagttgacggtgatacttcttctgtccccaagaataagcctaaggaagccaaggaaaaagctgatggtgagagggtagctgatgatgattctattcttgatattactgaccagtgggtagttgaagataaagatgaggaggcagcatgctgcctaaatctgatgaaaatgaggaggaaaccatgaggccgcaaagagtaaaagctgctgataacaatgtattttactcattttaggtatatgtttagcatcatttatctgtgcatttgtttattgtatcatatcattttgcaccattttagcttattttgcatacttaggcatctaggatcatcttcatacgcattgcatgttttgttgtgttttcaggtgcagaaggagctaaaaaggattctactcgatccattcactcgatccaggcggctagagaagaggcatcatttcactcgacttctttactcgatccaggctagctacagaggaggctgcaattcactagacactcttactcgatcaaggca

SEQ ID NO: 168385 - DNA, 795 bp, Arabidopsis thaliana landsberg
attacgatgtttttctccaaggatcttccttctcctacttcggttttcacagcttacgcatcaatggcgggttacatgatgatgatacgatcaatggctcacgagctaatcccagctccactccaagatttcatctacaggactctccggtctctcttcttccgttcttcttcctccactttgactctaaccatcgacgacgacaacatgggtatgaacaacgagatctaccgagctgctcagacttatctctccaccaagatcagtcctgacgcagtcagactcagaatcagtaaaggccataaggataaacatgtcaatttgtatctcagcgacggagaaatcgtcaacgatgtgtacgaagatgtccagctagtatggaggtttgttactgacggtggagacaagaaaggaggcggcggaggagtaggaggaagaggaggaggaggaggaagaagaggtggtatggacgatgacggtaaaagcgagtacttcgagctgagtttcgacaagaaacataaagatttgatattgaactcttatgtgccttacatcgagagtaaagctaaagagataagagacgagagaagaatcttgatgctgcattctctcaacagtcttagatgggaatcagttattcttgaacacccttcgacctttgagacaatggctatggaagatgatctcaaacgtgacgtcatcgaggatcttgatcggttcataagaaggaaagagtttaacaagagagtagggaaagcttggaagaggggttacttggtgttggctcctcagggt

SEQ ID NO: 168386 - DNA, 1443 bp, Arabidopsis thaliana landsberg
atgggtggttgtgtctctgtccaagtatcatgcgatcaattgttgaaccatctaggtagatgcttttgcagaaaactttattatattcaaaatataaaggagaatctcacttctttggaggaagccatggaagatctcaaggcattgagagctgatctgctacgtaaggtgcagacagcagaagaaggaggtctacaaaggcttcatcaaatcaaggtatggcttaagagagtcaagactatcgaatcccaattcaatgatctagatagtagtagaactgttgaacttcaaaggttgtgttgttgtggtgttggctcgagaaacttaagattgagctatgactatggaagaagggtcttcttgatgttgaatatagttgaagacttaaaatctaaagggatttttgaagaggtggctcatccagctacgagagctgtgggggaggaaaggcctctacaaccaacgattgttggtcaggaaacaattttagaaaaggcatgggaccacctcatggatgatggaactaagattatgggtctctatggcatgggtggagtaggaaaaacaacccttctcactcggatcaacaataggttttgtgacaccgatgatggcgttgaaattgtcatttgggttgtggtatctggtgatctacaaatccacaagatacaaaaagagattggcgaaaaaataggatttaaaggcgtggaatggaaccagaaaagtgaaaaccaaaaggcagtcgatatactcaattttctaagcaaaaagagatttgtgttgcttttggatgacatatggaagagggtggaactaactgagattggaatcccgaatccaacaagtgaaaacggatgcaaaatagcattcaccactcgctgtcaaagtgtttgtgcgagcatgggagttcatgatccgatggaagtccggtgtttaggtgcagatgatgcgtgggatttgttcaagaaaaaagttggagatatcacattaagcagccaccctgacattcccgaaatcgcaagaaaagttgctcaagcatgttgtggtttgccgctagcgctaaacgtcattggagagacaatggcatgtaagaagacaacgcaagaatgggatcgtgcagtagatgtcttaacaacatatgctgcaaattttggtgctgtaaaggagaggattcttcctattttgaagtacagctatgataatctggaaagtgagagtgttaaaacttgtttcctatattgctctctgtttcccgaagatgatttaatagaaaaagagaggctgatagattattggatatgcgagggattcattgatggagatgaaaataaaaaaggagcggtgggtgaaggctatgagatactcggtactcttgtttgtgcctctttgttggtggaaggaggaaagttcaacaataagtcatatgtgaaaatgcatgatgtg

SEQ ID NO: 168387 - DNA, 1080 bp, Arabidopsis thaliana landsberg; identical to SEQ ID NO: 16520

SEQ ID NO: 168388 - DNA, 1022 bp, Arabidopsis thaliana landsberg; identical to SEQ ID NO: 17121

SEQ ID NO: 168389 - DNA, 548 bp, Arabidopsis thaliana landsberg
atgaaggaagacgaagtaaatcgatgccagattcagaattggtatccgagattcaaatccttaaccatcaaaaccaaatttcacaaacttccagaatcattcatcaactatctcatcgacgattctggtccgtttcttctccctcattccgtaacaaacgaagacgcaatgcctaacagagtccacaatttcgaagaagaagatgatttccaagtccccgaagaatcttcagatgacgaaccattgaatcgtccttcttttccagaactcgaaatcgagatcagagaatcaatcgaaaccctaggcggcacaattatcccgaagctgaattggagttcaccaaaagacgcagcttggattagtccatcacagaatctaagctgcacttgtttcaatgagattgctctcttgtttcgttcctctgattcgttaacccatgatctcttcaatgcttatgattcatgtagtgacacagtcttctcaaggccagaaagtttctaccagaagttagaaaaatggtacccttcgttgaagcctgagatggaatt

SEQ ID NO: 168390 - DNA, 614 bp, Arabidopsis thaliana landsberg
aaatcttgtagtgaataagtagtgtcttccctttgtcttggctgaattcggcaaaaacatcatcaatggcacatacaagccggttcgcttatataattcacaagaaagaggactaagaaacgctactacgtgtgaagttttcgactttaggaccaatgtttggaagtatattaccccttcttctccttaccggatcattgctttccatgatcctgtgtacgtagatgggtcgctgcattggttcaccaaatgcaaagaaatcaaagttctatctctagatcttcataccgagacttttcaagtaatctccaaagttccttttgacattgcaaattgtgacaacattgccatgtgcaacttggataaccgcttgtgcatatccgagaacaagtggcctgaccaagtggtatggtcgtttgattcatgcaacaagaaatggcacaaaatgtttacgttagatctgaatatattttctcatgggtttgggaagcactttttggcagtctcaccagtagcagttttggaaaagaagaagaaaaatggtaagttattgttatcttctaatctaatatataagcaacaaatggtggtacatgatcccgaaaccaaatctt

SEQ ID NO: 168391 - DNA, 4758 bp, Arabidopsis thaliana landsberg
  unsure (1)..(4758): unsure at all n locations
aaatcgcctcaccaaccgaccgtatcgcaggcgcattcaatgcaaggatcgcctggcatcttatcctgacacgcgtgcctcagtcggcaaggtcgaagtgatcgcaatcacttcgccctcccgctgactgacctgacaggaaaacagcgccgctcgcccctctccgactgctgtgccacccgccaggttgaggctgacagcagctgagttcagcctcaggcgcaacaggaagtccgcctcgcccgaccccaggactcgcccccgcctcgacctcggaaggtggtctccgcctcgcctgacccacagggcttggcccccgcctcggcctcggaaggtggtctcagcctcgcccgaccccagggctcggcctcaacctcgacctcggaaggtggtctccgcctcgcccgaccccagggctcggcctcaggagaagtctccgcctcgcccgaccttaagcctcggcctcgggaggaggtctccgcctcgcccgaccccagggctcggcctcaacctcagcctcaaaaggtggtctccgcctcgcccgagcccagcctcggcctcaggagaagtctccgcctcgcccgacctgggccttggaccgactacgctacaggggatacatcattaccctactcctagctagctgcctcaggctatgaaggaacaagaccggtgtcccatctaaggttactccggtaataggtaatgatggttccccgcgtgcgcccatgatgtcggattgctctcagctctcttacggaagcaggacaacgtcagcaaggactcgaccgctccgacagctgtccctccgccaggctccgccgctcctccgacagccacgacatcacactagcagggtgccaagatctctccggctgccacattggcatgtacttagggcgctactctccctccgctagacacgtagcactctgctacatccccattgtacacctggatcctctccttacgcctataaaaggaaggaccagggccttcttagagaaggttgaccgcgcggggacgaggacgggacaggcgctctcttggggccgctcgcttccctcacccgcgtggacgcttgtaaccccctactgcaagcgcacccgacctgggcgcgggacgaacacgaaggccgcgggatttccacctctctcacgcccgtctccggccacctcgctttccccccttcgcgctcgcccacgcgctcgacccatctgggctggggcacgcagcacactcactcgtcggcttagggacccaactgtctcgaaacgccgacagttgccggccaggtaggcgcacgatgcgtgttgacgagcagtttcccgtcaagctccagatgggcagtctccaacaacctctccaacccgggacggtgctccgtttcgggagtctggagttcatgtccctcaacggcagctacgatatgatactccttccaccgccgcgcgacgacgacaatggcggccgacaatccagccgccggcggcggaatcgacgacatcttccccgcatgatggaagaacgacattcgagctcgccccgtcctctcccccgccaacggaggaggaggccggggcaaccaaggccaagcgggaggccgcgcttcgtcgacttgcgagcgaatcgacgtccccaggcgcccaacggggggcacgtcgggcgtcgacttcgcgtttgagacgaaggcgagagccgtccccccgcgacacgccaatcccgagcaagtggacgacgcctagcgtgctccggagagcttgcaggacgtcgccctcctacctgagacagcggtgcaatcagtccccgacgtgactatgtcgctgctcgtcgaccaaaaggtaccgaccgattcccatcctacgtcatttcgactcggcctcaacccgcctagcaaccttgctttggcaggcgctctcattgaggcgagtgcaaccccaccggggtttcatatgcggtcgccttgggaccggttgacggacgtctcgacctacgggccctctgggtccgaggaagatgacgatcccagcatctgttgggatttctctggacttggcaaccccagtgccatgcgggacttcatgaccgcatgtgactacagcctctccgactgttccgacggtagccgcagccttgacgacgagggctgcggcccaagtcgcgaatgtttccacatcgagctaggggatcctccgaagcaaccatctcggcatgccggtggacggtgatctccctaggccggtgcctcgcgccgacatcccgcgggagctagctgtggtccccgctccggcggggggtcacgacccacaactcgagcaagtccgcgaggcgcaggccaggctcgacgagggagcaggagcgcttgagccgatccgtcgggacgtcggacaggcatgggtgggccaacccccagccggaaaaatacgtcacctgccccagggtctccagcaccgcgtcgccaacgacgtcagggtcaggccgccacccgcatccagcggggtcggtcagaacctggctgcagcagcgatgcttctccgtgcaatgccggagccatcaaccaccgagggtcggcgaatccaaggagagctcaagaatctcctggaaggcgctgcggtccggcgggccgagagctctgcctcccgaaggcaaggatacccctcggaacctcatgccgcgacttcccgattcatgcgggaagcctcggtctacaccgggcgcacgcgcaacaccgcgtgcgccccgggccacctcggcaatgagcaccatcgacgtgaccgtcgggcccacctcgacgaaagggtgcgccgaggctaccaccctaggatgtggggggcgctacgacagcggggaggatcggagtccttcgcccgaaccacccggtccgcaggccttcagtcgggccatccgacgggcgccattcccgacccggttccgacccccgactactatcacaaagtactcgggggaaacgagaccggaactgtggctcgcggactaccgccttgcctgccaactgggtggaacggacgacgacaacctcatcatccgaaacctccccctgttcctctccgacactgctcgcgcctggttggagcacctgcctccggggcagatctccagctaggacgacttggtccaagccttcaccggcaatttccagggcacatacgtgcgccccgggaattcctgggaccttcgaagctgccggcaacagccggnnagagtcgctccgggactacatccggcgattctcgaagcagcgcaccgagctgcccaacatcaccgactcggatgtcatcggcgcgttcctcgccggcaccacctgccgcgacctggtgagcaagctgggccgcaagacccccaccagggcgagcgagctgatggacatcgccaccaagttcgcctctggtcaggaggcggttgaggccattttccggaaggacaagcagccccagggccgccagccagaagacgcccccgaggcgtccactcagcgcggcaccaagaagaagggcaagaaaaagtcgcaagcgaaatgcgacaccgccgacgcggaccttgtcgccgccgctgagtacaagaaccctcggaagcctcccgagagcagccaatctcttcgacaagatgctcaaggagccgtgcccctatcatcaggggcccgtcaagcacacccttgaggagtgcgtcatgcttcggcgccacttccacaaagccgggccacctgcggagggtggcagaggcacaacgacgataagaaggaggatcacaaggcagaggagtcctcaaggtccacaactgcttcatgatctacagtgggcaattggcgaacgcctcggctctgcaccgcaagcaagagcgtcgggaggtctgctcgataaatggtgcggcgccagtctacctagactggtccgacaagcccatcaccttcgaccaggcaaccaccctgaccgcgtgccgagtccggggaagtacccgctcgttgtcgaccccatcatcggcaacgtcaggctcaccaaggtcctcatggacggaggcagcagcctcaacatcatctacgccgagacccttgggctcctgcggatcgatctgtcctgtgtccgggcaggcgtgcgccttttcacaggatcatccccgggaaacgtgtccagcccctcggacaactcgatctacccatctgctttgggaccccctccaacttttgaagggagaccctcacgttcgaggtggtcgggtttcgaggaacctaccacgcagtgctggggaggccaatgtacgccaagttcatggccatccccaactacacctacctcaagctcaagatgtcgaggcccaacggggtcatcaccgtcggatccaatcaccgccacgtttacgagtgcgacttggaatgcgtggagtacgccgaagccatcgcgatgtgcgaggccctcatcgccgacctggattgcgtctccaaggaggcgcctgacgcgaagcgccacgccagcaacttcgaaccggccgaggcggttaagtctgtccctctcgaccccagcgccgacgctggcaagaaagttaggataggctccaagctcggccccaaataggaatcagtgctcgtcgactttctccgcgcaaacgctgaaatttttgcgtggagtcccttggacatgcccggcataccgagggatgttgccgagcactcactggacatccgagccggtgcccaacccgtgaagcagcacctgcgccgttttgatgaagaaaagcgtagagcca

SEQ ID NO: 168392 - DNA, 1026 bp, Arabidopsis thaliana landsberg
agtatagaaattctatgcgtatttgatttgcaattggtttctggcctcgatgatgataaaatcttgagcttttgagtgcggatttaggtatccaatttaccacattccctctcggaagaccgataaagatttatcgacatgtttcttgagttatcatactttatcttcggctttccaaggtatttgtatatactgttgttatagcatacaacttgcaaggatttttcttgttataaaatttctcagctttagacatatcttggtgcaaactttgaaacaactagctttttgatgttcgacttcataggtaacttgatagagggagacgatgagattaacgaaaccatgaaagaagaaacattgtgttttgatgaaggaccggtgaccaagagaatgccattgcctccgtttggtgtaacaacttacaaaatgcaaggagatctttgggggaagacggggtttgaccaggaccggttgctttatcttcaaagcgctgcggattcatggctgaaacagctcaatgttgatcaccatgactataacttcttccttaactcaagcttctaaagatcaatcgggtcgttcgtatgtttatccttctccaaaccttaaacaaaaaaaaaggacctcataacccttttctttgttgttttcaagctccttttgttcctctgtgtatcccgttctttctgtttttgtctggctcgttgtgttgttttaggtagcaaccgccatcgcggagtattttttcctgttgcaagccagtcatggaagtttctaagaagaaaacagagcttttttttctttttttttaacggtgttgacaaaacaagaaagttgtgttcttttcttgcgtgagagatcatctaaatggaccttgaacagaggactctgtttggtctagctcagcttaaaaatataaaaaaatctgtctttcttgtatgtcggtatgagtggaagaagaaaactcttttttatagatttgatatgtcctttcgtttgttttcaagattttttagtgttgaa

SEQ ID NO: 168393 - DNA, 3235 bp, Arabidopsis thaliana landsberg
ccacacaattgggcttgaaataatatgggcctcatatccatttatttctactatccttttttctcaacttctgctcattaatctactatgcatggttcagacactgttcaaaggttcttaccaaaatttcctcactcttcagttttctttggccaaaaagagttgaatccaattttttttgtttcagttgtggaaatccaatcagtattgtggcatctgcaagagtctctttgaccatgctcggtgaaatactgacctgagttataaactattacatctacaatatgtagctgacgtgatttgatgtattacgtgtgttgtgatgggcgtaacgtatgggttcatgctgggtgcgacatcattacgaatgagcgctttaaggtgcagttatacatctccgtgcttcttaacttttgattctaagtagttaggacaactgccgaatgactgacagttgtaatttggttatcgttttaaggaactggagcacaacaattactattgccctgattgtaaagtcctagagagtctcttcccagatacaacacgcagtggttgcacgcctctctggatccgtaatgccgcagccaagcgaggaagtcgcgaggacaggtctcgatgagtctacgattgagtcatacaagaaagttgagctaggggagagtaggagactcccgaccgggtccagtgatgttgtatgtcccatttgtttgtcggaatacgcaaccaaagaaactgttaggtgtttacctgaatgtgaacattgcttccataccgaatgtattgatgcgtggctcaagttgcatagttctgcccggtttgtcggcgcgcgattaattgtttttaatagtcttgtaacgtttgtatagaatttggaatttggatctctctataattgcattaaatactatgtcaaaaccaaacccaaacccaaacgccaagagaaaagtaaaaatgccaatgagagaattcgtagattttcttcggcagattctatgaaaccacgaaaatgggaaagtattgcaaattaatttcatataaacattttcatcgttttaaagttgttaacaattttagtttacaaataatagcagattacattgtttctattaggaaagaagatattacatataagcattcgactctttgtaaatatcctatagattattctctaaatcttgtttctctattcaactctttgtgtatattctatatgagttatatatatatatataatatatatatatatatatatatatatatcaaaaagaataatcaagccttgctttagaagaaacctaaggaagctgaccggagaagacggaagcaaaacaagtcccaaacattgtctgtgagttacttcctttgactcatctctcaaatatttaccgctttatttgcttcatctcgattcttctctgcttctttctctactaaaggttcgatctttaatttcccctaagatccaatacctaatttattcactcggaacttgaaaactgttgatatatgttaaaggatcaaaaatttggtagtctaattcttattccccatagatttgtatttgcttcagggttcttgtttagctatctaagtcagttcgtttaaagctttattactaattcgtgtgtttacttatgtctgaaattcagtttcttattcatatctttctttttttgtttttgtttcagagatggctgccaataaagatgaattctccgtcaagcaaatctttccaaagctgggaggagaaagaggagctcgaaaccctcgttacggtccaacttcttcacacgacctcgtcgaacagatggagtttctttacgtacaagtaatccaagccatcaacaactctgttgtaaaccctagtgcccgcatatgttgccccgtcgtcgaaatcactctcgggaactacaaatcctctaccaaaaatctgccaatgggaccaaatatggattggaaccaagtctttgctttcgacaaatccaaaggtgatgtcttgtcggttactcttaaagacggtccgaccaataccgtaatcaacaagcgcaacttcaagctggcctcggaaattccgactagggttcctcccgatgcaagaatcgcaccgcagtggtactctatgcataataccgaaaccgacttttacatggagttgctgatgtcagtttggttcggtacacaagttgatgaggtttatccagtggcttggtctcagacgcctgtgaagtgtgtgcctctcgcgtgatcaacacgcgacctaaggtctacctagctccaaggctctgttatgttagggttaccattgtttctggtcacgatttgatttccacggatagaaaccggactccttcggtttatgtgacagctactctaggtcaagtcactctaaaaacggaagtttctttcgggacgaacccgtcatggaacaaggatctaatctttgttgcatcagagccgttagaaggaactgtctacattaggttaatagacagagtcgacgatcaacacgaagaacgcataatagggaagttagagaagaagctctcagagatgactccgctcaaagttccaagttccgcaccggctttgttctacgacattgaggtcgaaccagcaggtgattctaggaggttcgccagcagactcaagatgaaactagccactgatcaagcttatcacgtcgctgaggaaagcattcaatactcgagcgactatagaccttttgttaaagggttgtggccatgtctgctcgggaaattagaaattgggattttgggtgcgacgggtttaaagggaagcgacgagagaaaacagggcattgacagttatgtagtggctaaatacgggaataaatgggccaggactcgaaccgtggttaatagtgtcacacccaagtggaacgagcagtattcgtgggatgattacgagaagtgtacggtattaacccttggaatctacgacaatcgacaaatctttaaagaggatcaggcgaacgatgttccgatcgggaaagtgaggatttcattgaaccgtgtagaaagtgactggatttatgcttgctcgtatccaattctgaagttgggaagcagcggactgaagaaaatgggagagcttcagctcgcggttcgctttgtttatgttgcgcaagggtatgcacggtaatcagctcctttccgttggttgttaccgaaagctcattcaaatctccagtgtcggtgtaacagatcgaaga

SEQ ID NO: 168394 - DNA, 1733 bp, Arabidopsis thaliana landsberg
atgggcaaacagagaagaaccatgatctcatttactctgtttctcacattgacaatgatgtcatcactcatcaatggcgataccgactcaatccaactaaacgacgacgttttaggactaatcgtcttcaaatcagacctcaacgacccattttcacaccttgagtcatggaccgaagacgacaacactccttgttcatggagctacgtcaaatgcaaccccaaaacatctcgagtcatcgagctttctctcgacggtttagccttaaccggaaaaatcaaccgcggaatccaaaagcttcaacgtttaaaagtactctcactttccaacaacaacttcaccggaaacatcaacgctctctcaaacaacaaccatctccaaaagctagatcttagccacaacaatctctccggtcaaatcccatcttctctcggttcaataacctccttgcaacaccttgacttaaccggaaactccttctccggtacactctctgacgatttcttcaacaactgttcctctcttagatatctttctctctcccacaaccacctcgaaggtcaaatcccaagtactctgtttcaatgctctgttttaaacagtctcaatctttcaagaaaccgtttctccggtaaccctagtttcgtctcaggaatctggagacttgagaggttaagagctttagatctatcttctaactcactttctggttcaatacctttggggatactctctctacataacttgaaagagttgcaactacagaggaatcagttctctggcgcattaccttcagatattggactctgtcctcatttaaacagagttgatctaagttccaatcgtttctctggtgaacttccaaaaactcttcaaaagctgaaatctttaaatcacttcgatttatcgaacaatttgctctccggtgatttcccgccatggatcggtgacatgaccggtttagtacacttggatttctccagcaatgagttaaccggaaagcttccttcttctattagtaacttgaggtctctaaaggatctaatcttgtctaagaacaaactctccggcgagctaccggaatctctggaatcatgcaaagagcttatgattgttcagcttaaaggcaatgacttctccggtaatattcgtgatggtttgtttgatcttggtcttcaagaaatggatttttcgggtaacggtttttccggttcgttcccgagaggctcaagtaggcttttcgagtcactcataaggctcgatctttcgcataacagtctcactggaagcatacctggtgaagtaggactcttcatccacatgagataccttaatttgtcatggaaccatttcaacacaagagttcctcctgaaattgagtttctacagaatttaacggtattggatcttaggaacagtgcactgattggttcggttcctgctgatatatgtgagtctcagagtcttcagatacttcaactggatggtaactcactaaccggttctataccggaaggaatcggaaactgctcttctcttaaattgttgtaagtctctgtttcgtatatacatttttgcttcattgcaaatgttttaccctaacaattacaagttttcttgttgcaggagtttgtctcataacaatcttaccggtcctattcctaaatctctttcaaacttacaagagctcaagattcttaaggtagagggtaataagcttagtggagaaatag

SEQ ID NO: 168395 - DNA, 484 bp, Arabidopsis thaliana landsberg
tgaatgtattgatatgtggttaaaatctcattccacttgtactctatatagatatctcgataagcctctcgccgggaatgaatcaacggcggcggcaagggagagggaagtagtgattgcggttaaatctgatccggttttggtaattgaaccgagttctagctctggattgacggatgaaccacatggatctggatcttctcagatgctgagggaagattccgggagaaaaccggcggcgattgaggttccgaggaggacttttagcgagtttgaagatgagttgactcggagagactcgccggcgagtcagtcgtttaggtctccgatgagtcggatgttatctttcactcggatgttgagtagagatagaagatgcgcttcgtctcctatcgccggagctccgccgctatcgccgacgttaagctgccggatacagatgaccgagtcagatatcgaacggggaggagaagagagtaggtga

SEQ ID NO: 168396 - DNA, 1341 bp, Arabidopsis thaliana landsberg
  unsure (1)..(1341): unsure at all n locations
atggcagaagcaaggtctggttctcttgagtatacacccacatgggtcgttgcgtttatctgtttcatcattgttctcttatctcttctcgctgaacgtggtcttcatcatcttggaaaggtccaatatcactatctctgtttgtagtaatcttgaggttttaagttaaaatctttttccaactttccgttctctctgtttcagtgtctgaagcgtaggcaacaagatgccttgttcgaagccttgcagaaactcaaagaaggtattgtacttcttccctaaacatgaaatggttgatttgattacacctgacacctgaccatattgatgtcctgacacagaattgatgcttcttggatttatctccctgatgttaacggtatctcaggccgcaattcggcatatctgtgtcccaccagctcttgtaaacaacatgtttccctgtaagaagccattggaggagcatcatgcgcctaaatcatctcattcgattatcaacaatgcacgacatctcctttcaacaggagaaagtccagaccattgtgcagccaaggcaatcattctttgctgttttgctagtttcctttctcttactggatctctttctattaaccattgatctcttggtatggctgcaagggcaggttccattagtatctgtgaaagcgttgcatcaactccatatcttcatctttgtgctagcggtttttcacgtcatcttctgcgcctcaaccatggttcttggaggagcaagagtaataccacttgcttttatagctttttgctcaagttaccaaacaacattaaacccctttatttcaaaagctggctctgattaattttattgatgtgaaataatatgtagatacaacaatggaaacattgggaggattggttcaagaaacgtccttctcaaaagggtgagcgagattccacaatagtaattaacagttactttgtaccttaacacacgcaaagtacataacataatgtcgcaggcnnnnnnnnnnnnnnnnnncatgctcatgctcacgagttattcagtgcaaatcacgagttcttcgagatgcatgctggaggattttggagaagatctgttgtcatcagctgggtggtgagtaatggatatatatactactgccaaaagtataacacatgaatcaaattatattctaatgagattagccaatgtgtactgtttgttgcagagatcattcttcaagcagttttatggttctgtcaccaaatcagaatacatagctctgcgacaagcattcatcatggtcaaacaaaaactgtcttattccaacatcttatttaggttactaaatgtcttgtgtt

SEQ ID NO: 168397 - DNA, 2187 bp, Arabidopsis thaliana landsberg
agtccctcgcccgaaccaccaggtccgcaagtcttcagtcgggccatacgacgagcgccgttcccgactcggttccgggccccgactaccatcaccaagtactcgggggagacgaggccggagttgtggcttgcggactaccggctggcctgccagctgggaggaacggacgacgacaacctcatcatccgcaacctccccctgttcctctccgacgttgcccgggcctggctggagcatctgcctcccgcgcagatctctaactgggacgacctggtcaaggccttcgctggaaacttccaaggtacgtacgtgcgccctgggaactcctgggatctccgaagttgtcaccagcagccaggggaatccctgcgagaatacattcgacggttttcaaagcagcgcaccgagctgcccaacatcaccgactcgaatgtcatcggggcattcctcgccgtcaccacgtgccgagacctggtgagcaaactggggcgcaagactcccaccaaggcgagcgaattgatggacatcgccaccaagttcgcctctggtaaggaggcggtcgaagccatcttccggaaggacaagcagcctcagggaagacaaaaggaagacgcccccaaggcgtccgtctagcgtggctcgaaaaagaaggccaagaggaaggcgcaagcaaagcgcgacaccgttgacacggatctcgtcgctgctgccgagcacaggaatcctcggaagcctcccggaggagtcaacacgttggacaagatgcttaaggagtcgtgcccctatcacaggggtcccgtcaagcacacccttgaggagtgcgacatgctccggcgttacttcatcaaggcgggacttcggcagaaggtggcaaggaccaaggcaacaacaagaagggggcgacaaggaagaggagttcccggaggtccacgactgcttcatgatctacggcgggcaagtggcgaatgcttcggctcgacaccgcaagcaggagtgtcgggaggtctgctcggtgaagttagaagcgccggtctacctagactggtccgacaggcccatcaccttcgaccaaggcgaccaccccgactgcgtactgagccgaggaaggtacctactcgtcgtcgaccctgtcatcggcaacgctaggctctccaaggtcctcatggatggaggcagcaacctcaacatcatctatgccgagaccctagggctcttggggatcgatctgtccacaatccagtccggtgcagcaccttttcacgggattatccccggcaagcgtgtccgtccccttgggcaactctaatttgcccgtctgcttcggaactccctccaatttttgaaagaaaccctcactttcgaggtggttgggttccgagggtcctatcacgcggtgttggggagaccgtcgtacgccaagttcatggccgtcttcaactacacgtacctcaagctcaatacgccgggccccagcggaaccatcaccgtcggatccacataccgccacgcttacgagtgcgacatggaatgcgtggagtaccgtgacgccatcgccaacctggatagcctctccaaggaggcgcctgatgcgaagcgccacgccggcaacttcgaaccggccgaggcggttaagtccgtctccctcggccccagcaacgacgccggcaagaaagtcaggatcggctccgagctcgaccccaaataggaagcagtgctcgtcgactttctccgcgcaaacgccgaaatttttgcgtggagtccctcggacatgcccggcataccgagggatgtcgccgagcactcactggacatccgagccggagcccgacccgtgaaacagcacctgcgccattttgatgaagaaaagcgcagagccataggcgaggaggtccacaagctaatggctgcagggttcatcaaagaggtattccatctagaatggttagctaaccctgtacttgtaaagaaaaaaggggggaaatggaggatgtgtgtagactacactgggctgaataaagcatgtccaaaggttccctaccctctgcctcgcatcgatcaaattgtggactccaccgctgggtgcgaaaccctatctttcctcgatgcttattcaggctatcaccaaatcaagatgaaagaatccgaccagctcgcgacttcttttatcacaccttttggcatgta

SEQ ID NO: 168398 - DNA, 2821 bp, Arabidopsis thaliana landsberg
gatttaaaaaaaaaaaaaaaaccataatagaagaaatcctcagtaagtcataactaaaaggtgccgcgtttatttttttccatcttaagggtatcatcgagaaagagaagatcgatgctttcaacgctccttactatgctgcgagctccgaagagttgaaaatggtgatagagaaagaagggtcattttcgatcgataggcttgagataagtccgattgattgggaaggtgggagtatcagtgaggagagttatgaccttgcaataaggtccaaacccgaagccctagctagtggccgaagagtgtctaataccataagagctgtggtcgagccgatgctagaacctactttcggtgaaaatgtgatggacgagctttttgaaaggtatgcaaagatcgtgggagagtacttctatgtaagctcgccacgatacgctattgttattctttcgctcgttagaaccggttgatcgtgttataacatatgccaatatacatgtctttgggcctacaatgacatgatttggtagttttctaatcaagcatatgtaatataatttgcttcgagaataaaataataaaataaagtgtgatgttacggtagacccttttttttttttcttcatttacggtagacctatagtattaaaacaaatagaatcagctggttcggaccttgaaatgagagagcttggatgcatgtagacgcattagtcgtgaattattcaaatagaactaccttttgggcaatcactatttgttcttctttttgcttttcctttataagatgcaacattaaggcggaatgtgacgtgagaatgttaaaagtgatcatcactttaacttgccacttaggagttgtgcctcaacatttggaattcaagttaatcatggccactcgtgagtcgtgagaatgtagggcaataccgcaacagcttctcttcaccgttcacgtgtctcccaaattataatttttctatttttgtatttctgttgttccttttgtttcaactttcagcgcatggcgtcacctcccatgaccaagacatttcttaagaagcgagaaaattccataaccaaaacatttatttatagccgttcaaatgtttccacatgctcatgatttatttttaatctgccaaggatcgtgattagttgcacaatacgtcaatactgttgcctctgtattctgtaacacactaaccctagtctcgagatgaattttttgtatcactcaactaatataaatatcaagaaaataattacagtagtttgatataccgataatttttcatgcatcaagaaaatgttttttttttgctaaattatatcaagaaaatgttatacaccaaaatttaccttgaattaaacaaaaacaaaaagaaaagtgtttttttaaaaaaaaaaactttgagacgttatattagtcacttggtttgatataccttatttgtatagccagcctcgattgatttatctgtaagaaaatacatatacacacacatattcaatagattcattttagtctaaagaaacatcatgaggagcaaaaaaagatcaacaccccactcactcgttacaaaaaatatctctctatatttatagattataagctcgaacaaagattgtataccaaaatttagaactaaattaaaccaaatggaacatctttgcctctgtcttgtcctctgcgctgcgatgctaacacttggaaaaattctcaaaattatgttccaagatcgaaagaaatcaacagctgatattcctccgggaagcgatggttttccggtgatcggagaaacacttcagtttatgctttctgttaacagcggcaaaggcttctacgaattcgtccgtagtcgtcgtatcaggtaaacgaaagaagcctctggcccatctagaaggtttccactttacatgatatatacttttgatatattacaggtacggtagttgctttaggacaagtttgttcggagagacacacgtgttcctgtcgacgaccgagtcagctcggcttgttctgaacaacgactcagggatgttcacgaaacggtacataaagtccataggtgagcttgtaggtgaacggagccttctatgtgctcctcaacaccatcacaagattctccgtagccgtttgatcaacttgttctccaaaagatcaacggctctgatggttagacactttgatgaactcgtcgtggacgctcttagtggatgggaacactgtggtacggtggtcttgctcacagatttgctccaggtttgtttcacatgtttcgttgtattgggcctatttaaagccttctctctttcggttcatagtttaaatggatcatggcccagttttctactcgtataaatagaaattctgaaatgactaggactataaaaaggactatgataaattaactttagtcaactcaaaatttcatttatttttcttattgaaggcaaatcttaactgatgttgcagataacattcaaagcaatgtgtaagatgttagtaagtctagaaacggaagaagaactggcttccatgcaaagagatgtgggctttgtttgtgaagccatgcttgcttttcctctcaatttaccttggactagattccacaaggggatcatggtacgtactacgtagtttcaattaccctattttagatatcatactatatacaaatctagaatttaaattgaatgtggtttgattcatgagaagtgtgttgagtgatgcaggctagaggaagagttatggagatgttagaaaagataattagagagcggagaaaatgaaataaatagtcataataatcatcat

SEQ ID NO: 168399 - DNA, 1624 bp, Arabidopsis thaliana landsberg
gtcgtatacgggtacagtcaaataacccgacccgaaatgctcaacggatctgcacggacgttcgcatcgacgattcacggctttcgcgaatcgcatcacgagccttccttctctcctacgcctctttcatcaacccttctctgcgaatccaattctggtatttcacgattctctttcgactacgcccaatcgcaattccagccgtacgaattttatatattgattatgatcttgatccttaccttttcgtcgtttccttgatcgaatttatgttgatttatgctgcgaaatcaaaattatggatacagagtaattttgtatatatggatgtgtaggagctaaaattagcaaacaatacgtaaagtaattgaaatcgaaatcataaacgtttaaggaaagaggtttttactaagtctctgaataatctgattgatagcttgtggtcaatggatcagataaaagtttgtaaagaatgacaaagaaaatgagaagagtgggcaagtacgaggttggtcgcacaataggtgaaggaacctttgctaaggttaagtttgcgaggaacacagacactggtgataatgtagccatcaaaattatggctaagagtacaatacttaagaacagaatggttgatcaggtatgttctggattgttttttacatggaaactaaggttgttgcgtcaatggtatgatctttgatttcgtttaaagctcttttacagataaaaagagagatatctataatgaagattgttcgtcacccgaacatagtgaggttgtatgaggtatgtttgtttgtttccatgcatctgcgaaattttatctctgaagtgtttttgcatcattgttcttctgtcgttttttggtgattttcccgatgtaggtgttggcgagtccttcgaaaatatatatagttttggagtttgtgacaggaggagagctctttgatagaattgtaaggaatttccatacttgtagcgtccattagttaaaacctctctacttaattttttaatatatgaaatctttcatgcaggttcataaagggaggcttgaagaaagtgagtctcggaaatactttcaacagcttgtagatgccgttgctcattgtcactgcaagggtgtttaccaccgtgacctaaaggtaaagacgtgtttttgtttaccaatattcctcagaatatctcactgcgttgcaatccagacttgatatttttgtgtcgctatgttatgttatctagccagaaaatcttttactcgatacaaatggaaatctgaaggtttcggatttcggactcagtgcattgcctcaggaagtaagtgctcttatctctgcttcagcagtctgcttacgtggtcattaacttgttatatactcaaatcagggagtgatacttctgcgtaccacatgtggaactccgagctatgtagctccataggtacttagtggacagggttacgatggttcagcagctaatatttggtcttgcggggttattcttttcgttatataggctgcatacttacccttttctgagacggatcttccagggaaaaacaggaaagtaagtaacatatcgtccggggacaaatcataaattccacgtcatggcttttgtcaaa

SEQ ID NO: 168400 - DNA, 567 bp, Arabidopsis thaliana landsberg
agaatgaagctatcatcaccaccagttaccaacaacgaaccaaccgccaccgcttctgccgttaaatcttgcggcggaggaggtaaagaaaccagctcatcgaccacgaggcatccagtgtaccacggagttcgcaaacgccgatggggaaaatgggtttctgagatcagagagccccggaaaaagtctcggatttggctcggatcttttccggtgccggagatggctgctaaagcctacgacgtggcagcgttttgtctaaaaggtagaaaagctcagctgaatttccctgaagaaatcgaggatctacctcgaccgtccacgtgtactcccagagatatccaagtcgcagcggccaaagcagccaacgccgtgaagatcatcaaaatgggagatgatgacgtggcaggaatagacgacggagatgatttctgggaaggcattgagctgcctgagcttatgatgagtggaggtgggtggtcgccggagccttttgttgccggagatgatgccacgtggcttgtcgacggagacttgtatcagtatcagttcatggcgtgtctgtga

SEQ ID NO: 168401 - DNA, 608 bp, Arabidopsis thaliana landsberg
attccctccttcttggttcaatatgtcggatgagttgtgggacgagattcagaacttggaactaggtcaagaagatccaactctctttatacctcatgaggcttatgtgatggtggaggctgccaatagactgagtatgatagctaggtctctgaatccaagagtcaaaaacctcaattatgttgttgtagccttaccaagatcaaggggattgacgactcaaattcatggtagagtacttgatgctacttatgttcagtttctttttcaaaatgaaattgatctaatgatggtgcaaagacgggagccatggctctttaacaattggtttgtgcagctactagatgggaggtggctccggctcataactttgtcacaacaatagatctgtgggtgcatattcgtggaattcctctgtcttatgtttctgaagagacggttatggagattgctcaagacctgggtgagatcattatgctagactatcatgatgcaaccttagcacatatcgcttatattagagtgagggtgtgttttggtattacggacagactaaagttcttccggagaatcatctttgattcaggtgaaactgcaaccataaggtt

SEQ ID NO: 168402 - DNA, 452 bp, Arabidopsis thaliana landsberg
ctcaacaatggagaaatttgcttcggaatcagaggcattagcatatatgttggcagaggttcttgcagaaaaagcaggacaaaaatcaagtttcttcaaagaaaactgtgtgagaaatacatgttatctaaggatgaaccgatatccaccttgtcccaaaccatcggaggtgtacggattaatgccacatacggacagtgatttccttacaatcttgtatcaagatcaagtcggaggactccaactcatcaaagacaatagatggatcgctgttaaacctaatcctaaagctctcattatcaatattggtgacttatttcaggtaattaattaagcttttattatgtcattctaccattaccattatatcattatccggaccttacaaattagtttggtattttatgttttgatatggtttggaaggatttaaacaatttgttcatacgcat

SEQ ID NO: 168403 - DNA, 524 bp, Arabidopsis thaliana landsberg
tatccgggctgataatgatttttgccaagcgaagggaggatgcttacatgttttctgagatggtcaggggcttcggaggcgacttcaccccaggcacgtcaggtcaatccataatgccaatccacgtgatgatagaggaagtcaaccccacaggcaacagcacagctcccagtcatcagggccacaacagatctccttcaggccaccagccccaagaggcagagggggcagaagcttcggacgaagatacagagatcagcccagaagactatattgcttattctgcggcgaggacaaaaaagagattgtcgaagctgagccacggcagaatcaaccgaagcaggtcctacatactgcgtcgtgcgattctccctacatcctagattatgtaggtaaccaacagcctacgacctctgtcgcttcggcaaaccactctcaagcttcctgggtcagctcccaccaccaccacctttaccacctactctgacctgaagccagtagccagaagggcaccagcacgctca

SEQ ID NO: 168404 - DNA, 974 bp, Arabidopsis thaliana landsberg
acacagagtctccgtcgtcatcgtcgtcgtcatccctagaagatttcattctctcatacaaaaccttaaacgacgcatgtccatattcaaagttcgctcatttaacagcgaatcaagcaattctcgaagctacgaatcaatcaaacaacattcacatagtcgatttcgggatttttcaaggtattcaatggtctgctctgttacaagctttagcgacccgttcttctggtaaacccacccggatccggatttcgggtatacccgctccgtctctaggagactcaccgggaccgtctctgatcgctacgggaaaccgtctccgtgatttcgcggcgattttggatctcaatttcgagttttatccggttctgactccgattcaattactaaacgggtcaagttttcgggttgacccggatgaggttttggttgtgaattttatgaatgagctttataagcttctagatgaaacagcgacgactgttggtacggcgctccggttagctagatcgttaaacccgaggattgtgacgcttggagaatacgaagtcagtttaaaccgggttgaatttgctaaccgggttaagaactctctccggttttattccgcggtttttgaatcgcttgaaccgaatttggatcgagattcgaaagaaaggctgagagtggagagagtgctgttcggtaggaggattatggatttggtccgatcagatgatgataataataaaccgggaacccggtttgggttaatggaggagaaagaacaatggagagtgttgatggagaaagctggatttgagccggttaaaccgagtaattacgcggttagccaagcgaagctgctactatggaactacaattatagtacattgtattcacttgttgaatcggagccaggtttcatctccttggcttggaacaatgtgcctctcctcaccgtttcctcttggcgttgactacttggtccgata

SEQ ID NO: 168405 - DNA, 518 bp, Arabidopsis thaliana landsberg
atgttcgaagatattctttctattaaatatccaggattgaatgaaaaagaactcttcttgaaaagaggcgaggaatatcatgtgtgggtgaaagattatgtatgtctaaatagtttatctatatattatttgcatttatttattgttattcttatctatcatgatgtttatttcaaaatttgcatacatgttacatattggaactctagtaatccatttccaacttgggttcaagagatagtcgatggacctttacacaaagtcaaaacatggccaatgtattttacaagaggctatttgtttcatacgcaaagtcatggagctggacgtaagacttgtaactatggtgtatgtgtgaaaggtgaaaattatacggatgcatctgacgctgcagatttttatggaaacttaactgatatcatagaacttgagtatgaggggtggtcagtttgaaaatcagacttattaatgttcatggtatgaccctaaagctcgagaggtactcggaggagcaatag

SEQ ID NO: 168406 - DNA, 531 bp, Arabidopsis thaliana landsberg; identical to SEQ ID NO: 58485

SEQ ID NO: 168407 - DNA, 2285 bp, Arabidopsis thaliana landsberg
ctaaacctctcggcctccgcactatcttcttcatatactcgacttgaacatcttatctcacacatctaacttttcgcaattctgtcatttcccatcgtcactcattgcaattcaagtcctcaagtgtccgattccatcactcgatcgccgctgctctcgtctctttgccaccacatcctctcattcgtctctgtttcactcgaccgtcacattcgcttcactcgacttcaccacaagaacacctctgcctttcaagctcacagtcactcgaccacgagttcaccaaaccgaaaaaaagaagaaaaaatttggtacactcgatcggtttactctgttggattgtgtttttggttttgttggaactaacgtattaacgttaattttttagttacatttgttttcaggtttcatcatgagtaactacagtggagaatcctctttggaccctgattataatgtggatgaagctaagtcctggtccgctagaccgagagagcaacatgtttaccagagcttcagggatgaatttgaacgctctacagcccgacgtaatcagagaagtgctgaaatcgccagaggaaagagggcgatgtcgagtagatatgagctgattgatgaggatatcgaaactgagtatgagccagagtcatggcgcaaggagacgaagctgctgaacaaacccgacgaggttacagtggaggagtatatcaggttctttgagatgaatgacttctggggaacgaggtatccgtgctatgagactttagcccagctggggttactggaggacgtgcagcatctgttcgagaagtgtcacctggagacactcatgtcttatccttaccctgcctataaggaggagacaatcgagtttctttccacgctgctagtggagatgtatgaggcactaacagactttgagctggataccatggggttaggcttcttgacattctcagtggatgaacagcggtatcagctttcgatcaagaagttggaagaactgtttggtttccctagtggaagggaaccaaacccaggtttgacagagaggagctcaaggatttgtggaccactattgtgacaatctacgctaactctgcgcggtccaagagcaaccaaatcaagagtcctgtgattcgctactttcagcgttcaattaccaatgttttgtactccagagagtctacaggcaccgtgtctaacacggacatggagatgatagattccgcacttacaggaattctccgccgtacaaagggaaagaatgtcctgagaggcaatctcaatgacgcgccaccagtaatgcctctgttgatccacctgtgtggatacaggaagtgggcgttgacaaacggcaagaagaaggtgagaggagcactatgcgtgggtggcgttgtgacgccaattctggaagcttgttgagtactgctcaaggaaccagagttagcaccgagaatgatggacttggatcatttgcgccgatgtgagttcttggagtatgacatggttgacgacttccaccgctacaggttcgaggattcatcgattagaatcgccaatattcttctcccctgcattgacactaataggattctcgagggaaggaacattgacttcaagcctgcgcttgaagatctttctttcgagggcagtccgccaaccgaagagatcagtcacacagaaggagctatatcggaagatgtgatgtgtcagttgaaatagatgaggcggagtttgacacgagcctgtatcatttcagtgagcatatacctccagcgagggaaatcaagagtttgagcgaagctcacaagaacaacagtaagctgcagaagtggtgcaagaaactggataagttacacgccaagtgcctcagggctatcaagtttcttaaggacaagcttagctgctcctcttccactacagctatcccgcagggacagctccctcaggacatgccctcgaggagatatgacgcgcttgaggcaagtcggcgtaggcctgagcctagtgagcaggagattccgcatgtccctgcgaggcattcatcatttgagcctcatgaatctgggaggaagaggaggaccacactcactcaatctagcagcacgagcaaacgacttctccagtctcgtagtttacgcgaccgcggtgctgtccgcagcagaagaagagaggtcgagtatcctcatagcggtgctggccgccacagagctgatgagatcgagtacccacctgctggagctgatacagaacatggcggctcgtctatggcctgtgagcaa

SEQ ID NO: 168408 - DNA, 732 bp, Arabidopsis thaliana landsberg
atatttgtagagtgttctcatgtaattgtttggcttttaagaatattatcttatgtttcagccgttgagaaagagagagatgaaatagaaattgggtttccaacagatgtaaaacatgtggctcatattggctgggagggttcatctggtagtgctcctggttgggtaagctctttagtgcctttttggcctatatgtgaaaattctagtttctaacaagtaaaacctaaaaaagaagtaaaattcatatagctaatcagtgaatatttgtatttcttgtgaagatgagtgagtttaaggtcggggctgagcttttatctccaagaccatcatctttcagtaatgcaagaccttctacttctttcttcacttcttcttcttccactggtaagttatttatttgtttttaactttttcatttccttggttttttttctttaaaattgatgtgattaaccatccacttactttcaaattacaatttgaataggtaaacaaatatagatgggttatccaaattttatatatagattgaataaatagaagatttgtatatcatcattgcatataagagatggaatttggtaatatatatttaacttaaaaccaaaaatgaactttattgaaataagcaccaaaatattataactttttgcgaaggtttcagaatgaaatttgcaagatgggataaactttaagttatgatttatgaattgttttaatctttaaaat

SEQ ID NO: 168409 - DNA, 1123 bp, Arabidopsis thaliana landsberg
  unsure (1)..(1123): unsure at all n locations
atggcggtgannnnnnnnnnnnnnnnnnnnnnnnnnnnnnnnttgtgtttccaagatccagacaacatatattctcccaagaagacaaagaaagatgatggtgaacgtgtgattaccaaacagaaatcgtttcttggattgtcgattctagacataagtaatccaagttccactaccttgtccgaagatctctcaatctccctcgccggctcggatctccacgtgttcacacaagcagagcttagagtcataacacaaagcttctcttctagcaactttcttggtgaaggagggtttggtccggttcataaagggttcatcgatgacaagctccgtcctggtcttaaggctcagcccgttgccgttaaacttcttgatcttgatggtcttcaaggtcaccgtgagtttatggttcgtacattcatttcattagtcctctgtttaagatacaaaaatattgagtctaaatgtctaactaatattatttttggggtgatttttttcagacggaggttatgtgtttgggaaaactaaagcatccgaatctggtgaagctgatcggatattgctgcgaggaagcacatagacttcttgtttatgagttcatgcctcgtggaagtttggagtctcaactcttcagaagtgagttgacttttttttattgtaaccatcaaatagaaatgatcatttcattttaagaaccagaactgatgaaattgtttcagggtgctccctaccgctgccatggacaacgaggttgaacatcgcttatgaagctgcaaagggtctacagtttctacatgaagccgagaagcccatcatctatcgcgatttcaaggcctctaatatcttgttagattctgtaagcaagcattcttcttttttgatcttaagggttacaccaaactagaccattttagttttagagcggacaataacctaaaatggacatatttgtttctttctattcaaattatggtggaaccgcaaattacatccatggtcaccattcaaaattataattgcttttggatttgaatagacttttgatgttttgatttcttttttcaggattaaacaaagaaactctcggacttcgggctagcaaaagacggaccacaag

SEQ ID NO: 168410 - DNA, 931 bp, Arabidopsis thaliana landsberg
ctagtagcagcacaaaagaaattctggttagggttatggaattgttatcggttaaggagaaccaagctaggactcttcttatttattaccaatggaacgttgagaagttgttctctgtgtttgctgatcaaggcaaagatcgtatgttttcttgtgctggtcttactgtttttgttccttctttagttacttcgaagaagactatgaaatgtgatgtctgcatggaagatgatttaccaagtaatgtgatgacgagaatggaatgtggtcataggttttgcaatgattgttggatagggcattttactgtgaagattaatgaaggtgaaagcaagaggattctatgtatggctcatgaatgcaaagcgatttgcgatgaagatgttgttaggaagctagttagtcctgaattagctgacaggtatgatcgtttccttattgaatcttatgtggaagataacaatatggtgaagtggtgtccaagtaaaccgcattgcgggagtgcgatacggaaaatcgaagatggtcatgacgtcgttgaggttggatgttcatgtggacttcagttctgtttcagttgtttgagtgagtctcactctccttgctcttgtttgatgtggaagctatggaaaaagaagtgtgaagacgagtctgagacggttaattggataaccgttaacacaaagctgtgtcccaaatgtagcaaacctattcaaaagagagacggttgcaatctcatgacttgtaagtgtgggcagcatttttgctggctgtgtggtcaagctactggaagagatcatacttatactagtattgccggtcatagttgtggtcggtacaaagatgaaaaagtgaggcaaatagaaagagctcaaagggatttagacaggtatacacattaccattaccgcgacaaagcacatctaaattc

SEQ ID NO: 168411 - DNA, 674 bp, Arabidopsis thaliana landsberg
  unsure (1)..(674): unsure at all n locations
ttagccgtcatgtcccgtccaagatttgatagagaaggaaatgaaattgttttgagaaaaataagaatgttttcatttgttacaatgcaaaagtcttaaagacaaagtagaaatcgagaggagggtactttggagttaaagccgacgacatccatcaagagagaaaatataaaggagtttttaactgaaaaatttgtaccaagaattcattaaagatggccacaagatgattttggaaaacctatttttatttaacaagataatgcaagaactcacattgatccaagagatgaggaattctgagtagtagtttctcatcatggctttgacattcgtttgatgtgtcaaccaccgaattcgcctgacttgaatattctagatcttggattttttagtgccattcaaacactctaacacaagggtgtgtccaaagacgataaaagatcttatttctatggtagaaaattcatttgacgaacatcccgcaaacatgtgaaccaaatttttttgactgtgcaatcgtgcatgcaagaaattatgaaaattcgaggctctaacangtatataatcccacatttgaagaaatccatcttggagaaagaggtaatataccttcacaaatggcctgtgatcctaatttagtactagatatagtaaattacttagctacctaa

SEQ ID NO: 168412 - DNA, 396 bp, Arabidopsis thaliana landsberg
cacgatcatcacgaccccgacgtgtcaggtcccaaggtgggcaaatccatgaaggcgctcttttggggctcggtgattcaaatcggcattctggacatcgtcttcagtctggattcagtcatcacggcggttggcatggttgatcacctgcccgtcatgattgccgcggtcatggcttcagtgggtgtcatgatgtttgcggccaaaccgattggcgaatttgtggaaaaacacacatcgctgaaggttttggcactggcctttttgttgatggttggctttctgttggtggctgaaagtttgggctcgcacgtgccaaaggcttacctgtacagcgccatgggcttctcggtactcgttgaattcctgaacattcgggccaaggccaagcgagag

SEQ ID NO: 168413 - DNA, 606 bp, Arabidopsis thaliana landsberg
  unsure (1)..(606): unsure at all n locations
atagcttatagatcttttttccacggagactctagtgttgaggagaaaacggtttcagaaggaaatgaggtatttatctcgaccatctgaatagtacaaatcgttagccatctaatgtggtgtatatcatctttgtgttaatgtaggagctcgatcgtatggaaataaggataagaatgaggtacgacgaaaacaggaggcgcgataagggtgttccgatcgagtgtgattgcaatgctaaaattgccttaacgttagttaatctacgataagtccgccttaacgttagaataactcagccatcacacacgaataactcaaagaaacatcaatttaatctacgataagtccgccttaacgttagaataactcagccatcacacacgaataattcaaccaaacatcaagttaatctactataatctgaaagagagacagattatatataaatcacacatgcgaatagaaaaaaaaaattgaagatntaactttgataacataggagtattgcaattcaataacataaaataaaatacanataacttcaataacatanaataaaatacanataacatggagatgtaatttgtatgacgatcaatcaca

SEQ ID NO: 168414 - DNA, 327 bp, Arabidopsis thaliana landsberg; identical to SEQ ID NO: 11028

SEQ ID NO: 168415 - DNA, 1776 bp, Arabidopsis thaliana landsberg
ggtaactcacggtctctctcttggaatactgtgagctactagctcttactcgtatatctcaagtgaacattcttcaagattgccaagcaggaagtttgacgaacgagataatatgggatacctagcaaaattcatggcggagtaactggtgaagataaaaagggaatgcattggtttgcttggaaaagaatgggactgtctaagaaggagagaggtatgggcttcagagacattgagaattttaatcttgctttatgaggtaagcaggtttggcgaataatgcagaaaccagactgcctcatggcaaggatgttaaaaagacgatatttcaatgatacaaatatcctcaatgctacgcaaaaaaggcacgcctcctttatttggaaatctttgcttcaggggcgcgacctaatcaaaagaggactacggattgttgttggtaatggctctactgtaaatgcttgggtggacccgtggctgcctgttaatccaccgtgccctccacgagcaagaaacaaccctccggaaattattctgttatcggattggattcaaacaactaggaatagttggaatgaagccaccatcagagagatggtgattgaggaagatgcaaacctgattatgtcaattaagctatgctctaccgcaactcaagatatgatgggctggcattataccaaagatggactatattcagttaaatctgcatattggttagcaaatcaattgtatctagatcacaccattcagccgccaccaggagacaatgcgatcaaagcaaaaatctggaaactagacactgctcctaagattaaacactacatatggaaattctgttctggggctttggctacgggtgccaatctgcgacgacgacatattaatgatcagtcaatctgccaccggtgctgccaggaggaagaatcaactacacatctgttttttgattgttattatgctcaacaggtttggagagcatcagggattcctaatcatgcggtaatcaccgctagtgggtcgatggaatcaaaattggaggctattctattgggtaatctaggcaaaaacaatctgcaactctttcacttagctctctggattctctggagactatggaagagcaggagcctgcttgtctttgaacaaaagcacttggcttggctgaatactttggagagagctaagcatgacgtcgaaggttggaatagtgcgcaagattatatcaagagcttttaacaatgcggggggcaggaaacacataatacaaggaatcaaacacaagctgagtgggtgagaccaccaaccggatgggtaaaatgcaattatgatgggtcttataatcctctcacgcaagcatcaaaggcgggttgggtacttagagatgatgaaggaacctatagaggtgcaggacaagcagtgggggtttcaaccaatagtgctttggaaagtgaatttcaggctttgataatggctatgcaacatacgtggagtcaagggtatcgtcgagtcatttttgaaggagactgtaaacgtgtggaagagcttatgaacaacaaaactatcagctttgggagttttaattggattcgtgaaggaaaggcttggcaaaatcgattctcggaagttactttcacttggacctcgagatcaactaatcaaccatcggatattcttgcaacaacaagacttcctaacaggagtttatttcaatatcatttttatgttccctcatttttaacaaatgctctgcattgtaatcaatttcaacttcct

SEQ ID NO: 168416 - DNA, 749 bp, Arabidopsis thaliana landsberg
gtatcattgacatgggaatagcaaaacacgcaaccgtggcggaacgttggaccaatcggagaagaagaagacaccgtgtgaactatctcaatcagatggaagagattttatctctaaaatggcagtctcaacaacatgaagaagatagagtgctctggcgagggaaaaatgatgctttccacactactttctccactaaagacacgtggaatcacactcgaacaactacgaataaggtggcttggtacaaaggggtttggtttgctcaagctattccaaaacatgctttttgtatgtggttagctgtccaaaaccgactctcaactggtgaccgaatggttcaatggaacatgggagtggaaccgacgtgtgtcctctgcaattctgaacttgagaatcgagaccacattttcttctcttgtagctacgcaaaagaagtgtgggagcctctagcaaaaaccatctacaagacgagatacaccacagattggcaagcgattattcacagtgtctctaaccattggccgaatcggattgaagggttcttagctcgttgtgttttgcaggcaacgatacacactatatggcgtgaacgaaatgagcgcaaacatggcaatcacccgagccctgcagttcgactagtaaagtggattgataagcacattcggaatcatatatcgacgataaatcttagtggagatcgaagatatgatagaggtctttaattttagtttcaaacaagagagaca

SEQ ID NO: 168417 - DNA, 2561 bp, Arabidopsis thaliana landsberg
tacagaatcaacaatatccagaatggctggccaacccggtcgtggtcaaaaagaagaacggtaagtggagagtctgcgtggattacaccgacctaaacagggcttgccctaaagacagttacccactgcaacacatagatcgcctagtcgaggcaacgtctggaaatcagcttttttctttcatggatgccttctcggggtacaatcaaatcttgatgaacccggaagatcaggagaagacatctttcatcatagagcgagggacctactgttataaagtgatgcctttcgaactaaaaaacgtgggggcaacttattagcgcttagtaaacaggatgttcaaggatctcttcggtaaaaccatggaagggtacatcgatgatatgttggtgaaatccgccttttctacttcgcacctcggccatcttaagcaatgtttcgatattttgaatgagttcgggataaagttgaatccttcgaagtgcacgttcgctgttccttcgggagaatttctacggtatatcgtcacagagcgcggaatcgaagcaaatccaagacagataaacgctttcctatcgatgacttctcctcgcagcataagggaagttcagcgtttaacaggtcgagtagccgctttaaacagattcatatctcggtcaactgataaatgcctcccgttttacaccttacttcggaaagtaagaaaaggtttcatttgggatgaacgctgtgaggaagcatttaaacagttaaaaacttacctttctgagccctcagttcttacaaagcctgagttcagggagcagctttttctttatatagttgtttcggaaagcgcagtaagcggtgtcctggtacgagtaaagcgaagcgatgagcatccaatcttttacatcagcaagtctttctatgatgcagaaaccagatatcctatgatggagaagttagctctaaccattgtaacagccgctcagaaattaaggccgtacttccactctcatccaatcgtcgtcttgacatcattaacgcttcgcaccatccttcacagtccaacgcagttcggacgggtggaaaaatgggctgtcgagctgagcaaattcgatctagaattctgagcccgaacaagcttaaagtctcaagttctagcagacttccttatcaagatatcttaggctacttctgaacaggataatacggatcaaccgtggatccttcacgtcgatggggcttcgtcgaaacatggctccggagttagtatttgtttaaattctcccactagagaagtgctggaacaatcctttctgctcgctttcaacgcatctaacaacgaagcagagtatgaatcacttttggccggacttcgtctcgcaatcggagtaggagtgcgaaatttgcaagctcattgcgattcgcagctcgttgcaaatcaatattctggagattatgacgcaaaagataaccgtatggaggcatacttagacttagtacgcgatttgtcaagtaagttcgataagttcgagttgtctagggttccttgagctgaaaaatcggctgccgatccactggccgccctggcatcgacttccgaagtaaaggttgcgcggataatccctgtcaaaacaataagccagccaagcatacatcacagtacagtaagtttcgtcacaactcaggcaatgcgcagacggctcgaagctcggttggacgatcccgaacctgaacatctcaacgtaaataaggacgatctcgaggaaattcagcctagtgccatcgacacaaatcaagaaaatgttaatagtcctaatgagcgcaatctagatcagccacatcatgactggggggcagactagagagaaccaattcgggattacattctcaacggtacacttcctgccgagaagtgggcaactcgaaagttgaaagccacttgtgcacgtttctgcatagcaaacgatattctctatagacaaatcatctcagctcccgacactgtgtgtatcttcggcgaacagacccgaactgtgatgaaggaggttcacgacggcacatgcggaaatcacaccggaggtcgctctttggcctttaaagtgaggaaatatgattactactggccaaccctggtagcggaatgtgaagcatatgcccgtaaatgcgaacaatgtcaaaagcatgcaccacttatccttcaacccacagaactcctcaccacggtttcggctccctatccgtttatgaaatggtcaatggaggagtacgcttcctgctcgtgctgacagattatttctcaaaatgggttgaggccgcagcttactccaacataactcacgtccaagtacggaacttcatctggaaagacataatttgtaggcacggcctgtcttatgaaattgtcaccgacaacggatctcagttcatctccgagcaattcgaggtattttgtgaagagtggcagatccgtcttagccattctacacctcgttatccccaaggaaatgggcaagccgaatcaatgaacaagacaatcatctcaaaccttttaaagaaattaaacgcttacaaag

SEQ ID NO: 168418 - DNA, 537 bp, Arabidopsis thaliana landsberg
atggtgatgaacatggcgatagcaacagagtttacagattttcctcgtttggtatctactgcaattagagcttggagttcgcagaatgcttctgatgttgaacgttgctttgatgttcttcgatacttgaagggtttgaatctttctgacataaatctttcccattccaaagtgatacttcccttggagagtctgagagatcacgaaaaccctaagatacgaacggaagctcacgtcttgttcacttcatggatgaagactttttactccagcggacaaaactcttcttctacttgcaacaaacctaatcccctgaaactgaagaaagttgttaaagcgtgttcggagttgaagaagaagaacgacgagcaactatctcatggttttgcggtacttaaggctaagaaagagactgtttttttggggatgaagaagaacgaagatgagagatctagggttcatgaaaccagagagatgaaacaaattggtgattccaagtctatcgcattgatgaggactatcgagaagaagaagcaa

SEQ ID NO: 168419 - DNA, 529 bp, Arabidopsis thaliana landsberg
  unsure (1)..(529): unsure at all n locations
gatcattcggtaagccatggagtaaataattgctttggatcacgtaatgcaccgccactatttaacctggtatggcagcaggaatttatgtgggatggaggcgtacatcatattgaagtttcaggattgaatgcgctgaccaatccctgtgaaatggctaacagtctggataatatcgtgagaacactgcagcaaaaagcaccctaccctgaattattcagaaaggctttcggtacaacggagatcaattcccagcgtcttttcagggcactgacccaatttaccggaatgatggtttcgtctgattcgaaatatgataaatatatacggaaggaaagcggcggtgaacttactgcggatgaactggcgggatacaatttgtttaaagataagtgcagcagctgtcatacggaacccctgttcacagaccgttctttttgttccacccccctggatcttaaaacgcgccacattggtcgtgatagcattacccnatgccacttccggccgcggaaaaataaagggtcct

SEQ ID NO: 168420 - DNA, 1153 bp, Arabidopsis thaliana landsberg
atgtgcatcgattacagaaagatgaatgctgctaccaagaaagaccattttcccttaccatttatcgatcaaatgttggagatgttagcaaatcataaatactattgcttccttgatggatactcaggattcttttagatcccgattcatccagatgaccaggagaaaacaactttcacctacccctatggtacatttgcttatctgagaatgcccttctgtcttctatcttcacagacatgattgaggatatcatggaggtcttcatggatgatttttcagtttatggatcataatttgaggattgcttagagaacctctgcaaagtgttagcaagatgtgaggagaaacatctggttttgaattgggagaaatgtcactttatggtgcaggatgggatagttctcggatacaggatttctgagcatggtagagatgttgatagagctaagatcgaagttatgacaagtcttcaagcacttgataatgttaaaggagtgaggagtttccttggacatgctggtttctataggagattcattaaagacttcaacaaaatagcaagaccactcactgctctactctgtaaagaagtcaaatttgagtttacacaagagtgtcatgatgcctttcagcagataaaacaagccttgatcagcgcaccaattgttcaaccaccagattgggatctaccttttgaggtaatgtgtgatgcgagtgattttgcagttggggctgttctaggacagaggaaagataagaaacttcattccatctactatgcaagtaggacacttgatgatgctcaaaggaattatgcaacttcagagaaggagttgttagctgtggtgtttgctttcgagaaattcagatcttatcttgttggatccaaggttattgttcacaaagatcatgctgccttgaagtatttgatgcaaaagaaagatgctaagccaataattttgagatggattttgctgcttcaggaatttgacatcgaggttagagataagaaaggagttgaaaatggtgtagtagattatttgtcacgcattaggatcgatgatgatgtcctattaaccatttcttgcctgaggacaacataaaaatggaagatacagctgaagaagatgacagcaaatgtataaggtca

SEQ ID NO: 168421 - DNA, 1519 bp, Arabidopsis thaliana landsberg
ctacttcgccattgtctctaaggaccatgatccttttgttggaacattcgctcgcataatgcccaagtccttgacacttaaagcatcggatatctctagccctcgtgattacttccttaacctttccttttggatctagatcgaccgattttggcttgacgaacggcttgtaatccttttgataaccaaacttctcttccttttgataacttggctttcccgggctgtagttggtcttggtgtgacttgatcgggcgttctttctcttgatttgctgttcgaacatgaccgctgtgtgaagcatctcctcaagctccacatagtgttgagtttctagacggtcttggatttctcggttaagacctcccatgaatcgggacatgaccgcttctccatcttcttgaagatcagctcttaacataagggtttccatttccttaaagtattcttcaacggttttgcttccttgaaccaaatttctcaaccgctgatgtatttcacgatgatagtaactcggcacaaatctctttcgcatgacggttttcagctggttccatgtttcgatcggatagtctcgggtacgtctcgggtacgtcttcggctagtaacaagttgatcccaccaacttaaggcatagtcgtagaactcagtagccgtaattttaaccttgttggactcaagacattcttgacaaagaaagactaactcaattttctgctcccattccaagtaagtatccggattgttggttccatggaatgcgggaattttgagttttaggcctcccaagggatctttaggtggtggtctctctcgtcgatgcctacgttggctactgtgagaggaggcgtgactatagtaatttcttgcctcttcatcttcccttggttcttcttgtcttagacgtggatttgtgtccgggttgacttgatataagtttagagcaccaagcttttcatcgattaatgttgccatagctgatgtgactgttttcaaaatcctcctttccaaactagaggcagatgacgcttcatcttcttcacttgtcaccattgtacctgaaaaattaaaaatttaacaagtaaaacaggcaaataaaaacggacaaaacgactccaaaaattccgaacttaatttctaaaaatactagactcgtaaatggttcgaattcaattggtttcacaatttttgaaccagccaaatattttgtaaaattcacgcaagattgaacggagatctgaaaaaaagaaaacaaaattttagggttggaacttcaaaacctgataacaaggtggctctgataccacatgatacactcctggacgtggatgtatgttccaaggactcactttgttggttttgaattggaaatgatgtacttgatgatgaataatggattgatttgaaacaaagcggcggaaagacgataaaccgggatgatgacaagatcgagtggatgcagcggaatgataggggaacgaattgtacttccaagagtgatgaaagactcttagactac

SEQ ID NO: 168422 - DNA, 294 bp, Arabidopsis thaliana landsberg; identical to SEQ ID NO: 64431
  unsure (1)..(294): unsure at all n locations

SEQ ID NO: 168423 - DNA, 98 bp, Arabidopsis thaliana landsberg
tcttaaacagctcctacagatgccactccgatccgccgaacggcggtgaaatgtctcagctcgagtaccacaactgcatgaaaccgcctccagttgtc

SEQ ID NO: 168424 - DNA, 325 bp, Arabidopsis thaliana landsberg
atggcatcctcatatatgtcaattacgcaaacaatgttttcatctaaactatgttcagggataaatagctttagctcatgctcaatttacacgaagaattctcgcgtgtcaattcgaaagggttctaccaacacgagttttcatctggatctatcacactcacatcgaagcactttgaagcattacacaagggtaagaaaatcggaatcagattgggaagagagcatagatgaagagaaatcagatcaggaagagagagaagatgaagagaatgacgataataaggaacactatcgagcgaaggagacgattctatagcaaaaca

SEQ ID NO: 168425 - DNA, 975 bp, Arabidopsis thaliana landsberg
atgatcgcgtccttctccagattccaaatctcaatccccgatttgattccgtcttcaccgcgatttcttccgcctagtcaaaaccagttccgtttcagattataccttcaatttccagctcaacctaagaatctctgtcaaatggagtggatgaatcgtcttggaatcggttgctttgcggcgaatcgaagcaaaagagagctgacgacggagatcgacaacggcggagaagactttttcgatgcggatgttatggagtctgcggagaagcctgatcatttggtggtcatggttaccggaatcgttggcaggtagactaaatcaaagagcttcaattagaatcacagattactatagtctgggttaatgactgtgctaattctgtgttggatgatgatttagtgcgacggattggaaatatgcggtggagaagttcggaagatgttcccggataaaatactagttcaccgtgcgtgattcttaatctatagatattgtggttttgattactctgtaattttatgatttgtttgattttgatgatgaaattgtatgaagcaggtagcgagagtaatagtgcaacgttgacatttgatggtgttgataaaatgggtgaaaggctagctaatgaggtagtacttagatgcattgttgtttcctctgtacttgcaacttgaatctgcaaatttggttggtgatttttgttattggtctttgatttctatgtttgacattttgtgaaggttttgggtgttgttaagcatcgaagtgggctgaagaagatctcttttgtggctcattcattaggtggtcttgttgcaagatatgccatagaagtgggctgagttctttggatctgaaaatgaggaggaagtaatgctggtggtgtgagaggaaacagaacgtttaggaatggtcatttcaacaccggtggtgccaatggttatagccgtgagatgagaaaagttccagcta

SEQ ID NO: 168426 - DNA, 269 bp, Arabidopsis thaliana landsberg
gtttatagcaatagggagaaaaattgcgaaaaagctcggcagatcacccattgcagcagtcacagtggcagcacggcttcggagcaacagcagcatcgatttctgggagacaacagcgaaccttgacatgttggacgaaacaatgggagctctgtggtggagctatcagcagctaggtgtagacgtcaggcgatgccttgcatactgcagcacttttcccagaggatacaggttagtacgagacgagttggttcacatctggatagcgc

SEQ ID NO: 168427 - DNA, 570 bp, Arabidopsis thaliana landsberg; identical to SEQ ID NO: 44417

SEQ ID NO: 168428 - DNA, 213 bp, Arabidopsis thaliana landsberg
  unsure (1)..(213): unsure at all n locations
tctggtgcgtgggtgttccgtttgcgtncttttgtggcgtggtttcgtgcctcttctgggcttgcggcggtggtgctggttgctctcctttggtcggtggtggccgttgtcttgccctcgccttttgcgtgtgcctggcttcttgtgcgttcgtgggggttggcccggtgcttcctattccccccccctgcggtttctctggtgctgcggtgc

SEQ ID NO: 168429 - DNA, 536 bp, Arabidopsis thaliana landsberg
  unsure (1)..(536): unsure at all n locations
cacccgcatgccttcaccaagactttcccggtttgcccgcggaaaagaagtgcgctggatgcgatgctgaaccatacctattcaggtnnnnnnnnnnnnnnnnnnnncaacgccaagatgcacgagatactgctgtacagcctcgaatgcctggtagacgaaaaagaagagggcttcagctgtaaattcctggcagacgaaagcggcaggctgcgtatttaccaggcgagggatatcctgctgcagcatatcggcgaccccatcaccattaaggaactgagccgtaaggtggccatgaacgaatgctacctgaaaaaaggattcaaagaagtattcggcaccaccatattcgatttctaccagcagcagcgcatggaacatgcgaaatacctcctgtatgaaaaaggattaagcgtaaccgatgtatccgccctgttaggctattcctccatctcccatttctccgcagcatttaagaaacatacggggctgaagccttgtgagctgttgaattgaggcttttagctgttggctat

SEQ ID NO: 168430 - DNA, 835 bp, Arabidopsis thaliana landsberg
tatctctcttacgtagacatctgttgtaccacatccgtagtaattttttttctatcttataactgttattttataaataatttatccatttattattgtatatttagtccaacgagtaagagaacaggtctaaattttaaataaaatacttgtatttcatgtatttttttgtttgggtattcagtttttacaaaatttagtacaagaagaatacacggtatagtatagcaaaagttactgaatctaaatctaagacaaaatggtccaacagatatttgaaaagcgtggaaaacaaaaaaacaaaaagatatttgaaaagcaagctatgaattattgactccaaaatcaagttagttccgcgctactcatttattatgtggcttgcgttcctgggcagattgcctactaaggacaggttgcggggctggggtattaacgtcacctcagcttgtgttctctgttctgctggcatcgagactcatcgatacttattcttcgaatgccccttctctttttctgtttgggaagctttaacttctaaagtttggcgcttgccacccttggatcttctctcagtctcatcttagattttacagcgcaagctccaacctcaaactctctcttctgtcatcatcaacctcatcgctcaggttgcgtgctatctcatttggcgcgaacgaaatgcaaggatcttcaccaacatctccacttcggcttctgtgactaaggctgccgtggaccgcaccgttagagaccgccttctatccttccctggtcctccttcttcttctatttctcttcttagtttctactttggttgtatctccttccattt

SEQ ID NO: 168431 - DNA, 499 bp, Arabidopsis thaliana landsberg
  unsure (1)..(499): unsure at all n locations
cttgtcaacacttgccatttcatacatcaactggatcttttttcacttatagtttcttattgtatttagtgggattgaagtatgaccactataaacatggtgcgttgagggaacacggttttttttaaaaaaaatcttaattatttcagacttgttattgatacattttagaattttttggaccgagatcttggttgtccatcaaggaacactttttgtagggtttgtcacgtcaaaccaagtcggaaaccgtctattcaccaaaacgctaaacatgggagatgtttttgtgtttccagagggattcattcacttccaattcaatgtgnnnnnnnnnnnnnnnnnnnnattcgctgctttgagcagccaaaaccccggtgtcatctctattgtcaacaccgtctttgggtctaacccaccaactaatctgaatgttcttgctaaggcattccagttggaccctagggtggccatgctcatggatctacaagccaaaatt

SEQ ID NO: 168432 - DNA, 158 bp, Arabidopsis thaliana landsberg
ggaaaggaggcatgtctagaagcactgacaagatttagaggactgtgcagtggaatgacattaaaggagacaatcttgctgaggttttagtttatgaaccaaggtcttgtcatccttaacaacactatacttgtcgagcattatttcacgtgcttgga

SEQ ID NO: 168433 - DNA, 409 bp, Arabidopsis thaliana landsberg
  unsure (1)..(409): unsure at all n locations
gcgggctgttggccccgggcttgccctccnatggttcctcgttcngggctttcgtttgtgctcgttccggtggcctgcctcggcgggccccggtcttgttttttcttgtcgctccctccccgtgtctgccttgggttttttgcgcgccggctgccttccttggctgtggtagccgtttttcgggctccctctccggcttcgggccctggttctccgtctcccgtttcctccttggtgggccgctctccttccgtcggtcgttgctcgggctgngctttgtntgttgtgtcgccggctctggggccatgcgctccgtcgggtcctcttgtgtcgtcggggcagcaggcggggccaacgtcgcccttttatctgattgatgcgtcccttcgttttgtcggggaattttgcc

SEQ ID NO: 168434 - DNA, 351 bp, Arabidopsis thaliana landsberg
gaactgaatggagaaaaatgataactgaccatagccgttaccaaaatctagtattcacctggttatcctagattgcgcgccagattgatctacggacaataatgggatgaactacttttacaagaagccacgaaaaatgttcttgaattgactggccgggcgaatactatacgacttcttgaccgacttgctagacggatatactgtatacagattgcgactgttctatggatcaaatgatgcgaataggctaatcaaacatttgaacttggggatgcgtattgaatctattcatacctacctattgatggggttgaaaggcttaaactctggctcttcgtagacacataa

SEQ ID NO: 168435 - DNA, 521 bp, Arabidopsis thaliana landsberg
tctagtatatatacacacctaaccattacctcatgtctttgccttatcactcaccaaaagtcgtcacataatatcactttcgagttatcaacatccgtacatgtcatccatagagccaaaagtaatgatggttggtgctaataagaaacaacgaaccgtccaagctagttcgaggaaaggttgtatgagaggaaaaggtggacccgataacgcgtcttgcacttacaaaggtgttagacaacgcacttggggcaaatgggtcgctgagatccgcgagcctaaccgaggagctcgtctttggctcggtaccttcgacacctcccgtgaagctgccttggcttatgactccgcagctcgtaagctctatgggcctgaggctcatctcaacctccctgagtccttaagaagttaccctaaaacggcgtcgtctccggcgtcccagactacaccaagcagcaacaccggtggaaaaagcagcagcgactctgagtcgccgtgttcatccaacgagatgtcatcat

SEQ ID NO: 168436 - DNA, 784 bp, Arabidopsis thaliana landsberg
  unsure (1)..(784): unsure at all n locations
atgtgggaaaatgtgtctagggagaaggtgagcataccccccttgaaggcatttatatcaatagaaggagaaggagcagagaagncacagtggaatggggagacacagcacaaacncctgctcaaaaggcaaccccatgggcacttacaactcggcctctttcgcggtcaactctcnctttctttgtcgctaagaatatcacattcagggtatataacttattaacatatacactagttgtcttaaaatttaattggacgtataagttttatatccatcttagcgatcttatatgtatgtagaacacgaccccagtccccttgcccggtgcagttggtaaacaggcggtagcattgagggtgtcggcagacaatgccgcgttttttgggtgtagaatgcttggtgctcaagacactctctatgaccatttgggaagacattattacaaagattgttacattgagggatcagtggacttcatctttggaaatgccctttctctttatgaagtaagcattctcacttagaatactatttaaagttagaacttttagtttggtccttgctctaacaaaagtggtgtttaggggtgccacgtgcatgcgatagcggataagctaggagcagtgacggcacaggggaggagcagtgttctagaggacaccggattctcgttcgtaaagtgtaaggtgacagggacagggattttgtatcttgggagggcatggggtcccttctcaagagtcgtctttgcttacacttacatggacaacatcatcctccc

SEQ ID NO: 168437 - DNA, 403 bp, Arabidopsis thaliana landsberg
  unsure (1)..(403): unsure at all n locations
atcttccagatcttccacagaagcagatgaagtaactgtacagcctgaaactatttctgactttgaatcaaacacaaacacaatcatcttcaaagcttctttttgctgcgaagatcaacccgaagcaatctcagagattattagagttctcacaaagcttcaactcgaaacaatccaagcagagataatctctgttgggggaagaatgagaatcaatttcatcttaaaagatagcaactgcaatgagactacaaacatnnnnnnnnnnnnnnnnnnnnnnnnnnnnnnnnnnnnnnnnnnnnnnnnncgaatcacatcttcttctacgactacttcttcagtttgcagaatcagaagtaaaagacagagatggttcctctcttctcattattctcacaatgaa

SEQ ID NO: 168438 - DNA, 1291 bp, Arabidopsis thaliana landsberg
  unsure (1)..(1291): unsure at all n locations
ctcaagggatttactcgctcaagcactagtcctcagttgtgcagcctttacttcaaaggtttggttggcgatgactcattggctggatttggggttgcaatttgcgggcatagagatgatatcttgtttcagatgaaaggaccaattcatcatgactccaacattacacctttggaggctgagcttaccgcattgaagcgaggactaaccgaagctgcgaatttggggatcactcatatctcaatatattgtgatgattatccaatttacgaatttgtaagttttcttttttgttggcttttaaggttcacatgcgtaatcatatagataacatgatcagatttacttgttttagaagctaacatgtacgactctttttataaagttaggtgttctaaagtttccacagtatttattnntttaagcacccaatagaacatgtgatctttctcccttctccttctcatgtgggtgtcacaaaataaaatatttcaatgggtgttcaggggttttaatctagatacttggtttggcctttggaatggtatcaggtcactggggggatatttcggtcccccagaagccaagaataacccatcgccttgctaatggatgatgtgcaatgcataaggcgagaactgacatctagcattcctgttactgtgactgaaaatcaagccaagtttgcttataagtttgcaatggaatcaataagcatacgtgcgcctcctaccgagcagaaggcttgcggtgaggttaatatcgaacatgaactgatgttttctgttgctttatgccgtcatcaattctgtgtagagtggatgaaacaacatatagaagtgagactaatcgagggagatgttccgagatgccctcattatcaatgcgagtccaagttaaatgttgtacgctgtgccaatcttttgactccggaactaagagagatgtgggaacataggatcaaagaggagttcatccctgtatgtgacagatttcattgcccaaatccaaggtgttgggctttgatgtcgaaaaccgagctcgttgagtctactgaagatggagttaggagatgctgctttaaatgccgcaaagccttttgcattaactgcaaagttctgtggcatagtgacttgtcatgcggtgattacaagaggttgggttcaaatcctaatgcaaatgatatgaagctaaaaattctagcaaatcagaaattgtggcgtcaatgtagaaattgcaaacacatgatcgaacgttcggaaggatgcatcaaattaacatgcaggttttc

SEQ ID NO: 168439 - DNA, 460 bp, Arabidopsis thaliana landsberg
atggagaagaaaattctaaagatcagggcactggccaagagttttcatcaggttaaagttaaaagtggttgaggaacatccttttggcatgaaaaatggtcctccgtggggaaattattggacatctttggtgataggggatgtatagaccttaagataccaaaagctgatataatggatgatactcacagagaaagacgtcatcgagtggagaacttaaataaagttgaagctgaaatcaaagaaatgcgattgagatgaaaaacatgggaggaagatgtgaaccattggcgatggaagacaagttttaaaaggaaattctcctcaaatgaaacttggaaacttttgagagcacaacaacctacatgcagctgggctaaaggtttgtcgaagctacaccaaaatttgctttgattacatggcgtgcagtgcatgacagattaccacatgtattcgtatg

SEQ ID NO: 168440 - DNA, 720 bp, Arabidopsis thaliana landsberg
agcttgtctctgtcatggctgcaacaagaacttggaattccagtgtatccattaggccctcttcacattacagcttcatcgcaaggacctagtttactgcaagaggacatgagctgcattgaatggctgaacaagcagaaaccaaggtcagtcatatacataagcttgggaagcaaagctcacatggagactaaggaaatgttagagatggcttgggggttgtgtaatagcaaccaacctttcttatgggtcatccgacctggctctgttgcaggcttcgagtggatagagttattaccagaggaagtcattaagatggtcacagaaagagggtatattgtgaaatgggcaccacagatagaagtacttggacatcctgcagtgggaggattctggagccactgtggatggaactcaacgcttgaaagcattgtggaaggagttccaatgatatgcaggccctttcatggcgagcaaaagttaaacgcactgtgtttagagagtatttggagaatagggtttcaggtgcaaggtacggtagagaggggaggggtcgagagagctgtgaagaggttgatagtggatgaagaaggtgcagacatgagagagagagcccttgttttaaaagagaatcttaaagcctctgtaagaaatggaggctcttcatacaacgcattgaaggagatcgttaacctcatgtagcagttcttaaaagaacat

SEQ ID NO: 168441 - DNA, 551 bp, Arabidopsis thaliana landsberg
tttcgaataagcctttcatcatcttcattccataatttgaaggtgccagtgagtttcaattgttgacattcattttttgcaatccaaccaaggatcaaagtcgatgactcagttgtagcatgtcttctcctctattccgctgtgagctcatctccggtgttaatatgtcctaattttttcctgtcgatacttctccatcaacatatgtggagaccgaagactcttcttttaggtttaaccaaaactgttcaccattgcctttttgggttcatgtcactaggtctaaataccataagcaacactctaccgacgagaaagtttcataaatagactgacactaatatcattgggatccattcgataacccgtcagaattctccgggatcaagctaccttcagctattaggtcttgttgttggggactcaagtcgtggctcagaaggccttggagagttgatatatgatgatgaaaccatgaaggggttcgattatgagtttggataacaataatgattttaacgatgatgaaatccttaataatttgttgatta

SEQ ID NO: 168442 - DNA, 1089 bp, Arabidopsis thaliana landsberg
atggataagaagtacatgaggaattcttgtttgagtatgcatggtgaaagaaagtctgatattactcatggtccaacattagaatctgaggcttatgatttgctaaggacggcttattgtagtggtgaaggtacacatccattagacaactttggaggagagaatttggatggtgaaactgcagaagactctgagtttaggtagaaactgaaagatgctgaaactccattgtactcgacgtgctctaattacaccaaggtttctgcaataatgggtctataccgcatcaaggtgaagagtggaatgtcagaaaactactttgctcaattgttgacgttagtccatgacatgcttcctaaagagaatgtcctgccacagtctactgatgcgatgaagaaattcctgaagatttttgggtttggatatgatgtcattcatgcatgcaagaatgattgtatcctctatcgaaaatagtttaataagattgaaagttgccctaggtgtagtgcttcaagatggtaaacagataagaatagtggtgaagaaaagaaggggattctagcgaaggtattgagatattttccaatcaaggacaaatttaggaggatgttttgatcaaagaggattgtagaggaattgcaggggcattatagcaatgcaagtggagatggtacaatgcgacaccctgttgactatataatgtgggctcaagtaaatgataaatggccagattttgctatggaaccaagaaatcttcggcttggtctgtctacagatgggatgaaccctttctctattcagaacaccaagtatagtacctggccaatcttgttagtgaactacaatatagctccatctctttgtatgaaggttgagaatattatgttgactttgttgattcctggtccaacaactctgagcaacaatattgatgtgtaccttgcaccattgattgatgatttgaaagatttgtgggctgagggtattgaggtcttcgatgcttttttgaaagagatgttaacccttagagctatgttgttgtggacaatcagtgactatcaaacattaggcactttgtctggctataaa

SEQ ID NO: 168443 - DNA, 1257 bp, Arabidopsis thaliana landsberg
tcaatgtagattagaagtccaaaggatactctccaaaaaaatattaaaaaataatagtgattagagggagcacaaagataaatgtaaacgcgagtgtagaagataactatctctttacaaatagtctttataccttccgcaacaagtaattgttctcatcagtctctctatgagtaaaaagctaagcgaaagcgagactccacactctcagcgattcaggcgataatacctaaactcaagtaagggtttttactctggtaagctaatcaaagctctcatctttaacaaattgcgacctttatatttctctcttcttatgattcgtcctctatgttctcaaaatagcttagaactttttacaaatttcagactttcttgtaatgattcttatgggtttaaacgtatttgatgatgaataggatttgctaaggatttggggatctttgttcggtttcaatgtcaataaaagaaccatattttatgactgagattgaggatcatgagatgaatgaagctgcgatgagtttggttatgttttctaaacaagtttatgactttgatttgactcatggtaatgatgatgattccatggatttagatcagcttaaagattgtgttgagtcgatgctagacttcagggaaatggtttctaactcgggtatggaaaagtctactacttgcagtgatgttgttgctctgagaagtaaattgcagagtaagtcaagtcatagatgtcaaatatgtggcaagagttttgagtgttatcaagctttaggtggtcaccaaagacttcatagaccgattaaagggaaattagcgcataaaagggagtatcataaagatgataattcactatttgattcatcaggaccatcaagagtggaggagaagatcttagattgtgttgagttgaaacaagacttcggcgaactgcttcctttgaatagtaagttgcagaaaagacctgtgagtagctgcagttatagatgcaaaatatgcggcaagagttttgggtgttttcaagctctaggtggtcactaaagacttcacagaccgattacaggggaattagcgcgtactgaaaatgataattcactgtctcactcatccgaagctaagaacattatgtcagatatcaaaacttgaagtctctcaggaggataagatttaaccttgtgttgagtcgaaacaagactttagcgaactgctttctcactcgggttttgacgagtttagtagttgcagtgaattaccctc

SEQ ID NO: 168444 - DNA, 262 bp, Arabidopsis thaliana landsberg
atgcaaactcggtccaaagattctgcacacctactgccttttaaagatagaatagacaaaatagctcgtgagttacaagaaaccaaagcaaaggcagcttgtgatcagcaaagaccagctgctatggatcaatagaacagaccagttgatgtttaaaatccacctaatgttgaacaaccaagaaacattggcgctggtgatgtcccaagaactcatcaccaaatacaagggatagtgccaccaccagttcagaacaacaact

SEQ ID NO: 168445 - DNA, 506 bp, Arabidopsis thaliana landsberg
  unsure (1)..(506): unsure at all n locations
tcatcctcgacgctcccggcttcatacgagtgtacaggacganccgcgtcgagcgctttctgccggtcgacttcgccccgccctccactgacgccgccaccggcgtttcttcaaaggacgtcgccatcctcccagacgcctgcctattggttcgcatttacctcccagcgcccccctcttccggaagttacagcggcaagctccccgtcctggtgttcttccacggcggcgggttctgcctcggttcggcgtttgatgcggcggtgcactcacacgccaaccggttagccgcggctgccggcgcaatcatcgtgtcggtggaataccgcctcgcgccagagcatccggtccccgctctctacggggacgcgtggacggcgctccagtgggtggccgcgcactccgtgggccgggggcaggaaccctggctgactgcccacgcggacctcgggcgcgtccacgtcggcggagagagtgcgggcgcgaacattccgcaccccgccgtg

SEQ ID NO: 168446 - DNA, 2953 bp, Arabidopsis thaliana landsberg
  unsure (1)..(2953): unsure at all n locations
aattccaaaaaggaagttttctaaataaagttgaaataaagggtttttttttaagaaacccaatgaactatttttgaccacaataaattttaaacatgacaaatgcatcgaacatgaaaatatttccacctaaaatagaactataattatttattaatttatcaatggagcagtattagcggatgcattattaaaagaaatagaaaatattttgtttgttaaattatattcttctaaaattatttttattaattaaaagaaaattactagctaaacccaaatataggatataattactagaatgtctccaaaaatctgggggttagataggttatttccatgaccataatacccttattctcatttgataggaataaaaataaagtcaatagtaccctttaatttttttttttaaacgttttcgtaaaaaatagattttttttttggaaaaatctgttgcttagttgtgacaagtttatttttctgtaacagatttatttgtctatgacagattttttgcgacattaaatctgtggaaaaatataaatctgtcgcaaaaaaaaatctgctatcattatataaatttaaatatagttacgacaaatatttaatttgtaaaaggctttattatgaggatagacttttttacgatgacaccatacactttttgtaaatttgacagagtttttaacaatttggcacatttaatttgttttagtggcattagacttatatttttaaaaactaatctgccataaagtaacatattttatgatgaaaatataagggtttgttacactatgaggcactttcggaaaaacttaatgcacttaagacactttaaaaactagaggcactttgccttgcttttggagtgaaataagacatatatacccccacaatttcgtttgagatatcattgcaaaccgggttatggtttcgtttggtattggtttaaaatatacggttataatgtgcggtttaaaaaaaacagtttgtgcgtgacgacgatcgtcggatttcaatagattaaacggccgagatgaaacattgtaacttcccttgctttccgagttaaaaaaaaactgaaacacgagatcaattcaaacacataagattctgggtttcaatcatcgatctttggtcaactgtcgtgtccaaggaggtacgattgttgaaaactgatatcatgaaattaaaacgaaaatccgtgcattctatttgttatgggtatcagaatataaccaaatctttttttcgtttatatgtacagggatcgatggacgactatatcatggttatatgtggagagtggttttgttcttcgactggagagtggaaattggagatatgtaaccaacttttctcaagggttgtaccaattcatgagggaataacattggttgcgttgaacgaagcaattctacaggagtttggcgtcaagggtttaaatcctctgttaagttactctgtaccgaataagaacatgtttgcaacaaaggataagactccaccggttctggttacaagcgagattggacttctgaagaatcatactgctatctggctgaatatttgcatctaatgaagctaactaatcctggaacaataacacatatagaanccgaaagagatgttgtagatgagagcaaagagaggtttttgtatatgtttttagcttttggtgcctcgatagcaggatttaagcatctgagaaggatattggttgttgatggaacacatttgaaagcaaagtacaaaggggtcttactaacagcgagtggtcaggatgcaaacttccaagtctatccacttgaatttgctattgtggacagtgagaatgacgagtcttggacttggttctttatgaagttggagcggattattgcagacagcaaaactctgactatattatcagatagacactcgtcaatccttgttgctgttaagagagtttttccgcaagcaaatcatggggcttgtattattcacctttgtaggaatgtccaagctaagtacaagaacaaagctttaacgcagttagtaaagaatgcagaatatgcgtttaccggtacaaagtttaaagagctttatggtcagattgaatccacgaaccaaaattgcggtaagtatctacatgatatagggatggctaattggacaaggcattatttcaggggacaacgtttcaatctgatgactagcaatatagcggagacgttaaacaaggcgttaaacaaaggtcgatcgtctcatattgttgagttgataagatttatcaggtctatgttaactagatggtttaatgcgcgtaggaaaaagtctctcgaacataaaggtcccgttcctccggaagttgacaagcaaataacaaaaaccatgttaacaactaatgggagcaaggttgggaggattaccaattggagctacgagataaatggcatgttaggtggaagaaatgttgttgatcttgagaagaagcaatgtacttgcaagaggtatgttaaactcaagatcccttgcagtcatgctttggtggctacgaatagttttaaaatttcctacaaggctttagttgatgactgtttcatgccccacgcatgggtttcgagttaccgggaagcagtattccctgaagctattggaagagacgacgaaataccagaagagcttgaacaccgatcgatgttgccaccatatacaaggagaccatcagggaggccaaaggtagccagaattccatcaacaggagaatacaaggttagaaattttttaagataaagtcttactttctaattgattgttaaaacctaatgcataatgtggtttgtacatggtaaatgtagaaacctaagactggaagaacgcagcagaaccggtgctcgaggtgcaaaggcacgggtcataacaggacaagttgtacaaatccaatttgaacaagttgttacggtgg

SEQ ID NO: 168447 - DNA, 155 bp, Arabidopsis thaliana landsberg
atgagccgcaagcgcattcgctggacgcttcgagcgctgcggcgtctcgatgaaatcggcgcgtatatcgaacaggacaataccgatgcggcggcgcgtgtcgtagcgcgtatcgtgaccgcagtggacatgctcgcggagcaaccggcgacggg

SEQ ID NO: 168448 - DNA, 713 bp, Arabidopsis thaliana landsberg
taatactccatcgataaaaaaaataagttttaaaggtcccacattgcttaaaaaatgaggaaatcgttaagaatcatactataaaaagaccaaagtgattttgaatacgaatgagcagagagtttgctttataagatatcaaaaattaaaagtattatctggttcattattttaaataattgaaacttaaaatttttttaaaatattaatatacatcaatataagattgtaagttttaggattgtaagtgtttctttaaaacaatttatatagttttttccaaagcctcttgtgttttttccaaagcctcttgtgttttagttttttccaaagcctctcatttttcgatcctcaaatcaaactcggcgtttacaggcttgccaaagcctcttgtgtttgtagcgtatagggatgagtttaaattcatggagccgcacttgagttatggttaggttggtaggaggtttaagaaaggagaaaatccaatttaagaaaaggcttatcaaatcagtttttcaggattgtaggtaatcttttaagatggtgcgattaaattccataaatcatctacgcctcaagaactatctatagttgtatgaatttctttttgataatatgagttggagagcttccgcgcacatgtatcaaatgggtaaaacacgatatgtacataaccaacaatctgatgacatcttggcggatttaggatgtca

SEQ ID NO: 168449 - DNA, 563 bp, Arabidopsis thaliana landsberg
cggtgtgtctttgaagggaaatacttattattatgctccacaaatagttgtcagatagccatgcagtttcaaatcgtattgtttttttactctgttttgattttacatcagaaaggtttggaccgcgtcttcctcttccgtttcactctagtgatgaagagactgtgactctatatatcttgtatcagagaagagcagctcgctatgttatatcaaccctacgacttatgtttggacttggtcatggagataacgactaaaattgagtccaatgcagtatcatgcatggaccaagttcttcacaatggaaaggacatcgctctctgatttttcgagtaaatttcgtgttgagagcttctatatcgacgaggagaagaaagttgttgtggtttccaaatctcgtaagtatagaccgaacgaaaactgtggatacgaaacagtgaacatcattggacaaatctgctgtgaaaatcggaacagatcacatctcgaaacctaaaatgtttagatattatttcgatccacttgtgttctcttcttacgttccaagtttagtgcatata

SEQ ID NO: 168450 - DNA, 2310 bp, Arabidopsis thaliana landsberg
agacatattccccgaggagattcaacccggactgccacctattcatggcataaaacatcagatggattttgtaccagactctgctttacctaacaagcccgcctacaggatgaatccggagtctaaggagcttgagaagcaagtgcgtgacctaatggagaaagggtacatcatagagagcctcaacccgtgtgcagtatctgtcctattggtcccaaagaaggatggtacatggaggatgtgtgtagactgctgtgcaatcaacaatatcaccatcaagtaccgacaccccattccgagactagacgacatgttggatgagcttagtggtgccatcatattttctaaagttgacttgaggagtggctatcaccaggtccgaatgagagaaggagacgagtggaagacaaccttcaagaccaagcaaggtctctacgagtggcttgtcatgccgttcgggctaaccaacgcgccaagcaccttcatgcgcctaatgaaccaggtcctaaggtcttttattggtaaatttgttgttgtttactttgacgacatactacagtaagagttattctgatcacattcaacatttagagttaattctcaaaacacttcggaaggaaggcctttatgttaacctcaagaagtgcacattttgttccgataagtatgtgttcttaggttttgtagtgagtaaacagggactacaagtatatgaggagaagatcaaggcaatccgtgaatggcctactcaaatatctattgcatacgtccgtagcttctatggactagcaagtttctacagaaggttcgttagagactttagtatagtggttgcgccactgaactgatgtaataaaaaagaacgtgcctttctcctggggagaagctcaaaataagtctttcaacacgttgaataagaggctcacgcaagcaccagtcacgttgatggtaagtctttcaaaaaccttaccagattttgaagtaatgttcgaagtagagtgtgatgcttcaggtttgggaattgaagctttactacatcagagaattggagatctatgctttggttcgagctcttgagacttggcaacattacttgttgtccaaggaattcatcattcataccgatcacgagactctcaagcatcttaagggtcagacttcgcttaagaggagacatgccaagtggttggagtttgtagagactttcccatatgtgattaagtacaagaaaggaaaggagaacgtggtagcagacgctttgtctaggagacatgcccttatagctactatgaaggctaaagtgatgggttttgagcatatcaaagagttgtacaaagacgaccctgagttaggagaatgctaccgagagcatggtaaaggactttacaagacattctacttgcaagatgggtttctattcaaagacaagcggttgtgcatccctcaaggtttaatgcgagagttgatacttactgaagcgcatggtggaggtttgatgggacactttgatgtagacaagactttggccaaggtaatggagcatttcttttggccccacctcaagaaagatgttgagaggttttgtgcccgttgcattgtttgccacaaagccaaatcaaggtcacatcctcatggtctctatttaccattacctattcctaacgccccttgggtagatgtttctatggactttgttttaggattgccaaagattaaacacaaggattcaatctttgttgttgtggaccggttctctaagatgacacacttcatcccgtgtgacaagacaaatgacgcgtctcaaaccgcggagttgttcttcaaggaagtggtacgcctccatggaattccaaggaccatcgtttctgatcgtgacaccaagttcttgagtcacttttggaggactctttggagaaagttaggtaccaagcttctattctcaacaacttgtcatcctcaaacggatggacaaaccgaagtggtaaaccgaactctctcaactttacttagggttactcttggtaaaaatatgagcacatggcttgattgcattccttttatcgagtttgcttataatcgtgctgttcactccggtacaaaactgtctccttttgagatagtctacggaattaaccccttgtctccattggatttagtacctttgcctgagaaagaacaggtttgccaagatggtttgagacgtggagaaatcatcaagaaaatacatgacaaggcgaaagcgaacttagaaaataaggccgccgaaaacaaacgtaaagctgatcggggaaggaaggaaatattatttga

SEQ ID NO: 168451 - DNA, 1174 bp, Arabidopsis thaliana landsberg
tgttatcggtattcacctgatcgttactggttccccaagctgatttgctatcgtctcccggtttgtcattggtttctttctttgagttagtatcccagctaggccagtttccagcacaaccaccagcagacgaaccggatggtttgctattgtttgaatcctctccccaaccttttttccagtctgatccaccactttggtcgctcttccaagtgttttcttgattgtctgttttccagctagatgatcgaccaccatcaaacgaccttcctcctctgcctgattggtttctacctccacggaatccccctcctccccttctttcaccaaacccacgaccaccaccactatgttcattccaaggtttagaaccaccatcaccctgcttgccccagctcgacccaccaccaccatcgttctgtttaccccagcttgaaccacccccaccaccatcttgctttccccagcttgatcctctaccagaatcattctgcttcctccagctcgatccattgctagtctcgttctgcttaccccaggcagaaccactgcctccaccaccatcttgtttaccccagcttgaaccacccccaccaccgtcttgcttgccccagctagatcccccaccagcatcactctgcttgccccagctagatccaccaccactaccatcgttctgtttaccccagcttgaaccaacaccattgtcttgctttccccagctagatccaccaccagcatcattctctttaccccagcttgaaccgcccccatcgccatcttgcttgccccagctagatccgccacttggtttactccatggagccggatcctacagtcattggaaaattacaatatgagacttcaacagcctacaaaaataaaataagaaagttttttctcaaactaacctcagaattaccgaaggagcttcccctcccaaactgatccctgccacctcgacgacctcctcctcttctcccaccaaacccacgtcctcccctatcaaatgtttgttctgagtaccctccctcatccttcttaccccacgacgatcctccatcatccttcttaccccacgacgattctccatcatccttcttaccccacgacgattctccatcatccttcttaccccacaacgatcgctcatcatcatctttgccacaagaag

SEQ ID NO: 168452 - DNA, 1850 bp, Arabidopsis thaliana landsberg; identical to SEQ ID NO: 37714

SEQ ID NO: 168453 - DNA, 849 bp, Arabidopsis thaliana landsberg
caagatttggtaatgcgtagaaattcaagtagtaatgtgaaacttttcattattgcagtgccatctttacaaagactagccattcataatggcagtggtacaccacaacattgtggatataccataaatactccttctttgaaatacttgaaacttgaagggtctaaggcttttgagtcttttatggttgagaacgtatcggagctgatagaggtaaatattactgatgtctctgagataatcgacgagaagcttcgggtatttcttacttcagttacacgtctttccttggctttatcaccatcggtgtttacgtttcctaccggtatcatcttcaaccagttagtatatttggagatatgtacaaataaaacatcatggtggaaactacttcccctcatgctccatagttctcctaaactccaagtcctcaagctcatcgatgtaagcaatatatatttcttgatcatctaaataagatacagattgtgtgtgtttttttctgaatgttcgttggtttgtctcaggacacagatgggatgaactatgttgaggctagtggagaatggaatcaaccaaaaaatgttcctgaatgtttgcaccatcttgagaaattcatttgggaaggctacaaatggaaacgtgaagagatagaagtggcgaaatacattctaaagaacacgaatcgtttgaagagagctattttctccctaaaaggtattagttctgaagataggcttgtggtggttgaagatttgaaaagtgttgtcatggctacaacaaattcatgccagtttcaattcatatgaaaacattatattaggtaacgtttagtttgcttttattctg

SEQ ID NO: 168454 - DNA, 975 bp, Arabidopsis thaliana landsberg
taatgatttggtgaacttggctcattagattttctacgaggactatggctccaagttcacctttgaacatgcttggagggcggttcactatgagcataagtggttaagagtttcttacgactggaacaacaaatagaagaaaagtgcatctcttccagttggcattgaagagaaccaaagccaaaccgaaattcgtccccctagagttaaggcagctaaagccaaaggcaaaacaaaatcccaagccaagccaagtagtgtgtctggtgacaatgtgaaagagtaacaacttatttgggatattaaggagaaatatttagctatgagagagaagctaattaacaaagaagagaagattggtctcactaaattgtttgatagtctctttgccaaaactgagcctctaactgacatagagataactcttaagaacaagctaatctctgatatgttgaattaagtttgtaatgtgttcattttatgtgtttgtaatgtattcagtttcatgctcttgtgtttgttatatgctgttgcgtttgtaatgtttcatgctcttgtgtttgtaatgttgaattttagtttcattttaactactattaatgaatgttggcttatattgtttgtgtttgcggatacatgagtttgcaaagtccatgtcttttatttaattagttgagtctattcaattttgtagtggtggacaaagacacttcttaccgtcatcagttgacttgttttgtgttttgttcttttgtactcacaccacttgttatgtgttttgttcttttatgtttgagaccacacaataatattcggaccacaatttgtattaaaagctttccaagatctttggatatggcacgcatttttaggacctccaggtacattaacgatatcaatattctcgttcgctcacctgtttttgatgatatattacaaggtcatgctctgagaatgagatacagagtcagcgag

SEQ ID NO: 168455 - DNA, 558 bp, Arabidopsis thaliana landsberg
actggggaaagaaatggcagggttcttctatctaggagggagagacaacaacagcaacaacaacaagcaagatcatcatcaagtagacaaggatcatcatcatcaagacaagagcaattatctttatctttacaaagacgagatctataataacaacaagggtttcgagatttggcctccgcaatacttccaacaacaagaacatcaacaacaacaacaacagcaacaacatgcctcagctcctgcaaacttctactcatttggaatggttcctagcggaagcagcagcaacaacaacaataaccgtagccggagtttatacttcaacgtagtctccgatcatgagccgggagggttcacggtgacgagacaaggaggtatgaattgtcaagattgtggaaatcaagctaagaaagattgtcctcatatgagatgtagaacttgttgtaaaagccgaggctttcattgtcaaactcacgttaagagcaaatgggttcctgctgctaaacgtcgtgagcgtttagcccaactcgcttccttgcagcaccactgagcctc

SEQ ID NO: 168456 - DNA, 694 bp, Arabidopsis thaliana landsberg
aatcttccggaaaatccatcaccagctggtggtattagaaaacatctctctgatctttcgcatgtgttgaggaagcccgagatttcttattcgatagcttggatcgcggtatcaaccgctgtggttccggttttgacagggtctatgtttttttaccaaacaaagtttctgaagaattgatgcatcacttttagggatctccaaggtgtttggtcaaattgcaatgcttctttggggttttgcgtataatcgttggcttaaatctatgcggccgaggaaattgatgacagccattcaggtgacgatagctttctttgtgatatccgatctcttgtttgtgaaaggcgtgtaccgggatttgggagtctcggattctgtatatgtactcttcttttctggattcttggaaactctcttttacttcaagattctgccgtttactgtcttgatggctcgtctctgtcctcctggatgtgaagggtctctcatggcatttgtcatgtcagccattgctcttgcattcatagttagcggatatcttggaatcgttcttgcatcgtttgtcggtgtaacagaggatgatttctcggggtttactcgcggactcgctatagaagcgataagagttgggattccgttgatcttaacttcgtggatatatgatgaagcggggacaaagtagaagaaaaaaaag

SEQ ID NO: 168457 - DNA, 417 bp, Arabidopsis thaliana landsberg
aaagcggactaaacgtattgttcagtttcatatagcaataaactaattcttgcaattgtccgcttctagtgaaacacataggttgagggttagtgttctatcacctcttggtaaattcttattgtttgtcaaaggtattgtaattatatatatttcattgtttttttttatctaacttatatcattattttgtaagaggtgagaatgtcttaatgagtgaattttgttgttcacatctgtacatcgatccaaccttccctgagatagatatcccaaaatacatgtaaatccataaacattttgtattttttctgcagtaaccataacattaatgactaactatatgttctgaattttgtgttttccagccgcagtatcaaaggtgagaatgatgctctagagaacgtaaagccgatc

SEQ ID NO: 168458 - DNA, 228 bp, Arabidopsis thaliana landsberg
  unsure (1)..(228): unsure at all n locations
aaggcccagtttgaagagtggccctcagagtttgcagacgccgaggcaaaactggtgcaagttacgtccaagctggaagaggcgcnnnnnnnnnnnnnnnnnnnnnnnnnnnnnnnnnnnnnaggcgggcataagtcggttgaagctctcgcggacgagatgggagttaccgatcaatccggttcgcatttgccggctgctgatgtccttccttccgagcctcaagaa

SEQ ID NO: 168459 - DNA, 216 bp, Arabidopsis thaliana landsberg
tatgtgtacaaaatattattttacggttttggtgggaaaacgttggcttacagttgttgcgggaaaacgtgatttttaattttggcagaaaatactttttgtgtgattttggcaagaaaacactttttgtgattttagcgggaaaacgtggttttacggttttgtcgggaaaatgttggtttacggttgtagcggaaaaacgtgattttaatattt

SEQ ID NO: 168460 - DNA, 512 bp, Arabidopsis thaliana landsberg
gctgcccaaaacggagttcctggcctgtactttcaacagctgcaattttacatcggccgtgctgagcaactgggacctgaccgactgcacctttaatgattgtaactttgccctggccaatttgttgcatgccaaactcaagaatattcgcttttcgggctgtaagctcatggggctcgatttcagcgtaagcgatcatttcctgtttgcggtctctttcaacgattgccagctggactatgcttctttttttcaaaagaaaatgaaaaagacccgctttgctcagtgttccatgcaggaagtgaacctggaagaggccgacctttcagaagctgtatttgagcggtgcgacctccagaatgcttcatttgtgcaaactgtcctggaaaaagcagacctgcgtacagcctatcattaccaattcgaccccgggcaaaaccggataaagggagcaaaattttcggtgcagggattaccgggtatgctgaccaggttccagatcgaagtggagc

SEQ ID NO: 168461 - DNA, 208 bp, Arabidopsis thaliana landsberg
tgcatttgcgacctgaccgcaccggtcggcctgtcccagccgactgtgtcccaccacatgaagcagctggccgaggccgggctggtcacccgtgatcagcggggtaaatgggcctactaccgggtcgcccccgaggcgatggccgccctgggcgacatgctgcgcccgtcagcctgacgtccgctaggcctgtacggcggcacccgcc

SEQ ID NO: 168462 - DNA, 604 bp, Arabidopsis thaliana landsberg
  unsure (1)..(604): unsure at all n locations
cactattgataacgtcaaagcaaagatccttgactttgaaggaatccctccggatcagcagggacttatctttgccggtaagcagcttgaggacggaagaactcttgctgactacaacattcaaaaggagtcgacccttcatttggtgcttcgtctcagaggtggtatgcaaatctttgtcaagacccttactggtaaaacaatcaccctnnnnnnnnnnnnnnnnnnnnnnnnnnnnnnnntcaaagctaagatccaagataaagagggaattcctccggatcagcagaggcttatctttgccggtaagcagctcgaagatggacgcacccttgcagattacaacatccaaaaggagtctacccttcatcttgtgcttcgtctccgtggtggtatgcaaatctttgtcaagaccctcactggtaaaacaatcaccctnnnnnnnnnnnnnnnnnnnnnnnnnnnnnnnntcaaagctaagatccaggataaagagggaattcctccggatcagcagaggcccctctttgccggtaagcagctcgaagatgaacgcaaacttgcagattacaacatccaaaaggagtctacccttcatggtgtg

SEQ ID NO: 168463 - DNA, 313 bp, Arabidopsis thaliana landsberg
gtgatcatagcctcaaggtcacttgaactcctccttcagtgcaccattcagtctggcacagatgccagcttttttcacagtctagatagggtgtcgtcccacacaatatgttctgcgccaggttcgctacattcggagtcgtacagccgcaaaaacaggcacatagcctatacaatcgttagtggtggatgtcccggaaggtaacacaaagtaggacacatgcgtcctcgtggaggctttgattcaatgcgatctcagttcttgagcagatgtccccgagcgtctacaagcacaatctatggagaagaacata

SEQ ID NO: 168464 - DNA, 400 bp, Arabidopsis thaliana landsberg
agactgcttctcttctcagtgagcttctttaatggcaagtttctgttctaagtcggcatctttatagtctatactggttgtgaatctgtgaaacagataatagcaggagagtggattgctttatggaaatagttagttgtttgcataatttgagtatttctcatgtactttttatagatttatgactgatgctattattcatttttatccagtggatatgatgaaagaaggcagtgtagtgactctgcgtaatgcgaagatcgacatgtacaagggttctatgaggcttgcagttgatagatggggacgtgttgaagttgcagaggagcccacagacatcaccgtgaaggatgataacaatctttcgctgatcgagtatgagcttgtgagcgtcgaaact

SEQ ID NO: 168465 - DNA, 382 bp, Arabidopsis thaliana landsberg
caacgacagatcattcctttgggacagtggcttccgaaggtagccgttgatgcttacgtggcacccaacgttgtgctggctggtcaggtcacagtctgggacggctcgtctgtttggaacggtgccgttttgcgcggcgatctcaacaaaatcactgttggattctgctcgaatgtacaggaacggtgtgttgttcatgccgcctggtcttccccaacaggttattgcttccttccttccattttcaaaaaaaattgtgttctgattatccaattttttgtatggaatcaagacaatgttgattgggatttaggggttttcattgtccattttcagttatgaaaagcttattgaagagtcgagaacttatatggacaattaa

SEQ ID NO: 168466 - DNA, 413 bp, Arabidopsis thaliana landsberg
tgttatattacgggagccgtcaattttattttcgcacgggcagcagcggtatttcaatatttgccaaatgtaggcacgtgaatgctcaatctcgcgaggaagatactgcaacttcgggattttcgttccagaaatgcaacatcagtgcaagttatgacctcactccaattaaaggaattgtaaagacgtttctgggacgtccgtggcgtgcattctcgagagtagtattcatggagtcgtttatagacgatgtcatcgatccagcgggttggactccatggaacataactgatattggaaccctatcgaccttgtactatggtgaatacagaaatacgggtccaggagcagatacaagtaaaagagtcggttggaaaggatatcacacactcacccctaatgaaactgcaagt

SEQ ID NO: 168467 - DNA, 548 bp, Arabidopsis thaliana landsberg
tatgtcaacacctggagcagttgtattcacctggcgcgggaatgttcttctcctatgcgcgggaacaacttgacccagtgttgaacctattgtctcaaacaatcacaccaatccttgtcaacatatgcccttactttgcttatgcgtacgacccagccaacatccgtctcgactatgccaactttaacactaagttcatcgaggtccaagatggatcattgggctattcaaacatgtttgatgcaatctttgatgcgttcgtgtgggcaatggttaaggaaggcgttaaaaatttaccaatggtggtgtccgagaccggatggccatccgcggggaacgggaactttaccactccggctattgcgtccacctacaacagaaattttgtgaagcatatagcaagcggaaaagggacgcctaaaaggcctaacaagagcatgaacgggtttttgtttgcaacgttcaatgaaaatcaaaagccggccgggactgaacaaaactttggtttatacaatccaagtgatatgaggcctatctacaagctattc

SEQ ID NO: 168468 - DNA, 549 bp, Arabidopsis thaliana landsberg; identical to SEQ ID NO: 17878

SEQ ID NO: 168469 - DNA, 372 bp, Arabidopsis thaliana landsberg
  unsure (1)..(372): unsure at all n locations
ggcaagacggagggcacgccccgcgagcggctgctggccgccgcgctccggctgctagaggacgagggacccgaggcgctgcaggcccgccgcctcgcgcgcgagatcggcgcgtccaccatggccgtctacacgcacttcggcggaatgcagcagctcatcgtggaggtggcgcgcgaaggcttcgtccggctccgcgaccggctggcggcggtccccgagaccggcgacgccgtcgccgacttcctggtactgggcatcgcctaccgggagcacgcggtggcgaatccgcagttgtaccgggtgatgttcggcgtgacggcgccgggcggtttccggttccccggcgtggatcccaacggnctgatgaca

SEQ ID NO: 168470 - DNA, 831 bp, Arabidopsis thaliana landsberg
  unsure (1)..(831): unsure at all n locations
ggactaggaagctccgtcaaagcgacagtccctttaaacgcttatgtttacgattcaccatcaagcaaccctgtgccatctgcaggaagattccgtcctgatatcatcggtcaaatgactcagattgttgactttcttggcaataacagtgcacccatcaccattaacatcnnnnnnnnnnnnnnnnnnnnnnnnnnnnatgattttccactcaattacgccttctttgatggtgctaaaccagtagatgacaatggtgttgcttacacaaacgttttcgatgccaatttcgacactttggtatcggctttgaaagctgttggtcatggagatatgccaatcatcgttggagaagtcggttggccaacagagggtgacaaacacgcaaattgtggtaagacatctaacattttccagttctttagatgcaatgaaatgttttaaaaacgtgttattcgcaggcagtgcttacagattctcaaacggtcttttaccaaggcttggggcaaacagaggcactccactgagaccaacctacattgaggtatacttgtttggattacttgatgaggatgcgaaaagtatagcaccgggagcgtttgaacgtcattggggaatattcaaattcgatgggcaaccaaagtttcctatagatctatcaggtcaaggacagaacaagttgttgattggtgccgagaacgtgacgtatctacctaagaagtggtgtatgtttaatccagaagccaaagatttgacaaaactcgctgctaacatagattacgcctgcactttttcggattgcactgcgcttggttacgggtcttcttgcaa

SEQ ID NO: 168471 - DNA, 687 bp, Arabidopsis thaliana landsberg
tatcgttatgcatcagcatcaccgaatccaagactaggctcgttgtttggaacctttattgtgggcatacccggttattcgagcccacacatcaattcaacaaattcgatagctattcgtatgctctcggatacgacaagagccgcaaatcccacaaaatcttgaggggtattacttgtttggatcccttttttgatgagttcaaaatctacgattttaactctgacttatggagggatcttgatgtaactccggagtggcacttatggcaaatgctccatggcgtgtctctcaagggaaatgcctactggtttgctagagagaattataccgaaacaatggacacagaccattttttcttactctgttttgatttcacaagcgagacatttgggccgcttttgcctctaccgtttgagtttgctgtttctgaagataccaccactctatctagtgttagagaggagcagcttgcggttttatttcagcgatgggacacatcgatgtgggagatacggataactactaagattgagcccaacgcggtgtcgtggaggtcgttcttaacagtgaatgagaacactcacttgctttggctttggctttcaatttgcggttacaggtggaagtttctttattgacgaggatgagatagtcgcggtggtttttggtcatgtctacaaagac

SEQ ID NO: 168472 - DNA, 255 bp, Arabidopsis thaliana landsberg
attggcgataagatcataaggaagaggatccatgttcttgtggagcatgtgcagcagtcaagatgtgctgtggagttcaagctgaggaagaagaaaaatgatgagctcaaggctgcatccaaagccagaggagaaaccattagcacaaagaggtagcctaaaggacccaaactaggattcatggtcgaaggtatgaccctggagactatcactcccatcccatacgatgaagtcaacgacttcaagggtgaccaa

SEQ ID NO: 168473 - DNA, 505 bp, Arabidopsis thaliana landsberg; identical to SEQ ID NO: 19679

SEQ ID NO: 168474 - DNA, 528 bp, Arabidopsis thaliana landsberg; identical to SEQ ID NO: 45081
  unsure (1)..(528): unsure at all n locations

SEQ ID NO: 168475 - DNA, 343 bp, Arabidopsis thaliana landsberg
gcatgtattgaaggattctatcaatcacaatggtaaaccttagatcatgggctctgaccagggatgtcaagataccatctccgtatggacgcaatatctggcacatgagggaataaagatctgcatggatggcaaaggtcgggcgcttgacaatgtttggatagaacgtttttggacatcgctcaagtaccactacatttacctcaatccacccaatgacagaatcgaattggaggaaggtgtgcaacgacatatactttactataacttcaaaacccatcatacaaccggaaaggcgcccaatcaaatgtaccaggatccaatcaaaacagcagcatgaaac

SEQ ID NO: 168476 - DNA, 910 bp, Arabidopsis thaliana landsberg
  unsure (1)..(910): unsure at all n locations
ttgaatttctcactgttctttcttcaaatcttcacatcttcgaatgcattggatgttactcaattcggagcggttggagatggagttacagacgattcacaggtaaaaactaagttctgtagttgtcatttgtccattataatccgaaaaagttcctaaaatatcaaagttttttcctggaattaaaaaaacaaaaggcgttcttgaaagcttgggaagctgtgtgtagcggaacaggagatgggcagtttgtcnnnnnnnnnnnnnnnnnnnnnnnnntacagcccctgaagtttcaagggtcttgcaaatccacccctgtttttgttcaggtactctgtttttcccctgttttttttttccttggatattaatgacgaatattttaaagtaagtaattactagtttgtaatttaattgaagatgttaggcaagcctggttgcaccgagtaaaggaaattggaaaggggacaaagatcaatggattctttttacagacattgaaggacttgtgattgaaggtgacgtgaaattaacggccagggttcgagctgtgggaacacaaaggctctagacctaccgtgagtatcacgttagctgtttgttttcccaaaacattgattcgttttgtatgcagttttagctaaattaaaaacaagataattatgatttatgagattaggcattgaagttcaggagctgcaacaaccttagattgagtgggttaacgcatttagatagtccaatggctcacattcacataagcgagtgcaactatgtgaccatctcaagcctacgaataaatgcacctgaatcaagtcctaacaccgatggaatcgacgtaggggcttcatccaacgttgtcatccaggattgcatcatcgcaaccggtatgaataaactcgatttt

SEQ ID NO: 168477 - DNA, 606 bp, Arabidopsis thaliana landsberg
aggatgtcgattatgttcgtagcagaggttttccgaatcagagatttgatcaccaacaaggctatagaggttcctatgggaatggtccaactagctacactcagaattctcagttccaacaaccgcttcagaatagcaatagtttcagcttcacaaagaactatgatcttgcttcttaccaacccccaccctccacccgcacctagaagcaagatataatcattgctggaacagattctggatggtcaacagtggatcttagagagacctacccctagatggaatgagagcagcctcagcacttcttgggatgctgtttcaatggaaagtgagtatgagttagaaaagattgaggggagtgacgatttttgagttgcagaggcagtgtcgaacgataccaacccttggtgtcgatcgacaccagtgcatatatatgagccattaggctgtgacgaagcaaaatcgagcaggctcgacactgatctctagagtcgctcgacacacattgatagtgttgaccgacaccacctgggtgtcgatccacaacaataccaacctgaggaagtgtcgacgtttgacggagcagaatcgaccgagattgacaga

SEQ ID NO: 168478 - DNA, 524 bp, Arabidopsis thaliana landsberg
tgcataaaagccatagaaatttcccaacccggcggccccgatgtcttgaagctggtcgatcgcaccgaccctacgccgaggccgggcgaggtcctcatccaggtgtcggccgccggcgtcaaccggcccgacgtcttccagcgccaggggcgctacaacccgccgcccggcgcatccgacctgcctggcctggaagtcgcgggccgcatcgtgtccggcgacgtgggcgataccggcctggccgtgggcgaccgggtctgcgcgctggtggcgggtggcggctacgccgagtattgcgtggcgccggcggcgcaatgcctgcccgtgcccaaggggttgtccgatgtcgaggcggcggggttgcctgaaacctatttcacggtgtggagcaacgtgttcgatcgtggcaggctgtccgcgggcgagtccctgctcgtacacggcggcgccacccgcatcggcaccacggccatccagctcgcgaaccgagctggggcacacggtgtatgccacggccggcagcg

SEQ ID NO: 168479 - DNA, 1257 bp, Arabidopsis thaliana landsberg
aaaaaagaagtgttgtgcaagtcatcaaagggcatacaatgttttgagtgcaaaggttttggacatatgcgttataaatgtgcgaatttgatgaaggaaaaggagaaaaaattcatcatgagtgcttctggaattgattcagatgatagtaaagaattggagaattttgtggcctttatgacctttgagtctagtattgcgtcagcatttgcatgcttcagcatctgcatcagggcctgcatcagcgtctgcaacaagatctgcaactgaaagtgataatgatcaaagtgatgatgatgatgcaagtattagtgatgaagagtttgcagagaattacaaaaccttatatgagcattgtgttaaggtagttgaggagaattcagtgttaaataaggagaagctcaagttagaggctaaagttgttgaaacactgaaatttgctgcagagaaagaagaagaagcgtcacaagctaaagtacaacttgaagaaactcaaaagaatttgaggatgcttaataatggcacaaagaagttgggtcatattttgagtattggcaagactgataagtgtggtcttggatttaaaggaaatccttcaaaatcagatccggtgtttgtttatggtggtaaaatcacgtctgcatcaggaactgtgaaggaaactgcaactgtggcagagattgcatctgatacgagaactgattcgagaactgatacagagactgcatccagtacaagaaaagttcaaaaattgcagagtgaacctcgacgagtttttcgaccagtttgtcatcattgtggagttgttgggcatattaggccaagatgtttcagattgttgagggagaaaaatcgattgatgaatgcttatgatgtgagatttcatggtcctaaatgttatcattatggagttcaaggacatatcaagaggaattgtttcaggttcattcgagaatgcagtcatgagggtttaaggctcaacaaagtatgggttaggaaagatgattttcatggaagtggtgttctaggctatcaacctcgtattgcgaagcggggagaattttataagtagttttgaccatgttgtgactcattcagggggagaatgatgatgtgtatggtgatgttgtgttggagttagaactgatgagttcacgacatagtcaaaaagggggagattgaagatgtagctgctgctgatggagttgttgaatgatacaagaagtattacgcgattatatctgatgaaatttctga

SEQ ID NO: 168480 - DNA, 1355 bp, Arabidopsis thaliana landsberg
atgtcaggagatcacgccaagaaggagatggtgaccggcgagaagcccgctacaagccacgggaaggctccatcgggagagtcccgcaacaaggggaaggagaagaaatctccttcacacaagtcgcatcagagtggcaaaaagaaaaagaagatgaggaaggtggtctactacgagaccgactcttcatcgccatccacctccggctccgacgcgccgtccgtaacttctaagcgccatgagcctaagaagtttaataagattcccctacactaccctcacatttctaaacgtactccattactttccgttccattaggcaaaccatcggtttttgacggtgaagattataacatgtggagtgacaaaatgaggcatcacctaacctcactccacactagtatttggaacgttgttgagtttggagcgcaggtaccatatgtgggggatgaagcatatgattcggacgaggtcgcccaaatccgacactttgtctcccaagccaccactatacgcctcgcctctctatgtcaagaggagtataaaaaggtgcaagggctaaaagcgctaaggagatttgggatgtgctaaagaccgcgcatgaaggggatgaggtgaccaagatcaccaaccgggagatgatcgagggggagctcggtcgattcatcctcaaccaaggagaggagccacaagcaatgtacaaccggctcaaaaccttggtcaaccaagtgcgcaacctcgggagcaccaaatgggatgaccatgaaatggtcaaggttattctaagatcacttgtttttcgtaatcctacacaagttcaattaattcatggtgatcctagatataagctaatgtctcccgagaaagtgataggaaagtttgtgagctttgaattgatgatcaaaggtccaaacaaattgttgagcaaggcgcacctccacacccgaggtgcaacccgtcgcattcaaagcgatggaagaaaagaaagaagagtctacatcaagtaggctccccatcgatgcctccaagctcgacaacgaggaaatgacgctcatcataaagacgtttcgccaaatcctcaagcaaaggagggggaaggattacaagccccgctccaagaaagtttgctacaagtgtggtaagcccagtcatttcattgctaaatgtccattatctagtgatagtgacaggggcgacgacaagaagggaaagaggaaggaaaagaagagatactacaagaagaagggcggcgacgcccatgtgtgtcaggaatgggactccgatgagagctccaccgactcttcctccaacaaggacgccgccaacattgccgtcaacaaagaccttctcttccc

SEQ ID NO: 168481 - DNA, 253 bp, Arabidopsis thaliana landsberg
gtattcccaggagatttctcattcttcgctttgtgtcaatgacaggaatccaaactttgcggtctttaattggctaagagagattgtggcttggaaaacaagatttgaggattgtcgcttcacatgggtccgacgaaattccaacatggcagcagacacattagctaaacatgcactaccttcacatacttcttatcatttttctaattttactcctcatgtaatcaccgacatattccatcgtgactttatc

SEQ ID NO: 168482 - DNA, 578 bp, Arabidopsis thaliana landsberg; identical to SEQ ID NO: 2726
  unsure (1)..(578): unsure at all n locations

SEQ ID NO: 168483 - DNA, 526 bp, Arabidopsis thaliana landsberg
ttacatgcattgcaaattcttaaatcaaatttaacattcttgatctaatttgttcttctttttctgtgtgattacagctaacaagcgccatggctggtctgattccgacactcgaacccagtctcgacgccgagacaagacaagagttcgaacaacttgagatcataaaatcagatatcgacaaaagagccgatgatctggttcgaaaagaattatgggccggattaggcctaataatggcccaaacagttggattttttaggctgacgttttgggaactgtcgtgggacgtgatggaacccatatgcttctacgtaacttcgacatatttcatggctggttacgccttcttcctccgaacttcaaaggaaccttcctttgaaggtttttacaaaagccggttcgagacgaagcagaaacgtttgattaaaatgcttgatttcgatatcgatcgatttaccaagctacagaagatgcatcgtccaaatttgactaaatctggtcgttgttgatcgtaattcttttc

SEQ ID NO: 168484 - DNA, 830 bp, Arabidopsis thaliana landsberg
gttctcttttttttacccttttaaccccatcattattcacatttcctaagggtataactggaatgacagaggggggaaaatgaccactcactttcattgctcgtgtgttgtttgttggcagagagataatgcatgctatgtggaaacctcagaagttcaagtccatatacctgtttgcaacactctacgtgctgacgctaacgctgccttctgcgtctgcggtttattgggcgtttggtgatttgcttctaaaccattcaaacgcatttgctcttctcccaaagaatctttaccgtgactttgcagttgtgcttatgctcatccatcagttcatcacctttggttttgcttgcacgccactctactttgtgtgggagaagcttatagggatgcatgagtgcagaagcatgtgtaaacgagccgctgcgaggctccctgtcgttatacccatttggtttcttgctatcatattcccgttctttggtcccattaactcaaccgtaggatctcttctcgtcagcttcactgtctacatcatcccagcactagctcacatcttcaccttccgctcatccgccgcacgtgaaaacgctgtggagcagccaccaaggtttctaggacgatggactggggcattcacgatcaatgccttcatagttgtgtgggtgttcattgttggattcgggttcggtggttgggctagtatgatcaattttgtacaccagattgacacctttggcctcttcaccaaatgctaccaatgcccaccaccggttatggtctcacctcctccaatcagccatcctcacttcaatcacactcacggcctt

SEQ ID NO: 168485 - DNA, 653 bp, Arabidopsis thaliana landsberg
aaatatatcaagtatatatacgaatgttttctcttgttgattagggctattgaggaagaggcactatagaggggtaagacaacgaccatggggaaagtgggcagctgaaattcgggatccgcaaaaggcagcacgggtgtggctcgggacatttgagactgctgaagctgcggctttagcttatgataacgcagcgcttaagttcaaaggaagcaaagccaaactcaatttccctgagagagctcaactagcaagtaacactagtacaactaccggtccaccaaactattattcttctaataatcaaatttactactcaaatccgcagactaatccgcaaaccataccttattttaaccaatactactataaccaatatcttcatcaaggggggaatagtaacgatgcattaagttatagcttggccggtggagaaaccggaggctcaatgtataatcatcagacgttatctactacaaattcttcatcttctggtggatcttcaaggcaacaagatgatgaacaagattacgccagatatttgcgttttggggattcttcacctcctaattctggtttttgagatcttcaataaactgataataaaggatttgggtcacttgttatgaggggatcatatgttctctaatcga

SEQ ID NO: 168486 - DNA, 735 bp, Arabidopsis thaliana landsberg
atgatatgtaataatcagcgagagttcgacaattcacttaagtgttaccaaactgcgctagtaacttcacaatggaccgttcacttcttaatcccatcgtttattctcaaccctatagtgccacgaaactgcccaacaaaattcatcccgattagaatttgttaagatctaaagatgacacattgaatctgtgtatctagggtttcaggaattggcagaaacagcaatttcttgcttaagaagtaatcgtcgtggtgattatgatttaccttttccgacgactttgacggctcagataacttccctaacacttcctctatcaaaaaccaccatagatattttctatgcggcttaggtattaccggaaatatcctccaaaaactccaacttgaatataaaatatttagctgaaataacttagcttttctgaaaacagaaccagtgatttgtcatcaacttgcgagatgaattgtgaatgcaatatacctccgtttgataaaccgtaaaattctatggactccttgcaccaagatgtatcccgagacgctaaaatctcgatgtaactctcttcggtttgacgggtaattagtcctcaaaacccttccatgtcacagttttctcttcttcttcttcacgaacaaaacctagatttaaatctatcaaaacaaaaacttgcagaagaagaagacataaacatgttaggtttccttacccaacaaaccaatgatgacaagg

SEQ ID NO: 168487 - DNA, 900 bp, Arabidopsis thaliana landsberg
cacattccttaatcctctaaatcatacaaaacttagttctttttccttcgccagggatttgatgaatttgattcttgataaaggtcatagcagagtcccagtatactatgagcaacgtaccaacataattggacttgttttggtaagtttctatctcatgatgggtaaaacaaaactcttctgtattttcattattgtcctcctgtatctgcattcaacggctcccaaatttatctctaggtgaagaacttattgactatcaatccagatgaagaaatacaagtaaaaaatgtgactatacgaagaatcccaaggtaactttaccatttagattttgattaccaaatataaacgattgaagacttgttgaatatgcttttgattgcttgtttgctccagagttccagaaacgttaccgttatatgatatattaaacgagttccagaaaggacatagccacatggctgttgttgtgagacagtgtgacaaaatccacccgttacagagtaatgatgctgcaaacggtaactagtttttcgtcgtgggagtaacaatggggatggagatttcttacagagactaataatttcctttccactttgaatagagactgtaaatgaagtcagagtggatgtggattatgagagatccccacaggaaacgaagttaaagagaaggagatcattacagaaatggaagagctttccaaaccgagcaaattcgttagggtcgaggagcaagaggtggtccaaagataatgatgctgatattctgcaacttaacgaacatccacttccaaagctagatgaggaggaagatgctgttggtatcattacaatggaagatgtcattgaagaacttttacaggtacttaaacaaatattacctcttcaattctct

SEQ ID NO: 168488 - DNA, 419 bp, Arabidopsis thaliana landsberg
  unsure (1)..(419): unsure at all n locations
ttattttgcatacttaggcatctaggatcatcttgcatatgcattgcatattttggtgtgttttcaggtgcagaaggagctaaaaaggactctactcgatccattcactcgacccaggtagctacagaagaggatgcagtttactcgacctctttactcaatccaggatgtcacagaggaggctgcagtttactcgaccctcctactcgatcaaggcaacctctgatgaagcaacagattgatctactcgcctctcctacttgatccatttactcgnnnnnnnnnnnnnnnnnnnnnnngacttattgagctatcaaagcgtcttcggatcctcctcattccccactcaaccagacatctgagcatacagataggagaggattgaacatctactcgaccaaattgtcactatgagcata

SEQ ID NO: 168489 - DNA, 794 bp, Arabidopsis thaliana landsberg
ctatccctaggaaagaagatttgctgtcgtgctaggagcacttctttcaagtcagacaaaagatcaagttaataacggtgcgttttgtgctactaagagacacttatttcacttttctagtttacactcaaatcatctgcatttacaagttcatgattgtacatggatacttactattcagacgctttcaacatgcagcggcaatacatcgtcttcatcaaaacggccttcttactcccgaagcggttgacaaagctgatgaatcaaccataaaagaattgatctatccggtatgttatccaagtgccgtcttacttcttcacgtcattgcctctaacatgagccccttgatgtgctaattttatgccattttctcataaaaaggccttattcttagtaaaatcttggtttaacagtttgccttttctttcaggttggattttatacaaggaaggctacctatatgaagaaaatagctagaatttgtctagtgaaatatgacggagacattccaagctctttggacgacctgctgtctcttccagggattggtcccaagatggcccatctggtaaaattcgactatattattacttatatcttgtgagttttagatgaaatgttttcaaaaagcttctcaaatttctcttctgttctctacatggcagattctgcatatagcatggaatgatgtccaaggcatatgtgtagacacacatgtgcatcgcatttgcaatcgacttggttgggtgtctcgtccaggaaccaaacaggtacctctaaattggcttcaa

SEQ ID NO: 168490 - DNA, 612 bp, Arabidopsis thaliana landsberg
tttctttatgaggacgaaccaatgaaagttgaagacgaagcaacttatgagcttatcaaagacgaactgatgaaagcagaagacgaagcaacttattggctaatcaaagaagaactgatcaaagcagaagacgatgtaatcatctcacgttatctgaagcgtatgatcgttaacggggattcgtggcctgatcacttcatcgaagatgtagacgtgttcaacaagaatccaaatgaggagtttcattctcagagccctagattcgtgatcgttaaaccacgaacagagaattgtggtagaaccgatggatgtgaatacggttgttggagaatcatcggtcgtgatagagtgatcaagtcggtgacgaccgggaagattctagggttaaagaaggtttataagttctgtgaaactgatcggaaaccgaaatcggtttttaagttcttggaaaaggagaagagaagagtaagagatagacgaatctgggcgatggaagagtataggtttgcaagtacgtggaaacaagattacgtgatctgcaagattcgacgtctgtatccacaaccatttgactacatgttggcccagcacattcgaggttactataaatga

SEQ ID NO: 168491 - DNA, 507 bp, Arabidopsis thaliana landsberg
aggtatcacccaaagattgggagaggcactcggcgaagccaaggtggcgttgtagacgttctatctacgaggaaatacaataaataagagccatttattcttggtacgtaatttttaagaggtcaattatgtttctctgttaattattaatactcttgtttgatatatgtataacttgtgtttacaggatctcaagcagatcaggtttgttatattccgtatccatatacgaagaaaccaaagaacatttggctcaatgttttaaaagtcaatccgaggggaaacatttctggagaatatgaaaacaatgatccgactctttttcaaacagaaaatgatgatgctgttttactcactacaattgaagatcttgtactagaaaatccggtggaaagcttaaacccaataatccttgattacgatgtcggggatgctgaaccagaagacgaattccgatgtaatttatcgtcctcggacgaagatgaagtagaatatgaagagtaataa

SEQ ID NO: 168492 - DNA, 700 bp, Arabidopsis thaliana landsberg; identical to SEQ ID NO: 40759

SEQ ID NO: 168493 - DNA, 1355 bp, Arabidopsis thaliana landsberg
atgagtgatcgggcacaaccgtcagcgtcagagccagtgagaaacatagttcttgtggggcctaccggaaacgggaaaagctccaccgggaactctctcatcggaaaagaagtgttcatcttggaaaccgtggaatgtaagacatgtaaagctaagacactagatggccagataatcaatgtgattgacactcctggtatgtttctcctttaacatttgaatgaagtgaggctatgtctcttttcatgagcacacaatgttcattatgatttttgggtcataatatctgattttaaggtggttagattgtgttgcggaatcttgcctttataaagttcgtaaaagtctggctgtggaatggtttcgtgatttaggtctcttcgatttgtccgtgtctacggattatatgaacaaggagatcatcaattgccttaccctcacggatggagggttacatgctgtggtgttagtactatctgtggggactgacattttaaaagaggaagaggccgcacttaacaagttacagctcctttttggcagtaaaattgttgactatttggtcgttctcttcactggtggtgatgttttggaaaaggaaaacaagacacttgacgactatttgtccagaggctgccctgaatttttgaaggtcaagttagtttgattatgaaaattatttttgcaacataggtctctgcctatcttatatgcgtacttcaaatggactttttcattttcagacagttcttagattgtgtggcggaagaagggttttgtttaataacaagactacggatgaagtcaagaagatcgagcaagttaaacagctccttgcccatgtcgaagccattgaaaatctcaacggtgggaaagcgttgtttactgaagaaaatgatctaaatgaaaaggtgaaactgtgattactttacttctactcttcataattctaatgtttacttatcctatataacatttgttgatatgtttgaatccttacgatttctcagagacaaggtgagatgcttatggaacaggaaatggaggtacaatctaagaagcctgagaacacagaggtagaagagatgaagaagcagttagaaatatcgtatggccaacaaatgaacatgatggcacagatggtaatttcctttccattaactctaggcaacactactgattcttgatgtatcaggtaataactagatctggatctctttcaggtggaggacacgctaaaggagtcatcggcgtcacatgagagaatgttactagcactgaaagataaagttgagagatcatacttagaaaatgaagacatgcataatgagaccaaaagatgtaacatcctgtga

SEQ ID NO: 168494 - DNA, 715 bp, Arabidopsis thaliana landsberg
cgcactggacctgaacggccggcgtgccgcgggcgcgggggcgcgcaaggtcgcggtcgtccggctgccgcggatcagcaacttcaccgacctcgacgcgctcggcctcgagccggagctcgacgtcacgttcgtctccgacccgcgcgacctcggcgacgccgacctggtggtccttcccgggacccgcgcgacgatcagcgacctggcctggatgcgctcgcgcggggtggatctcgcggtcgtcgagcatgcccggcgcgggcgcccggtgctcgggatctgcggcggctgccagatgctcggccgcacgatcgccgacccggacggggtcgagggcgcgcgcggcgcggtggtcgaggggctcgggctgaccgggcacacgacggcgttcaccgccgagaaggtgctgcgactgcacgagccggccggctacgagatccaccacggacgggtcaccggcgagacgacgagcggaaaggtgacgggcacgatggtgcacggctcgctcgaggacgacgccacccgggcggcgtacctcgccgacgctctcggcgtgacgtcgcaggcctccttccccgccgcacggtcacggcggatcgacctgctcgccgacctggtcgaggagcacctcgatgtggaggcactgctggccttggcccgctccggagcacctgcggatctgcccgtcctgccaccgggtggcgccagatga

SEQ ID NO: 168495 - DNA, 1942 bp, Arabidopsis thaliana landsberg
  unsure (1)..(1942): unsure at all n locations
ccgatcatacacaaaatctaatcttagttctgttctgtatgactcattntgctctgcttattttgtaggaggttcaaactcgtcacacatcattggagctgtagttggttctactgtttttctgttaattctaatgatagctgggatctatgctcttaagcaaaagagaagagcagagaaagcaaatgatcaaattaatccttttggtaaggacgttttactatcagggaagactgacaaaatactaatagctttttttttgtatgttacagccaagtgggatgcgaatcagaacagtgtcgatgcaccacagcttatgggaacaaaagcatttacttttgaagagatgaggaaatgtgcaaacaacttttcagtggcaaatgatgttggtggtggaggttatggccaagtatataaagggattcttcctactggtcaactcatagcaattaaaagagctcaaccaggatctttgcaaggagcgttggagtttaaaactgagatagagcttctttcaagggtccatcataaaaatgttgtcaaactcttaggcttttgctttgatcgaggagaacagatgctcgtctacgagtatattccaaatggttctcttagagatagtctatcaggtaatatcaaatctatatatcccttcctttgaaaaaattattttgtactaaacaggacaaaaatgcagggaaaagagggattagacttgattggacaagaaggcttagaatagcacttggttcagggaagggtttggcttatcttcatgagcttgcagatcctccaattatacacagagacgttaaatcaagtaatgtattacttgatgaaagtttaactgcaaaagttgctgattttggcttatctcaacttgtggaagatgctgagaaagctaatgtaacggcacaagtgaagggaactatggtgagtagagaatgaaaataatcatcctcttttctttctttatcaaatatattttaaactctcaatatcttttgaattagggctacttggatcctgagtactacatgacgaatcaattgacagagaagagcgatgtatatgggtttggggttatgatgcttgagctactgactggtaagattcctatagagaatggaaaatatgttgtgaaagagatgaagatgaagatgaataaatcgaagaacttgtatgacctacaagattttctggacactacgatcagcgcaacgtccaacaggaatcttaagggatttgaaaagtatgtagatgtggctctaagatgcgtagatccagaaggagtgaagaggccatcaatgaatgaggttgtgaaagagattgagaacataatgcagtatgcaggattaaaccctaacgtagaatcatatgcgagttcaagaacgtatgatgaagcaagcaaagaatctggagatctttatggaaacaactcttttgagtatagtgcaagtttcccaactacaaacctcgaacctcaatgactggttgtggatttatttgcttgtttatccagatgctaggtccaaatgttatgctttctgctttttcaaattatgtgagtttctgatgtagaaattggtgcaactcttgatgtatcatataaaatgcataaaaaaaaattcaaaatactaaaatgccctgattgttactaaaccgttagttaataatagtttaaaacaagtcatgttttataaagaactatcactttcagtcaaaataaagaaaatcacaagtttatgcctaaactagaattgcattttaacgccaatttagcaaactcacaatttgataccataactgcgaaattaatttggtgatgcttgaactattgagctgttaaagtatgagacagaggtaactgcgtggtgaggagaggtgtataggaagatggataaatcaagaaatttttgctttgtggctttaatgaagttga

SEQ ID NO: 168496 - DNA, 591 bp, Arabidopsis thaliana landsberg
aactatggtgtatgaagccgaagctagaataagagatccagtgtatggatgtgcaggtgccatataccatttacaaagacaagtgagtgaactccaagcacaacttgcaaaagctcaagtggagatggtgaatatgcaatttcaaagatcaaatttactagagctgatttataacatggaccaacaacagaaacaagaacaagataatatgtcctttgagagcaatgatttgggatttcttgaagacaagtccaacaccaactcatcaatgttgtggtgggatcctctttggacatgttgatcattactaagattttgactacttcgctttaaggccctctctagaactttactcagggttagttagcatacacaaatgtagcattgtacggtgaataaagaaaagtagaggcggcttttttaaattgttttttggaccgggttttcaatgttttttcctgcggtttttagacacaaaccggaaagtataccggatctaaacaaccgcagagcgaaaaaaaaaaatctataactaaacgacgtcgttcggctctttatcttgtcactctcctcaggcgacggcgacgatga

SEQ ID NO: 168497 - DNA, 2206 bp, Arabidopsis thaliana landsberg
ggttgtttactagaaactaaaagtaaagaaagttagagcagctcggataattaattatgtgttcaaagattggtcttcactctcaaattatgaagagcatcgacttggtaggttatggctggtttggagaacaatgtaaggctcacactgctttataagattgcacagcttatcacttgttcagtctatgtcgaaggtagacatgaggaattctttgtctcttttgtttatgcatcaaactttgtagttgaaaggaaagcgctttggagtgataacagaaaccatcaagattctcctatgtttaaagacaaagcttggcttatatgtggggattttaatgaaatattggaaggtgatgatcattctctatatgattcctcaccttttattccatcagggatgcgagattttcaggatatagtctgatactgtgaactcacggatctaagctatcaaggtacaagattcacttggtgtaataaaacacaagagggtaccatatgcaagaagctagatagagtgttagtgagtaagtcatggttacaaaaatatagtcaatcatatgctatatttgagccggtaggatgttcagaccacatgcgttgcagatttcacctgtcaagggaagtgtagagggtaaaacgacctttttaaatttgtgaatacagtgacaacgtaccttggctatcatacaacacttgaagagagttggagaacatcccctccactttttcactcaacatctgcaatgtttaggctgtcaaagaaattgaaagagctgaaacctcatctacgaaagatgggaaaacagatggttagtgctatatcaaatcgtattaaagaagcctataagagactttgtgacctgcagaacgtgacaatgactgatctaacatcgcaagcattcacagctgaggcagctgtgtatgagaaatggaggaggttgtcagacattgaggagaggtacttgcaacaaaaggcaaagcttcactggatgagaataggagatcagaacaatacggctttctttgctgcagcaaaatttaaggaagtaagaaacaatatcagagaaattcagtgtgaagatgggaccatagcatagactcaagatcgcattaaaataaaaccagaaagatactttagagattttctatctatgcgtagattatatccaatggtcgagacaagatctagaaagcattgtgagctttaaatgtgatcaagaagacaagaacatgctgataaaagaagtatcagaggaggaagtaaggaaaacattatttgcgatgccggttaataagtcaccagggccagatggattcacctctgagttctttaaggaatcatggtcaattgtgggtaaggacttcgtggtagctaaccaatcttttttcaagaaagggtttctaccaaaagagtaaattcaactatcctagctttaataccaaaaagaaagaagcaaaagtaatgaaagactacagaccaatatcttgctacaatgttctatataaggtcatatccaagattctcgcaaactagctcaagaccattcttccaaagttcatagctccaaaccaatcggccttcatcaaagacagattgctaatggagaaccttttgcttgctacagaagtaattaaagattacaacaaagattcagtctctccacgttgtgctgtgaaaatagacatctctaaagcatttgattctgttcaatgggggtttttgttcaacacgctgcgagctctcgatttcccagagcaatatgtagattggatacaaacctgtgtcagctcagcatctttctcagttcaagtaaacggtgaactcgcatgttattataatagccagagaggggttcgacaaggctgctccttaagcccctacctattcgtcatatgcatgaatgtgctttcaagaaagatagataaggcttttcatgtgcgctgcgttcgactgcctaaagcctgggtaaaagaaattgacaagatgtgcgttgcgtttttatggtcgggtccgattttaaatacgaggaaagccaaggtcgcattgtcagaggtatgtactcccaaaagtgagggatgtttgggaatgagatctatagaagaagcaaacaaagtatgtgtgttgaagctgatatggaggatactttcagcgaaaggttcactttgggttgattgggtaaacaaacacttaatacgtgatg

SEQ ID NO: 168498 - DNA, 583 bp, Arabidopsis thaliana landsberg
caagtgagggcggtgatctccatatcctggatatcggaacgggaacgggcgccatatgtctggcgctgctgagtgagcttccacaagccaaagggaccggtagcgacatatcggccgacgcgcttcaaacggctgcggccaatgcgaagcggaacgggtttgaggagcggttccgggcaatacaatccagctggtttgacaatatcgatggacgctttcacgcgatcgtctcaaatccgccctatattgcctccaaggtcattcacgatctcgctcccgaagtgaagaaatttgatcccgcggcagctttggatggcggcccggatggacttgacgcctacagggcgatcgccaaggatgcggcaaggttcttgcggcagaatggcattatcggactggagatcggcttcgatcaatgtgatgacgtctcggatgtcttcgagaaagaaggcttcaaacgtctggagtccgtaaaggactacggccagaatgcccgggagatccccctcgcactcaatgtttgagaaacaaattgcagcattggacaggacgatattgctattccgaagaaagggcttgcatt

SEQ ID NO: 168499 - DNA, 1038 bp, Arabidopsis thaliana landsberg
tattttcgttttctgtctaatgtctttatagagcatgatttttctcgtaaatcaaagttgcattcgccagatccagattcagaggatgatgagcatgatgatgatgacaacataatggttggaatggagcctggtctaagagataagaaaagttttggggaaccaagactgaaatccccttctaccagtttctataattctgtacctcgccacaaatcgtttaaagagacattcaaaggttcacaacgggaaatccctgtaactaacagcaagaagggtcggataagttccaaaagttgggctgaagggtcgagaaaccatctggttgccaacgtccaaaatctttctggaagcaatattgaaaccaatcagtctcatgattatgataataatatatctaatggcggacgcaagacgggatatctcactaaatcttcgaagctgttacctccgagtagaagcagatcccctgagtcaatggatagaggtccatcttctgggatggtaaagatttgtctaatacttccatgtctacatgttcctttcttgcccttttatggaaatatgacttgtgttttgtgtgatatcttcttttaaaggcaggaatatatcacggggagaggaatcaaatgaaaatgcagagagagaaattgcattcgactgatgaaccaccggtgagtttgatggttaactatcttaaaaatatagatattgatgtatattttaacaaagtttagaggctctatcaagttcgtgttctgacctttaacgaatgttaataggttgccaaacgagtgaaacatgggtatattcagcaagtatatgcaccaaaatcatcatcatacagcgagattcttgaacgaaaaagccagataaatcggttagtaaccaaccattgtgtaatgcatttattgtcccaaagagatatcaaatcggcttattggatcatactgttatgtttgtaggtctggtgtggaactgccttctagtttaagcggggacgatgagactgacgaatctagctcgtcaatggattaa

SEQ ID NO: 168500 - DNA, 812 bp, Arabidopsis thaliana landsberg
  unsure (1)..(812): unsure at all n locations
gaaaagcaagagaggaggagaaggatcgtgttgattcccgctccagcacaaggacacatatctccgatgatgcaacttgcaagagcccttcacttaaagggtttctccattacagttgctcaaaccaagttcnnnnnnnnnnnnnnnnnnnnnnnnnnnnnnnnnnntcagtttatcaccatcccagagagcttaccagcctcggatcttaagaatctaggaccagtttggtttcttcttaaactcaataaagagtgcgagtttagcttcaaggagtgtttaggtcacttgttgctgcaaaaaccacttaaaccggaagaagagatcgcatgtgtcatctacgacgagttcatgtactttgctgaagctgcagccaaagagtttaagcttccaaacgtcattttcagcaccacaagtgccacggcttttgtttgccgctctgcattcgacaaactttatgcaaacagtatcctgactcccttgaaaggtactcttgaattctctgtcttctattcttgctggtttctataatctgtaacagcatggttcttgacctttttgcagaacccaaaggacaacaaaacgagctagtaccagagtttcatcccctgagatgcaaagactttccggtttcacattgggcatcattagaaagcatgatggagctgtataggaatacagttgacaaacggacagcttcctcggtgataatcaacacagcgagctgtctagagagctaatctatgtctcgtctgcagcaacagctacaaattccagtttatcctataggccctcttcaccaggtagcatca

SEQ ID NO: 168501 - DNA, 471 bp, Arabidopsis thaliana landsberg; identical to SEQ ID NO: 78993

SEQ ID NO: 168502 - DNA, 652 bp, Arabidopsis thaliana landsberg; identical to SEQ ID NO: 65419

SEQ ID NO: 168503 - DNA, 1172 bp, Arabidopsis thaliana landsberg; identical to SEQ ID NO: 55613

SEQ ID NO: 168504 - DNA, 2110 bp, Arabidopsis thaliana landsberg
  unsure (1)..(2110): unsure at all n locations
gcacttgagcaagtactttgatgtcaacacgttaggttttgaagacattgttggacgtctaaaggtgtatgaagagagaacgtgtgacgacgatgatcaagtagaggatcaagggaagttgatgtatgcggactcttaagataaatggaacgcaaaccgtgggagaggtggtagatcctacggaagggcaagaggacgaggtcgtaatggaggatatcgtgatagatctaaagtaatatgctaccgttgcgacaaattgggacattatgcttcggattgtccggatagattactagagctacaagagactcaagaaagtgagaatggagacactcaacaagctgatgccttgatgatgcatgagctagtatacattaatgagaagaatgtacgaccaaaagctcttgaagagaactcagattttaaagacatgtggtacttagacaatggcgctagcaatcatatgacaggaaaccttgagtatttttctaaaattgacaagacagtgacggggaaggttcggtttggcgatgactctcgaattgatataaagggaaaaggttccattccctttgtaagcaagaatggagactcaaagttactagaagatgtctactacataccggacttaagaagcaatataataagtcttggtcaagctactgaggctggatgtgacgtgagaatgagaaagggatacgtaacgttgtttgaccgagagggagagcttttgatctgggcaaacagagcaagaaatcgtttgtataaagtgacacttgaagtaaaacaaaacaagtgtctccaactctctatgtctagtgactccatgaattggcatgacaagatgggacatattggctttgacaacatgaagacagtgatcaacaaggagctagttattagaataccaaaactcatcgtcgagaaacaaacgtgcacttcctgcttacttgggaagcaagtaaggcagtcgtttcctcaatcaacttcataccgagcttcaaatcctcttgaactagtacatggagatttatgcggacctattacacctcccacaacagcaaacaagaggtatatcttttttcttattgatgatttctcacgatatatgtggacgtttctgttaaaggagaaaagcgaggccttcgacaagttcaagatctttaaagtaagtgttgaacacgaaaccagagctactcttaagacatttcgaacatataggggtggagagtttgtgtccttggattttaatacgttttgtgatgtctctggcattaaaagacatttgacggcaccatactctccacaacataatggagttgtcgaaagacagaacaaaacgctcttaggaatgacatgaagtgttctaaaacacatgagtattccaaactttctttggggnnnnnnnnnnnnnnnnnnnnnnnnnnnnnnnnnnnnnnnnnnnnnaagaactttaaacaatcaaactccgtatgaggcattaaagaacaagaaacctaatgtggagcacttacgtgtgtttggctgtgtgtgttacgcaaagactgaagctcctcatttgaagaaacttgatgatcgatctcggatgttagtgcatttaggaacatagtcggggtcaaaagcatatcgtcttttggatccaacaaagcggaaaatagtagtaagtcgagatgtagtctttgatgaagacaaaagctggaagtgggacaaaactgagcacgagagagacaatgatccaagaatgtttagtgtcagttttggagtttttggaaataaaggcataagagacgagagtgttgatcaataagcagagaaagatgaagaagataaaaatgatcatgaggatatacaagaagattcatctcttgatggaaacgatatagtttcaatacaagaagaaatacccatgctaagaagatcagagggacaaacatgaccacccacctatctaaaggattacgttctcttgttcgagttatagggtgaacggcttctgcttgcaatcgatgaggaaccatgggatttttctgaagctatggaactaaaggagtggatataagcatgtcgatgagaaatatcgtgcattgaaaaaaacagaacgtggaatttg

SEQ ID NO: 168505 - DNA, 417 bp, Arabidopsis thaliana landsberg
  unsure (1)..(417): unsure at all n locations
gtgtcgatatcatcttgatcagtntgcagaggaggacctcaaccaaacacacgagagttgtttaacagaaaacattcaggactacgatcagtgattgaaaggacatttggagtgtggaaagcaaaatggagaattttagaccgtaagcatcctaagtatgggataactaagtgggtgaagattgtgacagcgacgatggcactgcacaacttcatacgtgattcacatcgagaagattatgattttgtgcattggcaagggacagaagaatatcatactcatggtgatgaagaagaaaatgacgatgatgatgatcgtggtgagcacattccatatgagcctaccggtgatagagccatggaaggcttgcgtgatactatcacgagtgagcttagtagaggatatcgattaccttat

SEQ ID NO: 168506 - DNA, 416 bp, Arabidopsis thaliana landsberg
  unsure (1)..(416): unsure at all n locations
gcgtggccctccattaccgcctcgaaccgacgctggatccggtggtcgaggtcttcgccgaggatctggcgcggcgcaccggcctgaagttgcaacgcggcatcatggtggtggaattcctgacgccaggcatggacaaggggcggtccgtgcgcgccttcatggtcgagccgccgtttgccggcacgattcctgtttttgtcggcgacgacctgaccgacaaggacggcttccgcatcgtgcggtcactgggcggcatcggcagtgctggtcgggggcttnnnnnnnnnnnnnnnnnnnnnnnnnctgggtaatgtggacgctgtccatcactggctcgaacgcgggctgcaaaccgaatatcttgaactggagaccgccattgagccgtcttatcgtcgtatctaataagcgta

SEQ ID NO: 168507 - DNA, 434 bp, Arabidopsis thaliana landsberg
taatataaaacgtcccaactttctagattcttccactatgtgcacttaatcagtcacgccgaactacttttttggccccaatattttatattatttaaatttaaccccatttctttactttcagtctggttgctgcaagcccccaacaaaatgtggattcacatttgttaatcctacttattggataagtcccatagatatgtctgctgatatggattgtctaaattggagcaatgaccaaaacactttgtgttacacttgtgattcttgtaaagccggcttgctcgcaaatattaaggtagattggttaaaagcggatatctttctactcttggcgcttatcggattgattaatggtctacattatcgggtgctgcgcattccgtaatgcggaaactgaggatattttcaggaagtacaagcagggttatact

SEQ ID NO: 168508 - DNA, 1082 bp, Arabidopsis thaliana landsberg
taaaatattttataatttagtccataatttttaccagggtcataatataaaataaatatacttgattctctactacccgaactccataacagcttggggttcttgattctctagtactaccactgtagatgctcagctcgagcacgacaaatctggtaccactattttacttgatattcgctggcttcggctcgacatcacaagagaaaacacaagggaagaatatgcccttattgagaaaactcaagggaaaaaactcaactttattgagaaagtggggaaggttgtgatggaagagattcaaaaaatgagtagcaccctaactacttatatgagctttaacggctcattgatcaacacttgatattattaaatcatcttcgtcaatggatgatttggcagctaactgcgctcactataatttaccggcgattgttcctcatttgccgccaggattagctccagctcatttcgcctatttgtctacgattggagctactttcagatattaggatttcatggatattttagatatttttggatatttaatcaacttatgtcaaacgactttgaagaaaacatctccaatatcttgaactcttgtccaggataccacaatgtcagatttccataagcttctcccggtttggctcatatggcgaatatggaaggcaagaaataatgtagtattcaataagttcagagaaagcccgtcaaaaactgttttaagtgcaaaggctgaaacacatgattggctcaatgcaacacaaagccataagaaaacaccatcaccgactcgacaaattgcagagaataacatagaatggaggaatccacctgccacatatgtaaagtgtaattttgatgctggtttcgatgtacagaagttggaagctacaggaggctggatcatcagaaatcattacgggacaccaatctcatggggttcaatgaagttggctcatacgagtaatccgtttgaggcagaaaccaaagctcttttggcggctttacaacaaacctggattcgaggatacacacaagtattcatggaaggcgattgtcagacgctaattaactag

SEQ ID NO: 168509 - DNA, 1262 bp, Arabidopsis thaliana landsberg; identical to SEQ ID NO: 33271

SEQ ID NO: 168510 - DNA, 1389 bp, Arabidopsis thaliana landsberg
ggaatcaactaagcagcgattgtagcgaagtccctgtgatcaaagccttgcaacgaggcgttcgagtcatcgagctcgatctttggcctaactctactgggacagatatcaatgtccttcacggaaggtaatatatatatatatatataaaacttgttcttgttctttctctttagtcaaaaacattttcaagaaaccgcggttttcttgattcttcagaacgctaacgacgcctgtaccgctgatgaaatgcttgaaatcgataagagattacgcgttttctagttcgccttatccggttatcatcactttagaggatcatcttacacctgatcttcaagccaaagttgctgaggtataacattttatatatctatatcttgtggttatcaataagtttgattttgatgttgtttgagttttttttttctttctttagatggctacacagatatttgggcagatgttgtattaccctgaatcagatagcttagtggaatttccttctcctgcttcactgcttcatcggataatcatctcaaccaaaccgcctaaagaatatctcgaatcgaggaacccgattgttaaacaaaaggacaataatgtatctccatcgtcagaggatgaaacacctagaacagaggagattcaaacactagaaagtatgttgtttgaccaagattttgaaagcaaggtaacaaaaaggaacttagttcatgaaaaaggttcaatatacattgtttgttgttttgtaatttagttttgagttttgaattagagtgatagtgatcaagaggatgaagaggctagtgaagatcagaaacctgcatacaaacggttgatcacgattcatgctgggaaaccaaagggaacggtgaaagaagagatgaaagttgtggttgataaagtgagacgtttgagtttaagcgagcaggaacttgacaggacttgttcatctaatagtcaggatgttgtaaggtagtactaatttatataccatcctaactctttataggccagggtttgcaacttgattaatctcaatgtttttttaggtttacgcagcggaatttgcttcggatataccctaaagggacaagatttaactcctcaaactacaaacctcttatcggttggactcacggagcgcaaatgattgctttcaacatgcaggtaacaagctaagttttgtaaggtctatggataccttgactcttaagctaccttttgtgatgtataaagtgatctctgtataagaaatgaaacatttggtgattatagggatatgggaaatctctgtggttgatgcacggtatgtttagagccaatggaggttgtggatatgtcaaaaaacctaacttcttgatgaagaaagggtttcacgatgaa

SEQ ID NO: 168511 - DNA, 597 bp, Arabidopsis thaliana landsberg
agaatcgttaacttcttaaattcgttgttcagcagcaattcagaacaatccaatgcggttaagagttatccaagcaagactagttacgatgattctgcttgcgtgaggaaaacaagtaatgattatcattcatctactactacgtgttcttcagcttcttctttctcaaggtcgtgtatgaacaaaggctacgagaaatcatctgggcgtatcaaaagaagcgttagattttccccggtcaatgttatcgtccccgagagcttcaccagcaaagaagacagattatttcagtaacggtaacgctagaaagtcggtgaagaagaatgtggaagatggagggaggagatcagtggaggagatagcgagagagttcttaagagattatcacaagaatcatgaaaacagtttggttaagactaatggttttgaggattatgaagatgatgatgaagacgatgatgatgatgatgttgcaagtgattcgagttcagatctgtttgagcttgatttagttggaaatcatcatcatcataatgtgtacggagatgaacttcctgtgtatgaaaccacttttgctggtttgatcttgtgaaactt

SEQ ID NO: 168512 - DNA, 988 bp, Arabidopsis thaliana landsberg
tttttttttttttttattttgggttcgaattaagggaatcaccattgactggttgaagaagcaaacagtgaatagcatcataggtcttttagggaaaattgatgttgtggaattacatgccaaaaactctcctgctctagaatatgtgagagtgagagtttggattaacgctaatgagccactacaatatgttaagagagcaagctttaagttaagggaagtggcttagattgaactcgtgtaatgaaacattgttaaaagtgtgcttcctctgtaaaaggcttactcatgataaatcggcttgttcctacgaagttgttgatcaaccacctgaaaaaaagcaaggtttttgagaaggaaggaaccggcaaaaccgaaagaaaaaggcaagggtgagatggataatgagggaccataaaaaaaccagccaattcaaaagaaaggcatggtttcttcttctaaatatgttaaagatagacacaattggaatggctctcctgatagtcagattcagtaggtttggagaccaattagaagagtgcacaaaacccctgcaaaagctatggattatcagagtctagaggatagtcaaacaaatcagagcaaacggtgaaggtctaacaccagtagaaagatatccagtaagagagcaagagtgggatcatgagaaactatgcatcactcaccatcagtctttgagagactgggaatcctggtgagggtatgaagaacctagaaaaagggctccaatgagaaaacaaagcagtctcctatagtgtatgagcgcctagactctcaggactcttcatctagtactcaaattcactctcgtcattatgcccttgtggcagcttcattttcgaatcattatgcctccatgatggcagcaaatcgtccaagttcctatggtgcagcacctgggaatgatagtgaaattaatttgaaagaagggtcgatggttaattccaacccttcaaactctcaatga

SEQ ID NO: 168513 - DNA, 512 bp, Arabidopsis thaliana landsberg
gttgtctatacagatcacattagtagttattcttcaactctcaacagctgcaatccttcacaactctggatggctcaagattctaaccattgcttacttctttggatcattcctcaaccacaatctcttcttagcaatccatgagctaagtcacaaccttgccttttcaactcctgtctacaatcgttgtctcggtattttcgcaaatctcccaatcggtgtaccaatgtcagtaactttccaaaaataccatctcgagcatcatcggttccaaggagtagatggtattgacatggatgttcctacttacaccgaagctcatttagtaaccaatatctttgccaaaacaatttgggttttcttacaactcttcttttacgctcttcgtcctatcttcatcaaaccaaacccacctggctactgggagttcatcaacttcttgattcagatagttttagatgtatcagttgttctcttcttcggatggagatctttggggtatgtaatgttat

SEQ ID NO: 168514 - DNA, 1864 bp, Arabidopsis thaliana landsberg
taagaccaaaagtaaagaaagaaaaacatcgaataacgttttccactggtaactaaaaaaatttctcaaatcgaaaccggtttatttacattagttcatgactaattaaacagaattcctcaaattagttcttatctttgtcaggctttttcgtcggttgcacagtctctctagtggtagctctagtcatgtttatccatgctcgtaatataatgggcgcagttggacataaagtctacatggagacaatgttccctctttacaggttcaaaaccaaaacatatatatatagtttaactctctaattgataacatttttttcttgctgacaagaaatgtttttttgtaccataatttcagtttatttgcatttgtggttctgcatatgatcatgtatgcttcaaacatatacttttggaagcgatatcgagtgaattatccgtttatattcggttttaaagaaggaacagagcttggttatagacatgttctgcttctaagctttggtctcggcacgcttgctctctgcgctgttctaataaaccttgacatggagatggatcctaacactaatgactacaaaaccatgactgaacttcttcccatgtttattttggctgtaagttgttcatcataataaccacgagaatcttaagtacattttgttactaatgtagtaacacatttcgtttgtactatgttttgcagctagtggtagctattttgttctgtcctttcaacatcttttatcggtcaagccgcgtcttcttcctcatggttgtcttccgctgcattgctgcgccactctacaaggtaatatactcatgcaaatccttttttttacgcggggtaaaacatcgataaaaaatcttaatttttactctgaatttgcaggttaatcttccagattttttcttggcagaccaattaacaagtcaggtttgtgtgttctcataacattcttctaactcccatttatatgttttcaaaatgtttcaactcattaatcaactttcttttttttaggttcaagcactaaggagtctggagttttacatatgttactatggttggggagacttcaagcacaggcaaaatacttgcagatcaagcgatgtatacagtacattctacttcatcgttgctgtgataccttactggtcacgttttcttcagtgtgttcgaagattgatcgaagagaatgattcaagtcaaggctacaatgctctcaagtatttattaaccgttgtggctgtttgcttgagaacagcttacagctttaacagaggaaacatctggaaaatctctgcctgggttttctcggcattggcaactttttacggcacatattgggacattgtttttgattggggattacttcacagaccatctaaacatttgttgagagagaagcttcttgttcctcacaaagccgtctactacgttgcaatcgtgagaactatgaaaatcaaaagaacagtacaattcctgattgatggtttccttataagttttgtttctgcctcttcttctttgtaggtcttaaacattgtgttgaggatggcgtggttgcagactgtgcttgatttcaatttatcgttcttacatcgagaaacgatgattgctcttcttgctgctcttgagatcatacgtcgtggtatctggaatttcttcaggtaaatttttgaccacgacacgatcactaaattctctttaaaccattttttactcaagggttcttcctttgacgacttgcgaacacaggttggagaatgaacacttgaacaatgtgggaaagttcagagcattcaaatcagttccgttaccattcaactacaacgaggaggaagatcgagatagttaa

SEQ ID NO: 168515 - DNA, 1067 bp, Arabidopsis thaliana landsberg; identical to SEQ ID NO: 12404

SEQ ID NO: 168516 - DNA, 559 bp, Arabidopsis thaliana landsberg
atgactatgatctctgatctttcgaaggatttggtagaggagatactctctaaggctccgataacttctcttggagccgtgagatccactcacaaacaatggaacgccttatccaaaggtcggctgttgtataaagcggaagcgaaggatcagtttctagggttcatggtgatggatcataggtttttatcaatgatattccatctcaatggaattctaaaaggagacggtgaaggctttgatcgtccatctatcagggaggtaggtgatatagttaatcaaatcgacatctctaaagtgtttcaatgcgatggtttagtgttgtgcgttccaagtgacaactctagtgttgtggtttggaatccgtatttgggtcaaaccaagtggatcgaagcaagagaacctcacgacgaatcagacatgtttgctctcggttacgacaaggacaagaaccacaagatcttgaggccgtacgatgagtgttattactactacgaagaatacaatttcaagacagaatcatggggggaagaagatcaccctccaggctgggatatag

SEQ ID NO: 168517 - DNA, 1012 bp, Arabidopsis thaliana landsberg
atgctcgtcctgtttaggacgtcaggtggttttgcactctttaaagtattagatgaaggaaagctctctaatgttgaggttatttaccttattcattctcttaaactttcattgatcttaaccttgtctatgtgtagtttttttttttatatattaaatatgtcaaatttgttcttgtaggatttgggtactgagttctactctgcagagtcagctcgaagaatggttaagctaaaagtttttcataagtttgacaacacatctgaagctcttgaagctgtgactaaattggtggagggaactccaagcaagggtctacacaagtatttgaaaaataactgtgatgatggtgaaatcttagcggtgcgctgatccaaagcttggagatatcatcacagagaaactggtgtgtgtattttgttatgatctttttatatatttctgtatatggcttgtgtcttacgttacggatttgcttctctcctctaggacatagaatgtgttcacatcgatgctgtcatggagctgttacgaggtgtgagaagccagttaaccgaacttttatccggattggatgataatgatttagctccaatgagcttggaattgtctcacatccttgctagatataaactaaaaatcacctctgacaaggtagtcattaagtttctctgtgttttgttttacccttgcttatgttactttttccctctcatacttaaaatgtctttgttaggtggagaccatgatattcctatctatcggtctgcttgatgatcttgacaaagagcgtaacacttacactaagagggtttatgaatggtacggtttacattttcccgagcttgctaatattgtacaggacaatatcttatatgccaaggtggttaaactaatggggaatcggattaatgctgcaacgctagacttctctgagggaaagccttatttaccattctccttgacttaattgttccattaaactatagttttgctttatgaaacatctttc

SEQ ID NO: 168518 - DNA, 1871 bp, Arabidopsis thaliana landsberg
atggttattataaccgaaataaccgaagactgttatgtccggacggtgagtggaacatgggcaatcggagctgatggcacatggatattcatagcaaaccacaataatgctgtcagacggttgagtattcgtgaaggtgaaaagctgtcatcagttcgggagctggttagagaagcgtacggccaggaatacatgggatgtcagctacacatgacataccaatggcctgattggatggacatggaggctacctttggaggacgaacgaagccagtaaccatcgccacagatgagacaatgggggttttcctagctatgcgttttgagttggaagacttgagtttgtttgtctctaagctaacggtagatggtgttccggttgatgatggaacgagtcagacatcgagttacgggttgccagctaaggggaaatcaccattgtattgcaatgaggaaagatctcctaactacgagtccgccatttggagaaagctaatggatgatgaagcggtcctccgatggatgcgttcgaaaggtacagaaggtacaaacatgggtgactcttcctccaacgtacatgcaccacctgcgggagctactgttgagccagctttgactttggagacaaatcaaagtatggacacggcgagtgaaaaggcagatgaggtaaaaaattagtagttcaatacattctaattaccaagaaggtaccaagcttatatcaactctgtttacgcaggaaggagactcaaatcttgttgaggcagatttgctggcaaatctagggctaccgtcaattaatctggcaactgataattacggttctgacagcggaagtgaagggtacaacgacgagaatgaatatgacgggggagaaactcttgagtgcaactttttcgggccgtcggcgacaatcatgaccaaacctctaggtgtacacttggacctacaggtcccactacaacaggctcttgaagatatgtgtattaactttgcatctttcaacagggatgtggcgccaaccctagatgaacaaggagaagaaggtaccaattgaatagcatgatattttcgtataaaacacatcgatttatatataatttgatatcgagtacctataacatatcttgcacattctgtatccgtcaagggtctacttatttctgttccatatagtcctgtatgttgctaaatagcatgtgatacattggaaactatttttttttggtttataactacgttacatcggattgatatgtacaataatttatatttactttggtatacgtaactataacaagtcatgcttacttatatcgtgtactttctatttatttttccatttattcatgtgtattgtaatatcatgtgttacgttggaacacattgttgtctgatttgatagctaagttaagtaatttttttacaggccgtgtcaggatggaactagcaattcgggatgttgtgtatgaaggtgatgaactgtttgtcggccgggtattcaaaaacaaacaagattgcaatgtcaagttagtagtacacgcactaaatagacgttttcattttcgccggcatcgctcctgcaagtaattaatgactttgacatgcatttcggaatcgtgccctttgcgtgtgtacattgtcaaattggaggactcggacaattatcaaattcgaagtgcaacactggagcacacttgcacagtcgaagaacggagtaactaccacaggggagcaacaacgagggaaatcgggagcataattaagccaaaatatgatggcaacacacgggggccaagagctgtagacctacaacgaatccttctaaccgattattcggttagaatttcttattggaaggcatggtaatc

SEQ ID NO: 168519 - DNA, 1353 bp, Arabidopsis thaliana landsberg
atggctccggtctcgttgcctccaggttttaggttccatccaacggacgaagaactaatcacttactatctcaagagaaagatcaacggccaagagatcgagctagagattatccctgaagtagacctctacaagtgcgaaccatgggacttgccaggtaagaattatttagttaaccataaatcaatctatcagtatatatttggaatgagacccttttatggtctaagcgctgaataggttttgaacgtataggttcgaaagatagagtgaagaaaagaaaaagaatatatatcacaataacaggacaactataatatagaacacttttaccaaaattatatgtatacatttatattggtttgcatattttgattgatttgaaaatcgaagcaaaattttgaaatatttctagaattcactaatcatgaggattttaactaatatttagaaatccctttaaataacaaagagttttgtgataccatgtgttttttttttggtactagctttgactttttcgtatatatcaagaaatcaaaattttaacaattaaaatgaatcaattcaacgtttggattagtttttgtcaattcaacttggattggaagtatatgatttttctgaatatattatataacaatatagccataatactatagtagtattgattagagcatacgcaattgtaggattccctctggtcaaatcctcaaatacttttcgttaacctctcatggaccaccacacttttatgatagtctacactttgtactttagggttttatcttgagagataacatattttacaggggacagaataaaacaaataaaaaccatatatagagaaactcaagttgaatcgatattttgtattcaaatgttattgtttactaatatactcaaccatgtcaattggcagggaagtcactgattcctagcaaagaccaagaatggttcttcttcagcccacgggacagaaagtaccccaatggttcaaggacaaaccgggcaacaaaaggcggttattggaaagccacaggcaaagaccggcgggtgagttggagagatcgagccattgggaccaagaaaacattagtttactaccgtggacgtgccccgcatggtattagaactggttgggtcatgcatgaatatcgcctcgatgaatccgaatgcgagccttctgcatttggcatgcaggtttacttactaaccaaaccaatcatcaatcatctactttaaagtattagatgtattactagggaaaactatattctaacaagattcttgttctattttcaggacgcatatgcactctgtcgcgtgtttaagagaatagtgattgaggcg

SEQ ID NO: 168520 - DNA, 1000 bp, Arabidopsis thaliana landsberg; identical to SEQ ID NO: 27996

SEQ ID NO: 168521 - DNA, 1101 bp, Arabidopsis thaliana landsberg
  unsure (1)..(1101): unsure at all n locations
gtgtgtttgttaggtttggagtaaccattntgtgtcgaagagaaaatatcacttcattattccgattgatactgagtggagtttgccattagaagatgatgcttttgattctcaatcccatgttttacatggtttgattcattgcaatggttttggtcatttggtatgtgtcaatggtatggaaagtggttctaagtacttatgcggaagagagattgtggacttttgggatcggctttgtaatagtctcggagcaaggtaatggagataacatttatctgttctttttgtgtttgttggattttgcttggaaattgatagagtgtgatcttgttgcaggatgattactgttgaagatttggctaagaagaggtctgtggaactgaggttgttgtatggtgttgcttatggtcactcttggtttggaagatggggatataagttctgttgtgggagttttggtgtgaccaagaatgagtatgagaatgccattgaggctcttggttcacttgagattgatcaaatcgagttctgattccggtgagcttcgacaatctaaggagatcaatcaggtttttcgatattacagagaaatgagtgaaggacactttgaagactttcagagatcttttgcgttttatgctcattataaagtctcatgcttctcctcaaaagcttcttcctgtgactcctcctctcttgacagattctcctcatcagaagagatcaagccgattgcttttgaagaaaagtgatgttgcggataatgacaagtctccgaaatataggaactatagtactgtggctgcaaatttgggtagtagatggcctgtgaggagactaatatttgcagctgaagtgatagtagagtcactgaaagagatgaaagcgttgaagcagaacggtatgactcgacaagatgttagggattcagctagattgcatattggagataccggtctgcttgattacgtgctgaagtcaatgaacaatgtggttgttggggatgttttggttcgacgttatgttgaacccattacacggatcctgcactatacaatacaggatcttgatgatgcggtgaaagccaaagaaccgaac

SEQ ID NO: 168522 - DNA, 489 bp, Arabidopsis thaliana landsberg
gcgccacggaccggcaccggctatctcgacaatttccatcaggaccccaacgcctactcgattgtcagcgtcggcaccgggctgtcgacgcaccggccaatgtacctgatgccctacacctacagcccgcagtacaacggcagcaagaccgaggtggcattccagatcagcgccaagcagaagctgttccacaccaatttctacttcgcctatacgcagaaatcgttctggcaggcctacaacaagaaggactcctcgccgttctacgaaaccgactacaacccggaggtgttctaccgctggatgccggaccccgtccgcttcaaccactggggcgcggacggcggcttcgagcatgaatccaacggacaatcactgccgaattcacgaagctggaatcgcttctacattgcgccgttaagggccaagggcaagacgctgatctatctcaagctctggtaccgccggccggaacgggcaaagaaagac

SEQ ID NO: 168523 - DNA, 810 bp, Arabidopsis thaliana landsberg
gttttctgggtgactgatgcatactggacgtggagacccccatgagtatcttccatgcgatgtatgtggtaacacggaaggcaacgccatttactgtaaaatctgcaaattccgcgcacatatcgaatgcatcatccagccagacatcatcaaccatccgtgtcactccaaacatcctctcaagaaagtcttggccgagacaattgactatacagatggtaactgtcatttttgtcgaagcccacttgatgaggtgatgtatcattgttccatatgtaatatcagcatagatttaagctgttggatatatcccccaccgcttactatttatcaaccaaagagccacagccatacattaaccctcatggcgagaaaggacgccttcacttgtaacgcatgtgggttggttggtgaccggaatccttacgtttgtcttgaatgtgatttcatgctgcacaaaggttgtatcaatttgcctcgagtcataaacataaatcgtcatgaccacaagatttctcgcacttatcatctcggtcacggtgattgggaatgtggagtttgtcgccaaaagatggattggacccttggagctttcttttgctcgcgttgtcctaattatgctgttcattcaaagtgtgcgacaagggaagatgtgtgggatggaaaagaactcgaagataagcctgaagatgagggagaagaggatccatacaaggtaataaatgagaaagaaatcattcattttagtcatgaagaacataatctaaaacttggtgatgatgataactgctgcgaatatgaaaagatgtg

SEQ ID NO: 168524 - DNA, 1128 bp, Arabidopsis thaliana landsberg
atggccgaacgttgtcaaagaattgatgaagaggttgttgcttctagagacgagatcagttcgttgcccgacgatttgcttatccagattttgttgcttgtaccgatcaaagatgcagttgggacaatgatattgtcaaaacgatggcgttatgtctggacgttgttgcctaaactcgagtacagtgatcctggtgatgaatgcgaaagcgtgtggaagtttcttgaaaagttattggaacttcacaaggcaccttttctagaaactttgtgcatccaactcggtgaaaattttctattgaggtagatgttgggaaattagttgcaaatgcagttgatcgctttgtgcgcaagctagagttagagctccactggacggcagagcctaccagcttgcctaagagtctttacacatgcaaaacacttgtggaattgactctttcggacaagattatagtggatgttccttcttcggtttgcctcccgtcactcaacatattacgccttttttatgtggtgttcaaagatgaaaattctctagagaggcttatatcaagttgctcagttcttgctagatcgaaagtgggcctcgccatcagtgataaccgggactaccgtttcgcgaaggtgcataagcttcgccttgaaaagccacatatcgacgttgtatgtcatactgatgacaagtttctcaaagctatttccttggtcacgtatcttgtgttacctttggaagatccaatggtatctatcctttttattattattgtttttttccttcttggctgttaggtttgatcacattgatttatattggcttttgatttagtcattgaaggctctggattttcgtggctttaccttcactcgacttggaaaattagtgatatgtccacatggccatctctgattggatataattccactaattctcaacaactctcctaaactaagatttcttgctatcacttctgtaagtaacaagtaacaacgcaatctccttgttgtataaactgattctttgattccacctcataaatttttatgtacttgcatccaggtaagtggatatcgacccggaaatctcccattgtcatggtcccaaccaaagtaccgttcccagatgctt

SEQ ID NO: 168525 - DNA, 414 bp, Arabidopsis thaliana landsberg
atgggagtggaaggatcgatggagtatatatcagtccttttaaagaagaggaagaggaagaagaagaagccaatgccaacagtagctctccgtgttgctcgtatcgactgcgaaggctgtgaacgtaagatcaaacatgtcctctccggtgtcaaaggtaaagaaaatcagttttagccaaccatcatgataatggttagagatttgccatgttggtcgaaaccacggatcaaattcattccactacttttgtacatgccccgtctaaagcatagagccatagacaaagaaaatcattaatatatgatatatctaacattttttaaatgccaacttttattttaaaaaagtagatttttctatatatgtacaaaaataatatgaatgggtatattaattttaatctgagggaca

SEQ ID NO: 168526 - DNA, 1889 bp, Arabidopsis thaliana landsberg
atgcgtattgtctcccacaagctcaacgctgaaacatggaaggttctttcttcctctacccttaattgaggcaaagcctgcatgggtatgtaatcacaaaaactactgcttcctcgatggcaactctggattctttcaaataccaacccatccaaacgatcaaggaaaaaccacattcacgtgtccctatggtacttatgcctatcacataatgccgtttggaccttgtaatgctcgcgcgacattccacagatgtatgaacacgctcttgacagacatgatcgacaaatccatggaagccttcatggatgactttactgcatatggggcttcatttgaagcatgcttggagaacctttgcaaagttctagctagatgtgaagagaagaatttggttcttaattgggagaattgtcatttcttggtttaggaaggtatagtacttggtcacaaagtttcaggagctggtatttcgggtgataaagccaagatagaggttatgacaagtctacaggcaccagatagcatgaaatcagtgaggagttttcttggacatgctggattttacaggaggttcgtcaaggatttcagtaagattgccagaccactaacagctttgctttgtaaggatgtgaagtttaacttcagtgctgagtgtcatgctgcttttaatcatattaagaatgccttagtgagtgctccaatagttcaacctccggactggaatttaccttttgagatcatgtgtgatgcaattgattatgcagttggagctgttttgggatagaagaaggacaatagacttcatgttatccattatgcaagtagaacacttgatgatgcacaacggaattatgcgacaacagagaaagaattgttagctgtggtttttgcttttgagaagttttgcccttatctggttggttcaacggtaattgtgcattcagatcattcagcactcaagtaccttatgcagaaaaaggatgttatgccaagattactacgattgattcttcttcttcaagagtttgacatcgaagtacgggataggaaagggattgagaatggagttgctgatcatttgttaaggatcaaggttgaagacgacattcctatcaatgattttctgcctgaggagagtatctacttggttgagacaagtttgcaggaaaatcatggcagtgtcgattcacacgcagatgagagctgcagagtataagtgtcgatcgacaccacacaccctgtcgatcgacaccatcgcgcttcaaagacagatggttctgcacctccttcccagcccacatctatttcagttccctctgataggtactcctccatcttttctcctacttatccttggattacttctttagaatctttgaaatgtgcttaccggtaaacgagcatcgagtttctcgagcgtttgtttccactgctgattttgtaggtaaagaagtgagtgtcgatcgacactaccaccagtgtcgatcgacaccaaatgctgcacatagccgatctgtttacacaccgccttggaaggcgagattgcagcataagtctcatgttcctccatccaagtcctgaactctggcaagtcaagctattgactataaacaagcgcttagtgggaggcaacccactggtatggttttctttttctttttcttttattttacgtttttcttttatttttctcgcttactccggatttgaatgccacttgggacattgttgtttaagtctggaggaggcgcttactaactacgtttttctttttgagtcttatttttattcttatttttctttttgagtcgttttattgagtcaaacttttgttaggaattatgatctctattctttagattattgtctggttgatgaatgttgca

SEQ ID NO: 168527 - DNA, 1793 bp, Arabidopsis thaliana landsberg
  unsure (1)..(1793): unsure at all n locations
accaggacctaatggacacagtgcaattttctccaggaggagaaattatttccattcgtcttgcacgttctgaactaggtacatataacaggaaagagctactccgtcaattaaacgatgatagtgttctctttggtagcagtatgacttgttgtttatttttcttttgtcttataaatctcagatgcaaatgagcgtaacatgatcattacagctagtattgtaagctttgctctgtttgtgataatggcttctgctgcgtttggtttctggagatataaaggtacaaactgatgttcttgctacctttctattgatttcttgtttttttttatttacagtactcatatcttgctatcggtaacacactgatgacctatattataatcagctaagatatcaaaggatgcttcacaagttgcatggaggaatgatttgaaaccacaagatgtatcaggtttaaatttctttgagatgaataccattcaaaatgccaccaataattttagtatatcaaacaaactcggacaaggtggattcggtccagtttataaggtcagagattttttatttataacctctttggtcttttctattatttgcttatgctctccagataaccttctgctatgtgtttcagggaaagctgcaagatgggaaagaaattgctgtaaaaaggctttctagcagctcgggccagggcaaagaggagttcatgaatgaaatagtactcatctcaaaactacaacataaaaacttagttcggattttgggatgttgcattgaagaagaagagaagctattgatttatgagttcatgttgaacaatagccttgatacctttctcttcggtgggttccttctagcttcattcctttactatcagcaactttttctctacatggaactgtcttatctgattgttcatactctatattgtcgcttagattcaagaaaaaggcttgagattgactggccaaagagattggatatcattcaaggtattgcgcgtggaattcactatctccatcgtgactcacacctcaaggttattcaccgagatctgaaggttagcaatattcttctagacgagaagatgaatccaaagatatcagattttggattggctcggatgtatcagggaaccgaatatcaggacaatactcgcagggttgtaggaactctgtaagactctattttccataacattgttaacaagattcatagtcataaactcataatcgtttattaaacattgggtgaaactattcgatgttcgcacagaggatatatggctcctgagtatgcatggactgggatgttttctgaaaagtccgacatctatagctttggagttctaatgttagaaatcataagcggngagaagatctcaagattcagctatggcanagaagaanaaacccttattgctatgtaagtacaacttttaggtattcatacagttgcaaatgtctcaaaacgttttttgcttttatattcttaagacctgaatctgaacaacaggcgtgggaatcttggtgtgatactggaggaattgatctcttggacaaagatgtcgccgattcatgtcgcccactggaagttgagagatgtgttcagatcggtctgctctgtgttcaacaccaacctgcagatagacccaacacacttgagttgctgtctatgctcaccacaacatcagatcttccaacaccagaacaaccgacatttgtagtgcacaggagagatgacatatcatcgtctgaggatttgatcactgtgaatgagatgac

SEQ ID NO: 168528 - DNA, 1729 bp, Arabidopsis thaliana landsberg; identical to SEQ ID NO: 21830

SEQ ID NO: 168529 - DNA, 591 bp, Arabidopsis thaliana landsberg
agctttgatccatccattggtgttgaacgtaaactttacgagctaaaggatcctgaacatgataagatacttggtgttatctctcactgcgatggtttattattgtgcgctaccaaggacaagactagactcgtggtttggaacccttgtactggtcaaaccaggtggattcaaatcaagaatgtgttcaagaacagttatgttttaggatatggaaacagcaacaacaacaacaacgacaacaacaaatcttgcgataactacaaaattttgacttatgactattttctcagatccccagcttattctcttggtaagtttaaaatctatgagttcaactctgattcatggagaattcttgatgacatctctcctgtttgtcatacgctcaaatggcgtgaatttgaagggaaatgcttattttgttgcttcagataaagaaagcaaattcatactcaagtttgatttcacaacagagagattcctacgtctatcgtttccttctcagaacaatgatcaaattgcggttctatcagttgttagacaagagaaacttgccttgttacaacaaaggtttgatacagattcaat

SEQ ID NO: 168530 - DNA, 534 bp, Arabidopsis thaliana landsberg
  unsure (1)..(534): unsure at all n locations
atagcggcctccaccaattcaactcatggcgctctggcannnnnnnnnnnnnnnnnnnnnnnnnnnnagagacgttgagcaatagaactccggtggacatccagtccgccctagcgttggccaagaaccccgtgttccatgaatgaagtaagcacatccgggtgaggtaccacttcatccgtgactgtttgacagaagggagcatcaaggcgcgctacatcaacaccaaggatcagcttgcggacctgctcacaaagccccttgggagaatcaagttctttgagctttgttccaggtccgggatggctcaactttcccacaaggcgacgcacaagacttagggggagaatgatggaataagtcatgtggttttctgatatgtcgtgggcgcctagggtacgcagtggtgatcgcagcaaggcttgggactggggaagggatctcagtggatatggggatcggccagagggggagctgattccgtcagcgctgcgcaaggtgcgccaggatgaccaaggaagctccaccgttcag

SEQ ID NO: 168531 - DNA, 354 bp, Arabidopsis thaliana landsberg
gacgaactggaatggggcgataccggaagccgcgcttcgcttcgcgcgatgcggccgctcagcctgccgtaccggtacgcttacgccgcacagcgtgccggcgtcacgctcgaggactgcctttccgcctggctgttcgcctggaccgaaaaccaggtggccgctgccctgaaagcggtaccgctgggtcaggttgcgggacagcgcatcctgttcgggctgcacggcgcgatccaggccggggcccgccgtgcggccgccacgccggaggaggaagcatccaccttctcgcccatgctgggcatcctgtccgcacgccacgaaacgcagtattcgcgcctgttccgatcctga

SEQ ID NO: 168532 - DNA, 1707 bp, Arabidopsis thaliana landsberg
attataaccaaatcaatcaaaaaaatgacaaacgctgctgtctcctattgtctcctctcatgtatctttgccttgcttgttgtgagtttcgcttcagcagacaaagatgatcaagacaaacaggtaattgcacaaatccttcttcgttatttgattattataatcatatcatggttctaattatattactaatgactaaccataactatgatgatgatacttgtaggagtatatagtatacatgggtgcacttcctgctcgtgttgactacatgcctatgtcccatcacactagtattcttcaagatgtcaccggagagaggtgcactgaatttattcaattttattgtttagtgttaatgtgattatttgtatatggtttcatgtctatcgatcaaagtctaacaaatgtatttcttatttgtagttcgatcgaggatcgtttggttaggaattataaaaggagtttcaacggattcgcagcccggctaaccaaatccgaaagagagatactagcaagtaagtgaacataaatggattacgacccgaaagttttcaaaaataattatcaaaactcaaattagttttcttctctatgaaaaaactttattaactcaatgtgttgctatttcttaatatctaatttcttaggtatggacgaagttgtgtctgtgtttcctaacaagaaactgaagctccaaacaacaacgtcatggaatttcatgggcctcaaggaaagcaaacgtacaaagcgaaatactatcatagagagtgatacaatcatcggtgtcatcgacagtggaatctatccggaatctgatagttttagtggcaaaggctttggtcctcctcctaaaaaatggaaaggtgtttgcaaaggcggcaaaaacttcacttggaacaagtataaaactcttaaatttgatcatacaattaaattgtgtaaggatttttcaattgcttagttataatgaatgtggatgatttgtttgttttatagcaagcttattggagcacggtactacacccccaaactagaggggtttcctgagtcagcgagggactacatgggacatggatcgcacacagcatccacggctgctggaaatgctgtgaagcatgtgagcttttacggcctcggcaatggaaccgcaagaggtggcgttccagctgcaagaatagcggtttataaagtatgtgaccctggcgtcgatgggtgcacaactgacggaattctagcggcatttgatgatgccatagcggataaggtggacatcattaccatatccattggtggtgataatagttcgccttttgaggaggaccctctcgcgatcggggctttccatgccatggccaagggaatcctcatagtgaattccgcaggaaacagtggtccagaacctagcacggtcgcgagtattgcgccgtggatgttcactgttgctgctagtaatactaaccgtgcgtttgtcactaaagttgttctcggaaacggcaagacagttgtggtaaagtaccaagggacaaatctttgttcctctcttacgacaacatattatcatacatatcttgtcctcttttaacattactgcttgttgctaaacagggaagatcggtaaattcgttcgatcttaacggaaagaagtaccctctagtatacgggaaatcagcttcaagtagttgtggtgctgcttccgccgggtaa

SEQ ID NO: 168533 - DNA, 1366 bp, Arabidopsis thaliana landsberg
aaaaaaggggtctttggggttttaaaaggaatgggccaggtcgttttttgtcatttcttttcaagaccggttcaaaaggtaggaacctcttcattacctttggattttcattacatgttggtaagtatgaaagttctcattttgtttttttttttaaaaattgtttaacagggtcttctaagtgctgttaagcatgaattgccaaatgctaaacatagaatgtgtgtgaagcatattgtagagaatctcaagaaaactcatgccaagaaggatatgctcaagatgttagtgtggaaattggctggagtctccaataaaaaggaatccaagaagaatctctataacttgagatgctatgatgatgcattgtacaatgatgtattgaaagaggaaccgcatacttggtcaaggtgtttctacaggcttggtagttgttgtgaggatgttgacaacaatgctaccgagtcattcaactcaaccatcaccaaagcaagggcaaagtcattgattccaatgctagaaacaataaggaggcaaggaatgactcggattgtcaagaggaaccagaaatccttgcgccatcaaggtagattttctaaatatgctttgaagattcttgcattagagaagcaagatgcggatagaagtacagtatatcgttgcacacatggtgtttctgaggtgtatatagatggaaatagtcatagagtggaactgcaaaaatctcagtgttcatgtgggaagtggcaaataagtgggataccttgtgagcatgcttatgctgctatgataaatgctggtttggatgctgagaactacatatccgggttcttctcgacagatatgtggagacacaactatgagacagccaccatgccattaaggggacctaagtattggatgaatgtaggttacaacttggtaaccgcaccaccagaacctgttttgcctggacgaaagaaagaaaaacctaaaaaagggaagtttgcaaggatcaaagggaagaatgagtcgccaaaaaagaaaaaaaagaagaaaaatgaagttgaaaagcttagcagaaaaggtaagatcatacattgcaagagttgtggtgaacctgggcataacgcattaggatgtaaaagattccctaaggagaaggtcccgagaaagagaaagagtgatggcaatgatgaggtttgtttctgttttaaagtttctttcttcatatactatgtctctttagtagcttactacttacttactcagtttgaaaagaaagctaagaaggctaagaaagaaagcaaggacaagaagtctaagaagaagactcaagggccggatacgatcagcatcacccaacccttctaaagcaacacaagag

SEQ ID NO: 168534 - DNA, 609 bp, Arabidopsis thaliana landsberg
atggctacatcaagacttaatgcctcttgccgctttcctgcaagcagaagacttgactgcgagagctatgtcagtctgagagctaagacagtgacaataagatatgttcggaccatagccgctcctcgtcgccatcttgtccgaagagcaaacgaagatcggactttggtggtgaatgttgtggcagcagcaggggagaagccagaaagaaggtatcctcgagaaccgaatgggtttgtggaggagatgaggttcgtggtaatgaaaattcacccaagagatcaggtaaaagaaggaaaaagtgactccaacgatcttgtatcaacatggaatttcacaatcgaagggtacttgaagtttctcgtggacagtaagcttgtgtttgagacgcttgaacaaattatcaacgaatctgctatccaagcttgtgagtttctctcatcattttttagtatgttttccttcatatgaattgaaatattggtaacttttaaagtcaacttgatccgttcagttttaagataaactttttcaaaattaaagtgattaggaggaatgaaaaacaaaaacagtaaaaaaatagcccccattaatatatttactaaatgt

SEQ ID NO: 168535 - DNA, 296 bp, Arabidopsis thaliana landsberg
aaaatcttgttgttccagttatggttacaacaacatcatcaacaacaacaactcaagaaagcagagtttatcggacagtgctagtagtagtaacaataatgggaaaggacgtaagaagataaagaagatgatgggagtattaaggaaaattgtccctggaggagaacagatgaatacagcttgcgttcttgatgaagctgttcagtatcacaagtcacttaaaatcgaagcacagaaacttggcgttggacatttctcaaaccaatcttgaatgctaccaaaattcggttcttcca

SEQ ID NO: 168536 - DNA, 744 bp, Arabidopsis thaliana landsberg
gcaattttttattcaggtgagtgggttttgatattatgattctttgtgaggagaaacagatttgatgctgtgattcactttgctggtcttaaagctgtgggagaaagtgttgaaaaccttggtcgttactttgataataacttagttggaacaatcaatctatatgagaccatggcaaaatacaactgcaaaatggtttaagatcaacatccttcacttttgaatatgtgtaacttgttctattttagttaccaaactgttctgactcttgactttatatgcagatggtgttttcgtcgtctgcaacagtttatggtcaacctgaaatagtcccatgtgtggaagactttgagttacaggctatgaatccttatggtcgtactaaggtatttcacacctcgaatctctttttttctgttttgtgttcataatcttgaaggttatattatttaagactgtgatcttgaatacatttgagctatttgtgtagctgtttcttgaagagatagctagagacattcacgctgcggaaccagaatggaagataattcttgtgaggtacttcaatccggttggagctcacgagagtggaagaattggagaagatccaaagggcataccaaataatctcatgccttatatccaacaagtagctgttggaagataacctgaactcaatgtatttggacatgactatcctaccatggatggtagcgcggtataacatcgataaaaccgtttctt

SEQ ID NO: 168537 - DNA, 887 bp, Arabidopsis thaliana landsberg
atggcggttgtggttgaagaaggtgtggtgttgaatcatggaggtgaagagcttgtggatttgccacctggtttcaggtttcatccaacagacgaagagatcataacatgttaccttaaggagaaggttttaaacagccgattcactgctgtggccatgggagaagctgatctcaacaagtgtgagccttgggatttgccaagtaagtagtagtcaattttcataaaccaaaacaaaaaaattcaaattttctttgaccattcatgtgtaaacacaaagcctatagcttcttgattaagatttctcaaattcttgatgtctagcttgtttttgaaccaaattttcaaacttcaaagccaaacaaaatttcaatcttctttgaccatttcaacacacaaaaggcttcttgatcaagattctgatttttgtttttggttggtatagagagggcaaagatgggggagaaagagttctacttcttctgtcaaagggacaggaagtatccgaccgggatgaggacaaaccgtgcgacggagtcaggatactggaaagccaccgggaaggataaggagatcttcaaaggcaaaggttgtctcgttgggatgaagaaaacacttgtgttttatagaggaagagctccaaaaggtgaaaagactaattgggtcatgcatgaatatcgtcttgaaggcaaatattcgtattacaatctcccaaaatctgcaagggtgagtttatgttacgaaaccatatattctcactgtttttttcaattcgactccaaaaggagaaagatctaagatttatttgattattagttttcttaaaccaaaagtgtgttaaatttggtggaaaacataagtccttttcaaaagagtttgattcgtttt

SEQ ID NO: 168538 - DNA, 453 bp, Arabidopsis thaliana landsberg; identical to SEQ ID NO: 46458

SEQ ID NO: 168539 - DNA, 1291 bp, Arabidopsis thaliana landsberg; identical to SEQ ID NO: 27902

SEQ ID NO: 168540 - DNA, 703 bp, Arabidopsis thaliana landsberg
atggattcaaaaagaaagaaccaagaacttagcacatcagaaaccgcagatccctctctctcaaagacgaataaaaagcaaaagattgatatgcaagaagcgatgaagaaccaaaacgaggtttctctgttacttgtggggaaagtaatctctgccgtagccaaaaactcaaactgtgtcttctctccggcatccatcaacgccgttctcaccgtgaccgctgccaccaccgacaacaaaacattaagatctttcatcctctcttttcttaagtcttcttctaccgaagagaccaacgccatcttccacgaactcgcttccgtcgtcttcaaagacggaagtgaaacaggcgggcccaaaattgcggcggttaatggagtgtggatggagcaatcgctttcgtgtaaccccgactgggaagatctgtttctgaacttcttcaaggctagtttcgctaaagttgatttccgacacaaggttagtttctgatttctctacttttcaatttcaaatataatatgctttgattagataattaggttcagaatgagaagatttttgtcaatttttatgctaaataaatatatagcttttcgatttcaaatttgcttgattagattaggtcaagagttaatgaaaacttattgcactttttattctgtgatatttggttgttttctattatgtggtttaggggttatgg

SEQ ID NO: 168541 - DNA, 298 bp, Arabidopsis thaliana landsberg
tgactttgctgcactccacaaaaccttagacgaatctttctttggaggagaaggaagttgctgtgatgggtctccggaatcagatcttgaagaagcttttaatgtgttcgatgaagacggagatggttttatttccgctgtggaattgcaaaaggttttgaagaagcttggattacctgaagcaggagagattgaacaagtggagaagatgattgtctctgttgatagtaatcatgatggtcgcgttgactttttcgaattcaagaacatgatgcaaactgttgttgttccttcttga

SEQ ID NO: 168542 - DNA, 825 bp, Arabidopsis thaliana landsberg
  unsure (1)..(825): unsure at all n locations
cgtattgccacactttatcaaagaaangacaagcttaggttcaaagagcttgagtcgtnggtcatcaccctattgactatgcatgtgtcgtcaagaagattgcagatgagacggatttgactcttgttgattttgctggcctagatcttactccagctattatcatggctatttcagttactgcttcaactacgaaagggagtgcactgccagaggatgtttagcaaaaggtgttagaggcttgtgatcgggatttagatcttgattccgcaagaaagaaggtccttgagtttgttgaaagtaagatgggttctattgctcctaatctttccgccattgttgggagtgctgttgcagccaaactcatggggacagctggaggtttgtcagcacttgctaaaatgcctgcctgtaatgttcaagttcttggccacaagaggaagaaccttgttgggttttcttctgcaacgtctcagtcccgtgtgggttatctggagcagacagagattttccaaagcacgcctcctggacttgaggctcgcgctggcaggctcgtggctgcaaaatcaactttggcagctagagttgatgctactagagaggatccgttagggataagtggaaaagctttcagggaggagatccgtaagaagattgacaagtggcaagaacctcctcctgcaaggcagcctaagccacttcctgttcctcattctgagccgaagaaaagaaggggtggtcgccgtctaagaaaactgaaagcaaggtatcaagtaacagatatgagtatccttggttacctccgaggtgtagtccaggggatcc

SEQ ID NO: 168543 - DNA, 158 bp, Arabidopsis thaliana landsberg
atggatcccaagaaagctgatattagtcgtttagaggcacttcctcaagatctacttggagaaatagttgctaaagttggagcaacaacagctgaagattttcacaattgcattcttgtatgcaaagaactaggtgcatcagcaaatgacatacacgt

SEQ ID NO: 168544 - DNA, 2146 bp, Arabidopsis thaliana landsberg
ctcatgacagttaatggtgtgctatatgaagagtggaaagatgcttgtgaagcataaggcttattagataatgatcaagaatacattgatgatttaaagagatcaagtttttggagcagtgaatggtatttacgtcagttattcgtaataatgttagatgctatgataattcctgaaaatgtgtgtgctgcaacgtggtcacatctctctgaagatattcaaaacaataagaggcaatatttcaatagaccaggtaacatctaatatcatttcaaaacctcaattttaattcattttgttttacaatgcaatattcacataaacttgctttgcttggttgtaactcatttagttatatgttgtttacagatttaattttgtcagatgaggagaaacaattatatgctctacaagagatagatcacattttaagaaggaatggtcgttcacttacatattataagactatgccactagtacctagagatccgaagtttgatactaatgtcttgattttagatgagagagggtatgatcgtgataatttgacagaaaaacatgccaaatggattaagatgcttactccagagcagaagtttatttacgacgacattattgatgcagtgaatgaaaacgttggggtagtagtttttgtttatggatttggaggaacaggtaaaacatttctttcgaaaacactctctgttgcacttaggtcaaagggtgacattgttcttaacgtttcttccagtggtattgcttctctccttttagaaggaggtaggacagctcactctagatttggaattcctcttaatcctaatgagtttactacatgtaatatgaaagctggttcagatagggcaaatttagtcaaagaagcttctctgattatatgggatgaagctccaatgatgagcagacactgttttgagtcattggataggagtttgtcagatatttgtggtaatggtgataacaaaccgtttggtggcaaggttgttgtctttggaggtgatttcagacaagttctaccagtaatccccggtgctgatagggcagacatagttatgtctgcccttaattcatcttatctttggagtcattgtaaagtattgactctgacaaagaatatgcgtctttattcttaaggtttgagtgttagtgaagcgaaagatattaaagagttttcagagtggatattagcagtaggtgatggtagaattgttgagcctaatgatgggcaggctttgatcgatattccttctgaatttctgattacgaaagcaaaagatccaatagaagccatatgcacagagatatatggagatattacaaagatacatgaacaaaatgatccaatttttttccaagaaagagcaatattatgtcccaccaacgaagatgtcaaccaaataaatgagaccatgcttgataacctccaaggttattactaattcagaagcattgatttgtaactttatttacttatataaatagtgtttctatttgctattccttctttaactgtaactaaccaaaattttaattttcaggagaggagtttacattcctaagttcagacagtttagacccagctgacattggtggtagaaataatccggcattgactcctgactttttgaatagtgttaaagtttcaaggttgcctaaccataagcttcgtctaaagattggttgtcctgtgatgttgcctagaaatattgatcctataggtggtctaatgaatgacacaaggttacagttcacgcaaatgagtccattcattttgcaagcaatgattctaaccggtgacacagctggtcatttagtattgattccaagattgaagctagcaccatcagacgcaaaattgccatttagaatgcgaagaacacaactacctttaaaagagtaggaatttttctacttaggccttgcttttcacacgaccaactttatgttgccatatccatagttacatcaaagacaagattaaagattctgattgtggatgatgaaggtaagccacaaaagcaaacaaaaactatagttttcaaagaagtttttaagaatctttagtttccatttgttttttacttatgttggatttttattagagcagtcttatatctacaatattcgt

SEQ ID NO: 168545 - DNA, 947 bp, Arabidopsis thaliana landsberg
tagtagtattcctttgtttagtcaacgcaaaaattgacacggcaacacagatttcatttttctattggctttttctcatttacacgcatttaacaatgtacaatttggatttaagtgtaggaaaatgatataataaccaaatttggtacatatatcactttggatagaatttagtttcgattcaatttttctattaaaattctgttttaatcaaatatatcattaatgtttattttctaaaatcagtttgattttgttaaaattgaagactcatgaataacacaagctttagccaagaaaattatgaacattaaaatcacaatgtggttataactacagaataaaatctcttagtaacaacattacaaaaagttgattaatttgtaatttgcagattttgggtagatgatgtaccaataagagaaatcctaagaaaagaggaaatgaatggagactatccacaaaagccaatgtctctctatgcaaccatttgggacgcctcaagttgggctacttccggtggaaaattaggcgtcgactacacattttcaccttttgtttccgaattcaaagatatagccctcgacggttgtaatgtctctgactcattccccggagaaaacaacaacaacaacatcggtaattacaataacataaattgttctgtctccgaccaatttctcatgagcaatgactactcaaccattagtcctaaacaagcaactgctatgcgacggttccgagaacgttatatgtattattcgtattgttatgacaccattcgatactcggtgcctccaccggagtgtgttattgtgacggctgagaagaaccggtttagagatactggacggttaaagtttggtggtagtcatcctaaagtgcataaagcacgtaagaaacggcgacggaatcggtctacgccggttgtatcggctgacctatag

SEQ ID NO: 168546 - DNA, 508 bp, Arabidopsis thaliana landsberg
  unsure (1)..(508): unsure at all n locations
atgaagcaggtaaatttatggatgaaaatactttgacggaagtaaagggagtaatggatggtttgatcaggcatatnnnnnnnnnnnnnnnnnnnnnnnnnnnnnnnnnnnnnnnnnnnnnnnnnnnnnnnnnnnnnnnnnnnnnnnnnnnnggaaggacatggcactttccctttcgggaaaaggcatagacgtgatactcacctatcattcaaggaaacaggaagcggaggaagtagtttctgaaattaaagcaaatggccaaaaggcagcggccctgcagcttgatacgggtgatctgaaatcatcagacggtttcgttgaccgtctttctgcctccttgcaggaaacctggcaaaccgatcagtttgatttcctggtgaataatgccggcatcggcaaatccatccccatcgctgaggttacggaagaagactttgacccannnnnnnnnnnnnnnnnnnnnnnnnnnnnnnnnnnnnnnnaaactgcttcaagataaatgatc

SEQ ID NO: 168547 - DNA, 891 bp, Arabidopsis thaliana landsberg
aatgtttcaaaattgatccaggaagcaagaaagtttactgcagatcaaaacaaggcgtgaattcgaaagggaagaaagagtttgatgttgactatgactaccttgtgatcgctactggagctcagtctaacacatttaacattcctggcgtggaggagaactgtcatttcctcaaagtaacaacattcttgctccactagttacatttatggtttttttgacatgtctctaagatatggcggttggcttgcaggaggttgaagatgcacagagaattcgtagtactgtcattgattcatttgagaaggcaagtttacctggactaaacgaacaagagagaaagagaatgctacattttgtagttgttggtggtggaccaacaggtgttgagtttgcttctgagcttcatgattttgttaacgaggatctagtcaaactatatcctaaagccaaaaacttagtgcagatcactcttctagaggctgcagaccacatcttgaccatgtgagattttcttactcttaaacttttgatctatatcgaagattagctcatgtcctatggtttgacaggtttgacaagagaatcacagagtttgctgaagaaaaatttactagagatggtattgatgtgaaattaggttctatggtggtcaaagtgaatgataaggaaatttctgcaaaaaccaaagcaggagaggtctcaactattccttatggaatgattgtttggtcaactggtattgggactcgtcctgtgatcaaagattttatgaaacaaattggtcaggtgagtagccaaaggtctaatgataatgctcatattttttcatagtgaacgagctttatcaactcggtctataagatgatttcttgtaaattccagggcaat

SEQ ID NO: 168548 - DNA, 1650 bp, Arabidopsis thaliana landsberg
  unsure (1)..(1650): unsure at all n locations
aagaggtaagcatctgatgatcgtagtgctatgttttgttctgttaaaacgacgttaccacgatagctttttattgtggcataacatgcaggtaaaagaagcaatcttcagaactcttataaccaatggtatgtttgacaatacacatatcaggttgtctctaactcgaggcaaaaaggtatttcaactttcttcgacaccgatttaagaaacttctgttttcatttagaccattgattagtctaaagaaaattgtgcaacttgtttctttaaggttacttctggaatgnnnnnnnnnnnnnnnnnnnatgggtgcactcttattggtaaacctttcagctttatgagagcaaccagttgtgctaatatgattaccttggagtttggtttacatgaaagatttgtgttctttctttcaaataannnnnnnnnnnnnnnnnnnnnncctccggtatatgacaatgaaggtggaattgtgctggtgactgcaaccacacgccgcaattcgcctaatgtatgaatttggttccacattctcttcatgttacaacataaaaaatccttgtctgtaaaattgttggtttctaaaattctttttgttttgtcagaatttggattccaagattcatcacaacaaccttctcaataacatactagcaaaggtactgtattcaaaataagagagttcaagaaattgacattgtgtttttactatgagattaattttctctgcaaatggaacaaacagattgaaagtaacaacacgaatgctgctgacgccattatgcttgacaaagatggttatgtgtctgaaaccaatgcaaccaacattgtaagtaaccctttgatgatttatccgcaggattttatttcgatagattattaagagactatatatagaagctaatattgtcaacaaatttactttatgtttgacagttcatggtgaagaaaggctgtgtacttactcctcacgcagattactgtctccctggcataaccagagcaactgtaagagaaattttcactttcttttattgagaatttctataaacaggtttttttattgcttttctccttcaatttttaaaaggtaatggaacttgtggtgaaagagaacttcatcttagaagaaagaagaatcagtctctccgaattccatacagctaatgaggttctttcagcttacaacttatcagtttttaaggggtcaaatcgaattatctgtgcctctctctttctctacaagtatctaacaataatagttttgtttttttaaaggtatggacaacaggaactatgggagaactaagcccggtaagtacagaacagtctctagtagcttgtgaataaaacatcctcaatcgttctccacctgaatgtataacattcactaattaaaactttgaataaatggaacttatatctaaagttcgtgatgaaatcttcaggggatcttacttaaaccatatgaaaacactaaatctttgagcatagtaatatcctgttctttggttacaggttgtgaaaatcgatgggcgtgtgattggtgacggcaaagttggaccggtaacgagaacactgcaaaacgcttacaagaaactgacagaggattcaggtgtgccgatacctacttatcaagaaccctga

SEQ ID NO: 168549 - DNA, 1491 bp, Arabidopsis thaliana landsberg
atcaatgggtgacaaaggaaggagcttaaagatcaacaagaacatggaggaattcacgaaagtggaagaagaaatggacgtaaggagaggtccatggacagttgaggaagatttagagctcatcaattacattgctagtcatggtgaaggtcgatggaactctctcgctcgttgcgccggtatgatactctaacatctacttacacatatacacacttagattaatataggcatagacggtgtgtataaatgtgctccttgattgaaaacaaataaaaataagtaacaaaccatatattatacacaagttgtttcgatctccatatgtgtcttttttaatttactcagtgcgccactttttctgttaatcatatctttttgtttcgaaagttctttttttttttttggataaaagtttgttgtgaaagttcaagaaatggattttgccttgtatgcacacaaaaaaaaaaggaaaaaacaaatcatggggataaaacaaaaagagtgtcatgcttttgtgttccgttctctcattatttttcttctttctgaatcgttaaaattatctatgatcattcctaatgaaatcgtgttttgctattcggactcaattattataacttttaggaaatggattcaattatttaaccctctaggttttgaatagagtaactctattcgtgttgaaataaatgaaataattgatcaacatctatatgggaagagcactaacgcaatggaagaaagttttcaggagacaaagaccctttttgagagtttgcctcatagcaacggtccctataatttctagagtaaatttgataactttaccaaatatatatgatcattatcatgagtttcttgcgtatgaaatcatcatacaatatacgtgtacacgatgatgtctaattaaataatagtaacttccaatataaaacagaactcaaaaggaccggaaaaagctgcagacttcggtggctgaactatctccgaccagatgtgcgccgtggaaacataaccctcgaagaacaactcttgattcttgaacttcacacacgttggggcaataggtacgttttttaattacggtcatttatacactttattttctactaacaagattttgatcacaaagatggctaaatattattgtacacgaattagttcacatctttagtcatcaatacattttattttctgttaacaagagtttgaaagattggtttatttgtactagtaatgaatttgatcacaagttttcttcttcttgtgaggacagatggtctaagattgcacaatatttaccaggaagaacggataacgagatcaaaaactattggagaacacgtgttcaaaagcatgcaaaacagcttaaatgcgacgtgaacagtcaacaatttaaagacaccatgaagtatctttggatgcctcggctcgcagaaaggatccaagccgcgtccatcgagtcttgttttcatgttattttgcgtc

SEQ ID NO: 168550 - DNA, 603 bp, Arabidopsis thaliana landsberg; identical to SEQ ID NO: 78402
  unsure (1)..(603): unsure at all n locations

SEQ ID NO: 168551 - DNA, 1853 bp, Arabidopsis thaliana landsberg
  unsure (1)..(1853): unsure at all n locations
tcttggacgaccgaagctcttcaacagttccttctaagtgatctgcccattggtcgctgagttctcgctttgtttcttcaagtatacgttcttccttggctctggccagttgtttccgaagatcttcaagttcgcgtttatgagcttcagcttgacctttaaaagcagcttcgtcttcctttattttatttatcaatgagtgtaatattttatctttctcgagaccttcgttcctcagtccaacaccaagagaccttaaagggattcttgagacaagctcaaaatgagttcggcttaaggatcaagaagattaaaagcgacaacgggacggagttcaagaactcacaaatagaaggcttccttgaggatgagggcatcaagtatgagttctcttctccctacacgccacaacaaaatggtgtagtggagaggaagaatagannnnnnnnnnnnnnnnnnnnnnccatgcttgatgagttcaagactttggatcggttttgggccgagcgggtcaacacccgcctgtacgccatcaaccggttgtatctacactgaatcctcaacaagacatcatacgaactcctaacctgtaaaaaccccaatatttcatattttagagtctttggtagcaaatgctttattcttgtcaaaagaggtagaaaatctaaatttgctcctaagacagtagaaggctttttactaggatatgattcaaacacaagggcatatagagtctttaacaagtcctctggacaagttgaagtttcttgtgacgttgtgtttgatgaaactaacggctctcaagtagagcaagttgatctggatgagataggtgatgaagaggctccgtgcatcgcgttaaggaacctgtccattggggatgtgtgtcctaaggaatccgaagagcctccaaatgcacaagatcaaccatcctcctccacgcaagcatctccaccaatccaaaatgaggacgaggctcaagttgataaagatgaagaagacaatgatgagccacctcaagacgacggcaatgatcaagggggagacgcaaatgatgaagacaaggaggatgaacaaccaaggccgccacacccaagagtccaccaagcaatacaacgagatcaccccgtcgacaccatcctcggcgacattcataagggggtaaccactcgatctcgtgttgcacatttttgtgagcattactcttttgtttcctctattgagccacacagggtagaggaagcactacaagattcggattgggtgatggcgatgcaagaggagctcaacaatttcacaaggaacgaggtatggcacttagttccacgtcctaaccaaaatgttgtaggaaccaagtgggtcttccgcaacaagcaagacgagcatggtgtgtgacaagaaacaaagctcggcttgtggccaaggatactcccaagtcgaaggtttggatttcgggaaacctatgcacccgtagctaggcttgagtcaattcgcatattattggcctatgctacttaccatggctttaagctttatcaaatggacgtgaaaagtgccttcctcaatggaccaatcaaggaagaagtctatgttgagcaacctcccggctttgaagacagtgagtaccctaaccatgtttataggctctctaaggcgctttatgggctcaagcaagccccaagagcatggtatgaatgcctaagagatttccttatagctaatggcttcaaagtcggcaaggccgatcctactttattcactaaaactcttgacaatgatttgtttgtatgccaaatttatgttgatgatattatatttgggtctactaacaaatctacatgtggggatccagg

SEQ ID NO: 168552 - DNA, 383 bp, Arabidopsis thaliana landsberg
gcgcgcatgacggattttgcgcgttacggtcgtcaggtcatcctgcgcgaagtcggcgtcaacgggcagcagttgctgcgcgattcgtcggtcctgatcatcggcctcggcggcttgggttcacccgccgcgagtctgcttgccggcgccggcatcggccgtttgctgctgtgcgaccacgcccgcatcgagatcagcaatctgcagcggcagacgctttatcgtcagagcgatgttggccgcgccaagaccgatgccgcggccgcgcagcttgcggcgctcaatcgcgatgtcgagattgaaaccttgggttccaatgacgggcttgccgccgttggcgacgccgacatcgtgctcgattgcaccgataactttccgacccg

SEQ ID NO: 168553 - DNA, 4467 bp, Arabidopsis thaliana landsberg
  unsure (1)..(4467): unsure at all n locations
agaaccccaccagggcaacacgcaaagagatcttcgctgcaaaccagcgtaggctgaaactacaacaacaaataccagcaacacacaagtagtaatcaaaccaagtcacgaaagagccacggaaaaacggagccgcaaaaccacccagccatcaaccactaccacaaccgtaatgaacgactaaaaaaaacctcaccgagaactccgacgaggcagttatcaccacaaagagcccaaagagagaagcaaaaccgatctaattccaaaacctggctgagagaccacatcgaaggcaagaaagagttagattcagagctgtcctcaaattccatcacctcctctgccatcaagctctccccatgcagaataatccgagctgaatttcttccacgcgagctcttacacaatgccgcaaaaaacgcaaaccaccaaaccaagctcacatatcttatctagacaactcacctaagctatgaccagaacctgagagaataatcaccgctcaaagagaagacgttagccaaagctgtgacactccttgccaccacgccgcatcaaacctcggaacaaccaccttctagagctgcagatcaagacagagaaccataacaaactcaaagcctaccaaagggggaggaaaagacaactgagaagtaaaaaaagggagccctctccggcaccggaaacagcataccggagaggcaatacaaagtcttgcctatatctactttgcttctttgaaactgaagagagaaaagagaggagtgcgtggggttcacgccaatggttttttttcttccgttctaataataataaccatatcttttagggagagttactcggatgttatagaaattaggtgtatttacaagaaccatacaaaacattttttattactatcatattttggccctattttgtataccatcgtgtctctactaaacgttataggaaaaaacgtaattacannnnnnnnnnnnnnnnnnnnnnnnnaaaccgagtcgtcaagtttgtaatcgctgacgtgtattaataaatgatatatccctatttttatcggctttaactatgttttaggtataggttttagagtcaaattgttatttctagagtcttttctagtctttttcaggttttacatgtttgggattcatttggagataatggagcattctgaaggaaaatagagaatttatgcttctgaagaaatccagagacgaaaaaccgcgtaggtgtcgagcgacaacaccctggtgtcgagcgacaccaatacctgacggcaattcgaagacgcaacttattgatgtcttgaagattttcaaattcggcccagaactttcccttatgtttaatgaaggcccatcacgtgttttaggtcatataattaggtttttagggtcattgtttagacctaagcttggaaaggctgatctcctttttctcttttgtacttgggagcaaaaccttatggagactccctttagagaagatctttcttactctttctcttgttcttttcattattgaaatcttatttagactatgatttgtgttcctttgatcatgttagagtagtctgcttgttaggaatagggtttctcattagggatttagatgatttagtagattgccccctttgctaggttatctgtaggattcttcatctttaattgttcttaatgctagatctagagtaattaactagaacttgaatccagacaataggtatccccgccataggtatatgtagttggatctattatttgatgagcctgttttataggggtgtaataagaatcggcctatctactaaggtgaacaatcgaactcgtttagcatgcatatttaggttaataatctctcggcttctccgattattcttagctatagatatagggagtttcgcggaacaccaccggttattccataattagagtttgagtttaagaattgttcgataacaacctatctttcattagatctactaaccaatagtttcctgagaataccctgttcctagctcttttcctaatcggttacaacacaatcaatctgctgtctttttactttgttctctttttactttcttatattctcttctagcttaatctcgacattcaactcattgtttgaacaaaagaactttgtggaaatcgatccttaaatactgcaattgatctcttatttgagagagtagttctagggtaatttgaaccttatcaaatttggcgccgtcgccgaagttcttgggaatcatcattgagttttgtttagagatttcgtctagtttttacttctattttgttactcacgcgtttcttgttttcttcttttctgtgtttcaggtgtatgcctaggcaaacaaggagcacaaaacagaaggagcttatcaacttgtctgttctggacttgggaaaacttgaacgcaccaaccaaaaaactcagaaattagcaatggctgacagagtcatcagagctgatgcagaaggagttttgagagatgaggatgggcaagcctacaatgaggctggtcagagattggatgatcatggactcatcctacctgaggacgccaatgaggatcaggcgcgcctcaatgcgcaattagctgccagagatgtagcagggctcgctgtcgatcgacaccaactaggtgtcgatcgacaccatcgggagcagcacgcggatgcaatcggtatcgaacgacacaacagaggtgtcgatcgacaccaacaccagattcctgcagctattcttccatctgcggaacctcgtcgtactcttggggatttcaacagaccagacctgttctatgctaatcgatcagcgattgtacccccaccattccagaggaacgactatgagctgaagcctggctactttgctttagttggccagcatcctttccatggcttgtctcatgagcagccaatagaccatatcgagcgttttgaggacctagttctgagcatcaaagctaatggagtcgcagaggactacttgttgtgcaagcttttcccttactcacttgctggggaagatgcttcttggttgaaccaattgaaggttggttcactcacgacctagagaagcatcaagatagccttcctgaacaacttctatgatgatgccaagtctgaggagctatgaaacaaactgtctaccttcactcagggtccgacagaagctttcaaggcaaccagggtttgttataaagagtatcaacgtgacttcctgcatcacggcttcaatgaggtacaaattctaggtagcttcttcaggggagttgattggagatatcatatggctctcgatttagcgacagatgctacaaccttgattgagactgttgcttgcaacatcagtaccaagaatgctgacttcaagaggaagaagattacaggagctttatcgggaaatcagatggctggagtacatgctaagttagattcatttcacaacttgcttacatggaagaagcatgtgcactttgttgctgaagcagagaccattgagcccgatctagagacataagaaagagtcttctatatagatggacaaggttacaagaagtttggtctgcaacagggcaactttagtggcaacaggtttaccgggaaccagagttcttcaagtttcaccctaaaacctgccttccagaagacatttcttcagagcaacttcactaggacttatggtaattcttctcaccaaaccccatccttcacccactacagagagtaagatggaatctatgcttgagaagattcttgagggacaatccaagttggttgtggagttcaatgggaagtttgatgctatctacactgatcttaacgggaagatcgacaatttgagctctcacatgaagaagctagatgtacatgtagcttaaactgtataatccgttaagagacaagaaggctttcttcctggagcccctgatgttaaccctaagaagagctgaaatgccatcttggtcagagaacaagatgatgggtgggaagagcaggatactgaacacgagttggaactcgtagctgcagagttggtgtcgaccgagacctaccagtgtcgatcgacatcaaccacagattcctgcagctattcctccggctatggaaccacgacgtactcttgagaatttcaacaggccgaacatgttctatgctaatcgatctgcgatcgttcccccaccattccaaaggaacgactatgagctaaagcctgactattttgctttagttggccagcatcccttccatggcttgtctcataagcagccaatagatcatatcgagcgtttgaaggacctcgttctaagcatcaaggctaatggagtctcagaggactacttactatgcaagctcttcccttattcacttgatggggaagccgcttcttggctgaaacaaccgaaatcaggttcactcaagacttggaaaagcatcaagatcgctttcttga

SEQ ID NO: 168554 - DNA, 558 bp, Arabidopsis thaliana landsberg
  unsure (1)..(558): unsure at all n locations
atatccactctntggtgagaatataatattcaagcaaagtttgaaacaaagagatttgaggttgagcttgactttaggtatgcaatagtggaggaacttgtatgctttggtgcaagagttcacatctgtgacatagacgaaactctgctaaacgaatgcttaagtggatggcatgcaaaagggtttgaagtgagtggttcaatctgtgatgtttcctctcgacctcagagagtgcaattgatgcagactgtttcttctctatttggtgccaaactcaacatccttgtaaggtcttcttcaagctttcctaggttcttatggtctcatttgggtcttgattggtttttgtaaagcaaaaaaaaaaaggataattgggcgtttgggataccttaataacgtcattggtttgccattatgcagataaacaatgttggcaagtacatattaaagccaactttagaaagtacagctgaagatttctcaagtttaatggctaccaatttggaatctgcttactacatctcccaattggcacatcctttacttaaagcctaggaa

SEQ ID NO: 168555 - DNA, 1427 bp, Arabidopsis thaliana landsberg
ttattcttttttggaatatcttttttaacaaattactttttaactgcttattctattatatattttactaaataaattttgaacttatgggtggttcggattaatattggacaaaaatatttttataccaattaaaaaaaggatttttttttggtagagttaaaaaaggatttatttagtaaattatataatagaataagcaaatgagaattaaatttatgtagtttccttttgctcatttttagcttaacaaatccttttttttggaaataaatcctacacattatacgcaagtagatattctatatattccttgttaaatttctatcctaattcctaagtatactggtcatgtcttaatagtagaaattaattactaattattttttaatattataaaaaatcacataactgagaaagaaacaaaagatatttttcactatatatgcgtttgacaaatgtgacaaggcacacagagcattccgtggaaaaaccccaataaaatctcaggcaaatctccggcgtaatcgatggcggaggagaatcaagaagaaaccctagaactcaaaccaagtagaaaaccaccacactttgtgctaatacatggcatgagcttaggatcatggtgctggtacaagatcaaatgtctcatggaagtctctggcttcaccgtcacttgcatcgacctcaaatcctccggcatcgattcttcatccgtggattcactcactaccttcgaccaatacaaccaaccactcatcgacttcctctcctctttccccgaacaagaacaggtgaaacctaattcagaactcaaatgaattgattcttgaatctgaagcaaactcactctgtttttctctgttctgtttttttcatcaggtgatacttgtgggtcacagtgcaggagggcttagcctaacgagtgcgatacagagattccctaagaagatctgtctcgctgtttttattggagcttcgatgctcaaatacgggcttcagacagatgaagatatgaaagatgtaatgatacacatttctttaaagtcaagttaacttgtgtgtgacgttatgtttctttgtcacagggagtgcctgatctatcagaacatggtgatgtctacgagcttggttttggtctaggaccggagaatcctcccaccagtgctattatcaaacctgaataccgacgaaaactactttaccacatgagtcctcaacaggtttctctactgtttcatttcatatataatctcaaaagatttaatgtgtttaagtgtaggaaaattcgaccaactccttataaaaataaatcaccatttaatacaaaatttgcaatgttcataactaacctttatttttatttttatatatgtgtggtttttcttatactttaactaacaattatccagtatatatataccaaa

SEQ ID NO: 168556 - DNA, 1059 bp, Arabidopsis thaliana landsberg
tggaagtaagaagcatggtgatgtggatattgatgcgcttgagatggaattagaatcttctatatgggaaacggttaaggagagggaaattgaatgtaaggatactcacaagaaggatctaatgcagttgatactcgagggagcgatgcgaagctgcgatggtaacttgtgggacaagtcagcctatagacggtttgtggtggacaattgcaagagcatctatttcgccggacatgattcaaccgcagtctcagtgtcttggtgccttatgctcctcgctctcaatcctagttggcaggttaaaattcgcgatgaaatcttgagttcttgcaagaatggcattcccgacgcagaatcaattcctaatctcaaaacggtaatctttaatttataatcataaagaaaacgttagagaattttacattgaatgaatttatacacaaaatcagtgtataaatgtagcttattttaaaaatctaacaacattttattgttaatatatataaatgttataaaataggtgacaatggtaatacaagaaacaatgagactatacccaccagcaccaatcgtgggaagagaagcatccaaagacataagacttggagaccttgtggtgccaaaaggagtgtgcatttggacactcattcctgccttacaccgagaccccgagatctggggaccagacgcaaacgacttcaagccagagaggtttagtgagggaatctctaaggcttgcaaataccctcagtcatacatcccatttggccttggaccaagaacatgcgtaggcaaaaactttggtatgatggaagtgaaagtgcttgtttcacttattgtctcaaagttcagttttactctttccccgacttatcagcactctccaagccataaactccttgtagagcctcaacatggtgttgtcattagggttgtttgactgtgttacgtgatccgtagacttttataatgatttaatttgctttgtgtgttcgaatttcaaaagtctcttactttttttctctcttttctttttttcagctcaaatctgtaaaatga

SEQ ID NO: 168557 - DNA, 1707 bp, Arabidopsis thaliana landsberg
tcaacaaagtgaaaaatgggttgaagttgaagtaagatcttctcaactatatttagtcttcaatagttgatggtcattgaaatatgatatcttaatttgcagtatgtcttcactaacacttgattagcttgtttacaatactagcattcagggaaatccaaacctatgtttttccagttcatgcaacaaaaagaaaaatagcatcatgttaccagttgttgcatcacttgcttctttggctgctataatagcaatgatcgctctgctttttgtttgtattaaaagacgctcatcaagcagaaaaggtatctgtatcaaattcatcaaaccagaaatattattgtatgcatacataattataaagtgatttctaattatttgtgtatggttctaggtccatcaccaagccaacaatcaatagaaacaataaagaaaagatatacatatgccgaagttcttgccatgacaaagaaatttgaaagggttttgggtaaaggaggatttggaatggtctatcatggttatataaatggtactgaagaagtagcggtcaagctactctctccatcatcagctcaaggctataaagagttcaaaacagaggtttctttggcacccttatgaatttttatacatttttgtaaggctaagttgacgtatattatatattgtacatatttggataggtagaacttcttctaagggtttaccacacaaatctggtaagtcttgttggatactgtgatgaaaaagatcatctggccctcatctaccagtacatggtcaatggcgatttgaaaaaacatttttcaggtaacacatgtatattctcatgcatatatcatgacagaaatgcatcgtgttgatatgtgacattcatgtctatgctaatacatgcaggtagctccatcattagctgggttgatagactaaacatagctgttgatgcagcgtcaggttcgtcattttcatttccttttaacaccacttgatcaaactttctattgttttgttaaacaccaaagaactttggagacaggtttggagtacttgcatattggttgcaaaccgctgatagttcatagagatgtaaaaagttctaacatactattggacgatcaattacaagctaagcttgcagattttgggctttctagatcttttcccattggggatgaatctcatgtgtctacacttgttgctggaacatttggataccttgatcatgagtaagaattttagctctttctgaaaactatcttctctaccggttaaaacaaaagaatcataatcatttcgtcttgcagatactaccaaactaataggttgtctgagaagagtgatgtctacagttttggtgttgtactgctagaaattattacaaacaaaccggtgatcgatcataaccgcgacatgcctcacatagcagaatgggtgaaacttatgcttactagaggagacattagcaatattatggatcctaaacttcaaggggtctatgactctggttctgcatggaaagctcttgaattagcaatgacatgtgtgaatccttcttccttgaaaagacccaacatgtcccatgttgttcatgagctgaaggagtgtctggtatctgaaaacaacaggacaagagacatagacacatcgagatccatggacattaacttaagctttggcacagatgtgaaccccaaggcacgttag

SEQ ID NO: 168558 - DNA, 499 bp, Arabidopsis thaliana landsberg; identical to SEQ ID NO: 72308

SEQ ID NO: 168559 - DNA, 1210 bp, Arabidopsis thaliana landsberg; identical to SEQ ID NO: 703

SEQ ID NO: 168560 - DNA, 1570 bp, Arabidopsis thaliana landsberg; identical to SEQ ID NO: 34288

SEQ ID NO: 168561 - DNA, 1607 bp, Arabidopsis thaliana landsberg
atggctgaagatcagaacacaactgaccgttgggagttgccttcagcgtcagagcccgtcaaaaacgttgaccgttgggagttgccttcagcatcagagccaataaagaacatagttttggtgggacgtaccggaaacggaaaaagcgccactggaaactcccttatcggaaaacaagtgttcaggtcagaaacacgagcaaccggtgttaccatgaaatgtgaaacatgtgtagcggtaacaccatgtggcacgggaatcaatgtgattgacactcctggtatgaattcgcttaagactttgaatatagcctataattcacttgatctatgattctaatttcttacatagatttgatgttactaaagataggtagttttgaaaatttgtttgcatactcaaaggcatgtctatctaggaatcaacaaatcagtctgtgttatttgacattaaaaagttaaaacacggtcgcttttgttttagccggattttgtcgcggaaacgagtttgaataatgtgaaacatacagacatatagactttgatattttttaaaagttcaaatcatattttgttgttttagaaataaaagtgaaaagcaagagaaacaaatttggggtacctttatactctagtatttttggtataaaggatgataaaaacttgactatcagaaacaagggtaccccagaaacaataactttgtatttaaaagtccctcgaccaatcactcaatcaccggttagttatgttcatacttgttaatacacataaactataaatcttaggctgtatatgtctgtgtaaaaatcgaatatccaccaacaaaaggatagacaactccaacattataagacattaatttaagcgtcaaccttgatcaaattttaggtacttctgaataaccgatgctacatatagtttgaaaaaactaactccatattggctatggttgttgacacaggtctgatcgatctgtcagtgtcggcggaagatctcagtcaggaaatcatcaatgatccttgttccagaggaagatggactgcatgttgtggagttagttctgcgagtgagaagtcggatttcgcatgtagaagaagctactcttaataccttacaagttatttttgggagtcaaatcatttgacatattttagtagtattattcacaggtggtgatgagttgaaagcacacaatatgaacattggatgataacttgtactaaggatgccttgaatttctgaaggtcttatatatccctttgatttattctaaagaacttggatagtgtcaataaaggttcagcatcgcttatatgtttttttttaataaaaatattggattgtgcaatttacgacagttcttagattgtgtgagggcataaggatcctctttgattacaggacaacggacgaaggcaagaaggtcaaacaagttcaggaacttctcgcccatgttgcagccattgaaaagagcactagtgggattcgcgtttacggacgaaatgcaccgtaaaatacaggtggatatgcttaccatctacatccatttttagtgtgtttgcgatagctagaataattgttatatgattaaagggatcctcaaga

SEQ ID NO: 168562 - DNA, 1226 bp, Arabidopsis thaliana landsberg
gtctccagaatctgattagcgaagaacaggtgtatgatttaacggaagtgaagcctattgattttattcgatatggattgggatgctgagaggcaattgcgtctcgaggagacgaatgtgctaaagagattcgtgaaaagatgagaattgtggtacttttttccattgcttgatctacaatcaaagatttgaaaatgtgtttttttttttttgttattgccactggtttgatcactcattacaggttgcaggtggagatggaaccgttggttgggttctaggatgtctcggtgaacttaatttacaaaaccggttacccgttcctccggtttcgataatgccactcggaacgggaaacgatctttcaagaagtttcggatgggtgaaaaagagatcttattgtctttttttgtatctttaatcttataaaatactctgttctaattagggtttatgttggttttattagggaggttcattcccatttgcgtggaaatctgcgataaaacgaacacttcatagagcaagtgttgttcctataagccgtttagataggtaaaattagtactgcgaaaaagcgtgatatgaacaatttctttcttgagctctctgcttaatcttttgatgttgaaatattgatgtagttggaatattctgattacaatgccttctggtgaaattgtggatcctccttattctttaaaggctacacaagaatgttacattgaccaggttttgattttcattgatacacaaaattgaaattcttttgtgattattagtctttggtttcaattagttaatctttgtgttgcagaatttggagatagagggagagatgcctccatcgacgaatggctatgaaggtgtcttctacaattactttagtataggcatggatgctcaagtggcttacggttttcaccatttgcgcaacgaaaagccttaccttgcaaatggccctatcgccaataaggttttaccaaattctcttgagaatgataattttctctaagacttttgtttttatatcaagaaagaaagctaacattttgttgttgcagattatatactcgggatatggttgctctcagggttggttcctcactcactgcataaatgacccaggtttaaggtatatactaacaccaagaaaacaaatgttacaacttacaacctcaaattgtggtcttaacacgtttgtaattatctggttttaggggtct

SEQ ID NO: 168563 - DNA, 592 bp, Arabidopsis thaliana landsberg; identical to SEQ ID NO: 31176

SEQ ID NO: 168564 - DNA, 1253 bp, Arabidopsis thaliana landsberg; identical to SEQ ID NO: 19580

SEQ ID NO: 168565 - DNA, 2372 bp, Arabidopsis thaliana landsberg
  unsure (1)..(2372): unsure at all n locations
atgagggcggcgaatcctatgactctacaagacgttgtttccgatgacctaaactatgaaatctgggctcatattatgaaaactagcttagtggagaaaggactttggtacgttgtcaagtacggaatcccgccggatttatcaaagattcgagagttagctacgaagattcaagctcaagacctttcaatatatagagattctgcggtaaaagacacgaaggcacttcaccttttgcaatcttttctcccagattcggttttccgaaagacactggaaaccacttcagccaaacatctttgggatttgctaaaagaagattacgtacaagccaagttagggatggagaaattacctgagtaccacatgttcgcaatcaatgttcttccggcgacatttgataaggatatgtggatgatatactcagtaccacttctcatatgactccatataagaagtatttcaccactttggatagaacataccgagctagggttagtttcatatttggaagtactctcatggctgaaggaattggagatataattatcatgactaaggatggtaataagacgatcaagaatgttctttacgttccagggatcacaggaaacgcgttgagtgttgttcagatggagatgagtgtaatcttcacagcaagaagagaaaaataacatcatatgaaacttagttttagaggcaggacactgggctagctattttattaaataaagtagacaaatcgatggattgtgttcggctaattcacttttcattttgtttatttttatcggtatgcggacttgtagggtttatggtcgcgtcttttatagcttgtggtatgtagctcaatggttgcttcattcaaatgcattgcaccatcttgaatggttaggtctaataacaagtcaaaaccatcaacgattcttgttgaccatatatttgtggagagaaagctgcgtgtggattacggttagtcgatttaaccggatcaataaatttaaactgaaccaacacttaaaaacgttatttggctttcttctaaggaatatatgtttaaagaaacatgcggatacgacggcggcgaatattcagtttcgttgatttcaaaattcaaattataataggatttagggtttgtagtgatgcaactatgaatataaataatcgcttttccaagataaataaaaacagaggaaatcctatgtaagtaccacgaggagatggtagttatgtatgtggagacaccgactctacaagagctcatttccgatgaccttaactttgaagtctggtcggcgatgatgaaaaccacacttattcagaaaggactnnttagcnaatggaatccctccagatccatcgaagaatccagagttagcggcgacgattcaacccgaagagctttcgaaatggagagatttcgtggtgaaagacgctaaagcgcttcagatcttgcaatcttctctcacggattctgttttcaggaagactctctctgcttcttcggctaaagatgtttgggatttgcttcgaaaaggtaacgaacaagcaacgatacgtagattagaacaagtaacgatacgtcgattagagaagcaattagaagatctcaaaatggttgacaaagaatctggcagttcctacttggataaggctttggaaatccttgaacgattgggccgtgcgaaacttgagaaatctgattacgagatttgcaagaatgtgttcacgacactctctgggtcattcgatggtctagattcaatgttggaggaactcattgatgttcataagatgactagtaagagtcttgttgagtatttttactatcgtgtacatgaatcatcgacagagaaagctatctttggactattgaaggatttgaggcttaaatcaaagtctgagaagtggtgtggcttgtgctacaagaacaatcacaaccaagaagactgcaaatttaggattcatacagataaggaggagaaagaagatgaaatcgtagttgattatcgtctggaaacggtaccaaatttaggggcaaaaacatatgatgatgatatttggataatacacaagatggccccgattaacatgactccatatgtgaagtatttcaccactctagacaggacattcaaagctacggttggaacggtcgatggaacagttcttttggttgaaggaaaaggagatgttaagatcaggatgaaggaagggaagaagaagacgatcaggaatgtgatttttgttcccgggctcaacagaaacgtgttgagttttggtaagatggtatcaaaacgctactcaatctcaacgggaatgcaaggcgaatgcatagtcagcgaacggggtgagaataaattggggga

SEQ ID NO: 168566 - DNA, 575 bp, Arabidopsis thaliana landsberg; identical to SEQ ID NO: 71409

SEQ ID NO: 168567 - DNA, 769 bp, Arabidopsis thaliana landsberg
aaacacagttttgaatgtgtggcgctctttcaccaaaatattagctggtggtaaagaacctgcctaccccaagagttgtaagcttaatccatcatttgagattggtcctgacgttgtccgatacactctccagctcacgcgtgaagatatccaaacgcttcgcgagagacttaagagagaagtttcctcctcctccttctcaacctcatcctcaaaagagcttcgcttgtctacatttgttattgtttactcgtatgtattagtatgcataataagagctcgaggcggggaaccacatagaccggttggatatgcgttttcggtggattgtcgaagccttatgaatccgccggctccaaattattttggaaattgcatcgctggttgctctagaatgatgctaacggcaaaaatgtttatgggtgaagaaggacttttggctgctgcgacaatggtcagcgattcgatcgaagaatgggacgagagttttgcgtggaagattccggattttgtagcatatgcaactcttccaccagagacacaacttattttagtttcagggtctaaccgatttggagtatacgagttggattttgggtggggtagacctgataaagtgatggttgtgtcgatcagtccaggcaatgggatttccatggcggaaggtagagaccaaaacggcggtgtggagattggcttatcactcaaaaaacacgaaatggactcactgattgatttgcttcattgtgaactaaaataataaatcact

SEQ ID NO: 168568 - DNA, 959 bp, Arabidopsis thaliana landsberg
cttacactcactgttcatttctctctattggcatcgacgccattgttggactgaagatgtcaggattcgaagatggattttcagctgaaaagctattctcacaaggatactcatacacctacgacgatgtgatatttctaccacacttcatcgacttttccactgacgccgtctcgctatccacgcgtctcagcaagcgcgtcccactctcgatcccatgcgtcgcttcgccgatggacactgtctcggaatcccacatggctgctgcaatggctgctcttggaggaatcggaatcgtgcactataactgcgacatcgatactcaagcttccgttatccgtcacgctaaatcgcttcaagttccgattgcgtctgatgctgtttttaaatgcccagagcaccagattggttctgttgatgattttggtccttcttccttcgtttttgtctcgcagacgggtataatttcacaatcaatttcataccttttagctgaaagttagctactttcattttcaaaattgtgaaatagtttccatttgacaacttcgttgttgtttgtttgatgatcaggaacattgacaccgaaattgttgggttatgtttcaaaatcggagtggtcgagtatgaaagatgaccaaaaggaggtgaagatatatgattacatgaagagttgtgagaacaaagattactatgtgccatgggatattgatcttgacaagattgaggcggttttggaagataagcagaaagggtttgttgttctggagaaggaaggtgagactgtgaacgtagtaacaaaagacgatgtggagagggttaaaggatatcccaagttagggtcaggaactgttggtgcagacaagaaatggatggttggtgctgctatagggacaagggaatcagacaaggagaggctagagcacttagtgaaagctggagctaatgttgtggtgttg

SEQ ID NO: 168569 - DNA, 2024 bp, Arabidopsis thaliana landsberg
actatttgtttttaaaattctaacttaacttttttcatttgtcttttcaatcggcaaatttttatatcctatataggatctcaaccggtctcccgcccgtggtgaagaaggccacggtgtcgcgggaacttcgtcaagccatcctccaaagtctgtactaactgaggttagttgtataatttcagtagtcaaagttttctaatgtcgatgttagttactaactgcttaccaatgaaaataatccatccaggacaatcttatcggaattgatgttgaacaaaatccatcgacacctggcatcccaatggacctcattcctgatgttgcaattaccgttccacctgtcggtccacccattccaactgcatcacaagttgaggttttgtactaacaaccttattcggtaaataatcctgtaacggataaagaattaaatattttgtaaaagacttctgaatattttcctatgcattcgtcacagccggaaactagtgttaaagtttcgttttaattttttcagaaagcgattaatacaactgttagcaccaaaactctcccgagccattcggtccctttaaaggtttttttttgttcccctttaagttcgtatttgatatcattcttatgggctaacttttgtttagctagtaagagaagctttatccgcaaatgatagtaacttggattaaattgttttttgttcagggtgcggacgaggcatctggtcgttatactatgctaccaaccacactggtaactattttgcgaacttagttttcgcaaatctgacaattaaacacatcttgacttgtcatttcccattttattacctcatctcacatgtatcttttgttttcaaaatatataagaatgatgaggtcaatcaggattcagatgaggtaagttgaaatttttacacgtttttattagtgtatttccttatttgcatccgctttaatttgtttcttcaattattcctaggatttttctactccgcccccggctctggggagaaattaacagctgggaaagatgtagccgtatttgatgttgatgttaaccaaggaagaaggagcagaagacccaggacattgtcaagcaaattagatgggcggttccacttcgacaagaaaaccaagctgcttgttggtcatccatctcctctgataagcgccggagaggtggttgcagatccagaagaacgctaccaaaggtcgctcttgaagctcaagcggaagaggtaattaacttagtcggtaattcagttatatgataataaatgtatttaccgttactcacatccttgcgcagttctatcagcattgttggggaagtggccctttcaaacaaagagattttgacatcattaagcggaagaaacatttcaccagcaaagttatggatgctctcatcaggttctgtaggcatctactaaggacagacgacatagatggcgagaagctgcgggttgatctgttgggctcgaaattcgtctcacaactgactagactttttacaaagtttaccaaaacaagcccgcccgaggatttcgtattccctgcagcagttgttgaccttcttatgggggtaggtgagtctgaccacgtccgattgtttgcagaggctgattgtgtatatatgccattcaactttgacaaaaaacattgggtggcgttgtgtgttgatctcaagagtcataaaatcactattcttgattcgaacattcagcttcgacgtgactcatcgttgtttgcggaattgcagccattggcagccatgctcccttacctcttcaagcaggccaattcgtctggtggtcctatcttgctgcaacctttcccgctagatcgtcctcacgacatcccccaggtttcttccccgtttgattccggtgtgttttcagttttcctaattcatgctcatgctgccggaggggttgaggaatgcctggaatttgatgttgccgctcttgaccaagaagtgaaaagctcgtctcgactataatattgtccggtgttgcatcc

SEQ ID NO: 168570 - DNA, 1181 bp, Arabidopsis thaliana landsberg
  unsure (1)..(1181): unsure at all n locations
atgtttgacgatgatgttgatatgttttacaaatatagtgacggtgatgtcgagtacaatgngggtancgaatcagagagtgaagagcggattgaagaagaaattgttagaagtaagaagaattcgaagaagaataagaaagagaagaagaaaaaggatgaagaagatcctcttgagcgttttgactttgaagtagatgatggagtagcaaatttcgaagacgagataccgataggccgagatataattcccgagagctcagatgaagacgaggatcctattttggtgagggatagaagaatcagaagggctatgggtgataagtttgtgattggaagtactttcttcacagggattgagttcaaagaagctattttagaggtgacattaaagcacgggcataatgttgttcaagatagatgggaaaaggagaagatttcattcaagtgtggtatgggcgggaaatgtaaatggagagtgtattgttcatatgatccagataggcaactgtttgtggttaagacatcatgcacgtggcatagttgctcacctaatgggaaatgtcagatcttgaggagtcttgtaattgctaggttgtttttggacaagttgaggctaaatgagaagtttatgcctatggatattcaggaatatatcaaagagcgttggaaaatggtgtctacaatcccacaatgccaaagaggtagacttcttgccctcaaaatgcttaagaaggagtatgaggaacaatttgctcatatccggggatatgttgaagaaattcattctcaaaacccagggtctgttgccttcattgatacatatcgaaatgaaaaaggtgaagatgtgttcaataggttttatgtatgttttaatatacttagaacacaatgggctggatcttgtagacctattataggactagatggtacatttttgaaaaatgttgtgaaaggagttctattgactgcagttggtcacgatccaaacaatcaaatctatccaattgcttgggctgtggtacaatctgagaatgccgagaactggttgtggtttgtctagcaaataaaaaaggacttgaacctagaggatggcagtcggtttgtcattctatcagatcgctcaaaggtatttatctcatctcattccctttgtatattggtatgtcgaagttctcatta

SEQ ID NO: 168571 - DNA, 660 bp, Arabidopsis thaliana landsberg; identical to SEQ ID NO: 56088
  unsure (1)..(660): unsure at all n locations

SEQ ID NO: 168572 - DNA, 1326 bp, Arabidopsis thaliana landsberg
  unsure (1)..(1326): unsure at all n locations
gctaacgttatgaaagctgattctaaaggggattcgatgatagttgagttgctgcttaggattgtggataatgtcagagcttgtgagacattcccgtggggacgtttttcctatgagcagtgtatggaaggggtgcagagagtaatgaagaacatgaaaggtgtggtgaaacccaaggcacagactgctttttatggatttattactccacttgaggtaagtagtcgagtaaattatatgagtggctagattttgttattgtgaacttgcatttacttttatgtttttgtgtctagattctggcatttgagtgcattccgcagcttgggaagagatttagagaagttgtacctgcagacaaggaatgtccaagaatgtgcaagcacaagttcagtgaaagttgcatgaagagatttactttggaagaaataaatgaagcgcttggagatataacggttagctttgttctcttgaaatctatgtttataatctttgtggtgtttgaaatatatgtttacttgacaggatattttaagcatcgtggaacctgatatggatgagagaaaaatgttgtcacgcgttgtagagaagcatgttgatgatggtattggatatatcgatccaattgttgatagctggagagagaggcttatcgtagagaaaaagaagattttttggcgtagtctctaccaagcagacattgatggtagacgtattgaaactgttgatgatgttccagctgtacctgaaatccctgggacatctattctctcgttcaaggaagctatggagaaaggatttgacaagctcacggacaagcttgctgtgatggatagcgaaatcaagcagatttgtgtgagagtacaaggaatagaggaatatgtggcagatcagcttgagaaagaggcagaaaaagcccgttatgaagatatgcgtcctggttcagctgctgattttgtgccaccgtcttatcagccaagggatactcagagcaaggccttggttattcacagtggaagccgtgacccagtacctcnnnnnnnnnnnnnnnnnnnnnnnnnnntggtgaacttttgtgtagtgatgctttcacaatagttcttacatgtttggttacatatttttgtaggtgatgtcagcgatgagtccgatgaagaggataagaagaagaagaagaagaagaagaagcagatatcgaagaagaagagaaagcatgttggtcctactctggaatctgggaaaaaacgtggaaggaaaccttccaagtataagggggaagagtttacagctgaggggaagcaaacgaggaagagacagaagaattag

SEQ ID NO: 168573 - DNA, 485 bp, Arabidopsis thaliana landsberg
atgcgcgcccagcccgatcccgcgattctcgacgcccacaaggcgcgcgcccgcgcctggttcgaggcgctgcgcgacgacatctgccgtgccttcgaggcactggaggacggcctgccggcctcggcgccgctgggcgaccgcgctcccggccgcttcgtgcgcacgccgtggacgcgcaccgaccacacgggacaacccggcggcggcggcgtcatgagcatgatgcgcggccgcgttttcgagaaggtcggcgtgcactgctcgaccgtgcacggcgagttcgcgcccgagttccgcggccagatcccgggcgcggccgacgacccacgcttctgggcctccggcatctcgctcatcgcgcacctcaacaatccgcacgtgccggcggtgcacctgaacacgcgcttcgtagtcacctcgaaagcctggttcggcggcggcgccgacctcacgccggtgctcgacgcgcgccggacgcagga

SEQ ID NO: 168574 - DNA, 1269 bp, Arabidopsis thaliana landsberg
atggctcgctgtgctttgattccatctataaacccagctcatagcttccgtcatcagtttccgcaacccaatgcgtcattctatttacctcccactcttccgattttttcgcgtgttcggagatttggaatttccggcggatatcgccgccgtgtgatcaccatggccgccggaactgatcactactcgactttgaatgtgaaccgcaatgccaccttgcaggagatcaagagctcgtatagaaaactcgctcgcaaggttactactcttcgagattcaagtttgtttttgttttttctttcttcccattttcggtttctctcgaattgaattgaagcttagggtttgtaatggtgtaacagtatcacccagatatgaacaagaaccctggtgcagaagataagttcaaacagattagtgctgcttacgaggtaacacaagttctgtcatctatcttttttgaaatttctagttttgattgatgaagttttgttgcttataacacctgggaatgaagcatttgtgtaggtattatctgatgaggagaagagatctgcctatgatcggttcggcgaggctggtttagaaggtgattttaatggatcacaggatacttcaccaggggtaagtcatcatctttgaactatttcttaggatatcagaacattttaattgtttaatgagctccttgattctattcttcattcttcaggtggatccatttgacttgtacagtgcattctttggaggttctgatggattctttgggggaatgggtgaatcaggagggatgggttttgatttcatgaataagagaagcctagaccttgacattcggtaacatttttactttgtttatgagctataaatacttttaattctgttttttcatgaattggcatttgcttactgtccttacttgtgtagtgagtgataatttgctataggaaatcagagattattgttatttacttttgttaggctaatattgtggtcttgtcttgtctgttagctgaatgtgttttattttcttgataatggaggaagttatctatctctcataatctttgtttctggtttgattgcggggacgtgtatactagatatgacctgcggttgagctttgaagaggcagtttttggagtaaaacgggagattgaggtttcttatttagaaacatgtgatggttgtggaggaactggtgctaaatccagtaactccattaaacagtgtagtagttgtgatggtaaaggacgtgtgatgaatttt

SEQ ID NO: 168575 - DNA, 1168 bp, Arabidopsis thaliana landsberg
ttagttaatttattcatgtcctttcttgtacgacgattcgttactaattttccttatacggaagtgaataattgtccggaaacaccgttgctttcgtcaatcgatcatgaggctattgatcacaaaccaaagttaaccggtatggtttcttctatgaagatctgaatttctatcactggatttgcctcaaaaacttctatctaaaatcgatcccgagaaccctttgcgccttgatgtctccaaagctgcaggcctcaaagaaggtatctatgttttacataataatttagataataactgtcacaactactaaaccaaatatgctttttcttctttttttgaagatgaaaaggagtactacgaaagacaattggcaacactaaaatcctttgaagaagtagaaagtttcttagctcgatcagatgagtataccatcgatgaaaaagaagaagaagaagatcgagctgagagagctgcacaagagcttgccatgcaaatctcaaattgggctaacatctttttacttgctctcaaggtgtgacttgatctattgaaacatttataacattgttttggtgacgtcgtctatatatcaaatgtctacaatgtgtagatatatgctacggtaaagagtggatccattgcgattgcagcatctacactcgactcattgcttgaccttatggcgggaggaatactttggttcacacatttgtctatgaagaacgtaaatatctacaaatatcctataggaaagcttagggtgcaacctgttggaatcatcattttcgccgctgttatggctacccttggtatacatatattcctttttcatgattttcttatataactctaaactatatattataattgctttaatgaaaatgtaatgctataaactaaccattcatacacaaatgcgtagggttccaagtgctgcttgtggcagctgagcaattgatttcaaatgaaccttcagagaaaatgaatcatgtccaattgatttggttgtattcaatcatgctaagcgcaaccgctattaaactcgtcttatggatctactgcaaaagctcgagaaaccatatagtccgtgcatatgccaaggtaaatatgtgcatatatattcttataatttcatgcaaaaatggagactgactgattatgcatg

SEQ ID NO: 168576 - DNA, 535 bp, Arabidopsis thaliana landsberg
tcatcaccggagacgtgatcgccaccacccaggcgcggcgcacgctcgattatctctatgaaaagcttcagaaaggtggcagcgtggaacgatctgacgtcgaaggtgcgatccgcatggccgttgccgccgacgaccagctgagcctgccgacgatggaaaagaaagccaagctgaccatggcgcagatttcgacgcgcaagaagacgatcatcgcccggacgccgacgcaggacgcttatatgcgtgcgctcgagcgcaacgagctcgtcttcggcgtcggcccggctggtaccggcaagacctacctcgctgtcgcgcaagccgcccagcttctggagcgcggcgccgtcgagaagatcatcctgacccgcccggccgtcgaagccggcgagcgcctcggcttcctgcccggcgacatgaaggaaaaggtcgacccctatctgcgtccgctctatgacgcgctctacgacatgatcccgggcgacaaggtggagcgggcgatcactgccggcgtcatcgaaatcgccccgcg

SEQ ID NO: 168577 - DNA, 1622 bp, Arabidopsis thaliana landsberg
  unsure (1)..(1622): unsure at all n locations
cttaaaaacgatgttcttttgtctttgtgaagcacacgtcaggaggataaaaggacacacttgaaatcaaaattcagaacaatcagagatgatagaaaccggcggagataaacagagctccgtcgaggaaggatgtggtggccgtacgattcttgtcggcgtgaagcttgacgctccgagcagagagttactcacttgggctctggttaaagtcgctgagcctggtgatactgtgatcgctcttcatatccttggaaatggttacatttctgagcttttccttaatataatttctcttaccaaaaagctttgatttttatgtttttgttaacacaaaagtttcggttttgggttttgtttagagattgtggatcgcgcagggaactcttcgcttctctctctggttagaactttcgactctgttcttgacgtttatgaaggtttctgcaatttgaaacaggtaaaataagatcaaagtctggattttttcaattttgttcctttgctagtttgcttacttctttagcttcttcagaagagaaacgaaatgttgaatttttccgctttataggtggatctgaagctgaagctatgtcgtggttcctctgctcgaaagattttagttnnnnnnnnnnnnnnnnnnnnnnnnnnnnnngttttagttgggatttcaaaaagtcaccacgcgattcgttcatcagcttctgtagctaagtacatagcgaagaaactatcaaaggattgttgggttattgctgtaaacaatggtaaaatcttgttccaaaaggaaggttctccatcatctaccattaatcaatctcaaggtttgaccttttttcttcaagtttctacattattttgtatctgaatgatttgtttttggtgttagtggttgaagaaactgttattgggtttggttatataggaaaggaagatgttcggaggattactttgttgaatgtgcttcagagatctgttacattgaataagactactaaagtagttagccattctgaggaagattctaactctaaggaggaggaggaggatcaagcctgtggccagaatctacggcaagtcttagcggctgctgtttggagaattgctcggtttgtggttttgattctttgtctccgaacgatacaactactcctggaaagttgtctggagcttcagattttgataggagtgaagatgatgatgagtgcaacaaagcaatggagattgtgcctgtgaatggttcagaagattaaggcggttctgtaactatgttggttaggaaattgcctgaacctagaccaggttggcctttgcttcgtcgtgctgtttctacattaggacaatctgttactcctcataagataccggtagttcaatgggctttgaagcttcctcctaaggatactaagcaacttggttatgattcttctgaagataatttgtcaaccttaaacgcacttgttccatttggtatcaactctatcaccaacaagtctattcctggcaatagtccaagaaaattgccacaggaattagagggactttatgagaggttctataatacttgccggtttttcaagtacaaggaacacgtttcagtgacatccaatccatgtgattac

SEQ ID NO: 168578 - DNA, 1293 bp, Arabidopsis thaliana landsberg
ttacagttatctgaacgtttaatccattgttgttccaaaatttccttacaaatcgtccctttgatttcaagcgcagttgaagatgatacaaatgacctcgacactcgtctccctccacggcttttcgcaactgaccgttaccctgatgctcgtctcaatatctactccagacccgacattctcactgtaatatgtgacgtcttgaaaggttccaaggagatggaaaccatcttagactcttgttttgggtctttgtttagtttaagggttagcgaatgtccaatctccggcaaactagttcatgctttgttatgtagacagttagtgaccaagcagaaatacgaaatgtggactgtttttggtggacagcctcttagattctctttagttgagtttggttctgtaactagtttgccgtgtggtgaatttccggaggagtatgaacctgacttcttccctagacgtgtcaatgggacaaatgattactgggatgttttgattggggaagataagaatgcaacactagctgatgtttcctctaagttccaaactttaaaagggattgaagaccctttaaaactccccctggctctgcttttgattattgatggagtccttattgctaataaccagactcatcgtccaactttcaagtatgttaagatgttagaggacattgactcattcctggctttcccatgggggagagaatcttttttgaagactattcagatcatgaggcctgttagaaaaaacccgtcaatggttgattctaagagaaaaaggtctcgacctggaatcaagctagaagatcccatccaacaattcattaatcatatgcaacagcagagtatagctatggatggctgtcccttagccctgcaacttcttgcttataggaacatttctggtctactggacaaaattcctggttctgcagatgagagaacgtttttggaatggcattcaattgggataccgaaaagcaatcttactatcaacgatgttcatctccttgaacgtgttcctgatgtaagtaattgtaaacattgttgtggtatcttttctttcatgtgctcttatgactttttttatttggtctaattttctgagtctgtttcttcagatgattgttatcctgaagctatttgtaaacactaatgaggatggttggggtgagtgggatgatgaagtgagagacaagaaggttctttatttgattgaatagataagaaaatgccataatttcaccaaaaaggaggggccttggtagttatgctgatctaccgctca

SEQ ID NO: 168579 - DNA, 1370 bp, Arabidopsis thaliana landsberg; identical to SEQ ID NO: 902
  unsure (1)..(1370): unsure at all n locations

SEQ ID NO: 168580 - DNA, 1797 bp, Arabidopsis thaliana landsberg
ccccccactaaagccccggaatggaaggcctaggacacttgtgttacatctaatacaaatcgatctgaagggggggggttcaggttatcttccagcatttcaacaacattgtcttcttcaaatgctgaacagtgtttctggtaagttcttttgtgctcattttcactgagatcccggtggaaaatgacttctgctcttcttgaaaccacacttgtgcatctgccattctaattcatggactcatgttcatcgcaggtttgcgtgagtggttctcacagacagatgatagaggtcaaccgatcaggatccctgttatggttaatatggcatcttcttccttagcgttgggtaaaggtggaaagcatcaccataagtcttccctttctattgatcaaacaaatggtgccagcagaaactctgtgctaatggatgaagactcggatgacgatgacgagtttcagatacctgattcagaaccagaggttggcctatcaagctttctctttgaacttaagatttgatcaagttgagtctttcttcacatttgctatatttcagcctgaaacgagtaagcaggagcaggagactgatgccaagaaaacaggtgaactgatagttgtgttttatcgttaatgcttactgagttggtgaaaaagtatctaaattttatgaatttcttgtgccatatgaaacctcaaaagaggaacctgctctcaacattgatctgtcatgtttctcgggtaatctgcgacacgatgataacgaaaatgcccgtaactgctggaggatttctgatgggaacaactttaaagtccgtggcaagagtttctgtgccgataaaaggaaggttagtaatatctaacctaattaatttagaacgcactagaaagatgcacattcttatcgtattacatctgtgatactcatttaaccttttactgaagattcctgctgggaagcatctaatggatcttgtcgccgtcgattggttcaaagacactaaaagaatggatcatgtggttagacgcaagggctgtgctgcacaagtaagagatgttattaccctgctccgttgctattatctatctttgaggtctcttctttgtcacatggaaattccaattaatatgctattaatccgtttcaggttgctgcagagaaaggtcttttctcaacggtagtaaatgttcaagtaaggtttgcctgtgaattacaacataatgacaaactataattttcgatgtataatccggtatttttggtaggttcctggatcaacacactatagtatggtattttatttcgtgactaaagaacttgtacctggatcactcttccaacgttttgttgatggtgatgacgaatttcgtaatagcaggctcaagcttatacctttagtcccaaaggtatttatctctctctctctctcttttcccctctctctttctctgtgtagaatcttaaagcaaattgattcatatgcagggttcatggatagtaaggcaaagcgtgggaagcactccgtgtctcctcgggaaagcagtagattgcaactatatccgcggtccaacatacttagaagtgagtccacattttgtaacattattaaaagcttgtagatcaaataaagtaactcaaaaagaaacattttcattcccatgcagatagatgtagatatcggctcatccacagtcgcaaatggagttcttggtcttgtcatcggccccctcccactctttggttgtcgaaatggctttcaaaataaaagtaaaaatcaatataacacaactaagactt

SEQ ID NO: 168581 - DNA, 2009 bp, Arabidopsis thaliana landsberg
acaacacttgtcttcttatagccgtcaaggaaactcaaggctttttccttttgaatcacccacaaaaccaactagcaagagctttccagttgtaattgttgcatcagttggttctgcggccatcctcctcattgttgtgctggttctcattctttttctccgaaagaaaaagccaactaatgaaggtaatatgcaagagagacatatcgaataagaaaaccgataaatctaatggatttggttttttctaacccctagatgctgatctaacagtttttctcccgcgtccaagtaggccaacgatgaatgttccttatgttaactcacctgagccgtcaatcgagatgaaaaagagaaagtttacttattcagaggttacgaaaatgactaataatttcggaagagttgtaggggaaggaggatttggcgttgtctgccatggtactgtaaatggttctgaacaggtggctgttaaactactgtctcaatcatcaactcaaggctataaagagttcaaggcagaggtatgaatattttcttagaaaatctcaagcattatgttagaccaatgtgcttcattcattgtttttttcattttgatagttaaacacttggctctaaaaaagataattaaccacttcattcattgttgttttgtaggttgaactttttctaagggttcaccatataaatttgggaagccttgttgggtattgcgatgaacgaggtcacttggctctcatctacgaatatatgtcaaacgtagacttaaaacatcatttgtcaggtgaaagattattctttcttcctattaaaaaaatccacatggcaactaattttgatgatttaatgcaggaaagcatgatgtctctattttgaagcggagtactcgattaagaatagccattgatgccgcactaggtttatctactaactcaaaatagttcttagtcactttgtttgtttagccaaaaagtttttgagatcactgaataatgaacaaatacatcttatcctaacctaaaccagccatgtgaaacctttctaaactattttcagtcacctgttagccacattttgaagaatttatgttatagtgatgctaatactggtggtgatatttttgaattcaaaatattttgtcttttttttttccactttacctattttcacattcatattacattgtgtagacattattcatatatatgaatgttcgctaatatgtttaggactggaatacttacatattggttgtcgaccatcaatggtacatagagatgtcaaaagtacaaatatattgttggacgatcaattcactgccaaaattgcggattttgggctttcaagatctttccaactcggagatgaatctcatatttcaacggttgttgctggtactcctggataccttgatcctgagtaagaattttaaataactttcgagcttttttaataagtggaatcttctagtcgatgctatactatcctagatgtgaacttcaccatgccatgccatgtttatattttgtgtccatattcatattagttggtacaataatggacacatgaatcatactacatattattgccttgccagatattacagaacgggtcggttatctgagatgagcgatgtctacagcttcgggattgtgttattggagatgatgacaaaccaacgtgtgattgaccaaaaccgtgaaaagcgacacataacagaatgggtagctttagtgcttaacagaggagacattaccaagatcatggatcctaatctttacggcgattacaactcaaattctgtttggaaagctcttgaattggctatgtcatgtgcaaacccatcttccgaaaaacgaccaagcatgtcccaagttatcagcgtactaaaagagtgtcttacttctgaaaacttgatgagaaataagaatcatgacatggaatccgatagttcccttgaactgaccaagagctttgatacagaagttgtccctcgtgctaggtag

SEQ ID NO: 168582 - DNA, 527 bp, Arabidopsis thaliana landsberg
atggaacgccgctacagctctcgggtctgcgccgagcagcctggaccgctgccaactggcgccggatacgcaatgctcgtcaaagcaggactgcccgccctggatgagacgcatacagtggtcgtccccggctggcgatcgcccggcgacgaggtctcccccggcatcgtggtggcgctgcagcgcgctcaccggcgtggagcgcggatcgtcgccatctgcaccggggcgttcgtgctgaccgaggccgggctgctcgacggccgccgggcaaccacgcactggcgtagcaccgcgcagttcgccgcggcctttcccgaggtcacggtcgatccggatgttctcttcgtcgaccacggcgatatcgcgaccagcgccggaacgggagcgggcatcgacctgtgcctgcacctggtgcgttgcgaccagggcgcggcatacgccgcccaggtcgcccgacggatggtcaaaccgcaccaccgggagggcagccagcttcaatacgcagcggcaccagcaccggcccg

SEQ ID NO: 168583 - DNA, 501 bp, Arabidopsis thaliana landsberg
ggtattaataaaataagttcttttatggtgattgagtcttctcgctgaaaatttggtattttattgttgttatgggacaggaagcttctatagatattaagctaccgagaagaagtttgcaagtgaaatttacttgcaattcatgtggagaaagaactaagcggcttatcaataggcatgcctatgaaaagggccttgtctttgttcaagtaagtctttgattctgtttcccttgcgcataccacatgtttgcttgattgtccaagagagatgatttggttgattgattgctcttttttttttcctttggcagtgtgcagggtgtctaaagcatcataaactggttgacaatcttggtctcattgttgagtatgatttccgggaaacctccaaggatttgggtaccgatcacgtttgattagctacgttgaatcaagttttgttcttttttctcagatgtgttcttttatgaaatgagaagaagtaagctatattccgcaa

SEQ ID NO: 168584 - DNA, 342 bp, Arabidopsis thaliana landsberg
atggaagtggctcttctctccttctcttcttccttgtctcctctctgtcaccagcgaatctcaactctcacacccaaaacctcgaattccccaaattaccctcgcctcccggtcatcagatccgcggtgtctcgtaacaagaaggaagagactgtcgaagccgtcaagtctcacttggagaactgccatctcctcgccgccatcaactacaaaggcctcaccgtcaagcagtttcaagacctccggagaactctccccgacactacaaagctcatcgtcgccaagaacactttggtcttcaaagccattgaaggcaccaaatgggaagctctcaagccttgt

SEQ ID NO: 168585 - DNA, 2495 bp, Arabidopsis thaliana landsberg; identical to SEQ ID NO: 8293
  unsure (1)..(2495): unsure at all n locations

SEQ ID NO: 168586 - DNA, 1358 bp, Arabidopsis thaliana landsberg
ttctgttaattctactttctttctttttccaactttaagttaatacaagatcccttaatgttcggatagtatttttgcggagcctgtggcgaatcacacccacataagaacttggcatcggtctcttgtggtcatcgtatatgcactcgctgctggacaagtatgcattaatatctcgtttgaataaaatggtttttctgatcactccttcttatttagataaatgacatgtaatgtataggccatatcaacaaaatcatcagtgaaaagccagctgctgaatggaatctttggctgaaatgtcctgttcgtgttggtctccacgcttcttgtccagcttctgttggtctagaaacgattgagagatttgcttccaagagagagaagttcaattacaatcaatatctccttagatcttacgttggcaacagagaaacagtaatgacaaggaattaaagaaaacaacgttagatagatcatagagatcactttgaaccatttgttgcctaaaaggttttatttagctttttctttttttgacattcattagatgaaatggcatcctatccaggggtctagatgcgccattgatcttagtccaggttctggaaatgccagtgtctcctgtcaccgtttggttagaaaatctgatggaatgtgagttttttttagcttgaatccttttgtttgaaaacatttttctattactataattgaatctaagcttcagtgcaagaaagacggtcccagtcctgtggactgtaaaactgctgcaaatggttagcaatacacgtttttgatatccaaaaacccgggacgtcggggaatttcccatttatgaaatgattcagtctttttggattatgattttaggctactagaaaatgcggtgccttgtcccaagtgtaagctaaggatcccccgaaatcaagataattcactgaagatgaaatgcttaccttgtaactatgttttctgttggtaatatacttgttcttctagctactattagctcttatgatcttgtggttaattagtatgatcttactagtatgctctttcatgaaatgtcctctgcaggttctgccatgtcgactggattgaagacatggaaggaactggtggtgatttacacttttgtaccttcgatgctgtcttggtactttatcagctgatgatatttattgaaaagtttcttttttattgatctttcatgtaccttaattttctgatgtttttgtagagtgatcaacgtgggaaaatgtcagaatctgattcaaatagatacgaagattgttatgaaaattgggacagtaatgaattggtatatatgcatttatttatgaacttcggatccc

SEQ ID NO: 168587 - DNA, 1405 bp, Arabidopsis thaliana landsberg; identical to SEQ ID NO: 9577

SEQ ID NO: 168588 - DNA, 538 bp, Arabidopsis thaliana landsberg; identical to SEQ ID NO: 79370

SEQ ID NO: 168589 - DNA, 1895 bp, Arabidopsis thaliana landsberg
gggattatatatataaaactttacatcttagtcatgttttgcaaaacaaatgtgtgcatagagatattgcagattaaagtgagattgatcccaatattttatatagaaagattagtatttttcttattttcgatttgtaatttgttcatactttgtctagttatgtcactggtgggttaatcttgtccatctatttctttttaggttttcaattaacttcaggcttaatagaatacttaaaattggactaaatatatttatacaatagcatgcaaaccgtgcatgaagttacatgtattccactttttataccatgtccacaactttcccgttggagtttgattgtttgaagtatatacgccagaatctcaaactttaatagttttacacgtctcatcttttttttttttttttttacaattatcgtcggttattatccatgcatgaattggtcctaactcaaataatattttgtgggttagagttgtaaatattctttcaaacgatcataatcaattacatattgattcctaaagtgaacactataatcaatggcttattgtggacatactaaaaaccggttttgatgtgatattgaaggtgacctaggccaaaccgattggaccgtaagaacattagatcagatacggaaacgggacttcgatgtcttcctccttcccggtgacctctcctacgcagacacccaccagccactttgggactcctttggccgcctcttagagactttagctagcacccgcccgtggatggtcacggaggggaaccacgagatcgagtctttccaaaccaatgaccacataagcttcaagtcatacaatgcgcgatggctcatgcctcacgctgagagtctctctcactccaatctttactattcttttgatgtagcaggcgtccacaccgttatgcttggttcttacaccccctatgagtcccactccgatcagtatcattggctccaagctgatttaagaaaggtaactagttgggatatataaattaaaatttgcactatttgtttgcaacatttctaagttagtcattgcaaaatttacatagcagaaaccacacgaagactattctggatttttacacgagacttcatgttttaaaagtaaaaacaattcaactgttcctcttaattagttctcgaaaagtataaattttttctgtgtgaggaggttgaccgtaaaaagacgccatggttggtggtggtgatgcacacgccatggtacagcacaaacaaggcgcattatggtgaaggagagaaaatgagaagtgccctggagagtttgctctatcgtgctcaagtagacgtcgtttttgccggccacgttcatacctacgaacgtttcgtaagtgcctcccatcttcattaacttttctttaatttagtggttagaatgaagtgaatactgtacattacacatcttttactattatatgaaaattatggacaatgcagaagccgatatacaacaagaaagccgatccatgtggaccaatgtacataaccattggtgacggtggcaaccgagaaggccttgctttacggtacgtatgccacctccgattaggccattactagtataattaatatgttcacccaattaaattgttttatttgtttgtaaaattgttttggttctttaaccgaattgtataagcaaaccaatactacaggttcaaaaagcctcagtcacctttgtcggaattccgtgaatcgagttttggacatgggagattaaggattatagaccataaacgagcacattggtcgtggcatagaaacaacgacgagatgtcatctattgccgatgaagtatcgttcgaaagccctagaacatcatcgcattgtcattcaaatcgttatagag

SEQ ID NO: 168590 - DNA, 624 bp, Arabidopsis thaliana landsberg; identical to SEQ ID NO: 45651

SEQ ID NO: 168591 - DNA, 2487 bp, Arabidopsis thaliana landsberg; identical to SEQ ID NO: 15502

SEQ ID NO: 168592 - DNA, 2458 bp, Arabidopsis thaliana landsberg
gcctgtgtctacaatgattgaaggttctatggatacctatcccatgtcttttgaggatgttgttttcaagctgattaattttgatgataagctgcaaaagtatgcagaggttcctaatgtttctcctcacttggcttatgctactgaatcaaactactcaaagtggtcaatctggtggaaatcgaggtcgcaacaactacaccactaaagggagaggtttccctcaacaaatctcaagtggctctccctctgactcaggaacaagacctacctgtcagatctgcaacaagtatggtcattctgcttataagtgttggaagcgttttgatcatgcttttcagagtgaagacttcagtaaagcctttgctgcaatgcgtgtctctgatcagaaatccaatccttgggtgactgactcaggcgctacttcacacatcacgaactctacttctcagcttcagtctgctcaaccttacagtggagaagattcagttattgtaagcaacagtgactttctccccataactcacattggttcagcagatctgacaagcaaccataggtaatctgccactaagagatgttcttgtttgtcctaatatcactaagtctcttttatctgtgtctaagcttacctcagattatccttgtgtgattgagtttgactctgatggtgtgattgttaaggacaagctgacaaaacagctcctcacgaaaggaacccgccataatgatttgtacctgttggagaatccgaagttcatggcttgctactcttccagacaacaagctacaagtgatgaggtgtggcatatgaggctaggtcaccctaatcaagatgttctccaacaacctttaagaaataaagccatagttataagtaaaacaagtcacagtttgtgtgatgcttgccaaatgggaaagatttgcaagcttccttttgcttcttcagattttgtttcaagcagactcctagaacgtgtccactgtgacttatggggtcctgcaccagttgtttcttctcaagattttcgatattatgtaatctttattgacaattactcaagattcacttggttttatccattgcgactcaaatcagatttcttctctgtctttttaaggtttaaaagatggttgagaatcagtgtcaacaaaagattgctagttttcagtgtgatggagggggtgagtttatcagcaatcagtttgtttctcatcttgcagagtgtggaatcagacagttgatctcatgtccctacactcctcaacaaaatggtattgctgaaagaaaacatcgtcacattacagaacttggttcgtcaatgatgtttcaaggcaaagttcctcagtttttgtgggtagaagctttttacacttcaaatttcctgtgcaaccttcttccatcctcagttctcaaagatcagaaaagtccatatgaagttcttatgggaaaggctccagtctacacttctcttcgagtttttggatgtgcctgctatcctaatctcagaccttatgcaagtaacaagtttgatcctaaatcgttactatgtgttttcacaggttataatgagaagtacaagggatacaagtgttttcatccgcctacagggaagatatatatcaacagacatgttctatttgatgaatccaaattccttttttcagatatctatagtgacaaagtttcaggtacaaactcaactttagtctcagcttggcaaagcaactttctcccgaagagtattcctgcaactccagaagtcttggatatctctaatactgcagcttctttcagtgatgaacaaggtgaattctctggtgctgttggaggaggaggttgtgggtgtacggcggacttagattctgttcctataggcaacagtctcccttcttctccagttactcagcagaattcaccacaaccagaaactcctatctcttctgcaggttcaggaaatgatgcagaagactcagagttgagtgaaaattctataaaattcagaaagttcagtgttcagtgaagctacaacagaaacagaagctgctgacaacactaatgatcaaagtcatcctatgataacaaggtctaaatcaggcattttcaagccaaatcccaaatatgctatgtttacagtaaagagtaactaccctgtaccaaagacagtcaaaacagctcttaaagaccctggatggactgatgcaatgggtgaagagtatgactcttttgaagaaacacatacttgggatttggttccacctgactcgttcattactcctttaggctgcaggtgggttttcaaaacgaagctaaaggctgatggaactcttgatagattaaaggctcgtcttgttgctaagggctatgaacaagaagaaggagttgattacatggagacttatagtccaggtggttcgcacagccacagtgagaacaatcttacatgttgcaaccatt

SEQ ID NO: 168593 - DNA, 1173 bp, Arabidopsis thaliana landsberg
agccccagcaggaccattactttgtggaaaaccaacacttgcgtcgactgttcctgcactgtgtaatatacacttccagaaagcccaaaagcatgtggctaaagctttaaaggatgctggtcataatgtctcttcaacaagcaagcctcccccaaagctccatgttatagtagctgcgtttgtgcatcatattcaagcgaaacgaaaaaatccacagaaggagtgtaaacttaaaagtgtagtaaaagaagaaaatacaagctgagttgagctgttagcgttgccagaagttatttttgtgtatgtcccagaagggaaaaggtgaggatctctgccttactatatcattctaagaagtgacataaaacgtattatgttgcgctcttattcgtctacagattttgttacagtgtaggtatcggatgtttatctgccctgagctattaagagaggttttgttacagtgtccggtagggtatagtagtttagatagtggtagtttattaggcttaataagaagataacagatccataagcacaaaaactagtgtgttggaagttggaactcattctaacatttggagatgtccatttcagtttagttgcaattttgttcatttctaaaatttacttgtgaaaagcgtatgcaaaatcgaaatggtctaatggctaatgggagactcaggcaacgatgctttgcaattgacaaattgtattttcgaaattatgggtggccaaaacttggcatacttcgatttttggctatccggtttagaatttttccgaaagttttaatttaggaaactaatttcaagaggaaccggaatagtcacaatcaaaagtagcgaccggatactaaaaaagtaaaaaggaaccaaatttggccggtttagatgtaatcaggttagctgctgctactccctacttctcatcttcaagaactgcagccttccagccttacactcatcctactactcaaagtggtattggcagacttcaatcctctgttgctgcgcccacaccaggagtcagacgggtttatgaaacaggaaaatcatcaagacgtgttgaagatagggattccaacaataacctgcaccttggcgactcatcccaacgcaaaaacatgataatcatacaacgtgaaaaggattcagatcagagcaagcccaa

SEQ ID NO: 168594 - DNA, 732 bp, Arabidopsis thaliana landsberg; identical to SEQ ID NO: 12596
  unsure (1)..(732): unsure at all n locations

SEQ ID NO: 168595 - DNA, 1432 bp, Arabidopsis thaliana landsberg
gcaggtcgactcatcccatcaccaagcgggagacgatcgagggggagctcgatcgattcatcctcaaccaaggagaggagccacaagccatgtacaaccggctcaagaccttggtcaaccaagtgcgcaacctcaggagcaccaaatgggatgaccatgaaatgatcaaggttattcttagatcactcgtatttcgtaatcgtactcaagttcaattaatacgtggtgatcctagatataagctaatgtctcccgaggaagtgacaggaaagtttgtgagctttgagttgatgatcaaaggctccaaacaaatcgtcgagcaaggcggctcctccacaaccgaggtgcaacccgtcgcattcaaagcaacggaagaaaagaaagaagagtctacatcaagtaggctccccatcgacgcctccaagctcgacaacgaggaaatggcgctcatcatcaagagcttccgtcaaatcctcaaacaaaggagggggaaggattataaaccctgctccaagaaagtatgctacaaatgtggtaagcccggtcattttattgcaaaatgtccattatctagtgatagtgacaggggcgacgacaagaaggggagaagaagggagaagaagaggtactacaagaagaagggcgacgatgcccatgtttgccggaagtgggactccgacgagagctccaccgactcctcctccgacgaggacgccgcaaacatcgccgtcaccaaaggtcttctcttccccaacgtcggccacaagtgcctcatggcaaaggacggcaaaaggaagaaggtaaaatcaagatcctccactaaatatgaaacctctagtgatgaggataatgctagcaatgaggaggataacttacgcattctttttgccaacctaaacatgcaacaaaaggaaaaattaaatgaattaattagtgctattcatgagaaggatgaactcttggatagccaagaggacttccttattaaagaaaataagaagcatgttaaagttaaaaatgcttatgctcaggagatagaaaaatgtgaaaaattaactagtgagctaagcacttgccatgacactatttccaaccttaaatttgaaaatgataaattgattgttaaggttgagaaattaaatattaatgatgattcaattgttaatcttagaaatgataatgctaatttaattgctaagattgacaaattgaatgcatctctctctagccttaaaattgagaatgaaaaattaattgctaaggctaaagatttaaatgtctgcaatgtttttatttccaatcttagagatgagaatgctattttacatgctaagattgttgaattaaatacttgcaaaccctctacatctaccgctgagcatgttactatttgcactagatgtagagatattaatgttgatgctattcatga

SEQ ID NO: 168596 - DNA, 1463 bp, Arabidopsis thaliana landsberg
tggtgtcgaccgacactctcctgtgtcgatcggcaccatacgagactctttctctgagacgactcaatacgacggtgttgatcgatacccctctagtgtcgatcgacactggatccggactgccccttgtgaggtgcaagtacctatgtagcccgagtctgtctacactcctcctgtcccctatccgaagaggcgtcgttgtaagcaggagattcatgctgccaagtgcacatctataatggagaagatccttcatactcttcctaaggatgattctcagacatcttctgcctcactcaacaggtatgtcaagcgacttgtagacaatggaattagctcagatgaagctaagtagcttactagagacatcagtgcaatcatgctgcctaaggcaatgacgaagtagtcatagagagtagacatagctgagtacatccgcaccattactcctggtcagaccactgagaaacttccagatccagatagctttattcttgattgctttatctccacaggcagattcagccgctctttgtgtgatctgggatcaagcatcaacctcgtgcccaagtatcttgctgagagactaggcatgactcactacaggctaactagcatcactcttctcttcgcggatcgttccaagcgaatccctgaaggaatccttgaagatgttcatgttaaggttggtaactccataatccctactgatttcgtgtcctggactatgagaaggaacccaaggatcctcttatccttggaagagcattcctagctacagctggtgctaggtttgatgtgaagaaagagagaatctctctcaaggtttgtgatttggagatggagtttggcatggatggttcagagcttactaagcctatcagttgcattgcttcaagcatagatacacctcctcagactgatcagaatcccaccacagagccacacaaaacgctccaacccgcttagctcgccaatgagagttgcagagcaacggtgtcgatcgatactactaccccctgtcgatcgataccctcgggttttacagacagaggattctgcacactctcttcaaccaacaccacttaaggacctatgtgataaattctcttctctctcttctcctgctttacctttgattaattctttagataattcgaagattgcttcacaagataacaagcctagagttcctcgaaagcttgtttctcctgttgttcttgcaggtgacgagatgagtgtcgatcgacacatccctgattgtcgatcgaaacctgcagctgccccagccagatccctttacacaccgccttagaaggcgaggaggcagcatcaatcctccaccactccacccacatcttgaactccaccaagtcaagctattgactcaaaacgagcgcttagtgggaggcaacccactggtttgatttttcttttcactttcttttattttcttttatttt

SEQ ID NO: 168597 - DNA, 568 bp, Arabidopsis thaliana landsberg
cgtgtgatggacaagacaggcatcacgcgggtagcgatcgtgggtgcggccgagtgcgatctcggccaggcggcgccgaacgtaactccatgggacctgcagggccaggcgacgtaccgcgcgctcgaggacgccggcctgaagctctcggacatagacggcgtcttcatgtcgtcggggcaggcgcggttgccgccgcagaacatctgcgaatacctgaagctgaagccgggctatttcgactcgaccggcgtgggcggcgcgtcgaccgtgacgcagctcgtgcatgcgcgtgctgccatccatgcgggcctgtgcacgacggcgctgatcgtctatgccagcacgcagcggtccgccacgcggcaggtcgcagcggccaccgaatactttccctacgagacggactacaggccgttgctgccggtcggaggctatgcacttgccgcgcagcggcatatggccgtttacgggacgaaacccgagcatctggcgcaggtcgcggtctcgacgcgggaatgggccctgcgcaatcccaacgcctgggaaaagacggcgctgaccatcg

SEQ ID NO: 168598 - DNA, 574 bp, Arabidopsis thaliana landsberg; identical to SEQ ID NO: 77830
  unsure (1)..(574): unsure at all n locations

SEQ ID NO: 168599 - DNA, 3030 bp, Arabidopsis thaliana landsberg
atggctcgaacaaagaacgcatgtgtgccgttggcggtggcgtccgcggcggaggtggtgggtttcacagacaatcaatgaccaagtagttgtagcgtcggctgttgaagtggattctgaagcaccaaattcaatcttttaacgaaaatagagcggtatgaactttaatctttacacaactagcagattatggtagaactttgtcgattttgtaacttacaaaattctgaaactaaaaaagtataactatgtatgaatttggtatatctttgttgatattataacttagaaattttaaaaagtatatatatgtataaattagtatatctatgcataaattgagtatatctattttgaatctaacttagaaatttttgaaactaaaaactaggtatatctatgttcgaatataacttagatattttagagactaaacaatatatctatgtataaattaggtatatctatactgatttctacctttaaattatatgaaactaaaaagtatatctatatttaaactaggtatatctatgttcgaatataacttagatattttagagactaaaaggtatatctatttttaaattaggtatatctatgctgatttctaccattaaattatacgaaactaaaatgtatatctatattaggtatatctatgctgatttctaccattaaataatacgaaactaaaatgtatatctatattgaaactaggtatatctaaacttgaatttaacttataaattttcaaaactaaaatgtatatctatgtataaactaggtatatctatattcgaatctaacttataaattttcaaaactaaaaggtatatctatgtataatctaggtatatctatgttgattgcaggattctgatgaggaaactgaagctcttcaacctcttaaaatgtacttcggtccgagtgagtatacaaagccattcaagattacagcaaagtgttatcttcataaggcagtcggattattgcagactcatcttaaagagtctgagttgaagtggtttttggagcacccacaattcaaccacttcttccacatgcataaggatccaaatcataaggtgatgggtatgtggctgttatttcttcgtacagcatgtttagataagaagaaggaagtatggtttattgtcaatggcgtaccgatccggtattctctcgaagaatttgcacttatgtcaggattatactgccataattatcccaaacccttggacagcttgggctgtaccacttttgctggcaagatgtttggactcggagcaacagttcagtatcttgatgtggagaataagttattgtctatgaaaaaaccttctgatgctcgtctgagggtagctgtactatattttttatgtagtgtaatcgttggaaagggtaagacaggaccaaacgcaccaaatgtggagaagttcttccttagggctgtggctgatctagagttgtgcaaaacatttccgtggggaagatttgcatttgaaaaaaatgtgaaagacattttctatctgatgaaaaagtgcaatggagtagttggtccacaaaaggtgtttcctagttttgttatgcctttggaggtatgtcattacattatgcatttatgaattgatttaagaaagttaaactgcgtacaactgtgttcttattagcagttatacttattagtttttgaaaaatctagaattgtttttatgtagtatctagcatttaaggcgatcccagttctcagggaaaatttctgcgaagatattgaaaccgcagatcctcagtgtccccggatgtgtaaaatgaagtttaaatcaagcactatgaaagggtttccaatgtcagatgtgtatgacaaactcggtacaactaaggttagtgatgacatatttattagttatctatcatgtatcatgtatgttctatcatgtatgttatattaattactttcttatcatgcacaggacattcagagtatcttggctccaactcctgatgagaagctactttttgaaagaattatggataagaagctacttggtacttggtttttttttgtatttctccttaagcttttgaaaacttggtacaactgttgaacatgtttattaggttttttgttttattttggtatatctacttatgttttgtaacactaggtacaattatatgtttttgtaattgataagaaaagaattttaatcgaaataactagattcaacacaacacttagtctttataattagattcatatccattcatcacatcaaattcaacacttagtcttcataattaaacattacaacacttagtcttcataattaaacattacaacacttacgcttgaatttctacgacaaacacaacatgccaacaattgccatggtgattaaacatccagaactaaaaatgactaccatcttaaagtccttcccctttttgttcttttccatcggatctctttccatcctctcttggttcctttccatcttcatcactcttacttcttcttcaagaacaccaagttgaaattccaattgttcaatctcatgtgtaaaagcctcatctacccacttaaacacatgattgtcgttcataagctacattttgaaattgtaaaaattgttaaatcacatgtatatctatgtataaactaggtatatctattaggtatatctattaggtatttctattaggtaaatctaggtattttagtgactagtcaaattaggtttatctatacctttttttctgcagctaaaccacaccggtaataacgacggtacggatttggatttgatcttgaaatcctctcaacgatttcatcgccacaccaacactgctttggaattccaggaaccattggtcttggtcgggaaacggaggttccacacgagttcgatgctcctgagaggtggctcataattccctgagttttggatttagaaattctagaatatttaatagataaaccaggttgtacaatatgaatcttcaaactccgaaatcgaaaattgtcaa

SEQ ID NO: 168600 - DNA, 918 bp, Arabidopsis thaliana landsberg
tacatgttttctgttttgttctttctctgaagtttcttgtttttttttgtgatgagcaggtttcttctgtgtaagttatacgtaacaagctcacttctcaatcagaagggtatgggtttgttgagtttctttcacgtgctgcagctgaagaagttcttcagaactatagtggttcagtgatgccaaactcggaccaacccttccgtataaactgggcatcttttagtactggtgaaaaaagagcagtggaaaatggtccagacctatctgtttttgtgggagacttgtctccagatgtcactgacgttttattgcatgagaccttttctgatagatatccttctgtcaaaagcgccaaagttgtgattgattccaacaccggccggtccaaaggttatggttttgtgaggttcggtgatgaaaatgagaggtcaagggctttgacagaaatgaatggagcttactgttcgaacaggcaaatgcgtgtaggtattgcaactcccaaaagagcgattgctaatcagcaacaacattcttcacaaggtaagtgatgagataatctttgtgacttaatgtagcattagtttcagtttattatcatttattatgtttttatttccatgttttctctctgttcagtgaatgcaagtggttttattttctgtttatgtcacttttagtaactatgaatatgaattttaaggtttaataacttgtcttgatgcgttaaacatagcatctgaagtgaattgtaatgttttcattggattagctcttacacttgctggtggacatggagggaatggttcaatgtctgatggagaatcaaataactcaacagtgagttctcttttagctattcctctgctaataacagtatacctcactgctcattgtcttttattacattgcagatat

SEQ ID NO: 168601 - DNA, 858 bp, Arabidopsis thaliana landsberg
gatggatcgttctgttatataccgaaaaacactagatgtccgatgcctctttcgagttattttcggatgaattctattgaaaacactggtcagtttgaaagaactttgattgttgctgaggaaggtagttttgttgagtattcagaaggatgcactgctatttctcatgacaagaatcagcttcacgctgctgttgttgagctctattgcgctgaaggagcggagattaagtactcgacggtgcagaattgatatgcaggggatgaacaaggtaaaggtgggatttacaatttcgtcacaaagcgtggtctctgcgctggtgatcgttccaagatctcatggactcaagttgagaaagggttcgcgataacttggaagtatccaagcgtggttttagaaggagatgattccgttggagagttttaatccgtatcattgactaataactaccagcaagctgatacatggaccaatccagagctgagaacgctagaaatacttcgacttgtgactcgatgcttattggtgacaatgcagccgctaatacatatccttacatacaggtactttgtatatgatcatctaaccttttattataaggttatgataaaagcacctctaatgaagatcttataacaggtaaagaatccatcggcgagaatagagcatgaagcaagtacttcaaagattggagaagatcagattttctattttcaacagagaggtatcgatcatgagagagcattagcggcaatgatctctggattttgcagagatgttttcaacaagttgcctaatgaatttggagccgaagttaaccagcttttgagcattaagcttgaaggatcagtgggttaa

SEQ ID NO: 168602 - DNA, 1981 bp, Arabidopsis thaliana landsberg
atggagatagttggtcaccgaggaagttggggtgatttccctggtaaaggcgtcggaagttgtggtttcggtggcggtggaggaggtcctgcttttggcggccgtgggggaggtcctggtcctggttatggcggccgcccaagagttcatggtcctggttatgtgcatcggcagcagaggtcctgatcctggtcctggttttttttacggcggaggaggtcctggtccaggttatggcggcggaggaggtcatggtcctggttatgggggcggaggcgacggtcgtggttatggctcagagacaggtggcggaaatcatgggccagaaggtggtaaatagaatgaggttcttggttaaaaaccaaaaccattttcttgattttaattttttttttttttactttttactttagtgacaagaacgttaagagatgagccaccatcagataggatactgacaataacaaatttctccgagattaaagggagagaagaaccctacgaatccgctgtttttgaggctcttttaagttacaaatggtaaagaactaaatattttacatttgatatatatatttgagtttattttgatgttaaaataaaaataaatcaggagattgattttgtacgtgaatggtaatcaaaacgatggtggaagtaatcatatctcactttacttgaggtccgaagagacagatcatcttacatacgatggtagtatcaattttgtactcaaactctttgtctacaatgggaaacaagacaagtatctgactgttacaggtagtttagatgtttgtggaattttactagatccattttatattacagatttattgctacttttacttggtaattatgtatgaccacatctacggttattacggttacggtttattaaccaccggttacggttataatctttttttaatcttaactttggttgaaacggttacagttaaatacggttacggttaaatacggttatggttaaattcggttacagttatttgataattatgatatagttaatatatgagacaaaatattatattttttttaacttttataaagaataattatatatactattttttacaacaaataaataaactacgaaatgattaaggtactatttgagtgaaataattatgtaattagaaaaatgaagtaaccaaaaaattcatatttattaattataacaatgtttattaagctaactaaaacaagtaataaaaaaaaactttaatcactatcttctgatattgttgataatacatcactatcaatatcttctaattcttcttcattctctcgaatgaattcttgttgtctatatccggctctggtccaatcgtcaagacatgcttgagcttcaagagaatctggactcattcttgatcgagtttcatctagtatttaacctcccatgctaaaagctcgctcgacggaaaatgtagaaacgggtgaagaaagaacgtcttttgcgatcatggctaaaattggatattgagattggtgactcttccaccaatgaatgatttgaaagttattacatgatgcatctgcatcactaaactcaaaattagtagataaatatttttcaagttcagcattattaccttgtgatggttgttgccttttacgtcgccgcattctttctacaagacttaatgtagaagttgataacatatcattttgaatgattcagttgcttgtggtacactacaaaaaaaaatccacattcttatcacgagagaaacgctatgttacgtcattaatagcgatttcataaacggtattctatgcccctgttatcgtaagtaccccatataaaatagcgtcagatatgtatgctatgttaaacaattctattatagcattacggaaatgttgtgtcttgatgcgtattaatttgttattatattatgtaataattcattccccatgctacgttaggggactctacgatagctttaga

SEQ ID NO: 168603 - DNA, 449 bp, Arabidopsis thaliana landsberg; identical to SEQ ID NO: 68752

SEQ ID NO: 168604 - DNA, 995 bp, Arabidopsis thaliana landsberg
gctacatcctaccatggaagatgcagcggagcaagaacgtggtttccacgtgatcaccataaggaagcagatagtcacggctgctcttcccctccaagaccattggcttcctctttcaaacctcgacctcctcctccctcctgtccacgtcagcgtttgcttctgctacaagaaaccacgtcatttcttatccgtggctgaaaccctaaaagcgtctttggctgaggctctcgtctcctactatgcctttgccggtgaactcgtgaaaaactcctctggagaacccgagattctctgcaacaaccgcggcgtagacttccttgaggcggttgctgacgtggagctccgggagcttaacttgcatgatcctgatgaaagtatcgccaagcttgttccgaagaagaagcatggagttatagctattcaggtaatataacaccgaaatcatactttcatcgattcagtttcagaaacatattcttataacgacttaactaacttgtatgtgtaattaggtaactcaacttaaatgtgggagcatagtggtaggatgcacatttgatcatcgaattgcagatgctttctccatgaacatgttccttgtttcttgggctgagatctctagattcaatgcaccaatctcttctgtcccatcgttccggagatctatactaaacccgcgacgaccactgattatcgactcatctatagacaagatgtatatgcctgtcacgtctttgccccttccacaagaaacaacaaatgacctagataatatcctcacaagccgtatttattacatcaaagaaaatgcgttggaagatctccaaactctagcaagcggtagctcccccaagactggttatggtcagaggacgaaactagagtcgttcagcgcgtttctatggaaacttgtggcgaaacacacaggaagaaatctagattcgaacaagaactcgaaaatgggtattgttgtcgacggaaggagaagagtt

SEQ ID NO: 168605 - DNA, 986 bp, Arabidopsis thaliana landsberg
atgtatattttatctaaatttcgatattatataagcggagctaatccgaaccgaatgactaccaatcgacacaagggagctaccatggtgcaagctaatacgtatgatgctaggaatgagcttaaaggtgtaaaggaggaccttaatacaatgagactggataaggagcagtcaatgatagaataaatcaagagtaagggtctaaggttccatagttctatctcagggcacaagttcgtcgtagttatcgggagcaaccaacaatttaatctccaatgagatagcattaggccttcaacttcccatgagagctacaaaccacgtttcgattttattgggacagaggcggtgcatagaaagcataggggtcagtctatgggttcaagaagtagaaatcactgaggatttccttttattggatttgaccgagactgaggctgatgtgattctaggctatagttggctctccaaacttggagaaacatggcaggatcatactttcgctttctcccacaaccaagattggatcagttttagcaataaggaggaagagctgaagcaaaatactaacaaaatgaagatgtggagtgagtatgtgaaaaaaggaattgaagatgagcagataagcgattgtggaatggttgttgatgactaccttgaggacaagtttggtttttcaggggaaggtaatggtagggtatgcaaggttggtttgtattggtagaacagatgaggctaaaggtattatagaggttaatattcacctagagaaactacgagcgagcaccaatgaaggaatcacttcaagctcattgatgaggttcaagatcatacgtccataataaagagcctttgacgtgatcgatatatgaaggaaacgttgttcactcttggttgtacttgtaagccaccttcttacgagcatctctgaaattttgcattccttgagaatgattcattatgataccaactgggccttggcgggc

SEQ ID NO: 168606 - DNA, 1293 bp, Arabidopsis thaliana landsberg
ccgagaaaattcagccaccaccaccgatcagtaagttcttcgtattcctccgtctctatcatcgaatcattatttattcaataaattaattccatttcttcaaacccatgttttttggttggtaaagttttcatttttatcgtctctctgtttttcaatctctctttcagtttcagattttggcatgggttgtactgtgagggagaagcacgtgaaaccgacccgtaggatcaaagccgctgcatttagatccgacccaccgttatgttgggtcgagaagattgctatgtcacaatcaattgttgagaaccttgtttatcatcctggtcttactgattccggttctgtcaatttgaattccgttactgagaatcctgaggagaatttttgggcatattgtacagaggagcatttggaagagattttgctgaaacatttggagtttttgtataatcaagctgtttctaagcttcttgaattgggctatgaggaacgtgttgcgttgaaagcggttttgagtaatggacactgttatggtgaattggatgtgttgactaatatagtgaataattcattatcttatttgaatagtggtggaggtggaggtgggagtaatgggaacggtgaggatcgaacggagactggttttacggatttgagagatttggaggagtattcgcttgcgggtatgatttacttgttgcaacaagttaagcctaatttgagtaaaggtgatgcaatgtggtgtttgttaatgagtgagctccatgttggtagggcaagtactctggatgtcccaacgaataggtctagttgttgtactaaggaagatagcaatgtagaagatgttggtacgggtggtactctagatattgctggttttatggcaccagcgttgtgtcgattccatggaggttggggttttgggaatgggggaggacctgagttttctggtaatgggttttctatgaaaggtgctgagttgaagttgcagagagagattgattgtcctaaaaggtttaatctttcgccatccatgaagtccttgttgaagcggaatgttgcagcgtttgctgctgggtatcgtgctagtatgaagcagaagcaaatacagtcgtctgatactattggtgatagcaaagcttgtaatgatcctgcaattgtgaagagttgtgggcagcaaccacgtaagtcagggagtgaagaaagtgttagtacggtgttggagaaatttcgtgatctgaaccttgatgataatctggaatcggtgggtgtggatgataaggattgtgt

SEQ ID NO: 168607 - DNA, 2803 bp, Arabidopsis thaliana landsberg
agacatcgatcgcctcgtagaatcaacttctggaaacaagttgctgtcattcatgaacgctttcgctggttacaacccgatcatgatgaaccccgaggttcaagaaaaaactgcattctacacagaacaaggcatcttttgttaccgagtaatgccattcggactcaaaaacgctggggcaacttatcaacgtttcgtcaacaaaatcttcgcattatagatcgggaagacaatggaagtttacatcgacgacatgttggtgaaattcttggcggaggaagaacacgtatcccatttgcgcgaacgtttccagcagcttaacctctacaacgtctaactcaatctagccaagtgccgcttcggggtaagatccggagagtccctcgggtatctagttacgcaccgcggcatcgaggcaaatccgaagcaaatcgaggcgttattagggatgtcatcgccacaaaataagcgagaagtgcagcgcctaaccgaaagagtcgcatcccttaaccggttcatctcacaatccaccaagaagtgcttggccttttacgatgtgcttcgggggaacaagaaattcgaatggattacccgatgcgaagaggctttccaggaactcaagaaatacctggcgaccccaccaatcctcgcaaaacctgtaatcggggaacaactctacttatatgttgctgtatcggacaatgcagtcagcagagtgttagttcgagaagacagaggcgaacagaaaccgattttttacgtctcgcagtaattcaccggtgcagaatctgctacccgcaaatggaaaaactcgctttagcagtcgtaatgtcggctcggaaactgcgaccctattttcaatcccattccatcgtataatgggatccatgccgctccgcactgtcctacacagtccaagccaatcgggacgcctggctaaatcggcaatcgagctcagcgagtatgacatcgattatcggaacaaaacatgtgcaaaatcccaggtcctagcagattttatcgtcgaattacccacaaaggaggcccgggagaatccgctcgatacaacttggctattgcacgtaaacggctcttcatcaaagcaaggtttgggcgtgggcatccgtcttacctcgccaacgggagaggttctcgagcaatcattcagattaaacttcaaggctaccaacaacgtggctgaatacgaagcgctcgtagccgggggctaaagatagagaaaatccgagcttttgtgactctcagctcgtcgcaaatcaattcaacggagaatacacagcacaggacgaaaagatggaagcctacctaattcatgtacaaaatctggcgaaggatttcgacgaattcgagttaacaaggatccctcagggagaaaatacatcggctgacgccctatcagctctagcctcgacatccgacccgagcctgagaagaatcatcccaatagaattcattgagaagccaagtattgaaatcggcaaagaagaacacgtcctcccaatacaaatcggtgcggatcaagacgacccagatgactacaacccaaaatggatagaacccatcaaaagctatatatccgaagggaaattgccctcagacaaatggaaagctcggaaactcaaagctcaagctgcacggttcgttctaggaaataaaaaactttacaagtggcgattatccggaccattgatgacatgcgtggaaggagaagaggttagcaagatcataaaggaaattcacggtggctcgtgcaaaaatcattccggggaaagagctttagccattaaaataaaacgccacggattcttctggccgacaatgatcaaagactgcgaaaattattcaaaacgatgcaaaatgtcaaaggcacgcgccaacaatccatcagccagccgagctcttatcatcaatcgcctcgccgtatccattcatgcgatggtcaatggacataattggacctatgcatccctcgaagcagaaaaagttagttctcgtcttgaccgactatttctctaagtggatagaggccgaatcttacgccagtataaagtacgctcaagtcgagaacttcgtgtggaaacatatcctatgtcgccacgggataccttatgagatcgttacggataatgggtggcagtttatatcaacccgcttccaaggcttctgtgataaatggggaattcgacttagcaagttaacaccacgatatccccaaggaaacggccaagccgaggctgctaactaaacaatcctcgacgaattgagaaaactgctcgatgctaaaaagggctcttggtccgacgaactcgaaggtgttctatggtcgcatcgaacaactcctcgctgagccacaggagaatcccctttcgccttagtatacggaacgaaatacataattccggccgaaatgatagtaccgagcctacgtaggagtctatctcccgaaaacaactctgataatactcagaggctcctcgacgaactcgatttgatcgatgaacgaagagattcagccttggttcgcatacaaaattatcagaatgaaacggctcgtcattataactcaaacgttcgacagcgaagattccatgaaggagatcgggtcctccgaaaagtttttcagaacaccgccgaaccaaacgctggaaagctcgagacgaactgggaaggaccatacttgatctctaaagttatccgacccggagtatatgagctcgcagacttaaacggcaaagccgttccaagatcatggaacacaatgcacataaggaaatactacaactaa

SEQ ID NO: 168608 - DNA, 1211 bp, Arabidopsis thaliana landsberg
caagtatctattcatagctttgggagctactattaaggcttcaaagtgattagaaaagtgataattgtggatgcaacacatattaagaacggatatggtggtgttctagtctttgcctcagtccaaatccaaatcgtcatcattctatcataggatttggcgtactcgacagtgagaacgatgctagttggggatggttcttcgagaagctgctaagtgttgtacccgatactccagaattggtgtttattagtgacagaaattgaagcctcatcaagggcatacgtaatgtatcttgtgcagctcatcacgggtattgtacttggcatttatcccaaaatgtgaaagctcatgccattgacatcaacagagacgtactcgcataaaaaattcttggagttaagtcggaaatacaccatggctgaatttgagagggagtatgattcttttaaggtgagatttcctaaagcagcctattatttggaagatacaaccatgaaagaaaaatgggctaggtgttgttttcccggagaaagatacaacttagatacaagcaattgtgtggaatctttgaacaatgtgtttaaaaacgcaaggaaatactcgttaataccaatgcttgatgcgatcatcaaaaaaatctccgtttggtttaatgaaaatcggatggaagccgcgtctggatccttagaaaataagatagtgcctttggtcgagaattatttgcatgatttgtggagttttgccgagaagctgaaagtggtggagctaaactcattcgagcgtgaatatgtagtcacatgcgacaaaggaatagattatacggtgagcttgcttttgaaaacttgcagttgcaaggttttcgatatccaaaaatatccttatattcatgcattagccgctttcattaacattatggatgatgaagatcggagaagaggtttggagttacatgatttggttacaaaatattattgggcggagttgtgggcattggcctattataggactatttatcttgttccggataggtcgcagtgggaagtaccagatgaagtaaaggcgttgaagatagttccgctgtctaaaaaaccgaagaaaggaaggaaaaaaatgctaaggtttccatcaaccggggaaaagcggccaaaacgacaaaggacgcaaaacaaaaggcgtccaaggcaatcgtgtcaatggttattatttgg

SEQ ID NO: 168609 - DNA, 709 bp, Arabidopsis thaliana landsberg
atgggatcaaagtttcatgcttttatgttcccatggttcggttttggtcacatgactgcatttttgcatctggctaacaaactagccgagaaaggccacaaaataactttcttgctccccaagaaagcattgaagcaacttgaacctctcaatctcttcccagactgcattgtctttcacactcttaccatcccatctgtagatggcctccctgatggtgctgagacaacctcggatatccctatctcgttaggcagttttctcgcctcggctatggatcggacatgtaatcaggtcaaagaagcagtttctgttggtaaaccggatctgattttcttcgattttgctcactggattccggaaatagctagagagtatggagtcaagagtgtcaatttcataacgatttctgcagcatgtgtagctatttcgttcgtccctggtcgtagtcaagatgacttgggtagtactccaccgggatacccttcctccaaggtgttgcttcggggacacgaaaccaacagtttgtcgttcctctcctatccgtttggagatggaactagtttttacgaacggatcatgataggacttaagaactgcgatgtcatttcgataaggacatgccaagaaatggaaggaaagttctgcgatttcatcgaaaaccaatttcaaaagaaagttctcttgacaggtccaatgcttcctgagc

SEQ ID NO: 168610 - DNA, 1362 bp, Arabidopsis thaliana landsberg; identical to SEQ ID NO: 54931
  unsure (1)..(1362): unsure at all n locations

SEQ ID NO: 168611 - DNA, 1352 bp, Arabidopsis thaliana landsberg
atgaattctgaaattgaaagacctgaatcctcctctttcgatgatgtcggctctagtaacgacctttgcatccggccaaatgacatcgccagtccccactatcaaaccacatgcactctccaatctcttaatcgattgggagatctctgtcggattccggctgaagttatgaaggactcgcaaatgccggagcccactgagtcgccggagaaccaccgtcccgggttcttttgcgtatacgagatctatttcaagggttgcggcttgacttctccccttcccgaagatttcgttcgatacttgtcagcccttgaaatcgccttgccccaattaacccccaacctcctccggactattatggggattatcactgtcgcggaggaagccagatatgtcatcggggttcccgaactgattgaacttctcagtgtgaggagttcttcaaagaaggtaggatacttctcggcctatccgaacgccaacaggaacctcatctcgcatcttcctaacaaggacgagaactggcatcacccatggttgttaattaaaaagacccctgcttcagttggaaatctttccgacttgctcccctcaaagtggactactaagcccggtagacgttaggtcatgcatatgatttttatatatatcttgccctatctgaccaacttttaatttccacatcgtagctttcatcgcttcaactcttccaactgccgagttcgctgaattcttcaagatcgttattgagggggaaactctttggaattccttcacctttgacagcttcataaaggccaaccacaagctcaggacgagtctccctgaacaacttcttcaacttccgttgcctcctcctttacctcacagagcttctgctcgagccatcgccacctgatgcaagacgctgtccaaatcaatcgtggaggcttgtgaagcgaacaagtcgttccttacgtcggctgtcgacaagaaggagtacagtagaacccagttagtcaatgatggcagtgccgaaggggctagatctgctggtgccttcagacccacacctcatcgtgaaggtcatggtggtcgatcacctcgccgagaccgatcacctcgtcgtgattcacctcggccttcttctcgaaataggttgagcagtgaatcaatcatgaatttgcttcgaaagaaaagggaaaatccaactcgcagcagtttctctcctaagagagataagacgagagcccgaactgatcgttctcctcgatcatctcccccacctcgatcaatgagtccccttcctccagtcatctcatctccttcttctagatctggtggcaaaaaaatcgatcagagtgcaaatccac

SEQ ID NO: 168612 - DNA, 778 bp, Arabidopsis thaliana landsberg
atggggaagataatggaatgggcagcaagatctgatcatttgggaggaattccaaggaatactgcgataatggctgttagtgcatttgcaaaagcagtatacaaatctttgcaataaaagctcagttcacaatgcagatactcttatgaatcttgtccagtcaagaccacctggtgttcctctcatcactgttagtaatcacatgtcgacgttagttaatattaaaaccttaatagtatgatcctttcttcatgtcatctctttccactcatttgtgtttttgatgttgatttatcttctttgctgtgtaatcagtttggatgatccagtaatgtggggggcatttaagggtctcctttccttagatccagaattggctcggtgggttcttgctgcagaggatatatgtttcaggaaccctatattctcctacattttccgcactggtatgtcactttttttctttgttgcttcttctcttgggaaagactgtaatcagtgatttgttcttgttttgtatggatttggacttgtatcacaactttttttagtagatttggtggattgccttcttaacaaaataggattttctcatgatgcatgttagtgatttcttttgagcaggaaaatgtatacctataactagaggtggtggaatctaccaagaaaacatgaatgaagctctcccgccattaaaagatggatcttgggtatgttatcataacactttaaactaattgtacttagatcttttcagacctctgacctgtgatttacc

SEQ ID NO: 168613 - DNA, 448 bp, Arabidopsis thaliana landsberg
aatttgctatactcttacctatacaatttggattgagaagcctagaaaagtcgcggttatttattgattacggtgatacaggaatcatttttacatgtccgcactgcgaattctgcagaaagattcaatctttgtgtgctaaagaaagtaattaaaacctctacttgtgtttttatttgcagggactgtatcctggatacattatattctttgtgcaatcagcattgatgatcgatggttcgaaaggtacgatactagccttcatctttcatttaatgatctgttttgattcagtttcagtaaataagtaatctaaaaacttctccctttgtattaaacagctatttaccggtggcaacaagcgatcagtccgaaaatggcaatgctgagaaatataatggtcttcatcaacttcctttacaccgttttggttctcaactactcagcc

SEQ ID NO: 168614 - DNA, 1107 bp, Arabidopsis thaliana landsberg; identical to SEQ ID NO: 16297

SEQ ID NO: 168615 - DNA, 1425 bp, Arabidopsis thaliana landsberg
agctcttcctcatggaaactcctctgtttatcgcctccattgtcatagggttgctcacaggacttgacaactacttatattcttacggattagcatatctgccagtttcaacttcatcgctcataatcggaactcaactagctttcaacgctctcttcgctttcttgttagtcaagcaaaagttcactccgttctccataaacgccgtcgttttgttgacggttggtatcgggatccttgcgttacacagtgatggagacaaaccggctaaggagagcaagaaagagtatgtggttgggttcttgatgactgtggttgcagctcttctctatgcttttatattaccgctcgttgagctaacttacaagaaagctcgtcaagaaatcactttcccacttgtgcttgagattcagatggtcatgtgccttgctgctacttttttctgtgtcattggcatgttcatcgttggagattttaaggtaaaaaatttacagtttttttcacgttgtgtttttagtataagagagagtatcatgggatgatcttgataaaaaaaatattatgcagattttgatgaagactttagctgagtttttggattctctattttaatgtttttctaaattatatagtttttttgttcattttatgatagaggccaaaatttagtctggattcccaagaaatgaggaatactaagatttgttcttttgtattattaatggagaaaacccatggaaacaattatatatatagaaattatttcagaatcattggtactagactatactagtcaaccaagatatattggtatctgtatttaaacattttctaaatacatatggatattatagaatatttaacaattttaatatagatttcctggttataataaaatatgtgattttatgtaatatttgtcttcctgatcttttattaaaaacaaatattatataaaatacaagataaaggtttgagcaatttataaaatatttaacaatttcaataaggttttatgtaatactaggtaatcacccgcgctacgctgcggtatttttagattttttgtatcgtataatttaaatataatttttaattatctaatcatttacttatgtaataagtaattattcttagtattaaaatatattttttctaacaacattctcaacaatgcattatacacacaattcctaaacaatgttcgtcttaaactaattaaatagagggtaatactggaattctcgaaacctaagaatttgatgattaaatttcttacatactcttcaccctcggcgattattatatagatatataacatatgcaactattcaactataactaatcatgactctatcactcataattgagttagatacagaaaaatctctggttgaaaatcaataatatttatgaacatgatac

SEQ ID NO: 168616 - DNA, 1154 bp, Arabidopsis thaliana landsberg; identical to SEQ ID NO: 18286

SEQ ID NO: 168617 - DNA, 500 bp, Arabidopsis thaliana landsberg; identical to SEQ ID NO: 51969

SEQ ID NO: 168618 - DNA, 657 bp, Arabidopsis thaliana landsberg
tccagattctgaaattgagttttactgtgttgtttccgcagaattggcttcagctggattttttttttttttttttttcctgagaagcttccgatgatttaggggttagtgcgatttaggtctcttcctgtaatttttcgcgattctctgtataatatgtgtggttggtgtgaggagaatcttggaattgggaatggaatctccgatcaaatgttgcgactgtggatgcgattgttgttcttcctcccctggttcatggattcgatctgtgaagaagagaagacacgacgaattacagaccgagaaacgattctcgataccggagctggacgacctagacatgttctctaatcctagagtccaaattgagaacgaatgtgaattactacgcgagactgttagcaatcaacagcaaacgattcaggatttgtatcatgagcttgagcaagagcgtattgcttcatcaactgctgcagatgaaacagtaaagatgattcagacgttggagcgtgaaaaagcaaaaatcgacttggaactgaaacagcttcagcgtagtgttgacgaaacattgaattatgaaaaccaagagattgaagcattggaaaatatggtttatcaaagggatcagacgattcaggctcgtacgtttaaacaagg

SEQ ID NO: 168619 - DNA, 578 bp, Arabidopsis thaliana landsberg
aggccttcaccggcccttggctctcggtgctcacgtcggtttttctgggtgtcgcggttatgtcatcggtgcatcatgcggaggtgatcgcccacaaaatcggggaggggctcggcactctggtgctggcactttgcgtgaccatcatcgaagtgggcctgattatttccttgatgggtcaggccggtgccgaggccgctaccctggcccgcgatacggttttcgccgcggtgatgatcatcacgaacggtatggtggcggtttgcctgattctgggcggtctcaggtacaaagagcaggagttccaagtgcagggttcgaaaagcctgctggtggtgctattgacgctctcgatgctcgttttcgtgctgccgaactacaccaccaccacgccgggcccgatgtacaattccgtgcagctggtttttacggcggtggtttgcgtgctgttgtatctgctgttcattttttttcagacgacttcgcacaaaacttatttcgaaccgtccgtcgcggaagggaaacgctgaacaggaaacacatgatgtgtcgcgtacggaagcctggctgagctttcg

SEQ ID NO: 168620 - DNA, 715 bp, Arabidopsis thaliana landsberg; identical to SEQ ID NO: 16947

SEQ ID NO: 168621 - DNA, 2170 bp, Arabidopsis thaliana landsberg
atgagtagtaacgctcgggttgaggttgacagatttgatggaatcggtgacttctctttgtggaaggtcagaatgttggctcattatggtgttctagggctaaaaggtatcttgaacgatgagcagctgctaagagatccacctgttatagaagaggaagctgcagtagctggaagagactatcacgtcggagattttgagctgcctcccaatgttgatcctgtaaagtttgaaaagtcagagaaggcaaaagatcttatagtactaaacgtgggaaatcaagtactaagaaagatcaaaaactgtgagacagctgcagccatgtggtccacattaaacaggttatacatggagacttctctacctaatcgaatctccttacagcttaagttctatacttataagatgactgattctagaagtatagatgggaatgtggatgatttccttaagctagttactgatctaaacaacataggagtagatgtgacagaggaggttcaagctatactattgttgagttcattatatgaccggtatgatcagctcaaagagacgttaaagtatggcagagacacttttagcttgaatgaagtcattggagctgcaaaatcaaaggaaagagaactcacagaaagtggaaagctctcaaagtgaaggtctgtatgtggaaacaagaggcagatcagagaagaagtttgaaaaaggaaaaggcaaaccatggagaggacgttctaagagcaaaggcagatcaaaatcaagaccaaactacaataaaaacaacaatggttgtttcatttgccgtagagaaggacattggaagagggagtgtcctgaaaagtcttcaaacaagccttcaagttcagcaaacattgcagtggagccaaaacagccactagtattaacaactagccctcaatacacaaaggaagaatcagttgtggattctggatgtagttttcacattacaccagacaaggattctccgtttggcctacaagaatttgatggaggcaaagtcatgggtaatatgactcaccgtgaagtgaaagggattggtaagattaagatcttaaatccagatgattatgtggtcatcttaacaaatgtgaggtacatacctacaatgggaaggaacctcatttcatatggtcaattggagaagagcagctgcaaatatgaaggaaaagactttgtagtcactttctacaaagatggacagaagatcatttctggaaaatatcaagatgggcggtactatctagaaggaaatgtagtaaatggagaatttgcagtggcaagaccagacgttgacatgactagattatggcattctaggctgggtcatatgagcttgaagaacatgaatgtgctggttaaagaaggctacttattaggaaaagaagtaaccaagctggaactttgtgagagttgtgtacttcgaaaatctgacaaacaaagtttcccaactgctaagcacactactaaaggtatattagattatatacattctgatatctcgggatctccttctactccagaaagtcttggtgggtgtaggtactttgtgagcttcattgatgatttctcaaagaaagtatgggtgtattttctgaagaccaaggatgaggcatatcacaagttcagagaatggaaacaagcagttgagaatcaaacgggcaagaagattaagtatttaaggactgataatggtcttgaattctgtaatacacagtttgacaacttgtgtaaagaagctggaattaaaaggcacagaacgtgcacctatacaccgcagcaaaacggtgtatcggagaggatgaacaagaccattatggatatagttagaagtatgcttgctgagacaggaatgagtcaagagttttgggctgaggctacttctacggcagtctacttaatcaacagaacaccgaactcgtttattggtttcaagctacctgaggaagtgtggacaggtacaaaaccagatttaagtcatctcaggaggtttggatgttcagcctatgtccatgtcactcaagacaagacaagtccaagagcactcaaaggagttttcatgggatatccctgtggtattaaaggatatagagtctgtttaccgaaataagggaaatgcactacaagtagaaatgtggtgttcaatgaaact

SEQ ID NO: 168622 - DNA, 175 bp, Arabidopsis thaliana landsberg
ggatagttcagattactcatgtgtataggaaaattaatcgcataggaatggattagcaaacaatgcgttttagttaccgattattctacatttatttgatgtttgtcagatggttgcaagtccgacattgttagaagataaacatgagatgttgtttctacaaagtattcgagtg

SEQ ID NO: 168623 - DNA, 226 bp, Arabidopsis thaliana landsberg
caatggcatggatatgtataatacagcatttccaatcctagcagtcaatgtggggatctgggttctctattttctcgtgagtaatcgcaatcccataaggactgcccgagatgcatatataattctctgtaaagccggaatcgataagagtcgtatgtgcggtttgaaggtagctctttcatatctttccagatcccccctacaatatggggtcatagagccacaa

SEQ ID NO: 168624 - DNA, 493 bp, Arabidopsis thaliana landsberg
  unsure (1)..(493): unsure at all n locations
cccccatccccgtcaccggcgcccggggtggcgccggtatgctgcccgtgggcatctccagcagcgccggttcggaggtgcatgccctcagcggcaagcgcgaacgcttcgattccctgcgcaagttgggcgcaaccgattgcctggagcgcaacgccatcgatgcccccggcaagcccatggtttcggtccgtttcggcggcgccatggacgccgtgggcggcaacatgctggcgtcgttgctgccggccacggcgccctacggcaatgtcgccagttgcggcctcgccgccagcgccaccttgtccacgaccgtcatgcccttcatcatccgcggcgtcagcctgctcggcttcgcctcggcaggcaccctgcgccacatccgcgaggccgtctggcagcatctgccctccccctggaaaccggcgctcctggcggataaccataacggacccccggcgctggactccctgcccggtgttttcgngaagat

SEQ ID NO: 168625 - DNA, 2473 bp, Arabidopsis thaliana landsberg; identical to SEQ ID NO: 16506

SEQ ID NO: 168626 - DNA, 206 bp, Arabidopsis thaliana landsberg
ggactacgttggtactcgatgcggcttaagattgatgaagacggagatgttgcagatgagttcttagaagaccaaaactgcaagactttaccaagaaagtgcaaaacaaaagctgcaaaagtgagaggtttagtgatatcttctgatgggaaacttcagccattaatgcattgaacaatgaaaaccaaggagaaagatttgctgaa

SEQ ID NO: 168627 - DNA, 518 bp, Arabidopsis thaliana landsberg
tatccttaaatggaaatacgtacttcttgactcaagagcaaagagcaaaagataagtatcgtgttttcttgctttgttttaacttcacaacggagaagtttgaaaattttattgctatgccgtttaagtatcataggaaatacgttggaacactttcttgtgttggaaatgaaaaactagcggctctatatcagcgctgggatacaggcgagatggccatatgggtaaccactaagattgagtccaatgaggtgttgtggagcaacttgtttaaagttgatatgaaaccactcgttaggtttggctttcaacaatgtaaagatgaagctggcagttttttcattgacgaagagaagaaactcgcggtggtttttagttcaaacaaatcaaaatgctacaaaacagcttacattattggagaagatagatacttgaaagaagtggatcttggagaatgtaaaccattgcgtagcccaattgtgtgttttagcttgtatgttccaagtttagtgcaaatc

SEQ ID NO: 168628 - DNA, 501 bp, Arabidopsis thaliana landsberg
  unsure (1)..(501): unsure at all n locations
atagtaatgcatcaagctctgtggaactcttaactagtcaacaagatagctccactgaagaaccaaatatgtatgatgatgttcctatcatgacactagcacacaacatctacgacacgattgatggggttaagttcaccttnnnnnnnnnnnnnnnnnnnnttcgccatgattagaaattgtgttcagctccctctactatagtaaggggaatgtcaaaaagaagcaagtgtgacgaggctgtagaatgttcaaacccccagcctctttctcatggaattgacgaagcaatgcatcgtcctattggtgtttacctgcaaagacgaaaaaagactataagcaagccaacaactactgaagacgaagaaaaggctctctttgtttcccaatctatgtgggagataaagaagaaggataacgaaatgaaagaggggttaaataagaacaaaatgctggacagtctcctcttaaaacagagccaatttttgatacgaatgtgct

SEQ ID NO: 168629 - DNA, 801 bp, Arabidopsis thaliana landsberg
gtggaagcaataatgaactttgactttcaaaatttgttcatcttaatcctcctctgcctactttcagtcctctgttactctctcttcttcaagaaaccaaaggatggcttcaatttgcctccgagtcctccgtctctaccgatcattggccatctccaccatgtactcttttcttcagcttacaagtctttacaaaaactctcatccaagtacggacctctcctatatctccgtatcttcaacttccctgtagtcctcgtctcctcggcctcagtggcatatgagatcttcaaggcccatgacctgagcatctcctctcgcgagaaccctccaatcgacgagtccctcttgcttggatcttccgtctttgtcagggccccttatggagatcattttaggtttatgaagaagctcttggttacaaagcttttaggaccacatgcactcgagaggtcacgaggcatccgtgcagatgagctagagcggctttacagaagtctttttgataaagctgtgaagaaggagagtgttgagattggtaaggaagcaacgaagctcagtatcaacagcatatctgcaagatgagcatggggaggagtttttcagaggagagtggtgaggctgagagactaaggggattggttactgatttagatggcttgacaaagaattttttgttggcaaacatattccgctggccgcttgagaagctcggaatctcactgttcaaaaaggagatagtgtgtgtttcaaatatctttgacaagttgctggagaagattcttgtggaacatgaagagc

SEQ ID NO: 168630 - DNA, 824 bp, Arabidopsis thaliana landsberg
gtctgtttgatacacccagtcttgtctatcttgactattctggttatcccgcagaagattatgaggttgatttgggttcccttgtagaagctacactcatgggagcgtcttccagatgactattaattattatgtggatggtgatacagaggatattgttggttatgttacgaatctggttgcagggataagcaatgttaaaacccttcacttgtccgctgtttctcttgaggtcagtctctgctacgtcttcttcttctattggttgattctatttgaagtgcatgctagctagcaaagtctcattttgtgtatatgtttgttttggttgtgacaatagatcccaggtattttactcgtgctgtaaatcaatcccggtgtttcccaacctcgttactttatcttttgagtgtaacaaagaaagaggctggtaagtggagccacttctccttaactactctccaaatctagaaactttagtcatcaaggtatcatctatttcgttcgatcaccacgcacttctgtttctttgctaaagttattattcccatgaatttgcttatgccttgttctttttgctttcacggtcttgtgcatgaagttacagacaaacgtggtgacgcctgcgtttgcacccctaagagggataagaggaagagctgaaacgaatgaggcatttcttggcaaatttaaaacgtcttgaaactgtcaatgttaatgtcgaattgagtgaaggcaaggatgttaagaaaaggttcctgacgatcaccaatgctcttatgaagcttcccagagtttcatcaaactgtctgatccatttcacc

SEQ ID NO: 168631 - DNA, 634 bp, Arabidopsis thaliana landsberg
tttcatcacaacttatttttatctgtttgtgatttctgggttctgttaattagctgagagtctttgttaattcagcgagtgtcaatcagagtgagctaaaagttgaatcctttttgttctctgagattcaaaatcgtaatggaaatgagaaaatgttcaactttttccatatctggaaaacttttgtcattgtgcgtaagatcgtttgacatttcatagacacgtgttgatagatcttgtgattcattattacaggtgaggattatctgtggggtcgagcatgaagacttgaaacaattgtttcatgtttcaaagacaataagagaagctgtaagttaaatttggcatcattagtaggttttgatgatacatacaccattagttgattctgaatctaaatgttctttgtttttctttgcagacaatgatagcaaagcagtcacatttcgcgtatagtacacctcggaaaacctcggttttccaccatggcagatttggttgggataaaccgtttgatgtagaggatgatgatgaagagattgaagctccgggagctccgttgcagaaaaggtaccgtctttcgaggataaaccgcaacaaggacgattccggagtctcagtggctctattccac

SEQ ID NO: 168632 - DNA, 427 bp, Arabidopsis thaliana landsberg
aatttttggtttgggtttaatttttccagggtctttcaaaaaacccgcttgttcgaaaatgggtttttccctttgaaccggccggttttggtttcttggtagggtagaatctgtgaacaattctgttttgaaaagtacccaaggttttgcttcaaaactgttgtcccaagaacccacattttaaagaaaaaatgttgtacaaagtttgaatgagattctgtgcaagtctactaaggaactctctaatggtgatctgggcgaggcatattctgcactacgattcgttacgaaagcagggtttaagttggattggttggagaagaaactgaaagagactggtaagagtcgattgcaagaaattgaggaagatttaaaggacttgaaggtgaagtgtgcagacatggatgctctgcttgagttcttacga

SEQ ID NO: 168633 - DNA, 190 bp, Arabidopsis thaliana landsberg
tttaatatgcatcgtgctctattgcttatgacactgatcacgtccgcggtttccatgagtgaagaagagcattgcagggacatgttcgagagctttattaaaggactatctatgcaaccccctccacagtattgtagaggagtgagccgcttcaataacgtcctcaagctcacgtctccaattactgtaa

SEQ ID NO: 168634 - DNA, 451 bp, Arabidopsis thaliana landsberg
atggatctaatagctcacaagtgtttaatccaactcttccaagagctgccgcaaaaaaaaaggaaatcaggttagtaacttatatactattgaatatgcaatattatcatacaaattttaaatataaaaatattatttttttatatgtcatgtgttgatatttatattttttattgcaggaaatttatccaatactaaaaagatatcatcatcacttcgagagaagaccaatgataaagcaaccaacaattatgatattgttaacaaaatatctattcgaaggctgtctgctgttaaaagaatgaccagaaaaatatcaaacgcttcacgttaagtataattttttttttactagatacaatacatattagtttaatattcttatttatctctatttggacgttgactctctcagtaggatcaccagacttcttaactcctaatcaaacta

SEQ ID NO: 168635 - DNA, 403 bp, Arabidopsis thaliana landsberg
gatcgtgttggtgatcgcgatgttcttcacccgcgtgcagatgccgcaccggctggtgacgatcacgtcggtactgctgggcacgacgatcttctcgctggccggattcgtcaacgcggtgttcgccaagaagttcgacgacgtggccatcgttccgaccttcatcctcacgccgctgacctacctgggcggcgtgttctattcggtgaagctgctgccgccgtgggcggaaacactgacgcacctcaacccgatcttctacatggtcaacgcgttccgctacggcctgctgggcgtgagcgacgtgcccatgtgggtcgcgtttggcttgatggtcttcttcgtgccggtgctgggcgggctgggcctgtggctgctgaagcgggggaccgggatgcgcagc

SEQ ID NO: 168636 - DNA, 994 bp, Arabidopsis thaliana landsberg
tgagtttttatgtcggagtcataggtaacatgcccattttatttgcacgtgtttattatcatctacatatttgatatacccacaaagttatgtaacttatactataaaatgagttatttttatatatatgatcgttgcagggaatgttatatcggtgcttgtcttcctctcccctgtgtgagttaactctctctttctacatatgatcttgattaatttgtaacatttgattgaactataagaaatggggaaattaagttaaacattaaaatgataattagggagacgttttggaggatagtgcagcggagatcgacggaggaatacgagtgtttgccgtacatttgcacgttaatgagctcgtcgttatggacatattacggaatagtgacacctggtgaatacttggtttctactgtcaatggctttggtgctcttgctgaatccatctacgttctcattttcctcttctttgtccccaaatccagattcgtaagttttctttccacctatacatattatatatatagtttcagtttgcattatatgtgatagtgagattttattatgtgtttttatatgatatattatattgatatgatataaaaatttgtttgaatatgcatttttaattgatgcccccagatcatttatattagagataacattggtgactcagattcacatctgattagcagattttaattatgacgtttaatcaataagttagtttagattatgtctacttgctatataatactataatagtataaattagactagaatacttagcttgaacgcgtttcatttgaaactaattgatttctgatttcaattttatttttcaactgaaaacagtagcaggcgttctagctttgaacgtgtgtttgccagctatcgcgattgcgtgaacaagaactgcgtttggagatgcaaactcgcgttctagttcaatgggtttcatatgtgctactctcaacattatcatgtatgg

SEQ ID NO: 168637 - DNA, 601 bp, Arabidopsis thaliana landsberg
atgcatttacatgagacatcgtgaattctaacataacgataattattttgtagggaatatcatctcctttttcgtctgccttgccccaatgtaagtactctataactctttgtaatttcgtcttatataagtaaccttttaactcaagaatttttacgtgtttttatatattagaccgacgttcgttcgtatatacaagaggaaatcatctgaagggtatcagtcgatcccttacgtgatttctctgttcagcgcgatgctatggatgtactacgcaatgatcaagaaagatgctatgatgttgatcactatcaactcctttgcctttgtcgtacaaatcgtctacatctccttattcttcttctacgctcctaagaaggaaaaggtccttattctatatgaatatagcttattgtcttgtgtttacacacaagagttactacatctttaacggaaatttttgtttcaatatggcagactctaacggtgaagttcgtcctctttgtggatgttttgggtttcggcgcaatcttcgtgttgacatactttataattcatgccaataaacgtgttcaagttcttggaataccattttgtatgg

SEQ ID NO: 168638 - DNA, 1333 bp, Arabidopsis thaliana landsberg
tttttatctagattgtggccaaagtatagaagtctacggctacaaactattattagttgcaaataatatgagttggccaaatctaaagagaatactaatagtatgtagccttcttgggtaaaataatttaatgttcatcgtggttcactaattatgcattactattatttagaattgtgttaattaattaaataatcaggcctatatgtggatctattcttgaatattaattagattcttttttggtaaaatatctttgctaattccgagaggtcgataaattaacggtcatgcccactcggatgaatcaccccttatcctcatcctttatatctcttatgatcctatattatagtaaaatttggttaatagttgcaattaacaatttgttttttgcagttttagtaactcctaagaaaaaatgttataatagtctagtggttgttttatagattagagtcttattgtgaacggtttaaactttagatattttttttcacttcacttcttaccccaaaaaaaactccaaagattggtaaaaatcaaacaatgatggctcaaaaggtgaacttggtagtgataaaagaactgcatgggacgatggtggcatggtgcttacaacagtgttaaggtgtatatatgtcaaggccacgattgtcgattgtgtgtccacggttagtttgagtatgccaatgcttctcaagttgttgctggagatgaacacgaaaagaggtacttatatatcgctgcggcctaaacgggccaaacgcattttgaacccatttattttataacttggttggtcgagatacggactttttttttaataagtgacccgtttaatcccacaacttccctaggcattgtggtctttgactattgtgactatactagttattttataccttcttaaagtcagaccggtttccatcggacaagattaagttgttttgcttgatttcattgtagttcgacattgattatccaagtgaatacatcaccgctgtcgatggcacatgcgattaaatctttggaagtgactctgcggtcattatcatatgcttaggttcaagactattatgcgaacatctaatccctttggtcttgaagctggcaagactattatgccaaagggattaaatctgatgatgatgggagaatcataatgatccttcagttctgaccataaaacttttcgctcctccacgtagtttgaagcatagacaaaggaacagaaaaattcatcctgtcgatcttctagcttcaccgaacaagtcagcaattgaccactcttataaataggactaagtcgcacattcttacgccatagaac

SEQ ID NO: 168639 - DNA, 530 bp, Arabidopsis thaliana landsberg; identical to SEQ ID NO: 80480

SEQ ID NO: 168640 - DNA, 302 bp, Arabidopsis thaliana landsberg
ctttttcaagaaacctaattctgctttttcttcttcgagggccacaagtttgatcaaaagacaacagactgtctttaagaaagctaaagagctttcaattctctgtgacatcgatgtctgcgtcatctgttacggatcaaacggagagcttaagacatggcctgaagagagagagaaggtcaaagccatagctcgaaggtacggtgaattaagcgagacgaagcgtcgccaaggaagcggtgatcttcacgagtttctcgagaagatgaacaaggatgatcccgagaaggaggagaagaaga

SEQ ID NO: 168641 - DNA, 1092 bp, Arabidopsis thaliana landsberg
ttccacatatgatcaattaaaggaagaaaacaaaattttattttgtgatttgaatttcgttcaaaacccaaatattcgtgcatattttgagattgaataagcacggattttacaaaaatgacgtgtccaacaacaagatcaatatcaagaaactcctcctccatctacttcatttggacaatattttaactatcttggtggatctacaagcaatttaccggaatattaaattgctagttttatgttttagttttcttatgttgtttattttaaatttagtaattatttacttattaattttataaaactatttgttgtagttgttgttcgtaaaatgataatatgtatcaaataaaaaattaaatttgagggaccaaaatataaatataaaatttcaactctaaaatagagtagagaatagacttactctatatatagagcaattctgcataaatttctattttagagtccaatatagagcaaggttggagaagaatttggagtttttactctaaatagagtagggttagagatgccttaacaacacatacataacaagcattttatccataatagcacatacatacgtatcgttagtctagccatcctcgtgttgactaaacctcatcagtggagactggccctcgtggctcagatactcccattccgggcttgtcaagcgttcttgaccagctcttaacccgtcggtccatcactgttcaaattactagggagagcacggcccatagcttgattctccccattcattcatacagacatacataatcatcatacttagatacttatacttaacattctcatacataatattttatagtcaaacattatcaccatacatatcattatatcaagcactcaataatcatcaaatcatatcatcacataatcttatcctatgcaatcaaacctaagcctacatatcatgtgtcaagaaccataacaaaagaaaatcatgcttcgcaaatagcaccctcaccttggcatgttgatgatgaagactcaattctcctttctttccacttaggcaatctttactacaactacatgctcataagctctaacttgattctc

SEQ ID NO: 168642 - DNA, 843 bp, Arabidopsis thaliana landsberg; identical to SEQ ID NO: 6866

SEQ ID NO: 168643 - DNA, 1040 bp, Arabidopsis thaliana landsberg
atgacatttcaaacgctgaataacaatgtatgtgaggagtttgaacttaatgcagaaaactggaagccgcagttgagttattggttgtcgggccaactgtctatgttctctgtaaacccaaggcctcctgtagttgttggtagcgacatggctgtgaggaacttccttagggtaagggagagtgagcctcagcttaatcttttgctttctctagaatctctaccttatctagttgatggtgtgagggtggagttgttaaagtgctcagggaaaggaaaagctatagatggtgagaaagctgatgaagaaaggggacaatgttctaaggagataacatatttccaatcagcattggggattctgaatggtagtaatggagctgaatgttcgaatatgatgagtagtttcagaccacatgcgtcaactgtgattgctgctgcaacagatgcaaatgaaactgttggagtgaatattgccacagctgcaaactgcacagccggtgacgattcaactgattgtgttgtgccacaactgagggagagtagcacagagccgtggctgagtaccaatgcaaatggtatcattaatcttgcagatgcagcaactccatcattatcaaacaatttagccgataattgtgaggattcagtctctaatgcatatgtggaatctgagactgaggcggaggatatgaggatgttaagagaggtagaagagattgagagggcagagcaatcaaaacgtcagtgcaaagggaagcgtaagctatttcagagtgatgaggatgcagatgaagatagttataccgacggttttaatgagtcctctgcagatggtgatgatgggttgtgggagtacgagggctggagtcatctgatgactagtgagtttcccactggggtcagtgacaatgacatggagactgggcatctttctgatgaatcggagcatgacgatgctgccagggaggaatctctaactccagctacagacattagtgaagccgggttagcatttcattaaccagaaccatcgccacc

SEQ ID NO: 168644 - DNA, 621 bp, Arabidopsis thaliana landsberg
  unsure (1)..(621): unsure at all n locations
gctctaaaaccatcagcaagctagcacatcncaatgcaccccttggttacgggctatgcttcttaaaccttgcttttgatggattcacaaacgcaacncaggattccattaccgcaaggtatgactcttgacattctgtcagatacttaacccagtctgacatctacaacatggtctagatgttggacattaatcatcgccatacatggatacaggtaccccaaaactaacgcatgggacataatgctgggaatgaatttatggggaaccatatacaacatggtctacatgtttggattgccacatgggagcggatttgaagctgtgcagttctgcaagcaacaccctgaggcagcatgggacattcttatgtactgtttatgcggtgcagtaggccaaaacttcatcttcttgacaataagcagattcgggtctctagctaacacgaccataaccacaaccaggaagtttgtaagcatcgtggtatcttcagttttgagcgggaatccgttatcttccaaacaatggggatgtgtgtcgatggtgttcggtggattgtcttaccaaatttacctgaaatggaggaagctgcagagaatgcagaagaagaaaaaggcctga

SEQ ID NO: 168645 - DNA, 473 bp, Arabidopsis thaliana landsberg
  unsure (1)..(473): unsure at all n locations
caaactcattatctatcttattcgtaaccaacaaaacttagaatggtctgttttgtttcttcacaaggttgctgaactaaaaggatatggttttgctctccggatcacaagccaaagaaggatcgtttttctttggaattgaagcagcactcgagggctcgagcctggatatcccggaggaccgcttttgaacccattaggccttgctaaggatgttaaaaatgctcatgactggaagcttaaggagatcaagaacggtactagacttactttggtttggttccttcctcataaactctctttgtgggacattgattgattggtttttaacaggtcgtcnnnnnnnnnnnnnnnnnnnnnnnnnnnnnnnnnnnnnnnnnnnnnnnnnnnnnnnnnnnattgataaccttgtcgagcatctctctaatccatggcataagaccatcattcaaaccctcttcacatctacatct

SEQ ID NO: 168646 - DNA, 423 bp, Arabidopsis thaliana landsberg
gtggtggcgactgctgttgtatcgtacttcctcttaaccgctgattacggtccagagcccaacgctcttgatcctgtgagttccaatttcttcctctctctctctctctctctctctctctctctcgaaccgtcaagcttctcgatcatcatcgcttcgaatcgcagatatttgctacagcctacaatcacttggtttcaattgatattggctagatctctttattagttgttagttgctagggttgaattttgatcttagaaaactttgaatgagatatgaatgttcctgacttctatgctcagctttgttgcgtttgcctggatcttcaacgaatgagtagttttgctgagtgcttagtcctagagagagtcctgattactcatttactcttgaacaccaaatcaattttttatgggttag

SEQ ID NO: 168647 - DNA, 4724 bp, Arabidopsis thaliana landsberg
  unsure (1)..(4724): unsure at all n locations
taaacgtctttaatggcaataaatgttggattctatgggcacgacaattagtctaaattttggtatgagattccctcagtttaaaaaaagattgagtagttagtcgtacccactaccatatttaacttcatggagaagtaagacagttttctccttggacttctttttttcgcatgcaagtgattctactatcaagtgaattaaacctatatgcttctactatcaaatacgttaaaatatagaaagaaactaatttggttaaccaaaagtgactgttggttttatgctagaaagccatttaccgtgttctcatcgatgatcgatcccgaatctttattgtgtgggtaaagccattagttatagaactttccagaaaatcattgctcgccataaaaaataaactttacagttaaaacatggaacgaaataaaaggtttacatgaaacgaaatctttaaattagagcatgaaagaaataaaaggtttacatgaaacgtgagagagccgtaatctttacatgaaacgatgattgaaaaattattggaaaatggtcgagtcgagactaggtctcaaggtaaagaaattaaagctttaaaacttctgtcaaaaactaataaaacttagacctgtcaaaaccatgaccattgataattaaaacccgttcaacatactattcaattatttagacaattattaaacgtctacataaatcttccactatcataattntgaattcacttgagaaattccatgtgcacgtatatatcgtagttttacatttaaaaccacttgagaaactacatttaattaagttgttaaacaattatcaaacagtttgtcgccttttgcctttcttgttatgttgaagatttcaacgttttccttgcgataattctgaaacccatcgtactctgctttaagatccattatgatcttcaagaaaactctataacctttttccatattgatgggttattgaaaagttcgtttctttgctttctgattcaaacctaaacgagaatcccaaaggctgcgtttcttgatttcaaagtctgaatttggtaagaccgttgctatttaactcttaaatttgaattttgagtactttcataattatacttatcatttgtgtgtttaattacctggggtggttttgttgtgaattggacttttagtacatgatgaacacggaatcgtttggagcttgcttgcttcttacgcttccagaagatgtgttagctgttatctctcgttttctttctccaagcgacatttgcaatctaatcttgtgcagcaaaagtctttgtgcccttgtcgattccgagaagatgtggcttctgcaatgtgaagaagtaaaggttcttcctttgattgaacttgtcaactggcgaatcgggatctcttcttacaaggcgctttataggtttcttgtagagatggtgaagccgcttcttgggatatgggtgcaacaaaaccctgaacttgggaatgttgtttatgtgatgcctggtttcttgtctgttgttgggtgccggataattccacaaaaggttgcgccttcgtggattcaagagggccgagttaagtggtcaccggtgtttgagataatctgcgggtttgatggctctaacgggtttttcctccatggaagagacaaagaaggcagttgcttgtaccctggttttgttatgggcattgagaagagttgcaatgtccttcatctcgaagttgtgccgaggcaaaagaagagttcgtacaatgagattgagagaggagcctcaaaaaaggagggagagattctattttggaagctcgcttttagcgatagaaaaaatttgctcaatattgtgacaagccatgtaagtctacatgtggtggaaccattaaatgaaatgttatttcccacattgaaatatgatgaagcaatgctggttgaacgcagaaccattctccttaaaatgcacaagtttggtggaaattggaagaacatgaatttggaggaggatgatcagttgtgttacaatcccatgcatgtaaaaataaacgagatgttggaaaatctcggtgatgactatttttttgatgaagaggagctgatagaggtcacaccaacggagaacacgaatgttttaggggagtctagttcttcaaagaacacaacaccttcgcagagtgaaattagagtttcgaatcaccaaagctttcttagctctggtgatacattcggtcttggtctcacagcttcctacagtgagatgtcttgctataaagggtggccatacatgcactttcaccactttttactttataaactaccggttaagaaagccgtcgatcaagaagcgtatgctggtttgtggggaggaacgtttggctggccagctgtgaaatgtcctaaaggtaagacggaaaagtctctttacgtactgatgctcacttatgaagaatctgaagaacatagtgagagagttctcattgggacaaaaatactcgaaggaaagcgctatgtgcgtcatcccaatggaactgcaatgtttgttgtaaacatcgatacaccttctcttgatccctttccaatggatgcaaatgaaacacattttgagaattcttactcgggagaaggtatcgcagagggttactcattccgctataccggttctaaacccggttcccttttcgtgattactaatgatcttctcgcattcgtttggaaagaaaccaaagttgtgattacgttgcaaagactaaaccttacagagatcttgaagaagggtttgggatcttgtgtgccgcctttgcctccttcgaagaattttacttatatgagaaggtccttcataaacgagtttaccaagttatcaaccgattcgtcttactctgaataaagaacattgtacgaaacacatcaatgttttgattgaaacactcaattagctttgttttatttttgaggtacattctccaaattttatttattgtgacgtcatttgcatttcaaaactaaactatactatagtcaatatgcttctaacgtgtgtccagcgtcgactttagagaatttggataaaatgtcgagatctttcctgtggggaagtacagctgaaaaaaggaaattacaccttgttgcttgggatagagtttgcttacctaaagatgagggtggactgggtatcagatcagctaaacagatgaatatggctcttttatctaaggttggatggcgtttaatgcatgagaaggctagtctgtaggcgaagattttaagaggaaagtacaaagttggtgatttacatgatcagtcttggatgggaccccgtcgcaatggctcttcaacatggagaagtatatggaagggattacaaagtgtggtgtatccggggctgggctgggttgttggtgacgggagagacatctgcttttggacggataagtgggtgtcgaattcaactctagctgaggcggcagtttgtgaagtaccggctgggcttgtgggtacaaagatccgagagttgtggactaatggtaggggctgggacatggatctaatcgcaccatatgtatctgaagctaccaagctgaacttgacagcccacgtagttgatacagttacgggtgccaaagacaggccatcgtggagagggaatgcggatggtaggttcacagtcaagtcggcctacttgtttcttatgcaggacggttcacacaaacagagtatgggagccttctttaagaggatttggaaagctgtggtaccagagagagttagagtctttctttggctggcagttcatcaagttatcttgacaaatgtagaaagacatcgatgacatatgggggattcgcgagtttgtcaagtgtgtaaaggaggggaagaaacaattctacatgttctccgtgattgccctgctatggcgggaatttggtatcgtttagtacctccaaataaacggtactctttcttcacaagctctttgttagcatgggtctatgttaacttgggagatgatgcagaaataagtggttgcgcgtgggcttctgtatttgcattaggcgtttggtggagctggaaatggcgctgtgcaaatatttttggtgatccagggaagtgccgtgaccgtactcgattcataagggagaaggcaaaggagtcatgggatgctcataaggttttgcgtcggggtacaactcgtgggaatgtggaggagaggatgatagcatggtccttacctagtgttgggtggttcaagttgaacacagatggagcctcgagaggcaatcccgggttagccgcagcgggaggtgtggtgcgtgatggggccgggaactgggttgcgggttttgctttgaatatcggaatctgttcagcgccactagcggaattgtggggagtctactatggtttacacatagcctgggagcgaggaataacacgacttgagctggaagtggattcgaagatcgtggttgggttcttacagacagggataccggattctcatcctctgtctttcctagtacgtttgtgctatggcttcatatcaagggactggttagtccgtatttctcacgtgtataaggaggttaaccatcttgcagacggattagcaaactatgtgttttcattatagttaggtatattcttttatttgattactgtcctatgtagccaaaccgattatgttagaggatgttaatgggacagatttttttcgtcccattcttata

SEQ ID NO: 168648 - DNA, 690 bp, Arabidopsis thaliana landsberg
atggatgatacatccatcaaacaaactcccagaacaatgtgtatgagtaatctcaagctgttttcgtttggtggatctaaagtccaagatttcagaggtttggagttgctgcctttctcaggttgctctcagttatcagacatgtatctcacagattgtaatctgtacaaattcccggacaattttagctgcttatcctcgctgcagtctttatgcttgagccgaaacaatatcgagaatctaccaggaagcatcaagaaacttcatcatctcaaatctctttacttaaagcattgcaaaaatctcatttctcttccagtgcttccatcaaatctgcagtacttggatgctcatggctttatctcactcgaaacagtttcaaaacccatgacgcttcttgtgatagctgaaaagacccattctactttcgtattcacggattgctacaagctaaaccgagatgcacaagaaaatattgtggctcatactcaactcaagagtcaaatactggcgagtagatcttttcaacttaatcataaggtccaatctctggttactctgttatgtacgagtcaattacgattgttctgtaacttctattcttagttacatagagccagcaaagcctcatctctggaaataactaatttcagaaagctgattccagacaaggtttggattcaaacagag

SEQ ID NO: 168649 - DNA, 1588 bp, Arabidopsis thaliana landsberg
aaaagtttttcttacatgcatcttaaactttacagattctccatcaagatgaaccaccattgctatacagcttagtctttggagaaggagtggtgaatattgcaacctcagttgtactgttcaacgccgtgcaaaagattcaatttgaaagcctaaccggttggacggcgctgcaagtatttgggaactttttgtacctcttctcaacaagcacacttctcggaattggtgtaagctattgagttggcatagttttttactctgtttgaagcatatcatgagtaatcttagaactgtgaatgtcttgcaggtggggctaataacatcttttgttcttaaaaccttgtattttggaaggtaaaagtacaccaaacttgcaaatttttcatctcaagcttaagttttttttttttagtgataagatgtgcctttatattgatcttgttatatggttgctgacagacattctactacacgcgaactcgccatcatggttctaatggcttacctttcatatatgttggctgaggtaatacactggtcatgaacgctactttttagttttcatttggaattgaagtgctgcatttctctgttttaactcaatatagttgttctcttgcagctcttctcattaagtggaattcttactgttttcttctgtggtgttttaatgtcgcattatgcatcatataacgtgacagagagctcaagaatcacttccaggcaatgtatcagacaattgtttattcgctgaagtctcaatttgcaggaattgcttttgtctgactgtgcatctatattttgcaggcatgtatttgcaatgttgtcctttattgcggagacattcatatttctgtatgttggaacagatgctcttgattttacaaagtggaagacaagcagcttaaggtataaagtcgtatccatttatcagctggtagagcgtttagagtgttttgtcaaaacaatacacagcattttgatatgaacctcgtgtatttcttaaatgcatacctagaatcaagattatcccaaagacatcctctatgtcttcttctctcttgacacgaagttaatcgccaattaactgttagttaagctgtggtggtgactcgttgtttctgaaatctcttcccaatgaagacttgtaacattaatcatcttcttgcagctttgggggtactctgggtgtctccggtgtcataaccgcattagtattgcttggacgagcagcatttgtctttccactctcggtcttaacaaatttcatgaacaggcacactgaaagaaacgagtctatcacatttaagcatcaggtttagctcttgtttgttacagttacattatcagaagcactaaaataaaaaattaataatggtccgagaatgggaaagtttctgttatataattctctctttgtatactttataggtgatcatttggtgggcaggtctaatgcgaggtgctgtctcaattgctctggctttcaagcaggtttttctctttgcacattcatattatctctaatctctattgtattacttttacattgaattagtaacatttccattatatctcattttgg

SEQ ID NO: 168650 - DNA, 2178 bp, Arabidopsis thaliana landsberg
  unsure (1)..(2178): unsure at all n locations
tctggaggaaaacaaagagtttatgctgctgaaccgtgtaggtgtctagcaacaccaatacctgacgacaaatcgaagacgcaccttattgacgttttgaagatttccaaattcggcccataactttcccttatttctaaagaaggtccatcacgtttatagatcatatgtatagtttttatggtcattgtttagaccttactattattctctattctgtcctttggggcaaaaccctatggagactccctttagtgaagattcttctaaactcttttctctttttaatttcatcattgatttcttattcaatcatgttttgttcttctatgatcatgcttcagtagttctcttgttgggtttagggattctcattagggatttggatgaattagtagatcaaaaaccctgttaggataatatatttagaattcttcatcttagattgttcttaatgttagttttagagtaactaactagaacttgattttaggataataggtatacccaccataggtatttactactagaactatctaagatgagcctagtatttagatgcgtgctagcgtccattacttaggtgaacttatcaaacctgattataatgcttgcttagttctagggattagaagaagagttggaatcaatactattaagcatagtgagtagcacggcacaccaccggttactttatattagtgatttgggttctagaatggttcaataatattcctaatttactactaaatctactattctgatatctctagagaatttccctaaacccgacatcttaatcatctgaatctaaaacaaacttttaattaatttcttgtcttttacttttataatattttatgtttagctatattcgaaactgttagtctattgtgtgatccgagaactttgtgaaatccgatccctaagtgttataacaacctctttatttgagagagtagttatttgggtaatttgactcatattaaatttggcgcatttgccggggatttttcttcgattcaccattagattaggtgtagaatttagtctaagcttttcttttcttttgttacttacgcgtttttatttctttttcttcttgtgtttcagaagtttacggaattcaaacgcaactcaagatgctgatagtaatacttgatgctgctggagtgttatgcgacaaagcttgtcagcatacaacgaagagggtcagaaaatagatgaacagtgaaacctgataccagaaatcgttgatggtgtcgatcaacaccatctgggtgtctctggacaccaagaagaaatcagagcagatggtcgggggaggactcttgatgactacaacagaccgggtctcttctattccaatcggtctgcaatccgaccacctacattcgaaagaagcgattttgagataaaccctgctttctatacactcttgtgagtacccacccttttcatggtctagcacaagatcatcctatcgatcatattgagcagtttgaagacttggtttcgagtattaaggcagaaggtgtttcttctgactaccttccctgcaagctcttcccatattctcttgctggggatgcatcttcttggcttaagcagttgaagcctggatctctgacaacttggaaagaaataaaggttgcttttcttaacaacttttttaatgatgcaaggtctgaggagctgagaaggaagatctctatcttctctcaagaagcagctgaagaatttaaagccgcttggatttcagagcattgacgttatcagtggctttggatgcagctagtaatgggaatttcatgtcaagatatccagaagatgcaacaatgttgattgacagcttagcttccaacattagtaccaaaagtgttgacattgcaaggaaaacgcaagttcagtatgttgcacatgttgacagtttagccacttcagaaaagatggatcaacagagatacatgagcttcaatcagcaatctacacatcagaaaccggttcagcaaactgcaagcttcattcagaatcatgcttcttcaacacaagcccaccctccacccctaaaacgatcgaatctatgctcgaacagattctcaaaggtcaagagaagcanacaacagattttgatcacanaacttgttgcattatccgacgatgtgaatgggaagattc

SEQ ID NO: 168651 - DNA, 1307 bp, Arabidopsis thaliana landsberg
agtacggaatcgtcttctaatctgtgtctgttagagaatggcggaggaggaagtgataagccgacggcggagacgtcgaggcgtgtgcggagaacggtatcggcgtcgtcgttgataaggaagagatcggatctgaaactgatctccagagttcgttgggagtttatgagacgaatcttgacgaatcttcaagaagttcttctcggcaccaaattgttcatcctcttcccggccgttcctctcgccgtcgtcgctcaccgctatgactgtcaaaatgtaagttccaacaaatatatctttattttatcggaatattttaccaaacattcgtcttaaaccatatggggtgttaattgttattgcgtggtgtaacaaaaaaacaggcgtgggtctttgcgttgagcttgctgggattgacacctttggccgaacgtatcagttttctcaccgagtaatgtattcttctttgttttcttcttttaccatttatttgctttctatctaaaataacgttattagttcatttacaaacatatattttgattctcttcttaaacaggcaagttgctttccataccggtccaacaggtgatcatttagatttcgttgactttatatttgttgccatgtgaatcgaaccgggttattcgcagcacaaaaccgaattcttaaattaaatcaacgcattatttttgtggtttaatctaggtgtcttttatagtgcattgatctttgataacttgacatgcaagctatatacatgaaggaaattggatttttgattctgtgaaagtgtttgcattttctctcacttatgaaaattaatgaaaataattgaatgaatgaatgaagttggaggattaatgaacgccacatgtggaaacgcaacggagatgataatagcgattctagcggttgggcaaaggaagatgagaatagtgaaactctcacttcttggctctattctctccaatcttctcttcgtcttaggcacttctctattccttggtggcatctctaatctccgcaaacaccaatctttcgacccagtacgttattgtctcctctcaatcaacattcaagatatatgtatcatatcttatagattgacaacaacgtacaacaaaaaaatcaaaatgtgtatcgatcatctaatcatgtgtgtaattctgcaagaacagagacagggagatatgaacagcatgttgttgtatctggcgctgttatgtcagacactaccaatgataatgagattcacaatggaggctgaagaatacgatgggtcagatgtagttgtgttgtcaaga

SEQ ID NO: 168652 - DNA, 540 bp, Arabidopsis thaliana landsberg
gatttctttgggatcatacttgtcgagctaacctgaagatttatgactaagaatttctcttctccctcgttctgttgtggttgcggatgcattgagaaagagacaatagtggcttacaaattctcgaagtcgcagtcccattattcagttgcttaaagaatgtcttccttcctattctactgttaacttacaggaggatgtaaaggatgatgtttacctttggaaggtgatgatatccatgcatcaaatattttctctgctgctaaaacttaggccccttaatattccaaaaaaaattatgcacatcttcatcctcctggcacaaagatggatcggtttgaatctgtgtgatttccaggaaggattcttaaagcatgctttcattgcttgggctaaagtctcatcatagacttctcactagagacaaaatgattcgatggggcatgactactccttcgtcgtgtcttctctgtaatttgatggatgaatctcgctaacatttattcttcgactgttcttatgctgcagaagtatgacact

SEQ ID NO: 168653 - DNA, 1037 bp, Arabidopsis thaliana landsberg
agtatgcagaaataaccgaagaatgggaaaatgaatttggtgcacatcggttctcttacaaatccttgtacaaagcaacaaaagggtttcacaaggatggatttcttggaaaaggaggttttggagaagtctacagaggaaaactccttttaagcagagaaatagctgtgaagagaatgtcacatgatggtgatcaagggttgaagcaatttgtggcagaagtggtgagcatgagatgtctgaaacataggaatcttgttccacttcttgggtattgcaggagaaagcatgagtttcttcttgtctctgattacatgaccaatggtagtctcgacgagcatttgtttgatgaccagaaaccggtactttcttggccacaaagacttgtgattataaagggtattgcatctgctctctgttaccttcatacaggtgctgaccaagttgttctgcaccgagatatcaaagcttcaaacattatgttggatgctgagttcaatggaaggttaggggattttggtatggccagttttcatgaccatggaggcatctcagactcaacatgcgccgttgggactattgggtacatggcgccagagatactttatatgggagcttccactagaactgatgtgtatgccttcggtatcttccttcttgaagtaacttgtggaaggcgaccttttgaacccgagtttccagtgcaaaagaaatatctggtcaagtgggtttgtgaatgctggaaacagacttttttgctcgagaccagagatccaaaactgggaagggaattcttatccgaggaagtcgaaatggttttgaaacttgggttgctctgcacaaatgatgttccagaatcaaggcctgacatgggacaagtgatgcaatacctaagccggaaacaacccttaccggatttctcaccagattctccaggtattgggggttttatgccagtttcagtggaaccatcatctaccattggtatcccagattcatcaatgcatgttactcactcgatcttggaagggtatgga

SEQ ID NO: 168654 - DNA, 462 bp, Arabidopsis thaliana landsberg
cacgtgaacaacacaggcactcaattttcaggggctgtagccggagccgacctggacatggtgaatgcctggagtctttctacgggtattcctgaaattaaggtggctatattagattgcttcggcagcctggcgcagtttgctcatcctgattttgcctttcaactggcatttgatgccacaggtacaggttttaatgcttccggtttttcgggcgatgcccacggcattaactgcggaggtttgatcggggccagcacgaataactccaccggggtagctggtattgcttataacgcacgggtgtatgccattaagatcggcagtattattaacagcagcggaaactggaatgctaccggcaattctatttccgcacggcatcccctgggcataccagaatgcacaaatcgtaaacaattccaacagcctgggcagcagcagcagccttattaatggtgc

SEQ ID NO: 168655 - DNA, 693 bp, Arabidopsis thaliana landsberg
gaactgcacaaggagatgatacaacgaggcatatctcttgatactattacgtacacttctttgatagatgggttttgcaaggagaaccagctagataaggccaaccacatgctggatctgatggttagcaaaggatgcggtcctaatatcaggacgtttaatatcctcataaatggatattgtaaggctaatctgattgacgatggtttggaactcttccgcaaaatgtctttgagaggagtggttgcagatacggttacttataacactcttatccaaggattttgtgaattgggaaaacttgaagttgccaaagaactcttccaagagatggtttctcgtcgtgttcgtcctgatattgtgtcctacaaaattttgctggatgggttgtgtgacaatggggaaccagaaaaagcgctggaaatatttgaaaaaatagagaagagtaagatggagcttgatattggtatctataacatcatcattcatgggatgtgcaatgctagtaaggtggatgatgcttgggatttattctgtagcctccctctcaaaggagtgaagcccgatgtcaaaacatacaatataatgattgggggactgtgtaagaaaggctcactgtctgaagcagacctgttgtttataaaaatggaagaggatgggcattcgccaaatggttgtacatacaacatactc

SEQ ID NO: 168656 - DNA, 1338 bp, Arabidopsis thaliana landsberg
atggatgtctttcatactccacttgaatcacatgattcttataaggatgatgcaaaagaaggcaatccaatttttgacactggtgtcaaagatccaaatggtaatgatgcagatgatgagggaaaaatccaggtacttttataaatacaaacacaacacatcaaacattttatttaacattttatagattcttacacatttgactattgtactttacaatcagtttgattcaagtgcaaacctaagcaacaaaaaacaatctcctcagtccattcttaaaccaaattatggaggtaagctaatatataaaccaaattattgtcagtccaaatctcctcagtccattcttaaaccaaattattgtcacagtcctgaagatatattcgtttgtaattcattattcaggacaccttggagacggttgaagcttctctttcagtgttggagacgcaacccgaagaaaacattgacgatgatcctatgcgggaggtaagctaataaataatttgttggaacacatcggagagggtttctgcatcccagtccttaaaccaaattttcattgtccttacgccatcttcctctataattcataattcaggaaaccttggagacggttgaagcttctcattcaatgttggagacacaacccgaagaaaacattgacgatgatcctatgatgaaggtaagctaatatataatttgatgtaacacatcggagatggttgctgcatcccaatccttaaactaaataatggcacatgtgcatagttattgtgcacaggattttgtggatacttaggagtgtacttcgatattcaggtcactttggaggcgggtgcagcatctcaatcagtggtggagccgcaacccgatgaccctatggaggtatacatttttaactagttccttgatttattggacactggagagagatgcttcatctctgagtccttgtccaaaaaaacatttacaggacaattctccacagggcaattctccatagggcaatgcagcatctcattcattgctagagactcaacgagaagtcaacatcgacggtgatcctataaggtatgcagtaacaacaagtatcattttatgggttgtggttcttgtgttattgaacatgattttgttgatacttcttaatttgtaggcaatatttcttatatttattcaaaccagctacatgtgtacttcaacattcaggttattgtggagatacttgcagcatcgcattcagtgtcggaggcacaacccgaagtaaagattggcaatgatgctatgggggtataaatttctaactagtttcagctaatgatttacattcattca

SEQ ID NO: 168657 - DNA, 647 bp, Arabidopsis thaliana landsberg
tggtcactgcatttgtgggaacagcagtagcatttgtgtgtttttccaatgcagcaatgttggcaacgcgtaaaaggtacctttacctcggagcttcacttgcttgttgtatgtccatcctttggtgggtacaaattgcctcttccatcttcgaaggcttcaacaactgtcttcaagtttggggtaaaatttttcccttctagggtataaaattgtatgttcatcgtaaaaaaatcttgcttgtattaacaaacactcttatttgcagctatactttggactcttgatctttgtgggatacatagtggtgcacacacagatgatacccgagaaagaaaacaacaggtgatatggactatgtgcaacattcttttacctttttcactgactttgcttctctatttgttcaaattctcgttctcaacatggtaagttcttcccttaaacccttggtgagttcattgttacctctaatgtctctctatctaatacaatttcgtcttattttgtgcagtttaggaagatgaagaaaggaagaaaagaccgaagaaactgaaaccaccaaatcaaagtctacatagctcagagttttagtcaaatcactctttttacttctctttgactagtctctttgctatcataaaaac

SEQ ID NO: 168658 - DNA, 726 bp, Arabidopsis thaliana landsberg
aagaagaaacagtggagaatctcacaagtcttacacctcaagatgcacacaatggtcttcctaagcttatgttcgaccttgaggtcgagatcttttcccgtctttcatgttttcaatattggaaactaaatcttctcaacaagcagttttcgcaactgctacaaagtcgtgagatttttaaagtgagacgagaacgtggacttgtgaaaccatatgtgcttatattttcgagcggtgacacttgttggtcaatgtttgataaaggtttcaagaatttccgacaacttccagaaattccttctgacttttgtttcttttatggagataaggaaacgattactgcgggtacgcatttgatagtcatcggaagagaggagaagcgtattgtggtgtggcgatacgaactagaggtaaacaagtggatcaacgatactgaaatgatcacaccgcgggtaatgtatgcttccgcaagccgtgggaccgatgcatttttcgctggaggaatcaagacaagcgaaaacgggggtcctgatgttgtgaacgttgctgaaagatacaactccgatacaaaaacgtggaaagcgatgaaagcaatgcacaagcgaagaaaatttagctcgggatgtttcttgcggggtaagttttacgctcttggtggtcgagatgagaatgatgtgtaccttacttgtggagaaagttagtatgagttaacaaattcatggaagt

SEQ ID NO: 168659 - DNA, 1170 bp, Arabidopsis thaliana landsberg
aaaagaaacctcctttcaaaaaaaccatttctttatcatcatgtaacctccaaaaccctataccataataaaccattcgaaacatcccaaacgcaaatgggttttgctctgatccaccaaaacacatccgccaacacaaccaccaccaccacaaccggcgagagacgaggccggagatcaaagcaagcggagccagggaggttcctaggagtccggagacgtccatggggtcgttacgcagccgagataagagatccaaccaccaaagaacgtcactggctaggcactttcgacacagctcacgaagctgctcttgcctacgatagagctgctctttcaatgagaggtactcaagctcgaaccaacttcgtctacactccaactgatgtccacaccatcctcacaaaccctaatctccactctctcattgtctctccttacaataacaaccaatctttcttaccaaactcttctccacagtttgtcatcgatcatcatcctcattatcaaaactatcatcaaccacaacaacctaaacacactctcccccaaactgtcttacccgcggcttctttcaaaacgccagttcgtcatcaaagcgtggatattcaagcgtttggtaatagtcctcaaaactcatcttctaacggctcgttatcttcttcactagacgaagaaaacaacttcttcttctctttaacaagcgaagaacataataagtccaataacaactcgggttacttggattgcattgtcccaaaccactgccttaaaccacctccggaggccaccaccacccaaaatcaagccggagctagtttcacaactccggtagcaagcaaagcctctgaaccatatggagggtttagtaatagctacttcgaagatggtgagatgatgatgatgaatcatcatgagtttggttcgtgtgatctctctgccatgatcacgaactatggtgctgctgccgcttcaatgtcaatggaagattacgggatgatggagccgcaagatttatcttcttcttctatcgctgcttttggagatgtcgttgcagacactacaggcttctactcagtcttttagaacattctatattatatatgttttttatatatgcaataatattattagtatttacgttattcgatggtcgtttgattgttgttg

SEQ ID NO: 168660 - DNA, 574 bp, Arabidopsis thaliana landsberg
gtttgcggcgcgtgcataaaaaggatggcgacaccctgatcattgccaagcgtgggcaccagcaggccaatccggataccggcgagcgcgaagtgaccctgaatgacggctaccgttatcgcggcgaagccggccaggcgcaattcgacatcgtgcgcttcggtgaattcaagaccttcatccagccgcccaatttcgtcttcaccagcagcaagcgccgcctgtaccagaccggcgaactgtggggctctgccgatccagaggaccgcgccgaactccagtggcggttcgctgcgccgatttcggtgctgattctggcgctgctggcggtgccgctgtcgcacatccgcccgcgccagggccgctacggcaaattgattctgggcattctggcctacctggtgtactcacagctgatcgcggtgggccaggcctggatcgccaagggacatgttccggccgggatcggactctggtgggtgcatgtgctgatgctcagccttgccctctggctggtggccaagcgcgcgggcagggcatgaacaagatcgaccgttacatcatcgtccacatc

SEQ ID NO: 168661 - DNA, 868 bp, Arabidopsis thaliana landsberg
aaccgatctgtgagagagctgccaatcgacttgtttggcttataccctagaattgccgtgttgttcgtgttcttgtataacactaaaagaattgactctacatgatttatgtatcaaggttgtcccggcttggtttcgcttgccatcactcaaaacgttgcaccttttgtcggttaagttctcgagtgacggatttgctgcaagtatatcaagaatttgccctgctcttgaacgtttggctgcacacggaaccaacggtgtcaatgtgatgatacccaatatctatgtgccttctctgaggagcttatctattcgatcctcgagagagctgaggatcgacttgtctttgaaaactttcagaaccctaaaagaattgatacttcatgaattaagtatcaaggttgttcctccttcatttagtttgccatcactcgaagcgttgcaccttctatccgttaagttctttggcgatgaatctgttgcaagtcttttaaaaatctgccctgttcttgaacatttggttgtagaccaaatcaaaaatgagaacgtgatgataaccaatattgatgtgcctactttgaggaacttatctattaggaactcgaaaggaaaaggcacatacgttgagggaagtaaaggatttgtgatcaaagctccttcattgacagatttgaactttgaggatacattgagtaactttcttatgtttgaacctatgcctgaggtgatcaaagcggatattcaggttatttgtgaccaatctgagaacttcatagggtctcttacctccatcccccatctttctctttgttctctaacaacaaagaattttctttcttactctaataaatgtcaagatttctcgttt

SEQ ID NO: 168662 - DNA, 546 bp, Arabidopsis thaliana landsberg; identical to SEQ ID NO: 72206

SEQ ID NO: 168663 - DNA, 1528 bp, Arabidopsis thaliana landsberg
cctttcctactaacttacgatatatcgtgaaatacaacaaatctacactaaactgacggaattttctatgttttttttggtacattggttttggctggttttaaatactcttaatatgctcatttggcactgactcacaaattctaacccaaatttcagctcatatatcagaagatgcatggaggaatgatttgcaatcacaagacctcccaggtttagaattttttgagatgaataccatacaaactgccaccaataatttcactctatcaaacaaactcggtcctggtggatttggttctgtttacaaggcgagaaacgttttatcctctttgctctttttcttttctgtcatttcttgacatgacatttccaacttgtttcagggaaaactgcaagatggaagagaaattgcggtaaaacgtctttctagcagctctgggcagggcaaacaggagttcatgaatgaaatagtactgatatcaaaactccaacacagaaacttagtccgggttttgggatgctgcgtcgaaggaacagagaagctattgatttatgggttcttgaaaaacaaaagcctggatacttttgtctttggtgggtcacttcttacccctttcgtgtagttttcccctttatatctggaatttcttatctgatagcttgtatacttagatgcaagaaaaaagctcgaacttgattggccaaagagatttgagatcattgaaggtattgcacgtggacttctctatctccaccgtgactcacgcctcagagtaattcaccgagacctgaaggtcagcaacattcttctggatgagaaaatgaacccgaaaatatcagattggtttggctcggatgtttcagggaacccaatatcaggaaaaaactcgcagggttgtcggaactctgtaagaaccatcccttgataacatattaaactagattagtagtcatatattaaattgggtgaaactatttgatctttgaacagaggatatatgtctcctgagtatgcatggactggcgtattctctgagaaatccgatatctacagtttcggagttctgttgttagaaatcatcagcggaaagaagatctcaagtttcagctatggcgaggagggaaaagcacttcttgcatatgttagtaagactttatgttttcatgcatttgcagaggttgcaaaaggtttgttgctttgatattcttaagagtggaaactgaaaaacaggcatgggaatgttggtgtgaaacccgagaagttaattttttggaccaagctcttgctgattctagtcacccatctgaagttggaaggtgtgtacagattggtttgctctgtgttcaacacgagcctgcagacagaccaaacacacttgagttgctgtctatgcttaccacaacatcagatcttcctctgcccaaaaaacccacatttgtagtgcacactagaaaagacgaatcaccgtcaaatgattcgatgatcactgtcaatgagatgacagagtctgtgatccaaggacgt

SEQ ID NO: 168664 - DNA, 2931 bp, Arabidopsis thaliana landsberg
gctgaaattcatctagattcaaagaatctccttgatactattaaagatggtaatcaaactccaagcagagaaaaatcaaaagctatgatttttctgcgacaccatctccatgaggatctcaagaatgagtacctcagtgtgaaagatccacagatcctttggaacgatctaaaggataggtatgatcatcaaaagacagtgatcttacctaaggcccgatatgattggactcatctgagactccaggactataagtctgtaagtgagtacaactcagccttgttcaaaataacatccaaattggagttatgtggagagaaaatcacggatgcagataagttggagaaaacattctctacttttcatgctaataacattgtcctgcagacacagtaccgtgaaaagggattcgtgaagtattcccaacttatttcttgtctccttgtagctgagaaaaacaatgagttgcttttgaaaaatcatggactacgcccatcaggttctgctccattccctgaagcgaatgtgacatcctatggtcaagaaagtggttacaaccgtggccgtggccgtggtcatggtcgtggtcgcggtcgtggtcgtggacgtggatacactggaggacgaggcagtggagttcattttaaaaactcaaactctcacaaggagtgggaaaacaaagatggtaacaaacaagtgaaaacaccatatgcgaatatctgttaccgttgtggagcgaaagatcactggtctcgtacgtgccgtacaccaaagcaccttgttgagctctatcaacaatcagtcaaaggcaaggggaaggatgttgaaacaaatttggtgtatgaagacggagttgatgattttgactttgatgatttcactcacttggacattgacgattttcttcctgaagaagagacaaagtgatcaaactacaactatttgaagaactatgttttatttctttatttatttcttttgctttcagttatttgatttttatttatttggctttcagttattttattttacgaattattattaaagttgatttattttaattattggattcattatcttatttatgatattaatttattttattttatttatttgaagaaacaatgaatggtggtgatatttgcttggcagacagtgcaactagtcatactattttaaaaaataagagatatttctcttttttgacaatgaaagaagcaagtgtaactaccgtaacaggtaatgcaaagataattaaaggctctggaagagcgaatatatcaatgcctatgggaacacaattagaaattgtggatgctttatactctcctaaatctcaaagaaacttattaagttttaaagacatccgcagaaatggatatcatattgagactatgagcgaaggtagtatcaaataccttcaaatcagaagtaatatccaaggctctaaaaatattctggaaaaactacctgcttttgccactggtttatattatactacaattaatacaattgaagtaaatggtatagtaaaccagaagtccacaaaaaacattaaactttggcatgaccggttaggccatcccggtacaataatgatgcgaaagataatcactaattcatgtggacattcattaaagaactagcagattcgtcctaatgatttctcatgtgttgcttgttcacaaggcaagttgatgatacggccttcaccagctaagataaatttcgaatcaatcaattttctggaacgaatacaaggagatatttgtgggccgattcacccatcatgtagaacctttagatactttatggttttaattgactcatctagtagatggtcgcatgtaaccttgttatcaactcgaaacctggcgtttgcaagattgcttgctcagttgattagattacgagcacattttccagattttcctttacagaaaattcgtcttgataatgctggtgaattcacatctcaagcttttaatgactattgtatgtctattgggataagtgttgaacatcctgtagcacatgttcacacacaaaatggtttagtagaatcactaatcaagcgtcttcaattgattgctagaccattactaatgaaatcaaaactcccaatatcagcttggggacatgctatattacatgcagcaggattagttcgcatcaggccaacaagtaatcataagttctctccatctcaactggttctcggtcatgaaccaaatatttcccatctcaaagtttttggatgtgctgtatatgttccaattgctccaccacaacgatctaagatgggacctcaaagaaggttgggagtatatgttggttatgatttcccatcaataattaagtatctcgagccatccacatggaatttattcataagctcgattcgcagactgtcattgtaatgagtctgtttttccaacattagagggatatattagcagtaaggaaaagatatactttggaatgaattatcaatgtcttatcttgatcctcggactaaagagtgtgtattagaagtccaaaagttaattcatttacagagcttagcaaatcagttgccacatgcattcactgacccaaaaagtgtgatcaaatcacatataccggctgcaaatgctccaataagaataaatatcgcagaaggacaaaatcaaactgcaaatgagtctaaggcacgtttaaagcgtggtagacctattggttccaaagataaaaatcctcgaaaaagaaaaggggcagaaattggcatatataaaacagaggaaataattacaaatgaagaatctccaaaagagaccttagacatgacacagaaagaaattcaggtacctgacaatgaagagatctcaattagttatgtctggattaaaatggaaccgaaagcaaatcgacgtctatgatattttttgcatg

SEQ ID NO: 168665 - DNA, 777 bp, Arabidopsis thaliana landsberg
cttgtccataacaagaaccaaaccttcatcaacctacgtggcattttgattggtaacccgagtctgggcaaggacgatatgggtgggtatgagtttttggcgagccgtggttttgtccctgaagaaactttccttcgctacaagaaaagctgcggacatgataaccctccagatgttgcgacgttttgcatggatacgagtctgaatttcgaagatatattagaaaacatgaacaaatacaacatattagctcataagtgcctaaacgccacgttgactaatcaatccaaagaatgcacaacggtgatgcagtctgatccgtgcggagagcgctacgtggaagcttactttaactgggacgaggttcagcgttcaatgcacgtcacgaaaatgccgtacacgtggaccatatgtagtgaagccctcggatattcttattggaaccagacggactattctgcatcgatgctacctattctcaaagagctgatgaaacatgatcaacttcgagtttgggtgttcagtggagacacggatgcggtgatttcggtgacagttacaatgtacgcactgaagatgatgaatctaacggctgttacggaatggcttccgtggtttagtgaaggacaggtgggaggtttcacagaggaatacagagggaattttaggtttgccacagtgagaggagctggtcatgaagttcctctttacaaacctaaggctgctcttactctgtttaaacattttatcctcaactctcctctccctcaaacacca

SEQ ID NO: 168666 - DNA, 390 bp, Arabidopsis thaliana landsberg
actgttgtgaacattgaaggcaagcgcgtcatcatcacgggcggatcgagcggcatcggcctcgcacttgcgagagccttcctcgccaagggtgcgaaagttgtcatcagtggccggcggcccgatgcccttgcgaaagctgtcgaagcacttcgtcgcaccagcccgtccgtctggagcgttgccgctgacgtggcaacgcatgatggccgcacagccacgctcgagcaggccctgcatgcgctcggtggactcgacatcctggtgaacaacgccggaggcgtcagagccgggcgccttgagaacacgcccgaagccgaactgcaggccatgatcgacaccaaccttgtcgcaccgatcatgttgatccgtgccactttgcctgttcta

SEQ ID NO: 168667 - DNA, 505 bp, Arabidopsis thaliana landsberg
cgtgatgggtttagatcaaaccctagtaatgttaacttgcctggacaaacaattaccgtggctgcatcaatcaaagcatttcaagctaaaggtttgaatgtaagggacatggttacacttattggtggtggccacagcgtcggtgttgcacattgcagtctctttcgggacaggcttagggatcctgcaatggatcccacactgaaagctaggttaagaaaaacatgccgtggcccaaatgacccatcagtgtttttggaccaagggactccatttagggtagactatgcaatttacagacagataaaaagtcaaaaaggaatccttagaattgatcaaaacttggctctccatggatcaaccagtgggattgtgtcaaggtttgcatcagacaggagattattcggaaagagatttgtcgaagcaatgcataaaatgggtgcaataggagttcttacggaagattctggagagaacaggacaaacatgcagagccatcaacaat

SEQ ID NO: 168668 - DNA, 3766 bp, Arabidopsis thaliana landsberg
tctgatgagggtggggggggggggggcttggtaagttgaattaccatagtttctctgaaagctactttgaagaaaggtcttctggaaagcaggctttggagtgtagttggaggaaccctggttctctgtaaacctgttgccactgaagttgccctgtggctgcccaaacttcctgtatccctgaccatctatgcagaatactcctttctctgactcaggctcaggctcaatagtctcttcttcagctacaaagtggacatgctttttccctatgagcaagttatgaactgaatccagcttagcattcacctctgccatctgatttcctgaaatagctccagcaatcttttttctctcaaaatcagcattcttggtactgttgctacaagcgaggttctcaatcagggtcgtagcatcagctggataacgtgtgttgaagttaccattgctcgctgcatctagaggtatctggtatctccaatcaactcctttgaagaaggtacctaaaagttgtacctcactgaaaccatgatgtgggcaatctcgttggtactccttgaaacgaacctaagcagccttgaaagcttcagctggaccttgtgtgaaggtagacagcttgtttctcaactcctcatacttagcatcatcgtaaaaattgttcaagaaggctatcttgatgcttctccaagtcttgagggaacctgctttaagttatttcagctaagaagctgcttccccaacaagtgaataaggaaaaagcttgcacagtaggtagtcctctgagactccattagccttgatgctcagaacaaggtcctcaaagcgctctatatggtccattgcctgctcatgagataagccatggaaagaatgctggccaactaaagcaaagtagccaggcttcagctcatagttgttcctctggaagggtgtgggtacgatcgctgatcgattagcaaagaacaggtcaggccagttgaaatccccaagagtacgacgtggtttcgcagctgaaggaatagctgcaggaatctggtgttggtgttgatcgacacctatgttgtttcgttcgacatcaatcgcatcgtcattcttctcccgagggtgtcgatcgacaacgagccctactgcatctctggcagctaattgcgcgttgaggcgcgcctaatttgcatcgacgtcctcaagtaggatgattccatgataatccaatctttgaccagcctcattgtaggcttgcccatcctcatcagctcctatgactctttcagccattgctaatctctaagttttcccaagtccaaaatagacaagttgataagctccttctattgtgtgctccttgtttgcctagccatacacctgaaacacagaaaagaagaaaacaaaaaaagcgtgagtaacaaaataaacgtaaaagctagacaaaatctctaaactaaacacaatgaatgattcccaagaacttcggcaacgacgctaaatttggtatggttcaaaattacctagaactactctctcaaataagagatcaattgcagtattttaggatcgaattcacggagttcttttgttcaaacagtcagttaaaaatcgagattaagctagcagggtatgagtgaaatagtaagtaaacaaaacaagaaagcagcagattgattagtttgtaagcgattaggaaaagaggtaggaacagggtattctcaggatactattggttagtcgatctaatactagctaggttattatcgaaccattcttaaactcaaactctaattttggaataaccggtggcgttccgcgaaactccctatgcctagagctaagaataaccggagaaaccgagaaatcttatacttaagcatgcattataaacgagttcaattcagttcacctaagtaaataggccgattcttattacacacctataaaccaggctcatcaaataaaaagtctaactatagatacctatggtgggtatatctattgtctggattcaatttctagttaattactctagaactagcattaaaaacaattaaagatgaagaattttatagataacctaacaaaagggcgatctactaaaccatatgaatccctaatgagaaactctaaacctaacaagcaaactactcagacatgggattgaaataaacaacatatttgagtaagaaagcataaacaaatcaataagagaaaagttagaaaagatctctttactgtattgaaaactgaatgaaactctgaagaataatcgatgaatagggttttgctcccaaagtacaaaagagataaggagattagcctctctaaccttaggtctaaacaatgaccttaaaaactatatatatgacctaaaaacgtgatgggccttctttggaaataagggaaagttctaggcagaatttggaaatcttcaaaacatcaataagttgcgtcttcaaattgccgtcaggtattggagcacgcggtagagtgtgttgaactctcggctttactgctacaaggaaattttcaccttgaggcattacctgtggggttcttgctatcttctccagcacttcggattctgaatctaagtgggacacgcataagttcattgcctctatccctcagcaagcttcttgagctccgatctctcatcttgagagactgctactaccttgaagaagttccttcccttgaaagtcttacaaaaattcaagttctggacctctgtgccactcgtattagggaattgccaagagggttggaaactttgaacagcttgagactacttgacctctctcgaacacatcacctcgaaagcattccagatggagtgatccaacatttatctagtttagaggttctagacatgacgcttagtcatttccactggggcgtccaaggacaaactcaagaagggcaagcaacacttgaagacattgcgtgtctccatcgtttgtcggttctctctatcagggtcgtatgtgttccacctctttcccctgaatacagttcttggatagaaaagttgaagaaattccagttgtatattggcccaactgcaaactccttacctagtagacatgacaaaaggagagtgacaataagtagtctcaatgtttcagaggcattcattgggtggttgctagtgaatacaacttccctagtgatcaaccattgctggggtctcaacgagatgctggaaaacttggttattgatagcacaagtagcttcaacgttttgaggtctctaacggtagatagttttggtggaagtataaggcccgctggtggatgtgttgcgcagctggatcttctacctaacctcgaagaacttcatctgcgtcgtgtaaatctggaaaccatcagtgagctcgtgggtcatctggggttgagatttcaaacactgaaacatctagaagtcagcagatgtagccggctcaaatgccttctctcgttagggaacttaatctgtttcctgccgaacctacaagagatacatgttagcttttgtgataggcttcaggagctgttcgactattctccaggagaattttcagtctccagtgaacccttggtacctggtctgcgtgtcataaagctgacgaatctcccgcggttaaacagattatgtagccaaaaagggtcatggggatctttagaacatgtggaagtgataaaatgcaatcttctcaagaatctacccattagctcaaataacgctcctaaagtcaaagaagtaagaggaggaacacactggtggaacaacttatct

SEQ ID NO: 168669 - DNA, 406 bp, Arabidopsis thaliana landsberg
aacgttgacctgttatcaaaacttgtcacgccggaaaacacccttacgcgtgttaagacacaaaatagcgccgacagctatgaatatttgagaaatgcaggtttttcggccaggatatccttttttggaatccatgtaggatgctgtggatatgagcctatatgtgcatctatcttaagatcaaaccctacttgcgacatacaaaagggggaattatgaacgaattcacagcgaaaaactaatagatttggagggtgactgggcagatgatcggggagacatagattcgaattttaaaacatccttaagtgcgagcttacgatgatcagcctgacatacgactctttgtgatgaacgaagcattgatggaattacaaacggagtaaggattacacgggtggttgtg

SEQ ID NO: 168670 - DNA, 772 bp, Arabidopsis thaliana landsberg
  unsure (1)..(772): unsure at all n locations
gattctcttgttactatctagtccctctaaactagttcttgaactgactttgtaaaaaatggctttcttgaattgattctctgttaaagaaattggtttcttttgggaactgtttgttacaattaaacttcggttacagctaaagaattttattgacttctgacatacatgcttgataattnnnnnnnnnnnnnnnnnngcttcagaattacgaacttttattcagggtcagtatgaaattatctcactgagtggatctatattcggtgcgagcacgggggtaaaactggtggccttagcgtttgtttatctaattcagatggtcagatctttggtggaggagttgggggactcctaaaggctgctggtccagtccaggtatctttcctcttgtcttatagtttaatttacatgtgtgcacaaactcacctgaatctagaaaatggaattccttgattatttgccaagtttgatagggatagtctttgtgctcttggctttggtttcccgtacaggtggttcttggcacgtttcagctagagaaaaagaaggatggaagaaatggtgcgaaaggagatgatgcttcgggaagtagaaacatgttaccttctccttctggtacagaatctttgtttgggctaccatcccgatatggaatcttccggaagaaatccaaacgatgagcatcatactattactagtagtgcattgggtggtggagctcatttcatgatgaaaccacctcagggcatgcacatgacacatgcccgac

SEQ ID NO: 168671 - DNA, 1093 bp, Arabidopsis thaliana landsberg; identical to SEQ ID NO: 24053

SEQ ID NO: 168672 - DNA, 563 bp, Arabidopsis thaliana landsberg
catattactggatgaaaaactaaaccgtattaaaccaaatcggtttaatgaaactattgtaatcatctgtaaatgctcttcgatagttaagcttttaatgtcattatatttgtttctgtaaaaattacaatatggactatcttaagtgaattgaaaagaaaccaaataaatctaaggcattgatcacgatttggtttattatatcattcacataaagcccggattatatgtcggaagctatttattattgtatttcttaaactcacatatgttttataaacttgcagccatcgatggaaattggttcatggcccaggatctttggatacagaacacggctggaccagcaaagggacaggctgttgctcttcgagtgagcggtgatgctgtagtcatctagcggtgtcgcattgatgcttatcaggataccctctatgcccattcatacagacaattttaccgtgactgcttcatcacgggcaccgtagacttcattttcggtcatgcctcagcagttttccaaaactgtcgaattgaggcccggaagccaatggaaggacagg

SEQ ID NO: 168673 - DNA, 675 bp, Arabidopsis thaliana landsberg; identical to SEQ ID NO: 45137
  unsure (1)..(675): unsure at all n locations

SEQ ID NO: 168674 - DNA, 455 bp, Arabidopsis thaliana landsberg
atggcaactccaaccaacaaagagcatttctcgggtggacttgcaaaggttttggcagaaaaatggcaagttgacgtaatgctcaaggcaaagaatagtgatgagggttcagctatctctgcccacaaacttattctggtctcttctttcatcttctctctttattgatatcatcatctgattcaagaatcactatgatttttttatatttttgctttgtgtggttaatgaagttttctcaacgtatatgttcggaatttgaataggcatcaagatcggaggtttttaagaatatgttcgaattagacgagttcaagacttcgactaaacatgtggaaacaattactctttcagagatgaaacatgaagagttagaagctttccttgagtttatatgcagtgatggctcaatgaaatctgacaacgtaaaacaaaatgaacgctcactctatctt

SEQ ID NO: 168675 - DNA, 480 bp, Arabidopsis thaliana landsberg; identical to SEQ ID NO: 73146

SEQ ID NO: 168676 - DNA, 1086 bp, Arabidopsis thaliana landsberg; identical to SEQ ID NO: 35016

SEQ ID NO: 168677 - DNA, 1060 bp, Arabidopsis thaliana landsberg
catggaagatcataaacttaggtacctacagagttttattcctagaacagccttaagtttggaagacctggtaagagtcgcaaggacatggcaagaaagggctcgcttttgttacacagaagatgtaagacttagtagcgatgaatatgtgaagatgttaatcgttgatgcgagcttcctagtagaacttcttttgaggtctcagtttgatgtatatagaggtatgctagataggatatatgggaagcaaaagatgattgtcgatgtgaaccatgacgttatgttacttgaaaatcagcttccatattttgttgtcgaggggatgtttggattgctacatgttgactaccatagggaacttccccctctgactcgaatcattcacaaccacttcaagaaattctggatgagcatcccttcattttcgagaagcatttctgattcaaagatctgtcattttgttgaccttctgcgatctattcacctgcctttggttttgagttttcctggaggaagcatgaggatgatggactctgtactgagtgcaaaagagattcaaaatgccggtgttaagctccagcccgcagataacaacacctgcgcacttgacataagctttgcaaacggagtcctcacgattcccaaaatcaagatcaacgacatcacagaatctctgtacagaaacatcatcttgtttgagcaatgtcatcgtttagatgcttacttcattcattatatgaggttcctcagttgcttcataagatctcccatggatgctgagttgttcattgaccacgggatcattgtgaacagatttggaaatgcagaagacgtttcgaggctgttcaatagcatattgaaagagacaagttacagcgggttttactataagacagtctatgggaatctacaagcgcattgcaatgcgccttggaacaagtggaaagcaactctgagacgtgattatttccacaatccttggtcagctgcttctgttgtggctgcctgtgtacttctccttcttactttcgttcaggctatatgctctatattagcttta

SEQ ID NO: 168678 - DNA, 3439 bp, Arabidopsis thaliana landsberg
atctccatcgaaccaacaatatctctggatacttcctagaacgctacgaaagaggatacaaacttgataccagttttttccatgagaggagagatttggataacaaaggagtctccatcgattttctgccacaaggagaggtaaagatcaaagcttgtgatgcacgtcatgggatattgctttgttataatgatacaagaccaataccggaatacatagtctgcaaaccaacaacaaaacagtatcagatcataccaaacccaaaattgtgtagccgtgataagtcactcggtataacggtaactggattggagcctttccggtataaagtattcaggctttttaacacgccgatatgaatcctttcagtacttttgcgtgcgaagtttttgattccgattcgtttatgtggaagaggttaaaaaatctgcgtctaccaagaacagaccgtttaattctttcaaacccggtacaagcttcggggttcttgcattggagatcatggaacaacaaggtgatccggttctgtctcaaaaccgaaacttggtctttcgtacgtatccccaactttggtagtttcccagagttggtcagatacgaagggaagctaggtgttattcttcactggataaacaaagatcaagaagatgttcacggattatgggttttaaagagcagttgtggaaaggcgtggataaaagtgaaagatattaaaagcattggattaggtcagattgtgtggactccaagcaacgacgtcgtaatgatttctagttgggatcgtgtttgcctttacaaccgtaacacagagacgttgaacttagttcatacaaacaaggattttgcctcttacgtttgtttcctgttttgttctgattacgataaggttgatcttgacgaaagaagaaatggaccgacaaatgcaaactagttaacaaggctcaacctggggtataaaataagggagatttactgtgatgggtaacaatttaggtgttattaccagaatcagacagaactttttttaattactgtgatattttcgtctttttcttaatacccagcgtgcccctactaaactttaccggaaaaaacgtaattacagggaatgccactgccacgtcagaatttgctgacgtgtattaaatgaactcagccgtaacgcgatacagcggcagttacggctgagttacggtatgttgcggctgacttacgacaaaaatatatgagtcataacaaaacggcgaagtatgagtataactcagccagacgttacggctgagttgtaaaatgttgcttgagttatagtataactcaggcaacggtatggttgagttaaggaatgtcggtcgagttataagaagttatacgataacccaaacaacgttatggctgagttatgagaaaacggctgacttatttcctcgacacggccgagttatagttttggacggcttagttatggaatgatgtgacggctgagttatgatcgagtgttataaatcagccgtaaagagctcgattactaaataactcagccttgttacggctgacttatgtgcaaaagattaattactataatagcatgcagttacagccgagttttaaaacgttacggctgagttagttgagttacgacattacacggctgacttaactttgtttttttcctgttttaattactgtaatagtattcatgttgcggctgccttaaagatttgcttcatggctgtgttatgaactgttcgtttggtggctgacttgccacgtcatcacttcaaaacggcgttgactgtaataacccatgtcatcattccatgtcagcatcctcgacggaaatacgaaacgtcccttgcttctttaaatcattttcccagactgtgttcaccgcctgaacgttacaacatcaccgaaactttcttttcttcattcatcttctcatacatcttcaatttctttcatctttctcttgatatggctggtcccgctacggtcatagttgtttctggttcgtgggtaaagaaacagagattcgtatttaaccccgacgaaagagggtgtagagttgtgcagctataagcggaaagaacagtttacgatagtcttttgaagatggtggtcgatgattacggagtgaatcagtcgactcatcagttacggctgagttacatgttctccaacaagactttgaaaaatatgtcgttcgatactccaacagtttatatctctaatgatcaacaattgcaatgttatctaggtttgacaaaattcgagcagctacgtctctgtgtggagtttacagctgaagattcaagtgatattagtcggaaggacggatcaagaggaaggggttcgaaacgccctatcgaatctgactcaagagcagaatctacattcaaagttccgggtggggggtttgaaggcgtctgttacgattatcaagacgatgaagcaggaaacgatgaatcaggtgatgatgaagaatgggacgatgaatcaggtgtcgatgaagcatctgacaaagaagcaggtgacgaagaagaagatgatgaattttctagccggtttgatgttttcgacgactccgatggtgcctcatctgatgatgaggactttgctgtatacggcgagcctaataataaagacgaagattcaccgaaacttactccttcgaagagaactcagaccatggaaatgatcggatctgctgggagcctgactgatttaaagttggagctgtctacgctaacactcgcggtaggccaacaataccgtagcaaattcgatttggagtatcgactcaaacttcttgcgataagggatgggtttgattttgatgtaccaacttctaataagactacaatatcttacgagtgctgggtggatagatgtctttggagggttcgtgcatctagacaaggaaatgatcccaattttcatgtttatatatacgattcggaacacacatgttctgtgacggaacgttctggtcgatcccgacaagcaacacctgatgttctgggagttctttacagggactatcttggtgacgttggtccggatgttaaaccaaaatcagtcggaataatcatcacttagaattttcgagtaaaggtaattacaatgtttcggctgacttactatttatctgctggctgacttatagatattttacggttgacttattgatatagtatggctgacatataattacattctggttgagttatgactttcaaggctgacttaagatcacttgttggttgagttgtggtatagtttaggctgacttatcgattaatatgtttgtgttaacagatgagttattggaagtcatacaagacgctcaggtttgcacgggagctcactctgggaacccctgatagtaattttgaaaaactgccttcttacctatacatgataagacgggcaaatgggg

SEQ ID NO: 168679 - DNA, 658 bp, Arabidopsis thaliana landsberg
aattccttttcattcacattaatgtgttaagatgatatttcattgattcattttgtgaaaataacataaaatacacactctttacgagttatgtctaaaacttcacctaattacaaagaatatttgatatatttcaaaacttttattggaaaagtaaactattttaaacaaggcttacaagagagataagtttgttctcaattgttatatattttttttgaatacccccattatatttacatgatattatgcaaacatttttttcagttagtagcaggacttttgggagtagaatcgggtcaagacgcggtgattagaggtatgttatatgctcgagcggcacacatagtctatccttatggtgtcacggttgcggctttcacggataagatttcggatctaaggaacaaattgggaaaagcgggtgtgaaagatgagggattgatcgtacctaaattcatgggtgcagaaggacaagtgattgggaatgtattggtcggtaatgagctctcgctttcgtttgatagaacacctgaggagattctacggattgtgtatggaagtggaaatgaaagtgttcccggtggattttaccctaaaggagcggatggagaaatcgctaagtcttatttggttactgtcgggagtgagtgaggtt

SEQ ID NO: 168680 - DNA, 3058 bp, Arabidopsis thaliana landsberg
  unsure (1)..(3058): unsure at all n locations
cttcatccatcagtcggaacttcatctatctctactgtacatggaatagagcaggtaaaaacacatttgtatatgttttaggaggggaacatacatattcaggatgaccttcctaaaccagaggtgattacttccattcgactttttcgcggttgtaaatgtctgttcatttgtctatctatgtttgtgtttgtagaaactgatataacccgattttcaccgattttatctatgttttaggtatacaattttgagtctttatgttatttctcgagtctttttagtgtcttttcaggtattctatgcagtgggacaataatggagataaggagacattttggagcaaaagttaaggaaaagagctaaggacgattttggttcaggaatcagcgaggagtgtcgatcgacacactcttggtgtcaattgacaccaattttggcccagcagaagtccatgatgctttcaagtttacagaagaggaaatttgccccagaagacttcccnatttgcattattagtccctggacgtttttagggtctttatgtattgtttttagacctaagtttcatttatcaagttctttgcaaactctattgtgagagacataagctattcatccattgttcttgagagattcattccagatattaatacagtgaagagatcccttctttccccttctctatctactgtgtttatgttttcgcactcaaatatgatgtttgcttcatccaatatgtctgagtaatatgcaggtaggaatagggtttctcattagggattcatatggtttagtagatcgccccctttgctaggttatctttagaattcctcatctttgattattcttaatgctaaatctagagtaattaactagatcttgaatccagacaatagatatacccgcgataggtatctgtagttggatctattatttgatgagcctggtttataggtgtgtaataagaatcggcctatctactaaggtgaacaattgaacttttttaaaatgcatgtttaagttaaagatctctcggcttctctggttattcttagctataggcataggaagttttgcggaataccaccagttattccataattagagtttgagtttaagaatggttcgataataacctagctatcattagatctactaaccaataatttcctgagaataccctactcctatctctttatttaatgtttcacatcaaatcaatcagatgttttcttactttgtttactttttatttcagtcattttctgctagcttaatctggacgtttgattcatagtatgaacaaaagaactttgaggaaattcgacccttaagtgctacgacgatctcttatttgcgggagtaagcttaacgcaatttgagctatatcaacctctttatccagattgcacaaacaacagtaatctctactattgtttcactctttaggctaaagactcagggtggttggtctacttgagtccttgtcaaatatgctacccaagggtaatgtcttgcacatatccttgtacgaggtgaagaagttttttaaaacttttgatatgggttatgaaaagatacatgcttgtgtaaatgactgctgtttattcagaaatcagtttcaggagcttgacacttgtcctaaatgcaattcttcacgatggaagattaacacgcgaactggtgaggtgaagaaaggtaatccatagaaactacttaggtactttctgatcattcttagtctcaagaggatgttcatatcagaggacatgaccaaagacttacagtggcatttcactaacaagagcaccggtggaaaaatgtgtcatccggtagattctgtgacatgggatcaaatgaatcagaagtatcactcatttgctgcagaagaaaggaatattaggcttggactctccacatatgcggttaatccgtttaacatgacgaatgttcattatagtgcttggcctgttttgctagtcaactacaacatgtcacctgacaagtgtatgaaggaagagaacatcatgttgtcattacagattcctggtccaacccaatgtggaaacaatatagatgtgtacttagaaccccttattgaagatctaatcgatctgtaggagaagggaaagtcaacgtataacgcattcagtcaaaccactttcacattaaaggaaatgcttatctagaccataattttcctgcatacggaaatgttgttggctataaggtgatgggcaaaatggcatgtcctgtttgcggaaaacatacagaaaatatgtggttaactaattgtagaaaacaagtatacatgtgccatcaaaagggtttgctacccacacatgtttatcgaggaaagaaagcatggtttgatggtaaagctgagcatgggataagaggtcggattctgagtggtcctaacatataccaaatactcaaaaattacaagaatgattttgggaatgtgaaagtaacaagaaggaagagaaatatgaaatagtgtgttggttcaggctcaaacactaatgatgataccagtgaatcagaggaagatgaagaacaagtagatgacgatgagttatctagttggaagaagttgtttatcctttttacgttgccttattggaaagtatgttcctaaggtgttttttaatttatcatttcagaattgatcgattttcaatgtctttagggggggttattggatcattgatttgaatggatttgaaaatccaagtaacatttggaaatccacacagaatctattgttttaaaaatcagacaacgtggatttgaaagtcaaataatatggaattgaaagtcaaataaagcagatttgaaattcatacaaaaggattacaaaattaaaaacattacaatctttaaaaataatctctcacgttctgatctatgaattctcaattgaatcattccacatgtttgatgttatcgtttctctccactgattggcatattctctctatttatcttgggttgtaagaacttcggcaatattgttaaaaatttccacgacaacttcttctacactttcgtc

SEQ ID NO: 168681 - DNA, 332 bp, Arabidopsis thaliana landsberg
aatggctgtgtggcgtagaaagcgctaacaaaaggtattgatccattcggatcagggtattcaattcaccagtgaggactggatgctgggtgggaaagcttcataaccttgagtgcagtatgagtcgcagaggtaattgccatgacaatgctgtggctgaaagcttctttcaactactgaagcgggagaggattaaacgcaaaatatacaacgaccgggatgaagcgaaacgggatatcttcgattacaccgagttcttttacaactcaaaacgaagacacaattccaataatttgctatctccgatagactttgaaaagcagttcaatcaa

SEQ ID NO: 168682 - DNA, 191 bp, Arabidopsis thaliana landsberg
atggtgtcacagggacggagtgattctacctccggcaagaacaataacccgcccgacggaagcagcggcaagagatctccatcttctcccgcagataaatctccatccaaacgccaaaaggtttctgatcggagacattatttcttatccatctttcgagtgccatctggagcttctggtttgacaatttt

SEQ ID NO: 168683 - DNA, 842 bp, Arabidopsis thaliana landsberg
atgtcgaaagctagggtttatacagatgttaacgttgttcgtcctaaagagtattgggactacgagtctctcgttgttcaatgggggtaaaacttctagctttagaatttttctttgatgaatttacgatttttgacttctttttgataaattttcggtggaatttgattgatttgttgccaaatggaattcgaaatcagagaaattggaattttttagggtttggacttaggtctcttgaagacactttgttttaagtatctattagcaaatattggattttgaaattcaacagtgtgagattcttaaatacttttgtgtgattcttcagtcatcaagatgattatgaggttgtgagaaaagttggtagaggaaaatacagtgaagttttcgaaggcaaaaacgtcaatacgaatgagcgttgcgttatcaagatcctcaaacccgtaaaaaagaagaaggtgatcagttagtagaactcatttctgatgaatttgcatacataaagatggctaattttgctgaaacttgatgttatgcagataaagagagagatcaaaatacttcagaacctatgtggtggaccaaatattgttaagctgtatgatattgttagagatgagcactccaaaacacctagcttggtatttgagtttgtcaacagtgtggactttaaagtattgtatccaacattgactgattacgatatccggtactatatttatgagcttctgaaggtaatgtatcggtatttaccataaatgacttttaccgtacatacaaatgtttatcgtgggaatccagagcttgatgttatttgcattttcaggccattgggattt

SEQ ID NO: 168684 - DNA, 350 bp, Arabidopsis thaliana landsberg
gtagaggcaaaccctgtaatagtgtcattaaggcggacacacatgctctccttatggtcatgtaacacacctggatacaaggctacagaaatattacctttgaaggagatatcaagcaaattccacatcttatcaacggagaaatacagaattttggagtccataacctgacgaaggaagtccaaacaaggcaaaaaagattcacaaatgctaccttcacatggataccaaggcattgcaacaaggcggctgattgtttggcaaagaagttaattcctgccaatgttaattttatacaacatttctttgttcctagaagccttgtacaaatcctccatgaggatcacttt

SEQ ID NO: 168685 - DNA, 1163 bp, Arabidopsis thaliana landsberg
gtcgggaccctcttagtgatgcagtgcatggtctcaaggctatatcttcttggagaaagcttttggaagtcgaggaagatcataatatctgggtagtctcaacgccttatagccaactagtctcggaggtagtgttacctgctgttcgaatagcaggcattaatacctgggaacccagagaccctgagccgatgcttagatttttagagacatgggaaactttgctgccttcatctgtattgcaaacgattttggacacagtagtgctaccaaagttgtcaactgctgttgaatattgggatccacgaagggaacttgttgccatccatgtttgggtgcatccttggttgcctatacttggtcagaagttggagtttctttatcagatcattcagatgaaattgagtaatgttcttgatgcttggcatcccagtgattcatctgcctacactattctttcaccatggaagaccgtttttgatactacaagctgggaacagcttatgcgacgttacatagttccgaaacttcagctggctttgcaagagtttcaggtaaacccggcaaaccagaatttagaacggtttgattgggttatgaagtgggcatctgcagtacccatacatctaatggctgatatgatggagaggttcttcttccccaaatggctggatgtgttgtaccattggttgcgtgctaaaccaaggttcgaagagatccagggatggtattatggttggaaagagttattcccgcaagagcttacagcaaatgagaggatccgaattcagttaaagcgtggtttagatatgttgatggaagctgttgaaggagttgaagtgtctcagccaagagcaaaggcaaatgagcgtacacagtccgtgccggctcaggctcaagctcaggccaaggctcagatggatagcactgaagtgttgagtttgaaagaagtcttggaagtatttgcgcaagagcaggagttgctgttcaaacctaaaccgaatagaatgcacaatggtcttcagatatatgggtttgggaatgtgagtgtcattatagactcagtgaaccagaagctgttggctcagaaagatggcggttggtttcttgtaacccctgatgacttattgaggatgcacaacaatacaactgtttctgcaaaa

SEQ ID NO: 168686 - DNA, 1078 bp, Arabidopsis thaliana landsberg
aatggctcagaagatgaagaaacatgattatcagccacttttggatagaatcaagtataagttctctacatggactgctaggcatttatctttcgccggcagattacagttgctgaagtctgtaatttattcaaccattaatttttgggtctccattttcatgttgccaaatcagtgtcttcttaagctagaacagatgtgtaatgccttcttatggaagggagctccaaattctacaaggggagcaaatattgcttgggatattctctgtactcagaaggagtgtggtgggttgggtttgcgccggttgaatgatttgaataaggtgttggctctaaaacatatttggttgttgtttactgctgcagggtctctttgggtttcgtgggtcagaattaacctcattggccacaaatgtttttgggatttaaacccgtcgtactctggaagctggctttccaggaagctctgcaagctaagacctttagctcgacctttcctgatttgtgatattggttcaggggaaaccgcaagtttctggcaagacaactggacaggtcttggtcctctcattgatatcacgggtccagttggccctatctcagtgggaatgcctttaaatgcggtggtgagggatgcgctgagaggtgatgtgtggtggctgtcttcgagcaggattcgcaaccccactattgtgttgttaaagagctgtgtaccggatgtgaggagcataccaggttgtactaaagatgacgtttatttgtggaaggctgatgctcatgctccaactagatcgttctctgctgcgaagatgtggttagctttgcatcctcctggtgctcaagttcagtggcacaagtctatttggtttaaggatcgggttccaaaaaatgccttcatagcctgggttgcagcttggaacagattacacacaagagatagattaaggagttggggtttttctgttccagctctgtgtgtgttgtgtaacgtggggaacgagtctagggatcacctgtttttcagatgcccgtttagtgaagctgtctggaccttctttacaaggagggcgggtctc

SEQ ID NO: 168687 - DNA, 340 bp, Arabidopsis thaliana landsberg
  unsure (1)..(340): unsure at all n locations
cttgtactgatgtttgctgctctgggccaccatgtaggccctaagnnnnnnnnnnnnnnnnnnnnnnnnnngggccgtcaaacgctgtacaggcgaaagaatttgacgcgggcgggcctcaaagagttcatcagaccctatttgctcaaagggctcgtgatcagccgtcccaaccaggtgtggtgtaccgatatcacttatatcccgatgaaacagggctttatgtatatgacggcctatattgatgtgttcagtcgaaggatcatgggatggggtattggcaactcactgggaacgcaatggtgcctgggatgtattgaggatgcaatcaatcagaatg

SEQ ID NO: 168688 - DNA, 460 bp, Arabidopsis thaliana landsberg
cacaaaggacttggaaaatgataaagagcttgtaaccgaggaggagcttgatgatgaggagcagcttgaacctgagcatgagcttgtaggtgaaaaggagtatggaaaagatgatatcttaacctcattggttttgatacatgatcatcaaatgggcatgtgtctcatttgtactctttttcccttgtcaagttttgtcccaatgggttttcttgacaaggtttttagtgaggcaaatgattcacattcaaatcacccatttgttgatcaacatcatgacataactttcagaacttggcctcaaggaatatatatcaagtccaagtcattttatgcccattacaagcccaagaagagcccaaaccaaatgattaatttgatggtcaagagaagtgacgaaaatagaagttcaaaggtcatctttgaagccaaagaatcttttctattcaaattctatctt

SEQ ID NO: 168689 - DNA, 360 bp, Arabidopsis thaliana landsberg
ttgcatcagtcgcgttcttgttgcggcttgaggaagaaaaagaacacctacactaaccaaaacaagaacaaggacgaattgaaaccgaagatgacaacaacgaatgaagctactacacagcctcctcagcagatgatgagcttgagttttagtagtcatatgtcgagagaagacgaagagatgactcgttctgctctttcggcgtttagagctaaagaagatgagattgagaagaggaggatggaagttcgtgaacggatccaagctcaattgggtcgggtcgaacaagaaaccaaacgtctctctactattcgtgaggtttgaattttactctggttccttttcgaagttagagttttt

SEQ ID NO: 168690 - DNA, 396 bp, Arabidopsis thaliana landsberg
  unsure (1)..(396): unsure at all n locations
gccccaacggcgccggcaagaccacggtcttcaaacctgttgacgaaaattcctgccgcccagcggcggcaggatcgaaactgcttcgccaggacatcatccgcacgccgtcggccaaggtggcgcgcatggggttggtgcggtcgttccagatctcggcgatcttcccgcacctttcggtgcttgacaacgtgcgcgtcgccttgcagcggccgaacggactggccacccagttctggcggcctgccggggcgctggatgcgctgaccccgcgcgcgctcgaacttctggagacggtcggtctcgcagaggcgcggcaccggctcgcgggcgacctgtcctacggaacaagcnnnnnnnnnnnnnnnnnnnnnnnnnnnnnnnnnnnnnnnnggt

SEQ ID NO: 168691 - DNA, 680 bp, Arabidopsis thaliana landsberg
acatgaccatttgtttgtataggatgctctctaatagagaatcagctagacgatccagaagaagaaagcaagcacacttgagtgagctagagacacaagtatgttactctcgcagcgttcttattctttctcctttaactttgtttagctcccttgtcagttgtgacaatctccatttcgtgtaggtttcgcagcttcgtgtagagaattcaaaactcatgaagggtctcactgatgtaactcaaacattcaatgatgcatctgtagaaaacagagttttaaaagccaatattgagacactacgagcaaaggttaaaatactttgttttctctctctgtctaccaaaactcgctattgaaacatgtttgtttttggcaggtgaaaatggctgaagagacagtgaagagactcactggctttaacccaatgttccacactatgcctcagattgtttcaactgtctctcttccttcagagacatcaaattctctagacactacaagcagccaagtgactacaccagagatcatcagctcggggaacaaaagcaaggccttgatagggtgcaagatgaacagaacagcttcgatgcgtagagttgagagcttggaacatctgcagaaacgtattcgaagcgttggggatcagtagctgttaaagaagaatcttgatttgtaac

SEQ ID NO: 168692 - DNA, 367 bp, Arabidopsis thaliana landsberg
tcaaagatgaatattctaatcgttgaggacgactttatcattgcgaaacatctccaatttctactgaatggtttcggttacgacgcaaacgatatcgcgactgattatacaactgccacagaaattctccatagcaaggtttttcacctggccgtgctggatatcaacctcaacggctatcaaaccggaatcgacctcgcgcattatatacgggagaatttcaaaatcccttttctctttctgtcagcccatgaggatatcgccgtggtaaatgctgcattgcaagcagcgccccatgcattcctgcagaagccttttcaaaaaaatacagtgtacacggctgtcaagctggcattgaagaattgcc

SEQ ID NO: 168693 - DNA, 472 bp, Arabidopsis thaliana landsberg
ttgcaggagttattacagatgcacatatcgtaacatacagtactgttgggctacgaaacaagtccaaagatcggacggtgatccaacaatcttcgaagtaacatacagaggaacacacacttgctcacaggggatcccacctccagagaaacgagaaaccaaaccaaaccacacagtagtcgtaaattaccaaaataacctcctcgacaatctcaggatggtacgtaccggcagacttggaagcgaagctttctcattccccgtcaggtcgccgttgtacacttacgagtccatcaacggtggtggaacgttttaccaccacgtgggaagttctggtccgtccgatttcactggattgatctcaacaaatacttccacaggaagttctccaatcttcgacgttaattttcagtttgatccaacggctgagattgacacaggcttccccacttttttccacaattcgatttaa

SEQ ID NO: 168694 - DNA, 446 bp, Arabidopsis thaliana landsberg
tattttaacagaatcggcttcgtcctctcctcgctgctcgttgtgctggccctgctcagctccatgctgttcgacgtcgaccagcgccagtacggcgtggtctacgcgctcggccaggtcaaggaggtcatcagccagcccggcctgcagttcaagctgacgccgccgctgcagaacgtgagctacatcgacaagcggctgctgacgctcgacagcgtacacaccgagccgatgctcacggcggagaagcagcgcgtggtgatcgactggttcgtgcgctggcgcatcagcgacccgttcgcctacatccgcaacgtcggcctcgacgagggcgtcggcgccaaccagcataatcgcgtggtgcgcaacgcgttccaagaagagatcaacaagttcaccgtgcgcgagctgctgtcgtccagcgcgagcagttgatgaccggactt

SEQ ID NO: 168695 - DNA, 499 bp, Arabidopsis thaliana landsberg
  unsure (1)..(499): unsure at all n locations
cgatccgatctcggtgcagatcgccggcgccgatctcaannnnnnnnnnnnnnnnnnnnnnnnnnnnnnnnnnnnnnnnnnncagatcatcgacatcaacatgggctgtccggccaagaaaatctgcaacgtcatggccggctccgccctgctcaaagacgaacctctggtcgcccagatcctcaagtccgtggtcggcgccgtcgatgtgccggtaacgctcaagatccgcaccggttgggacaagcagaatcgcaatgccgtcaccgtggcgaaaatggccgaggacatcggtatccaggcactggccatgcacggccgcacgcgcgcttgcggctataccggcgatgccgaatacgacaccattgccgccgtgcgccaggctgtcggtatccccctgatcgcccccggcgacatcacgacaccggaaaaagccaagctagtactgnnnnnnnnnnnnnnnnnnnnnntcatgatcggccggtccgcgcaaatccgc

SEQ ID NO: 168696 - DNA, 2411 bp, Arabidopsis thaliana landsberg
gaagcaaacaatgaagactactcttttattgctgtgatgaagaaaacacatcagaaacctgatggctcgtacattgatcaacgagcacggttggttgcaaacacttatgaaaagcatgtacaagaacgcttgtgtctacttgaatctgctggggaagagaatctgagagctgaaactattgacaaccatgagaaaaatgaaatttatatcaaggtaataattctaaacattaggctggttttacactcactttaggcttgttagtctatagttttacattcactttagccttcttagtctctggttttacattcatttgttcttgtgatatgtgtagataaaactatcgttttataaaacttgttagatgtttagtgttgtttgcttcaggtttagtgttgacgtgttttgtgcttgcttctcaacggccctaacttttatcattttataaagcgtgttttttttacttctcaacaagtaagttccttcattaggtccggtttagaattggttatcaaatttggttcctaaaagatatccaagttcacatccaaaacaaaatatgtgcatatcgttttatcatttgttctacaagccttgttagatgatatcgttttatcatttgttctacaagccttgttagatgacttgtagtgttttctgtatttgctaatatatttagtctttcattctaggctgatgtatcatctaaacatggccatatatttggacttggggcactaatggagactctaccatctgttggtgcttcttcaagtgcaccacaagcttcggaagaagtagagacgataacgcatcggctacaagagatggaaactgatcttaaaaagagccttgaagagaatctgcaaattcagaaaatacttgaagctatggaaaaacttgttgagacttttgcaagtcaaaatgtctagatccaaatccaccaccaagaacgtccacttaatctagtttatgtatggttccttttagcctaagtattgtttagtttgtattttctttaagttgtgtttctagtttgactttatttggatgttatggtttgttttatttgcattaacctaagtattgtattttgtttatttggatattgttttatgatttctataaattatggcttctattagtctaagtattgtagattgtttatcagatgttgtttaataatttctataaaatatggttcgctataattttataaagagaatgactgcaattagtaaaagcaaaaaatggtaatcatacgtttgtgaccaaacgtccatgtgttgttcatgaaactagttttgtaacaaattgatacgagtttagtaagaaaaaatgtcacaacataaaatcaatttgtggcgtttgtgtgactataatcgagtcactaattgtgacggatttgtaattgtattttggtcgtaaaatgtaacgggccggtgacttaaatatggtaataatctgtgacaagtatgttacgattttattgtcactagttgtggcatagttgtgacagtatcgtccgtcacgaattgtatccgtttttgcgactataataacgtcatcacaatcagtgacaaattgttactgttgttaatcgtcacattcgtttgagacttttttgagacatacatagatttgtgacgattttattgtaacattctaaaattcgtttcagtttcgacacaagaaaattattgtgaccgaatatctttttattgtgactataataatcatatcaatattcagtttttattgttgtggaggaggaaactattcctgatggtttcgatccacacccagctcctgtcgatcgacacccaattcgttcagacaatgtgcaaattccagctgcaaccaagtcagcaaatcggcgaattcccttccccaaaagtcctaaaaagtcaagacaagccttagatgatctcagatgcaaggctatgattgataagctgattgttcagatgcctctagttgaagctattcatctatctcccacaatcaaaaggtatgttaagacaatggtcactgagaatttgacgaatgaatgcagtgttatgatgatttcagagcagggcggcgacatcattcaggaacgaatcccaaggaagctacttgatcatggaacttttgtacttagtttcaccatcaatcacgattctttcccaagagctttatgtgatctcggttctagtgtgaatctgatgcctcgttcagttgttatgcgtcttgggtattccaatcttgagcctacctttattactcttgtcttggcatatcgttctacccgaattccagatggaattcttattgatgttcccatgatgaatgctgctaccaggaaagaccattttcccttaccatttatcgatcagatgttggagatgttagcaaatcataaataa

SEQ ID NO: 168697 - DNA, 1333 bp, Arabidopsis thaliana landsberg
  unsure (1)..(1333): unsure at all n locations
aggatattgcatagagggtgtaaataggtgagtctgacttgtctcttatcagtctgaatgtactactaattagtctcatgagtaatctcctaattgtactacggaatagaaacttgtcccatgtatcaatttctgttttgatgtaatgcaggatgcttgtttatgagtatgtgaatagtggtaacttagaacaatggctacatggagccatggggaaacaaagcactctcacttgggaggctcgcatgaaaatccttgttggttctgcgcaggcgtaagttgtttaaaatgtgactgttgttggaccttttacttgaaatttcaaaaacaactctttaaggggatattgacatgctctgtactacaattttacaggcttgcttatttgcatgaagcaatagaaccaaaagtagtccacagagacataaaagcaagcaatatcctgattgacgatgacttcaatgcaaagctttctgattttgggttagccaagctcttagactcgggtgagagtcnnnnnnnnnnnnnnnnnnnnnnaacctttgggtaagtctaaaatttgtaccctctttggtgatgatgggtttttgtatacatattattaacggtcatgtgtatatgcatcagatatgtcgcacccgaatatgctaatacaggtctattgaatgagaagagtgacatctatagctttggtgtcctgctgctagagactataactggaagagatccagttgactatgaacgtccagctaatgaggtagcctaaaatatgtctgctttgtcaatgtatccaggagttatgaaaatgttaacttggtgttaaaacatgtgttcttgttggcaggtgaatctggtcgaatggctaaagatgatggttggaacaagaagagctgaagaagttgttgactcaaggattgagcctccacccgctacacgtgctctgaaacgtgcacttcttgttgccctgagatgtgtggatcctgaagcacagaaacggcctaaaatgagccaggttgtgcggatgcttgaatccgatgaacacccttttcgtgaggtaaatatatacttaattcaccaaatttggacgaattctctggatatattgaacactttatcatactataacaagtgatggtccaattctacaggaattgttgtgtgttgtacatatggatatgcaaactaattttttttttccccgcaggagcggaggaacagaaagagtagaacagcgagtatggagattgttgaaaccactgaggaatcagctgacacaagcaaagggcctggtcactcagagaacactacaaaacctgagaagactcatgtatag

SEQ ID NO: 168698 - DNA, 507 bp, Arabidopsis thaliana landsberg
atgagcggaagcaccaccggttgtggaggtccatgcggcgcatgtaagtttctccgacggaaatgcgttgctgactgtgtcttcgctccctactttgattcggtggaagggacgtctcatttcacggccgtgcacaaggttttcggggcgagcaacgcctccaagctcctcatgatgattccagccagccggagactggacgctgtcgtcacgcttacttacgaggcattggctaggcttcgcgatcccgtctacggatgcgttggtcatatcttcgcccttcaacatcaggtattcaactatataaaacccaatattgtcacatatttatgtatatataatatatgtttgatgatctatatacattgaaagatttactatgcatgcatgcgtgtatttagttatatagaagttcattgtataataaaatcatcccataacattaggttaaagatgagatttatatatccgcatcttttagccacgtaacttgttacttttataaca

SEQ ID NO: 168699 - DNA, 849 bp, Arabidopsis thaliana landsberg
tcattcttctagggtatttattggtattaaccctcttccatgatccgatcattgtcgctgccctcggcggtgagagtaatccggcggtaggactgttcacttttggagactcttactttgacggtggaaacaaaatgtttaatttgtaagcaaatttcaacatcctccccaaagcttttggccgtacgggaaatcccgcgatgaccccaacggcaagttttctgacggccgcatagtccctgactttatcggtacgttacagttacatatttgtacattcctacgtacttaatacacttttttccaacttattatgcgttctcttctaaaatctactatgcatatcgaccgatccacgatataaaattcaaattggaaacggtagtttatgattgattactaacaatcgttttattgcaaatttattattttgtgatccatgataaagctgaattcatgggcattccggaagagatcccaccagtatttaaaacagccgttgatgttttacgtggagccagttttggcgtcgccgatgcttctattcttggctatccggcaacatccgtacgtaagccagccatcgtccaatttatttcctgtcgattttttgtattagtatttttatcacaaatcgtatatgtatgtagatgacactaaatcagcaagtcgataattttagaagtatgaaatcaaattggaccgacgatttcattggaaggtcactgtttatgatttacattggtaccgaagataaattaaaatttacccagaccaaaccaaatgcagcaagcatttgtcatatcagcaattaatcaattgaagtccgacatcaacgtacgttgctga

SEQ ID NO: 168700 - DNA, 1216 bp, Arabidopsis thaliana landsberg
  unsure (1)..(1216): unsure at all n locations
atgaagaacacgaacacattcatacaatttgactatgggtactattcagaaaaccatgattgattttcaaacaattctttaaggggtgtgttgttgaagacgtcactgttagtagaaaacatatgcaagaagattggaatagatgaaacctcaaggaaattgaacttgagttacattctatgcacatctaagagagagatatctattgtagatgatgatgactttttagggtatctaatggtagtgaatgctaagggaataagaccagctttgcatgtggaggtagtaaataaagaatgtacttattgagcatgtggatagccagatggatagggaaaaagataatggtgtggttggtagaattgagtattatgatctttcatgtgctgctagtgaaggaagtgagagtagtgagaaaattcagagtgttacggaatgggaagatggaacggggattgaactacaccaagaattgttttctaaggagacggtgcaagatttggtttacagagctgcaaataagtattgttttgcgaccgcaactataaaattggatctaaagcgactcatgnnnnnnnnnnnnnnnnnnnnnnnnnnnnnnnnnnnntggtatttacgatgtgcaaaagtaacgagctcaaattgtttcagtgttagagttcacaggaagatgcatacaatcaagcggtctgataagaattcaagcgattgttaacatatcggcacaccacggttagccgcgtctcttttgcatgagaattatccaggtgagtttcaaactccaccacctaaaagcataatgagtattgttcggggaagagtgggtttgcattgttcgtatgctaccgcatggagaggaaaaaaacaacacattagtgacgtgcggggtagtcctgaaaaaaactacaccgacttgtactcttatttatacatgttaaaggaggtgaatctcgggacaatatcatatgtggaagtggatgcacaacaaaagtttaagtacgtattcgttgctttgggtgcttccattgaaaggtttaaagttatgaggaaagttgttattgtggatgccacttttcttaagaccgtatacgacggtatattagttttcgcaatagcccaagatcctaatcatgacaattatatcattgcgtttgcagtaattgatagggagaacgatgctagttggtcgttgtttttcaacaagctcaaatccgtt

SEQ ID NO: 168701 - DNA, 1941 bp, Arabidopsis thaliana landsberg
  unsure (1)..(1941): unsure at all n locations
cgtatggctctttcttatcgcaattggttgtacgacgtgttcccgagcttcagcggagaagacgtacgtgtaactttcctcagccactttctgaaggagcttgatcggaaattgattagtgtattcaaagacaacgatatccagagaagtcaatcgctcgatcccgagcttaaactggcgattagggattcgaggattgcaatcgtcgtcttctccaaaaactacgctgcttctagctggtgccttgacgagttgctggagattgtgaaatgtaaagaagagtttggtcaaattgtaattcccgttttctacggtttggatccttgtcatgttaggaaacagagtggcgaattcggaattgtgtttgaaaacacttgccagaccaaaacagatgatgagatacaaaaatggcggagagcattgactgatgtagctaacatcctcgggtttcattcttccaactggtacgaactacgaatacttgatgaatctttacataatctggtgtgttatgaattatctttctttttttgtttagggataatgaagcaaccatggttgaagatatagccagtgatgttttggctaaactgaatttaactacaacatctaatgactttgaggggtttgttggcatcgaaggtcatatcgcaaagattagtttaatgttgtgcttggaatgtaaacaagtgaggatgtttgggatttggggaccttctggtattggaaagactaccattgctagagctctgtttagtcgaatctctcgtcatttccaaggtagcgttttcttagacagagctttcgtgtctaagagtatggaaatttatagtggaggcaacgtggacaactacaacgccaagctgcatttgcaaggaaagtttttgtctgaaattttaagagcaaaagacataaagatatctaatttaggtgttgtgggagagaggctaaagcatatgaaagttttaatctttattgatgatttggatgatcaagtggtgttagatgctttggcgagtaaacctcattggtttggttgtgggagcagaatcattgttattacaaaagataagcaattttttagggctcatgggattggtcttttttacgaagtgggtctcccatctgataaactagctctagagatgttctctcagtctgctttcaggcaaaactctccacctcctggtttcacagagcttgcttctgaagtttcaaaacgttctggtaatcttcctttggctcttaatgttttgggttcgcatcttcgagggagggacaaagaagattggattgatatgttgccaaggcttcgaaaaggtttggatgggaagattgagaaaatattaagagttggctacgatgagttaagtaataaagatgataaagctatatttcgtctcatcgcgtgtctcttttatggtgcggaaatcagttacatgaagctggtacttgcagatagtaacttgggtgttaacattgggcttaaaaacctagttgataagtccctcatacgtattgggtgtgacactgtggagatgcacagcatgttacaagaaatgggtagagaaattgttcgggaacagtccatttacgagcctggagaacgggaatttctggtggattcgacggatattttggatgtacttaatgataacactgtaagtgctcttttcataaccacctgatacaacttctacaactcttacagcatagtctgatctttacaactttttctcagggtacgaaaaaggttttaggtatatcatttgatatgtctgagattgaggagttgcacatacataagagagccttcaaaggatgcctaatctcaggttcttaagattttacaagaaattagggaagcagagtaaagaagccagattgcacctacaagaagctntgacagtttttccccctaactcaattactgagtgggat

SEQ ID NO: 168702 - DNA, 2075 bp, Arabidopsis thaliana landsberg; identical to SEQ ID NO: 28769
  unsure (1)..(2075): unsure at all n locations

SEQ ID NO: 168703 - DNA, 2509 bp, Arabidopsis thaliana landsberg
cgatccagaagctgccagccctaacttgaaccacactccaagcttaccagtcaggtatttatactcaatatttatgatgcccaatcccgtttatcacttatgttatagttattctcatgaaggttctttatctttaatttctgcagtacaaaacccttgccggaactaccaatcacggagacgacctcgtccattcatcaatcagtaaaccaaccagatacgaccaaacaggccaaagtaacggtgggacgtctttactctatgatccgtccggattggaaatacggattatgtgggacgttaggttcctttattgcgggatctcaaatgccgcttttcgcgcttggtatcgcacaggctttagtatcttattacatggactgggagacaactcaaaacgaggtcaaaagaatctctatcctcttctgttgtggctccgtcatcactgtcatcgtacataccattgagcataccacctttggtattatgggtgagcgtctcactctccgagtccgacaaaagatgttttcaggtacgcacaaacacaaaaccgcagtctagctaaatcctacgattagttgtctttacattggttgatttaaatatgtgattgttttcttctttgtttagcgatcttgaggaatgaaatcgggtggtttgataaggttgataacactagttcgatgttggcatcgcggcttgaaagtgatgcgactttgcttagaaccatcgtggtcgatagatcgacaattctacttgagaatttaggtcttgttgtgactgctttcatcatttcttttatactcaactggcgtctcactcttgttgtcttggccacataccccttgattataagcggtcatatcagcgaggtaaaacgcagctttttgcgtttttacatacttttttttggtcgtcaagtaagttcttactcttttcttcttggttgcatttgttagaaaattttcatgcaaggctatggaggaaacttgagtaaagcgtatttaaaggctaacatgttggctggagagtctattagcaacatccgaaccgtggtcgccttttgtgcagaggagaaggttttagacctttattctaaagagcttctagaaccttcagaacgttctttcaggcgtggacagatggccgggattttgtacggtgtttctcaattcttcatcttctcctcctacggccttgccctctggtatatatataaactgtttcacacaaagtataaatttgtgtagattgaaacgttattgaagctttaaatgttttaataggtacggatcgattttgatggagaaaggattatcaagtttcgaatctgtgatgaaaacattcatggttttgatagtaacggcgttagtgatgggtgaagtgttggctctagccccatatcttcttaaaggaaaccagatggttgtttcggttttcgagctattggatcgaagaacacaggttgttggtgatactggtgaggagctgagtaatgtggaaggcactatagagctcaaaggtgttcatttcagttatccttcacggcctgatgtgactattttcagcgatttcaatctactagttccttctggcaaaagcatggcgcttgtgggacaaagcggatctggaaaaagttcggttctttcgcttgttctccggttctacgatcctacagccggaataatcatgatagacggtgagtgctagctcttgacagaatttcttctatcacaaataactctgatcacaggtttcttgcatcacaagaactttgtttatggacttatggttgagtgagctaattctgttttcaatcaataaaattttattgcagggcaagacatcaagaaactgaagttgaaatcactgcgaagacacattggtctggttcaacaagaaccggctctgtttgcaacgactatctatgagaacatcttgtatggtaaagaaggagcttctgaatctgaagtcatggaagcagctaagcttgcaaatgctcacagtttcatcagctctctccctgaaggttactcaaccaaagtcggtgaacgtggcattcagatgtcaggcggccagagacagagaattgctatagctagagccgtcctcaagaacccagagattctgcttcttgatgaagccacaagcgccttagatgttgaatcagagcgtgtggtaagctttcaatagcgtttagagcttggatcaagattttcggcaaagatttacaagtttataccaatgaattgcaggtacaacaggcaaagatttacaagtttatactaatgaattgcaggtacaacaagcattggatcggctaatgagagaccgaaccacggtggtggtggctcaccggctatcgacgatcaagaactcagatatgataagtgtaatacaagacggtaagatcatagagcaaggcagccacaatatcctcgttgagaacaagaatggtccctactctaaacttatcagtcttcagcagcggcagcgccatcatccttaa

SEQ ID NO: 168704 - DNA, 1752 bp, Arabidopsis thaliana landsberg
atgaggtatgtaatcgaatcgattcttagggttagaattgggggaaatcgatttttttgttcgtcgggatcgatttctgggttgtcgggattgagaatgggaagatttctggatcgattactggatttgtcgggttagatttctgagtttagagtaacagtttctatgtttgtcgggttcgatttctaggttaagggttttgtcgggtttgatttctgggtttttagagttctaggtttgtgtcatttgaacttaatccccttattctttgttgtttttgcagtggtttcgattgtttgaagctgcatataaagtatggaggagatgtctcaattcgcgatgagtcgtttgcctacattggaggatttgagaagagggatatgctcattgatccagatctgatgacgtggtctatcttcgccgatttcccagcagagaatggagtatctgctcccgtgaaaaaagtttggtacaagcttgcacacgaaagctttgaatcagtaagagctataggcgaggatagagatagtgggattaggcagctgtgcagtgaagcgttgattggtggagaagtagacgtttatattgagcaaggtgtgtctgaaccaacaccgtttcctatgtctcagcatggtgaagaggctgttgttgaagagatggaagagtctgatgcagaggttgaaggagataaaactggggaagaagacagaggtaaagatgatgatgttgatcctgtagcagaatgtgagggagatgatcctcggtttagggccttttatgaagagataaatgaagaggataataaccaccaagatgcaggggaagcagctggtcagggaattcctgaagctgatgaaggacatgtaacgggtcaagaggctggagttgatgaaggacatgtaacgggtcaagaggctggtcaagaggctggtcaagaggctggtcaagaggctggtcaagagggtattgatgaagaagagtttgaggatcaatgcatggatacagagcgacctgatgctgcgttggatacagatgaggagtgggatgctttagaccgtgaagaaagagaaattgcaagagctaaattcaccaaagataagccactttatctatggcttaagcagcagtttaataatggtgaagagtttaaggatcagcttttgaggtatgtcttgaagactaactatgatgtgaagttatgcaaatggggtcagaaacagctgatggctatatgcagccatgaaaactgtcaatggaagatttattgttctgtggataagagggtagggaaatggacagtgaaaacttatgtggatgcacataagcatgcgatcagtggaaaagcgaggatgctgaaacaaggtgtgattgccagattattcagagatgaagcaagaaggaggccaaccttgacttaggttgacattaaggatgagataatgatgaggtatacgatttcagtgtctaagtggatatgcaggaaagcaagaaggatggcgtttgacatggttattgaaacacagagacagcaatttgcgaagttgtgggattatgaaggtgagcttcagaggtctaacaagcacacacacacagagattgtgacaattcctagagctgatggtaagcaacaatttgacaagttctatatctgttttgagaagcttagaactacatggaagagttgttgtcggccgattataggattagatggtgctttctgaaatgggaattgaagggtgagattcttgcagc

SEQ ID NO: 168705 - DNA, 587 bp, Arabidopsis thaliana landsberg; identical to SEQ ID NO: 80507
  unsure (1)..(587): unsure at all n locations

SEQ ID NO: 168706 - DNA, 2899 bp, Arabidopsis thaliana landsberg
ttacctttacttctccctgtttttcctcttccttaaattcatcttcaagcttgaatttcatttcactaatcaattactttcctcgttatccttttttgcagtcaagttaaattgctctctttcaagacttgtgttctttaaaccaaaaaaaaaaaaaaagtatctgtgttcatcaccaactcattcttctttcagatctagggtttcatgcttcactcaatttttttttgtttaggtagttccatcttctaaacgttgtatttttttttttttgccatcataatcatatggagttcgagtcagtgttcaaaatgcattatccgtatctcgcagccgttatctacgatgatagctccactttaaaagattttcatccatctcttaccgatgatttttcttgtgtacacaatgtgcatcacaaaccatcgatggtaaactctaatcctgatctttttttcacaagaatctcacattaaagatctcaatcctatcactttactcaaaatcttaatattgttccctatcactttgatatgcagcctcacacatatgaaataccatcaaaagaaaccattaggggcatcactccttctccatgcactgaagctttcgaggcatgttttcatggcacatccaacgaccatgttttttttggcatggcctataccaccccaccaactattgaacccaacgtttcacatgtctcacatgacaatactatgtgggaaaacgatcaaaaccaaggattcatctttggaaccgagtcaaccctcaatcaagccatggcggactctaatcaattcaatatgccaaaaccactcttgagcgcaaacgaagacaccatcatgaatcgacgtcaaaataaccaggtaatgatcaagaccgagcagatcaagaagaagaacaagagatttcagatgaggaggatatgtaaacccacaaaaaaagctagcatcatcaaaggacaatggactcctgaagaagacaagtaaattcaacatctaattttttggaattctcataaataattttcttaatctagtatgatattgtttttaatattaatattttctaatgattctacctatatttaggttattggtgcagctagtggaccttcacggaactaaaaaatggtctcagattgctaagatgcttcaaggacgagttggaaaacagtgcagagaaaggtggcataaccatctccgtcccgatatcaaggtctcttattttattttattttcattttcttattttcataggagaaacaaaaacaaaatatcatcttcgatactttcaaattcattacatgatacattgagaatcttctaagagaatattaacaaacttttttcacacttgtcaacatgtatacggttttatttcatgcatgaatactttaaacttttgtttgtatatacatatatgtctatgacaattctttaaggcattttgtcttcttgttgcggacaaaacttcacaattggtcagacatttaaactaaagtcattgtcacttggattctctcatataattcaacaaacatgaaagagaaaaaaacatataaaaaataaaaatatttgtttaatattgtatgtattatttacatataaagcatattttatgtggtatgttacagaaagatggatggactgaagaagaggatataatactgataaaagcccataaggagattgggaacagatgggctgagatagctcgaaaactcccgggacgcactgaaaatacgatcaagaaccattggaacgcgactaaacgtcgacaacactcgaggaggactaaaggaaaagatgaaatttccctttcacttggtagcaacactcttcagaactacattaggtctgttacctacaatgatgatcctttcatgaccgcaaatgcaaacgcaaacattggtccaagaaacatgagaggtaaaggtaagaatgtaatggttgcggtctcggagtatgatgagggtgaatgtaagtatattgtggatggtgtgaataacttgggtttagaagatggaaggatcaagatgccgtcattggcggctatgtcggcctccggatcagcgtctacttctggttctgcgtctggttctggaagtggtgtgaccatggagattgatgagccgatgactgatagctggatggtgatgcatggatgtgatgaagttatgatgaacgagattgctttgctggagatgattgctcatggtcgtctttagaccgtgcaatataaacaagtcgaacttgattatatctacctatataattatgctatttatgaaattatgtttgtgcttttaattgaagaattggacatgtaatatatattgtggtttaattgaaggtttcttttggactaaacaaaaattgaaggttttcttgctttatcagattttttttttgttattctctaatttcattttaattaagaatctatatatattgttaaattttctgttatactatatgaatggtaattgcgtttgcggttaggagaagacgaccattaggtccacaacaagtacatttagtcactaaagaataattttatatcgactatgctaaagaaaaaaagtactagttgtttacaaaatatctggttagtatgatgtaatatgggataatatgtgtatggtccgttgtattgtaattttctggaatttgttaccttaccgtcataatgactatatggtccgtcgtattgtaataccagaaattttaggcaaaacacaaacaaaaataaacgtaatgagagttttgtatacattatattttggttttccatttgctttgtatatcaccattcgaaaagtcatacataacttaaagaaaaatacataaaacttttgggatctattttcattaatgatattttgactaactac

SEQ ID NO: 168707 - DNA, 1576 bp, Arabidopsis thaliana landsberg
ttccgtatcccaattatgtcaaatgggctacaactgtctatttactaatgtaggtgttactgtctttagaagaagtgatgattcaatagcatttaagggggtgttagagggtcagctatacttggtagattttgatagagctgaactcgacacttgcttagttgctaagactaacttgggttggctctggcaccgccgactagcccatgttggaatgaagaatcttcacaaacttctaaagggagaacacattttgggactaaccaatgttcattttgagaaagacaggatttgtagcgcatgccaagccgggaagcaagttggcacccatcatccacacaagaacatcatgactagtgacaggccactggagctcctacacatggatctattcggcccgattgcttacataagcatcggcgggagtaagtactgtctagttattgtggatgattattctcgcttcacttgggtattctttttacaggaaaaatctcaaacccaagagaccttaaagggattcttgagacgggctcaaaatgagttcggcttaaggatcaagaaaataagaagcgacaacgggacggagttcaagaactctcaaattgaagtttttcttgaggaggagggcatcaagcatgagttctcttctccctacacccctcaacaaaatgtgtagtggagaggaagaacaggacgcttatcgacatggcaagaacgatgcttggagagttcaagacgcccaagcggttttggtcggaagctgtgaacacagcctaccacgccataaaccggctctatctgcatcgcctcctcaagaagacctcctatgaactccatactggtaacaaacccaatgtatcttactttcgtgtatttgggagcaaatgctacattctggtgaagaaaggtagacattctaaatttgctcccaaggcagtagaagggtttttactaggatatgactcaaatacaaaggcgtatagggtcttcaacaaatcatcgggattagttgaagtctctagcgacgttgtatttgatgagactaatggctctccaagagagcaagttgatcttgatgatatagatgaagatgaagttccaacgaccgcaatgcgcacgatggcgataggtgatgtgcgaccacaagaactgtaggaacaagatcagccatcttcctcaacaatggtgcatcccccaactcaagacgatgtacaggtaactcaagaagaggggcaggatcaagggggagcataggaagaacaggttatggaggaagaagcaccatgggcccctccaacccaagtccgagcgacgatccaaagacatcaccccgtcgatcagattcttggtgacatcagcaagggagtaactactcgctcatgattagttaatttttgtgagcatttgtcgtttgtctcttctattaagcctttcagggtagaagaggccttgcaggatccagactaggtgttggccaagcaggaagagcttaacaacttcaaacggaatgaagtctggagcctggtgcctcgtctaaagcaaaacgttgtgggaaccaagtgggtgttccaca

SEQ ID NO: 168708 - DNA, 2454 bp, Arabidopsis thaliana landsberg
  unsure (1)..(2454): unsure at all n locations
atatgacaaagagctgtatgctttggtgagagcactacaaacgtggcaacattcatctttggtctaacgagttcgtcattcgcaccgatcatgagtccttgaagcatctcaaaggatagcaaaaactcaataagagacatgctaggtgggtcgaattcattgagacgtttcccaatgtcatcaagtacaagaaaggtaaggacaatgtagttgtcgatgcattgtcaaggaggtacgttcttctctcatctcttgatgctaagttactcagatttgagcatatacaatctctttatgcaaatgattctgattttgataagatatattcatcatgtgaaaaaattgcttatggaaaatattatagacatgaaggattcttgttttatgataatcgtttgtgtattcctaattcttctttgagagagctgtttataagggaagcacatggcggaggcttaatgggacactttggagtctcaaaaactcttaaggaaaaaaaaaaagaaaagggggggantcaataccattggcctcacatggtaagggacgttgaacgtatatgtggaaggtgtgtcacatgtaaaaaggctaagtccaaagtccagtcgaacggtctgtatacgcctttgcgtatttcttctcatctttggacttacatttcaatggatttcgtgcttggtttgcctagtactaaaaccggaaaggattcaatctttgtggtagttgataggttctctaagatgactcattgcattgcatgtcataaacccgatgatgcatctcatgttgggggcctttaatgttgttctttaaggaaattgttcgtttgcatgacatgcctagaaccattgttttggatagggaaaacaagtttcttagttatttttggaaaacattatggtctaaacttagaactaagctcttattctctactacttgtcacccccaaactgatggacaaacggaagtggttaatagaaccttaggctctcttttgcgcactctgattaaaaagaaccataggactggggaagaattttttccgaatatagaatttgcataaaatcatgccattcattccgcttctaagttttcattatttcaaattatttatgggtttaatctcacctctcctttggatttaatgcctctacctttgagtgtcagaacaagtttagatgagaaaaagaaagccgaaatggtgcaacaaatcaatgaggaagctcggaaaactattgaagagtaaacgaaaaagtgtgttgaacaagcaaacaagggtcggcgacgcatggtctttgaagagggtgaccaagtatggattcacttaaggaaagaacgattcccagccgaatagcaaacaaatgccaagaatcgacgggtcgtttaccattacaaaacggatcaatgataactcttatcaaattgatcttcgaaataagtataatataagttcgagctttaatgtttctgatttatctccttttcttatagatgaaacggatttgagggcaaatccttttcaagagggagggcatgatatgactattgtcgggcaagactcgcaacttgaaccaacaaagctgtttgtagccgaggagcagcttgtagccgaggggcagcttgtaacggaggagcagcttgtagcggagtaagctttggcggaaccaaccagtcctatgactcgttcgaagactagacttctcaaccaagctgttaaaggaatacttaaccacttgggcaagcatccaaacgaagtcattcaaaccgtttggaactcgatagcagcccaagacgattgggaatgggctatgtgttacttgggtactctttttcccttctaaggttttgtcccaatgagttttccttagtaggtttttaatgaggcaaatgattcacattcaaatcacccatttgttgatcaacatcatggcataactttcagaacttggccccaagaaatatatatcaagtccaagtcattttatgtccattacaagcccaaaaagagcccaaaccaagtggttaatttgatggtcaagaagagtgacgaaaatagaagttcaagggtcatctttgaagccaaagggtcttttctattcaaattctatctttaattattatgttgtgtttctaggcagccttggagtatgttccaagacttgtctctttctcttctcttcttcttctctttataaactcatgtaatctcttatgagaacccatctatctttttatcaaaaactctcttttaaaaatagatcatggatccattttcgtatgtcgaattttgatctttctcgacttatcaaaaggattttccgcatccttttgtggcgtcattcaatccatcatctcgtctttgagtcgtgtgtcgtctctatttcgagaatatccactccagatcttccaagtgccgaaattgggattgattcctcaccaggatcatatcactaa

SEQ ID NO: 168709 - DNA, 877 bp, Arabidopsis thaliana landsberg
atgcattgtctgaaaccaaacaaagaaaatacacgaaggaaggaaaagaaaagtaaaaagaaaagctttctgcaaaatccaaacatgtccgccaagatttcaatattccaagctcttgtctttctattctaccggtttatcctccggcgatatcggaactctaaaccaaaataccaaaatggcccttcttctctcctccaatccgacctatcacgccacacattgatcttcaacgtagaaggagctcttctcaaatccgactctctcttcccttacttcatgttagtagcatttgaggcgggaggcgtaataaggtcatttctcctcttcattctctatccattgataagcttgatgagccatgagatgggtgtcaaagtgatggtaatggtgagcttcttcgggatcaaaaaagaaggttttcgagcggggagagcggttttgcctaaatactttctagaagatgtcggactcgagatgttcgaagtgttgaagagaggagggaagaaaatcggagtgagtgatgatcttcctcaagttatgatcgaagggttcttgagagattacttggagattgacgttgtggtcgggagagaaatgaaagtcgttggaggttattatctaggtatcatggaggataaaaccaaacatgatcttgtctttgatgagttagttcgtaaagagagactaaacaccggtcgtgttattggcatcacttccttcaatacatctcttcaccgatatctattctctcagttttgccaggtcagtctctttatcattattttgtttgcctttacgtttacaaacaatatatttgttaagagtttttttttggaaatactaaacgagaatgttttaattactaaatattgct

SEQ ID NO: 168710 - DNA, 873 bp, Arabidopsis thaliana landsberg
gaaaattccctcttattattatacctcctttggttttgaaatcatttggtaacctcttgactcgttttgcagcaatttatttcattcatagagtaacggctaatactggtccagaatctccttataccatcggtattgtcccaggttagttgttattatccagatatatgtgtaatttgaaacaatttgttgcagcactaaaatctcaaactgttatttttttcagattcttctgaaaatgtgtgtatccaagaatctagtatcaacatggggtatgatgccatttctcttaaaagtggttgggatgaatacggtttatcgtatgcaagacctactgctaatgtccagataagaaatgtttaccttagagcagcttctggttcctccatttcctttggtagtgaaatgtctggtggtatatctgatgttgaggtcagtgatgctcacatacacaactcgttatccgggattgcctttagaacaacaaatggaagaggtggttatattaaggagattgatatttccaacatccatatggttaatgttggtactgcatttctagccaacggtagcttcggtactcatccggattctggtttcgatgaaaatgcttacccgcttgtgagtcacatcaggttacatgacattgttggagaaaacataagcactgctggatatttctttggaacgaaagagtctcctttcacttcgattttgttatcgaatatctctctgtcgattaaaaactcggcttctcctgctgattcttggcaatgctcatatgttgacgggtcttcggaattcgtagtccctgaaccgtgccttgagctgaagagttttgatagttactatggtagagctgaggccttatga

SEQ ID NO: 168711 - DNA, 1695 bp, Arabidopsis thaliana landsberg
gcttgagatcgttatatttaaactagaggtcttggatcataaggcgcgggaaagagctggagttattactcctacccttggtttgccagttccagtgcttttgcagcctgatgctgctggtgaggtatacacttattttcttttgtttatctaattttgatttatatttggttatggaactcaaaaggaggaataaaatgatgatggttgattggctagttctcatcatagtgaaccatcttttaacggggacagttttccaaaggatgtgattatacttttcctcactgcctaaaactgtagcaggagccaggagcatagatctagtaatagtgattatattgcctcctctagaggaatgtgttctcctggggttattactcagaggcagagcaggacatttacattgttcttattgtgctgtttccattttttttacaggcgctgaaatatttgtccatcaaatatggagttttccacgctatatacagttattggaaaaataaggtttgatatagttgtcgtatagtttgatgataattgatttttttttttttaatgaaaagttgttaatggttctttgggcataggcttaaaacattaagtaacttcgacttttgtattcttttagcgtgaaatatggcagaagcctatcttgcggcgtttacaggtatatcatttggactggtctcaatcttacatgtggaagaaatgaatttattctgaaatgtactgaaaattagctactcttgtgttttttgtttggaacagcctccaccaccggtcaatgataccaatccgtacaatgtgtttaggccacgggagaaagctcatagactacacgcaagaagagtaggctgtcttgttgtctgtggtttatcaatttccttatcttacatgtgtgagtatggaaaatgcaccataacttactaacaatagttgacctcacttcagatgcagcagagagaaaacaatgcgcagtcatttgagaagctgcgacaggtaagggaagacctgaatctgtgtttaacttcttaaaataattcctggattctcaaacgttcttctcttctgttctgggatatgttattattaggtcaggcgcaatcttgaccaagcaaagaccattctagaagctcttattaaggtaatctaaatgacatctatattttgtgacttgaatgtaattttattgatatcttaagagatacctgcagactccataggtattaacttgattaaaaacatgttatctttatagagagaagagaaaaagagggatttcatggcgagtgaggttagccttcagagaatccaactgaaatataaggtagtcctctacaacctgcatcgagtgttcttttgttaccagaaagagttgtgcatttcgatctcctctgattttttttgtggggttttgatatgtttgcagaatgaaaccgaacttttggaagatagtttggctctggctgggtttccactctctacagcttacagatttggctcaagcgaagatgaattcatggactccgatgacccgaccaccacccaaacatgtacaaggccttcctttacccctcatcgtcgtttcaccgactcaaacctcgctcgagctcaagccgggagcataaagcaagaggcgagaagacttggatggctccacaaactggtaattcttcagaacctctgtatttg

SEQ ID NO: 168712 - DNA, 611 bp, Arabidopsis thaliana landsberg
ctcaaacaagtaagagttcgtcaacaaatggcagctttgtgatgtcccaaccacaagagtttatgtatcaccgcagtcggtgctgcaaaccagcttatgaaacgtgatgtcgacggccaaatgaaccaaggcaatatctcatccaaggtaagatttcctcaaatggacctgtaatgagtgtttttctttagctcaagctgtttctgtaatgattggtcaaatctgtgaatgcagacactgaacaacttttcatgtgtgatacttggaggaatggtaacagaacatatactattcggatactcagaagggctatactcagatattgtcaaggtaatacaaactcaagtctccttccactcatagtcatgagactataatcttctaatgtattttttgagatttgagtgttgcagttgaacgatgttctgcggtggctcggcttcacagaatcagaaaaggaggctcatatcaaatgggctgtttccaacactgtctcattattacattctcacaaagaagcaagagtctcacttgcagaaaccatggctaaagccaaacctattagcacttgtattgaagccattgaatccgctatttcaacacatcaaatt

SEQ ID NO: 168713 - DNA, 1586 bp, Arabidopsis thaliana landsberg; identical to SEQ ID NO: 64947
  unsure (1)..(1586): unsure at all n locations

SEQ ID NO: 168714 - DNA, 1337 bp, Arabidopsis thaliana landsberg
aggctgtgtcttccggtattgtattttcgacaacgtttttttccaagttttgttattgtctatgggggggtctccaaaatttcaggttccttccttggaaaatcgatgaatagttgttagcctgtggtgcaattttattgacttgggtgttttcttgtatagcacgttaggtcaagggctgcaaacaagtacatatccaggagaagttttgttttcaattgcaattgctgtagctggacttcttttgtttgctcttctcattgggaatatgcaaacttatcttcagtcacttacggttcgcttagaggaaatgaggattaaaagacgtgattccgaacagtggatgcatcacaggtcacttccacaaaacctgagggaacgagtcagacgttatgatcaatacaaatggttggaaacaagaggagtcgacaaaaaaaacacattccagagtttaccaaaagatcttagaagagacatcaaacgccatctctgtctaaatttagttcgcagggtaagtttcaaaaaatgtgaattgcctaaagatcctacacttcattcacaaggaacaatgttctttcttttatttgcaggttcctctgtttgctaatatggatgagagattactagacgcaatatgtgagagactaaagccaagtctatacacagagagcacttacatagtgcgagaaggagacccggttaacgaaatgctcttcataatccgaggccggttagagagtgtaacaacagatggtggaagaagcggtttctttaacagaggtttattgaaagaaggtgacttttgtggtgaagagcttctgacttgggcacttgaccctaaagcaggctcaaacttaccttcttccacacgaacagtgaaggctctaactgaagtagaggctttcgctttagaagcggaagagctcaagtttgtggctagtcagttcaggcgtcttcacagtcgtcaggttcaacaaactttcaggttttactctcaacaatggaggacttgggctgcttgtttcatccaagccgcttggcgtagacatttaagaaggaaaatcgcagagcttagacgtaaagaagaagaagaagaagaaatggattatgaagatgatgaatattatgatgataatatgggtggtatggttacaaggagtgatagttctgttggatcaagttctacattacgttccacggtatttgcatcaagatttgctgctaacgcgcttaagggtcataaactaagggtcaccgagagttcaaagagtttaatgaatttaacaaaggcatcagaacctgactttgaggctcttgatacagatgacttgaactaa

SEQ ID NO: 168715 - DNA, 824 bp, Arabidopsis thaliana landsberg
gagttctccagcaccttttcatgttgccttaacagctacagatgcaccttataataagtggcagtgtcgtattatgtattattggtataagcagaagaaagctcttcctggttctgatatgggtggcttcacccgtattttgcattccggtaattctgataacttgatggatgaaatacccacatttgtggttgatcctcttcctccaggtcttgatcgggtaagaatttttattttattcccgtttctccatttggtctcactttttgttgatggtttatcactgattcactcttttttgtaatcttgtaatcttgtatttaggggtatgttgtcttgaatagaccatgggcattcgtgcaatggcttgaaagagctaccatcaaggaagagtaagtcctgtcatttctctcttccttccaactaacattctactgtttgctaaatctcctgcatcttactgttggtgcagctatgtgctcatggcagagcctgatcatgtatttgttaatccccttcccaatttggctgttggaggattcccagccgcttttccgtttttctatattactcctgaaaagtatgaaaacatagtcagaaagtattatccagcggagatggggccagtaacaaatatcgaccccattggcaactctcctgttatcataagcaaggtgagattatctgtgctatactgtttgtatatgtgttatttgacttgggccccaaagattttcagaggcgtttagctagatgtgatgttggtgtccaggaatatgttctgtttgttctgttcatgcattaaaattgatgttgacatgcct

SEQ ID NO: 168716 - DNA, 552 bp, Arabidopsis thaliana landsberg
atggctccgactcggattctaaccagagatgaagagcttggtgttatatcagacgatgatgattcaccatcgggtaaaagatctaaacttgatcgcttccctcttagccgttgggaactcgccgtttctctcggtgtattcctcgtcttctcctctggactctgttgtatctacatgaccatgcctgctgctgaatttggcaaactcaaacttccaagaagcctcgctgatcttcgtttgctcaagtaactttctttctaatgttacgactcaatttttgtagccaattaggagaatttactgattagtgttggtgtcatgattggaattgacaaatctgtaatctttgttgttgttgttgttgttgtttcagagataatctagcaaactatgcgaatgagtatccggcgcagtttgttttagggtattgtgcaacgtacatttttatgcagacctttatgattccagggactatcttcatgtcactattagctggagctctctttggagtattcaaaggtgttgtcttggttgttttcaatgcaacagcgg

SEQ ID NO: 168717 - DNA, 1293 bp, Arabidopsis thaliana landsberg; identical to SEQ ID NO: 34557
  unsure (1)..(1293): unsure at all n locations

SEQ ID NO: 168718 - DNA, 1574 bp, Arabidopsis thaliana landsberg
aaacagtggaagtgtgttatccactagagagagacccaagttagtcactgaggacagtgcatcccaagatggggtggatttcagtctcaataaagatcaagctgacaaacaactcgagcagccactcgaccagtcactcgagcagccacttgaccagtcactcgagcagccactcgaccagtcactcgagctgccactcgaccacttcactagaccgaccttcctagcaacatcaccaactgctctgaaacatgttgctgtcaaaaacaaagaaaaagtcttcattcctcatccttacaagcccacacttccatttcctggtcgacacaagaaagagttagaagataagtacagagctatatttgccaagaacatcaaggaagtcgaattaaggatccctcttgctgatgctctaacgcgtatcccggattcccaaaagttcctcaaagacttgatcatggagagaattcaagaggttcaaaaaacaacaatttagagccatgagtgcagtgccatcatacaggagaacgatgtcccagaaaagctaggagaccctggttcattcactctaccatgctccctaggttcattgactttcaataaatgcctttatgacctaggagcatcagtaaatctcatgccactctcagtagctaagaggttgggtttcaacaagtataaatactgcaatatctccttggctgataggtctgttagactacctcatgggttattagaaaatttgcctatcaagattggaaatgtgtaggtgcctacagacttcgtagtgctaaacatggatgaagaaccaaaagatcccttgatattaggaaggcctattttggcaacagttggagcaatcatagatgttaagcgaggaaagattgatcttaatctggggaagaatttggatatgaagtttgatatcaatgatgctatgaagaagccgacaatagaagaacaaaccttcttagttaaggaagtggaacagttagctggtgaactgctaatggaacttgaagaagcaaataattgaaaaactgttttgatcaatagtggtaaaggtgggtatctccctagtgaaactttgagttttgagttttcattagactcacacaaggcatcagttggctcagaggtttacaagggcttgatggggtcagacacaaaggttatgaaagctaatgaagtaagttcaacacatgctcgaccaacttattccaccaacaactcgaagaagcctccaacttgtcctgaaagctcatgctcgaccaaacaactcaaggcaagcactcagatgtcagatgattggttagaactcagggagagatctaaatggcaagacaaagccatacaagagctaacacatattgtgaaagagctaaaggatcaaatcaaggagctcaatggaaaagccaaccaagtaccactcaacatcaaggacgcccctgacgatggagccactatacttgtcagcaaagaaggatgtgaattcacgtcagaatggtctagaggagaagactatcttgataaaaaaagaagcttactgtgaggacatggccactgagtaccca

SEQ ID NO: 168719 - DNA, 354 bp, Arabidopsis thaliana landsberg
agggatggcttacttatgaaagtgggagtcttacgatttccaggcaccaactgcgatcgcgacgtgtttcaggggatgatcgaccagggacacaagcctgaatggctgtggcacgccgaccagttccgtgctcaagactactaagctctcgcggacccgggcggatttagctttggcgattacttaagatcgggagctgtggcggcgaggtcagcggctttaaaaagtgtgaaagagatggctgacagtggaaagcctgtcattgggacctggaatggctttcacattttatgcgaggccggacttttgcccggagccttgattcctaatgaatcgggacttttattgatgatt

SEQ ID NO: 168720 - DNA, 1975 bp, Arabidopsis thaliana landsberg
gatccttgcaggatagatcttcaagaaaacccttcggcatgatgaaagatctaccagtcatgattaatggagtggaagtgcctacagacttcgtggtgctggatatagaagtagagcataaggatcccctaatcttgggaagacccttccgagcagtgatagatgtcagggaagagaaaataagtctcaaccttggaaagcacatcaagttgcagttcgacatcaacaaaactccacaagagtcaaaagaagatgaaaaaacctctggagatgatggagtgatcccaggagaaggatatgagactgagaaagtaaaagagagtacaaaataaagacaagaagacattgaggaacccccgctgatgcccatgtcttccatgcaaaagaccaagagacaaggaatctcttcacaccccctctccaccagtcgacctcatcgtaaccttacccccccccccccccatcactcgacctctccgccttctccttccatcataaacactcgacttctccctttcaccttcatcccaacaacactcgactctcacttctctcatcaaccctcactctcaagctcaccaaacactcgatctcaatcaccaattcgccttaaccacttctcgctcataaccactcgaccactcttcgccaccaccacctctcattcgtctccgttttactcgaccacaactctcatcgcctctccatcatcaccgcctgctccctctctccaaggaaacaactcgacctcaccatttgattcactcgaccgccactttacgtcttctcaatcatactctcattcactcgacctctcgacaagagcacctccgcctctccatcgccacttctcaccttatcatgccaccaacaacactcgaccgcagctcctacatagcctcatcgtttccaccgctttgccacattcactcgaccaagctaccaccactttctcttctcaccgaatcattcactcgacttctccactgctttccaccgctcaagctccattagttcactcgacatcatctcattctcaaatcaactcgttcccaaatcaaacgagaagaagaaggaagacgccaccatcaacaaccgcttcactctaaccacgaaactagtttcactcgaccttacaaaatcactcgatcacaatccacagaccgaaaaagaaaaaagaaaaaaatcttcaaaaccgataggttcactttaacggtttactctgctgtattgtgtttttggttttattggaactaacgtattaacgtttatttttgagtttcatttgttttcatgtttcatcatgactaactacagtggagaatcctctatggaccctgattacaacgtggatgaagctgagtcctggtccgctagaccgagagagcaacatatttaccagagtttcagggatgagctcgaacgctctacagcccgacataatcagagaagagctgaaatcgccagaggaaagagggcgatgtcaagtagatatgagctgattgatgaggatatcgagactgagtatgagccaccgtcatggcgcagggagacgaagctgctgaacaaacccgacgaggttacagtggaggagtatatcagattcttcgagatgaatgacttcttgggaacaaggtatccctgctatgagactttagccgagttgggttactggaggacgtgcatcatttgttcgagaagtgttatctggagacactcatgtcttaaccttacgtataaggaggagacaattgagtttctttccacactgcaagtggagatgtatgagggtctcacggactttgagctggataccatggggttagggttcttgacgttcttagtggatgaatagcggtatcagctttcgatcaagaagttggaagaactgtttggtttccctagtggaaagggaaccaaacccaggtttgacagggaagagcttaaggatttgtgggctactattgagaacaat

SEQ ID NO: 168721 - DNA, 796 bp, Arabidopsis thaliana landsberg
atggttttgaatttcttttcttttgtaggaaatgcggaaatacgagccatccattggtgtcaaacctataaggcgccaatagtacctaatgagattaagcgtgaatccgcaactgctaagaagaaaggtccaactatcacaacggtgactcaaactcatgacaatggggttagatcaaacctatgttacctccattgcaattcatataagatcggtatataaatttaactaactgctactaactaattattttaatatatagctaattattttaatatatagattttaatacaaatatgttaacataccataaaaagtttgtaaattaaactatgttagtttgattatttaaatggttgtgttttatatatgtatactctatttgagttcactttatatgttaaggaatttggagatggaagcaaactatccaaagattacagaggtgttccagagatagttgataaagtcttgaagcaaaaatttggtaacttttttgttttgattaatgtgtaccaatatagattacagagttattatctataactaatatctatgggttgataaaatttaaattgtgattaccaattgcagagatatgttgggccatcgcattgacacgtcttctgcaagtcatttacaatataactcaagagtacatagctggccgcctaagattcgatcatgatgacctcgtcgtgcatttgaagatgaaaaaaactcgaggcaaacgaccggggtcgatgaaacttaagaaccttaaagatgctattaatcacatagcagttaaggggct

SEQ ID NO: 168722 - DNA, 2664 bp, Arabidopsis thaliana landsberg
atggctgagcaggaatggcccgttacaaacttagttctcctaggtcgtagcgaaaatggaaaaagcagcaccgggaacaccatcatcggtcaaaaatatttcgaggtaaatttgtttggaagagatatggaccagagatgtaagatgttcaaagctgcaatacaagatggcccaataatcaatgtgattgacactcctggtatatactccattaaaacttcatataaagtcttaattctaacattatatacaccaaaccggcattttataaagtcatttgggaattgtttctctaatcatagccatactatagatgtgattggctggtaatataatgtacatctttgccaatagcaaagctgaatttattcaagtcagaatgtaacattgtacgtgatacaggtttgctcgagtcatccgtgtcaggagactatctcagtaaggaaataatgaattgcttaactatggcagaagaaggaatacatgctgtgttgtttgttctgtctataacgaatcggatttcacagcgggaggagttcacatttaatacattgcagaagatatttgatgataaaatccttgactatttcaatgtggtgttcactggtggtgatgagttggaagcagacaaccagaccttggacgattatttacgtgaaggttgccctgaatttttgacggtctgctagcatccgtttcgaacttagcatatttattttttaaattagtgcaaccattaatattgctgttttttttttacttggattaattacgaatttccagagagttctcaaactatgtggaggacgaaaggtcctgtttaacaacaagacaaaggataaaggcaagaggactaagcaacttaaccagcttctagcacatgtcacggatattagacagcaaaatggtgggataccgtatacagaaaagatgcaccgtaagatcaaggtaaaaacaaatgtgtttgatatgtgcataagttgatcttgtatgcttttcctttatatataagttatatcactaagttttgaacacaaatttttgtaactatagttcccattttactagggaaattacttgccattgttaaatttgtttatattaaaattgacctcttcaccagctccacagcggaagtaaaccatttaatgatctaattagtgaacgggttatttccatctcatttaaacaaacccttaagctttcatgttttcactaacaaactattttcaagaaattgttacaatatacatttttcactaacaaactattttctagaatttgttgtactacatacataataatggtaaatgttctcagtaaagtggacaaatctgaatcagagcattaaatgatggcttcgattttttagaaaaggaatgggtaggaacaacatgttcctaattgttcctctgttttttttgaccattcaacaataattttttttccaaattgtaacatgtgaaccctacactattcctattcattccttattttttgaggaattgtacaagaaaaattgttcattcccaaatttgatggggaccaaagaggaaaaaaaattaaatattagtttattaaaattaaatttttaacctccacgtttgtttgatattttttcttaacgtccatgttcatttaatatttaatttagaaaatattttatttattgtttcatttttatactatttattttatgtttgggttatcatttacaataacatttattctatttttcttttacactcattcctctttatttttattttataattatttgcttttctatttattcttttttaagcatgttcattattactctgtgtagtttcttatagcttccaatcgacccaataaattgtgttttttttggctagaaaaacattatgttcagcaccatatgctacactttcacgacgaatttaaaggttctgtggacagaagacaagtcatccgcaaagcaacccgagttcttgaaagatgcatgagtagaagattcataaattttttttttttttttttttaaaaatataatttgttctcgtcgatctcccaagtaataacattttcatatgaatcgtatctaaataaaattatgttaatcccgcaaattcaaacctacaatatatccactatttttcttctgtcaaaataaactatcggtacttatagatccggaatataacataagatgataaatatttacttttataataacgataagaaataataaaaagctacttttggtaataaaaaaaaatggtagtaggagatttcaaagttgacaataaagcggctcacttctatatttggaggaaaaagtataatggatccgattattaatacaaacccgtacaagtttttgaacgagtaaaaaatcataagtaattcgataatagttaaaaacagtataaaataggggtatgagtcacgaaaaaaattcgaatggtgaccgaatcgcacattaataaaattctctgcatatatatatatatatatatttgttattatttgaactgcaccgcactttatccgcagttgaactgcatgtttccattaagactctgagagtaatatatatgataaaacttttaaatgttaaaatcaggctcgactcactagagtggagcgaaagtgcgacggtccaaagcttaggcctattta

SEQ ID NO: 168723 - DNA, 856 bp, Arabidopsis thaliana landsberg
gaacatcaaatctttttgtgaggaaaaacaaagatagaagaaggggctccatcagttgttaaatattggtctcgtcttgatcaacttagcttagaatgccgaagcctcaagagattaacatatgtcccgccaagcataactatgctaagcctaagctttagtgatatagagacgattccagattgcgtcatagatctcactcggttacgaactcttaccatcaaatgctgcagaaaacttgtttcgttgccaggtcttcctccttccctagagttcctatgtgcaaaccattgtcgatcacttgagagagtacattctttccataacccagtcaagttacttatattccacaattgtttaaaactggatgaagaagcaagaagagcaatcaaacaacaaagggttgaagggtatatatggttacctggcaaaaaagtccctgcggagttcactcacaaagctacaggaaactccataaccatccctctggctccagttgcggggactttctcggtgtcctcaagattcaaggcttgccttctcttttcgccaatcgaagacttcccaactaatgatataacatgtcgtctaagaatcaaaggaggtgtccaaattaacaaattctatcaccgggtagtgattctagagtcgtctaaaattcgaacagaacatctgtttatattttatggtgacttgttttcagaaaaaataggcgtagatgtgagtacaagcgagattctgtttaaattcagctgcagggataagcacaagatcattgagtgtggtgtacagatctttaaggaggaagctgagagtagcagcagcagcagcgaagaggaatactttgatgctgaaa

SEQ ID NO: 168724 - DNA, 416 bp, Arabidopsis thaliana landsberg
catttagcttattttgcacacttaggatcatcttgcatacatattgcatgttttggtgtattttcaggtgcataaggagtttacaaggattctactcgaccctctactctatccaaccaagagggaagcagcagagcattctactcgaccagttcactcgatcgaggcagccatagaggaagcaacaattcactcgacccacttactcgatcaaggcagcctcagaggaagtagcagatcgatctactcgtccctcctactcgatcctctactcgatcacgggcgaccaactctacaagacttgttgatctatcaaagcatcttcggatcctcctcattccccactcaaccagacatctgagcatacagataggagaggaaaacgcatctattcgaccaattgatcactcggagca

SEQ ID NO: 168725 - DNA, 2227 bp, Arabidopsis thaliana landsberg
tactacttcttgattgtaaacatgcatacatgtgttctgtctttgatgggtttatttttggaaaacatgtatcagtttgatgatataatcttcaataattttcgttcctgtatgtagatcttttcttaaaaatgctttgattctttaactatggatgcgtggagactatatagtgtatagtttccttaggcttctgtttttgttctgaaacataaacttcatcagagctgaaaaagaatagttaaagcttacaagttctagttgcattaggcattagccaacacaaatagtctggtttttctttgtttgatttcagtactctgcagacacgattcttttacctgctctttgcatcaatttcattaacttgttagtgtattatcgattttgcaaatatctaatgattgtattctggttccagctctgcgtatgaacaaggaaagttttgtgacgtatttcaccaaagggcttctggatggaggtgttgtgagtcatgtggaaaggtaactatatgatttactagttaaaattttctatgtctccttggcatcccaaaatcatacatggggtttccagatgtgaagtctctcactaatagcatttcgtgcagcgaattcattgtggatgtattgcgtctgcttctgcttatacgttaatggatgctggaggaattgagtgtttggcttgcgcaagaaaaaagtttgctttggtgagggacgatttcacttttttatttcctgtcaccaaattccatccatattttttctcggaggcatgatgttacctgattcaatgtctctcagtaattatatatcttaagctagcaagcaaacttcaactgtacaaagatcttttcaagtttaagatcgatgttgagctgtagtctgtgtgctataacagtctgtattcatgtgtttcagggacccaatttttcgccatcaccgtcctttcttttccagtctccaatttctgagaaattcaaggacgtgtcgatcaactgcccctcataaactcccccaaatcagataagcaaacagcctcctagaagtttagatccttcagttctgccgtttgagtttcgtaatcgtggaggtaataatgaatttagtcaacctgcttctaaagaaagggtcactgcatgtaccatggagaaaaaaaggggaatgaatgacatgatagggaaattaatgagtgaaaactcgaaacattatagagtatctccttttccaaatgtcaatgtatatcacccactgatctcactaaaggagggtccatgtgggacacagcttgcgtttcctgtgccaattacaacaccaattgagaaaactggtcactctagactagatggaagtaatttatggcacacacgtaattcttctccgctaagtcgcttacacaatgacttgaatggtggagcagactcgccattcgaaagcaaaagtcgtaatgtgatggctcatcttgagacgccaggaaaatatcaggtggttccacgattttggcccaaggtttcatataaaaaccaagttctgcagaatcaatcaaaagagtatccttcttctcttatagatactacattggaatataactttgtatgtttaccagaagcatatgaatcatgctttttttcatacttctgtgtccttttactcttgcttttagtttgtcgttctagcttttgatatgaataagtctatactaggttgtagaatagggtggatgtaaggctatcagataaatggttttagggataggttttactttggatacttctaagttaccagaaccttaacgatgtgtaagatctgaatccgttgtcactcctctctttgagaagatcctgagtgcaactgatactggaaagcggctggtcctgccaaagaaatatgcagaggtaaataactgtttgcttatgcaagtacatattctcgttttcttatttaaatggttaatcatgtgaatagaatttgggatgtggctctctgttgcttatagcaaatacttcactgcttttgtatgttgaatctagtagtcataatatctgaaaactttacagcgtctcaaattatatataagatgccaaatgaacaaggcatctgctatgtaacaggctttcttgccccaactttcccacaccaaaggtgtgcctctcacagtacaggacccaatgggtaaagagtggagatttcagtttcgcttttggcccagcaacaaaggcagaatatat

SEQ ID NO: 168726 - DNA, 1177 bp, Arabidopsis thaliana landsberg; identical to SEQ ID NO: 11622
  unsure (1)..(1177): unsure at all n locations

SEQ ID NO: 168727 - DNA, 3058 bp, Arabidopsis thaliana landsberg
atggtaccttcattgccaaagctagtacgagctggaccaccaaaagtcatccatgttcttttagatggtcaagttgtaggcacgctatcttctaacctagtcacgaaagttgtctcttatatacggagactgaaagtggaggctccttcagtggtaaggcgtatttacttcttaacagtatttggtgacggcaacctatttcattagaaaataactatatatgcgaatgcttctttacagattcctgaagacctcgaagtgggatacgtacctacaagcatgggtggatcttaccctggattgtatttggcatcatgtcccgcaagattcattaggcctgttaaaaatatatctataccttctgataatattgaactgattggaccattcgaacaggtagcaaatcctatcaatattatcttcatatccacctttcctggtatacaatcaaattataagaaaaagattctaccaaaccaggtttttatggaaataagctgtcctgatggtggaaatggaggaaggaataactcttccctagcaactcacgaggaaattcatccaaccgggatgataagtgtggttgctaatcttacaccttggtcagatcataaccaaagtccccgtaacatgtatcagtgtcaggtattactagaaattcgatgcaaattttttatgattatgctgctggaagttttttaaattttcagttatacagatggcgaaacaaaccatggcgtactctactcaagcactccaatttcgtgccgaccagaagatttaccacctgcaggtcatttcctatcttactcttagaaagctgaaagtacatggtacaattttcagttgatcatttcgtctcttttggtcccattattaaattctttttgtatgctacagactcctcaatcccctgtggtccgcacaaaaacatacaccacttacagtattgatgagaatcctacagggactaatgcaattgttgctgtcctcgcacatacagggtaagaaactgcttttgcgtacaagatcttgtcagtgataagcttttttcgttaatgtttcttctcttgttcttttatccacctacctgtctcacagatttgatatggaagacgcgatgattttgaacaaatcatctgtggagcggggaatgtgccatgggcaaatataccaggttcgagttcccattctcatttctttattaagagtcctgctgattagctgaatatagtgcttaagcttgatgtaataagttcctttgggtctggagctttatcataatcctggtcaatgtcccctaggtcaatgtcccctacacttgttcctttatgaaccccataaaaaaatcttgtagttgcagcgagagatttagtatcattatacaaatcccccaaatttcttattttttttaatttcctaacccttgtctttatatgatctcccagacagaaaatattgatctttcagatcagaatagccgatttgatagtggttctaaaagttttaggaggagtactaacaaagcagaacattttcgtatcgatgctgatgggttaccatctgttggacaggtaaataactgctttctatcctctctatgtactgtaagttaaatatttaattttagtttccttgtcaactttcatagaaactcactaatttgttgggtttaacgcagaaattatatccagatgagccgcattgtagtatctatgatgaggcaactaacaaaacaaggcacatgaagcgtaaaggtaccgaccctgtcatagttgactttgtctctgtcgacatgaaaagcaagaaacatcctcaaagggtgaggtttagctccaactatcgcatagacagattccaattggcttaaaatctaattttcgagttacttggcatgcgaatattcgattccggcatgccagataccccataatcggtgacaagttcagcagtagacatgggcaaaagggtgtttgttctcaattgtggcctgatattgacatgccatttaatggagttactggaatgcgtccagatctcatcattaacccgcatgctttcccatcaagaatgacaattgctatgcttttggaatctattgctgctaaggtatccttcagaatttttctccttagaaatttgtctgattcttaggttccatcgacgctgatgctgtgcatcttcttttcatgtgttgttgaacccttcccatttttatttttagctggtaagtaaagtatatgtaatgcttatatcctcggcttttacagggaggtagtttgcatggaaagtttgtagatgcaacaccgtttcgtgatgcagtaaaaaaaacaaacggagaagaggagagcaagtccagtttgcttgttgatgatcttggctccatgttaaaggaaaaagggttcaaccattatggtaccgagacattgtatagtgggtatttaggagtagaactgaagtgtgagatatttatggggcctgtttactaccagagactgcgtcacatggtctcagacaaattccaggtttttcgacccttctggcttcatttcttttatcatcctgacatatagtctccaactggcacttgtctcatcttcgtgctatatctgaatcataatactctggcttacaggttagatctacgggacaagtggatcagctaactcatcagccaataaagggaagaaaacgaggtggtgggattcggtttggtgaaatggagcgagactcactacttgctcatggagcctcctatctattacacgacaggcttcatacatcttcagatcaccacattgcagatgtgtgttcgctatgtggaagcttgctcacatcatctgttgtgaacgttcaacagaagaagcttattcaagaaattggaaagttacctcctggtagaactccaaagaaggtaacttgctattcttgcaagacaagtaaaggcatggaaacagttgcaatgccctatgtgttcaggtacttggctgcagagttggcttcaatgaatattaagatgactcttcagttaagcgatagagaaggagtaactgattaa

SEQ ID NO: 168728 - DNA, 1888 bp, Arabidopsis thaliana landsberg
agttttccacgaaacagcgtttctcccttggtttccaacaggctcgccgactccagcgattccaatcaccgagatgatcttcccccgatttacaagcgtcgaatggtttggacttcatctgagggctctgaggctgatgcagcgtcgtcttcgaatgcatccgaggcaactccctttgtggctcgggaggacgctactgctgatattgctcgcgagctagatttgcccgaagattccgagtcgtcccttgttcgtaagctccgtgtcccagctgctgatgaggccggtgcttcgaattggcaggacgtgaccgagccgttttatcccgaagttaagatcaaagagcatctgtttttcgggcctgatgagacggagaaccttgttcgagcgttcgagtagaccgcttttgagaaagccgagaaaaagaagaggaagaaaaacaaaaaggtggttcggccgaaccctcccgactcatctttatccaccgagtagtcgttgtctgacttaagggctcggttcagttttggcaacgtcacccttcgcgttcctagcccaaatgagcgagccgacgatcctccagagggctttctcactctgtacgaaggatttttctacctttgttttctctggctgccctttccgaggctgattctggattacgtgacctcgtatcaaatagccctctcttaaattaccgctcgatcgctaagaaatctcatcgggattcgtgtgcgtggttatgaaaccgagagtgaggtcacgcttgctcacctccgaaattatttggagatccggcgagttctgaagtccgaggcagatagatactatatttctcctgctaagaacagaagattatcgaggattttccgagcaaggatgatgcctacactgattacttcttcttcgtggctttggaggacgctgtccttaaagatctcgtcgggaaagttctgacgaaatggggaatttttggtagtttagacattccgtgaattgacttgtctgtgcccgaggtgattactgtaatttatgctgacattattttgttgatctgtttccacagatcgcccaatcaggtttctcgagccgtgtcatgacgatctcatatcctgtcatcgagagctatcggcccacaagtgtcactggacgaagcacttctgtgagaccccgtcccggacgtctcggcgtccggcgacgttggactcaagttcgcgcctcttcctggccgaacctcttaatttttttgcgattcaacatagaattgcctttacgaggcttaattctataattgctctcttattacacagcgaaagtctttctaaccttggtttaattccaaccaactcttgtaccggtttcatcgtctttgtcccttagacttagatcgatcctttacgcggtcaagacatgcatatgttcgctaaccattctaagccaaacaatcgcatattcctttatcctactttcagtgtcaattaccaaacgtctatcttaactaataagctagatcgttacataccttggccaatatgcggatttgattccttagcccgtttgtcgccttactccattcgttcaacgactcatatccgatcgtgaattgatgaaccaatccctatcgttacttagccatacaaccaaccaaccccactggtctaagtacaacgatagagattgggatcgtacgattcccttggttcacgatggccgaatcaagctcttggcttattggtccattcgttctccaaacgtacgcccctccggctacatggtggacgattgagccctcggcttataaaaccatccatgtttccgtttcggtcgtttaacactatgaccgcccacggtttactaaccgtttacccgtccggtccatggtggtcgataa

SEQ ID NO: 168729 - DNA, 1879 bp, Arabidopsis thaliana landsberg
tctcatgtcgcttgtcacgctctgaaggtgatacggtgtggtcctggccaagtaagatatgtctgttctttaaagtgtgtgatcactttcatttcatgcaattggggataaacattgagaccagattattttattctgccagatctcttttaggtgttttttttatgcatcatctcattgtttggttgtgatgcctttaattcaagcagcacacgtagtttaagtttaagtttttttctgtgaagacgtaaaatggtgtctttagttcaagcagcatttagttgtttaagtttgtggttgtaaattttccaaacatggcagagaaagttaggatatataacttttggtctgcctttttcagtttcctttttttttctactagtaatggagatattttttcccagcttccacatcttgcaactacttatgctgcagtgaatgcacttgttactttaggaggtgacaaagccctttcttcaattaataggtggtgcattcttttttctttgtggtcagtttcttttattaagagtctagtgatgtttcctctagaatacttacatgtgactcattcttctttcagagaaaaaatgtcttgttttttaagacggatgaaggatacaagtggaggtttcaggtttgattctctttctgcttgaacttcttaaaggcatcatttttactgacagcgcactctttatgcattcgtatcgctgttaatgccataccttcagtcatgttgtttttttaattcttgcttaattctacttactcactgatcgttaggatgcatgatatgggagaaatggatgttcgtgcatgctacactgcaatttcggtgagttttaccaacttctattttccttttctctgtttttgtggacaccaaaactttttaggattaatgagatcaacaaagtctggacccattatgctatgtttcttccgttttcatggcttaaacatcacattcagattacgatatgatcttattatttgcacacttgcgcccaccagatactttgaatagagattactcgttttgagacttacacgtcttgcaaatgcatcctatggctggttttctccctgatatgtttgacttctctcttgtgacacaggttgcaagcatcctaaatattatggatgatgaactcacccagggcctaggagattacatcttgaggtagcttttcttattacttttatctcgcattatatatatatagctgaactactgttatacagttgtaaattcaggaattcattaatttccctgggaaagctcttttaactcgatttatattgagcagttgccaaacttatgaaggtggcattggaggggaacctggctccgaagctcacggtgggtatggtctcctacttacttccattatgttgaggcttagataaaaattgtgctttgcttccctcttccttgatgacatggttattgatggttaagtataattaattttctgaaataggatttgtcacctgcagctttgcttattaccaagttgttttttgtttaggtatacctactgtggtttggctgctatgattttaatcaatgaggtcgaccgtttgaatttggattcattaatggtaacatacaatgctgtttggagatgattaataattttccctgagagatattttccttaccaaataatttccttatgattctagaattgggctgtacatcgacaaggagtagaaatgggatttcaaggtaggacgaacaaattggtcgatggttgctacacattttggcaggttaactttctatctttcaggattattattggccctacttctaaattcttcaccgttggtgtcttttcttatttcctttgggtatatgttaaacaggcag

SEQ ID NO: 168730 - DNA, 401 bp, Arabidopsis thaliana landsberg
atggatgcccatgccggcttctttcagcgtttcgcgctccagcggcaacagtttgcgcacgtggtcgcggctggccagctccggctcctctccgccgtaatcggcgtgcagcttgatctggctgtacagcgtgtgggccagcaaacccttgcccttctggtagatcgcgacgcccgtttcgtcgcaggaagattcctcgccctactcgggttttgaaaattggtattcggtctcggtataattcccggctcgcccgaggttagtgggccagtttaccatttggagattccatgcccagcgtcaaagttcgcgagaacgaaccgttcgaggttgccttgcgtcgcttctagcgtacttgcgaaaaggccggatgtgttggccgaaacccgctagctcgagat

SEQ ID NO: 168731 - DNA, 2324 bp, Arabidopsis thaliana landsberg
  unsure (1)..(2324): unsure at all n locations
gaaaaaaaacgacatgcgacattttaatcctgtttaaaatctgccgatttgtggaaggtatttgcagctttcgagtgtttgtgctacatacggggtcgaatccatcattcccaaaggtaaatattgttagatctggatttttaagcacacaattagtatctttcacaaatttatagtttagtaactgttgataannnnnnnnnnnnnnnnnnnnnnnnnnnnnnnnntgtataccctaatactgtttttagatggcgaaccaccctattcctcgtcggttgtttcgggctggatctgaaccaaacggtgagagagtccagtcttacagtgagttatctttaatcgatgacatcgccaacgctttagatgaagaggacatgaagattctacatgaatcgcagtttggaaaattatttgatatccaggaaggagctgcgtattctaggaagcttattcactttctgctaacgaggcagttagttgttagcaacaaaatgaaatctggataatattctctggttccccaattcggtttttgatatctgagtttgaaagagtaattgggctcacctgccccaaactccctcatgtcaaagagagaaaggggaaacaaaaattacttccttgcaagtattggtacaccttatttgaccggagtgatgtatctgttgagtgggttgttggtaggctgaagaaacgaatggttgaagatcaaggaattcgtctacggtacgctgctctagccctcattgatggcgtcttgtgcccgacgtcgggtagaagcaaaatatctctggtacatgcggacatggcagaaaatctggataagtttcttaatcatccgtgggaaactacatcttttttattgacgttgaagagtgttacagcaaggggtgctgataagcttatgcggaaatctgtcacggttcagggattcccacacgcaatccaactattgttccttgaaagtgtgcctcgaattagggaattgcaattccctgaggttgacgaagatgatgactcagatatggaggaaacacagaaggaaattgagcgtctatggagcttgaagttggatattgtctggaaagtcgataggcagtcccaggtaatcgttgcattttcgtccttttataaaatacatactattatactttatatcatgttatacaaactgtagttaatgtacttctacataacatgatttgaaattgtctagcatgtattaacttaaaatagcgtacttattgggattgcagtatgtgaagggtaattttagagatttaatacaattagtctacgttatttcagggtgtagtatgatttattgataaatcacatgctttaaatttatgtaacatgttttaatttaatcaaccgtgttatgtttggtctggagttggggttttaatctagttgttctatgggataccgtaataatgtattgactactttacataagttttgtattgcattacgttaagggtaatgttagagatttattaaaattagtctacattatgtagcttttaatatgatttattgataaatagcatgttgtaaatattttccacatgatttaatttaatcacccgtgtaatgtttcgtctgtagttgggcgtaaatttagttggtttaggggataacgtaataatgtattagctattttactatagcttcttattgttttaaatttatatcatctgatatttatgaatatactctggcttttaaacgtaaaactaatcattcgttattaataacaatagcatgattttaaattaagaaatctttatttttttgcagatcaaagtcacatctgttatgagtggtacagctaatggtgaccctttctcgagagggtggattgatgacgtagctgatcctcgtgttgacagcttattgcaacttatttgagaggattacctatttaagggatccatgttcttaggtggtgtagtccctgattcgttgcctgatgaaaggaatgacaacagcgatgtttgtagctctcatgattgtagtgatgatgacaacaaccaaactgatgaaaccatggatgcctcctccaaaattcgtaaagctaaaggccagtttagcataccagactcgatcaaaaactatattgacaagaaagacaagcgaatggagactcgtatgttgaaggctatagctgattcggaggctagattaagcaccttattgagagcaacccatggcaaacatcatgtgtatgaagaggttccacgtcctcgagtggttgtgaagggaggataatgttgtagatctggatacatctgtgggagtgcatcgataaggatagt

SEQ ID NO: 168732 - DNA, 942 bp, Arabidopsis thaliana landsberg
atggttttcaacttaaattcttttttatatgtgtgacatttattctccgtaatatttttccatggatctgacttgtgagtcattttcataaaccaacgccaaagatgaatccatgtttcttacttggaaaccctgaacaaacaccactgacaggagacgctcgcgttggcgtcgctcattgacgacgaaaagaagcttggcgactgccagttcgacctctggaagcagtactacgtggtcgcatgcgtcgttgtgttcggcaagctccggcacagccgccgcttggacgcggtccaaagcggctgcaccgcgctgtccatcttcaaatagggggacttcatggtcgtcaccaacgccgacgactcttgggttgttatgggcacgcatccgacaacggcgctgtcacaccgtccatctcatcgtccacctgaagcccaacctaccacgtaagtcgctactgaccggacatgaattcttgtgcgctgggacgatggacgttgctgacgttgtgtaagtgtcctcgaacatgatgtatgtagtggagtagcgcatcaggtggtgcaacggccaggggtactacctcgctgatgagcccggggtacacttcgtttggcagcccaaccaaaagtcatcggtactcgtcatgtcgcacgcgttcgacgactactatatcgaggattgtggcgtcatcttagcgtcggaggtgacgtagacgaggatcgacaacagtgaccagttcgtcatcctcgccaccgtcagggtagcttttgtgccgaccttcctttaattctcttcgcaaacacacgcacttacctttttgtttaagcaagaacgtatggtggtgtgtgtctgataactaacgatgtacgaggaaatttcttccgacatgtgtggaacgtgctctccaatgatgagaccatacaaatcgtgacatatatcgaa

SEQ ID NO: 168733 - DNA, 876 bp, Arabidopsis thaliana landsberg
tccagatcatcggaagagctcctcaccgttcacttgctgatttctcgagagtttatggaccagtcatgagtcttaggcttggaagtttaaccaaagtggtcatttcttcaccagatgcagcaagagaggttctttaaacgcttgaccatgtcttatccgggcaaacctttagcaagacggttcgagccttcggccaccacgaagtctccgtagcatggctaccttcgacgtcgtctcgttggaggtaaattataagttaatgtgattaattaaatatggttatctatctatatatataaatacaatgttccaattaggttatggatactggcgacaaaacttttctcacgggagcatcacaaagccacgaagtccgtaaggtcgaagaaagcgaaagaacttgtaacatttcattatccaaagaggcgaacgaggcttctccgtcgacattgctcgtacgtgcgtgcttcatcacgtcgcttaatgtagactcaaacgttgtgttttcgatcgacttaggtagttacgatccgagagcctccacggagctccaagactccttgtctcgtatgatgaaaacaatggggaaaccgaacctcgcaaattattttccgtctcttgagtttcttgatctacagggtatccggaaagagatgaaggtcatgtgttcggagaggttgtttcaggtttttcaaggcctcatcgatgctcggatcccggaaagatcatcgcagattggacctagagtcgatgcactgagaggcgatttgttggattcagtgatcgatcttattcaagaagagggatcggaagtcgacatgaatgatatcaaacactttttatgcgtaagtgatataagtcttaaattatggtttg

SEQ ID NO: 168734 - DNA, 2155 bp, Arabidopsis thaliana landsberg; identical to SEQ ID NO: 37685

SEQ ID NO: 168735 - DNA, 1608 bp, Arabidopsis thaliana landsberg
tactcttgataagttggatatgatgattgtgaatttacgagaggccaagttcaagcgaatgcagaaggttacaagtctgagctcttctttgtaatgtagtgcaagtttttctgcgtgattatggtttctgactttcatcactttgtttttctaggttcaagatcttgcagtgtccttgttggagctctggaatctgctggacacgcctgcggaagagcaaaagatatttcacaatgtcacatgtagcatcgctttgactgagtctgaaataactgaggccaacatactttctgttgcttccattaaacgcgtgagtgcacaggaccaaacctttctgtgttttctccctgtattgtttagtctatccgtttataatagtataggaacaatcttttttataatgtgagtttgttttacaggttgaggatgaagtcattaggcttagcaagatcaaaataactaagatcaaagaggtgatactgaggaagaagcttgagcttgaggaaatatcaaggaagatgcacatggccaccgaagtcttaaatcagaaaacttttcagttgaagctatagaatctggtaagccattattaggaacagcttattctttacataatatgatgtgcacaaactccagaaatgttatgctcattatactggtagataacatgaacatgctaataataacatgtttccactcatcttttaggtgtcaaggatcctgagcagttgttagagcaaattgattccgagattgcaaaggtcaaagaggaagcttcaagcaggaaggagattcttgaaaaagtggagaaatggatgtcagcttgtgaagaagagtcttggctggaagagtacaatcgggttagacatttaaatctaaatctattcctttgcctcaatcttttttttgttttgttctcacatcgttggcttcgcaggatgataaccggtacaacgctggaagaggagctcatcttacattgaagcgtgcagaaaaagcccgtttacttgtcaataaacttcctggtagcattcttgctctttagattatattacagaaacctacaaactcataacttatgatcttttttgtctattgctttctgctgctattgatgcagggatggtggaagctttgaccgccaaagtcactgcttgggagaatgaaagaggaaatgaattcttatatgatggggtaagtggttttttactgatcaatgatctgttctacacaattatcaaatcagcatctttacacaaaagcacgtaaatatttcaggtccgagtcttatcgatgcttggtcagtacaagactgtatgggaagagaaagagcatgaaaaacagagacagagagtaaggaaaactgttttttactaggaaccaaggtcactatgagccaaaagcatcattggcaatttgacattgttactttcatctcaagatatgaagaaacttcatggacaactcataacagagcaagaagctctttatgggtctaaaccaagcccaaataaaagcggaaagaaaccactgagaacaccagtaaatgctgccatgaacagaaaactcttccttgtggtgccatgcttcatcaaagcttaaagcatg

SEQ ID NO: 168736 - DNA, 766 bp, Arabidopsis thaliana landsberg
tgaagaggtttggcgaagatcccggggggctgatcgggcagagaatgccagtgatatatattctactttttgtgagtgggtgctgcatgacacattcgggggggctctccacgtgaaactgcttcggtacgtgactcaagcagactatgatcagagcattcttatgtggcatattgcgactgagctcttataccaaacagaagaagcaactgaaaagaatcaatgtaaccgcgagttcagcaaaatcctttcagactacatgatgtacctcttattcgtgcagcctgctctgatgtcaacagttgcaggaatcgataagacaagtttcatggaagctatagcagaagttaagaagtctggagaagctaaaatgttcttgaagaggaagaaccgtgaggataaagacctagagaaggtctgcgatgagattttatcttctcttggggcgtcaagggaaagaagaggcaggagacatcaacgcaggaatgtgctagctgatgcaagtagactagcaaatgcgcttaagcaactaagtggggaaacgaagtgggatataatgagtaaagtgtgggtggagatgctttgctatggagcaacttactgtgacccgaaacaacatgtagcgcaactgtgcaaaggaggtgaattcataagctttgtttggctattgatggctcattttggccttggagaccaattccagacaacagaggagaatgctagagccagactcattgtggccaagtaaacctctactatgttcctt

SEQ ID NO: 168737 - DNA, 1328 bp, Arabidopsis thaliana landsberg
tcttctctctcagatttctctccatcactcatcgtctctagcttcacctctcgtcttctcacagcagcaaacttcttctcttctccttcttcttatacttcctctgcttcagatacaactatgtttctctcttctgtttctcccagaagaatcaacgagccaaagattgattcggagaccaaagaactcgcttcttgcgacatttttgatggaacttgggtctttgacgattctgaaccggtttatcttcctggttattgtcctttcgttgaagataaattcaactgcttcaagaatggtcgacctgattcggggtttctccgtcatcgatggcaacctcatggatgctcgattccaaggttagttcttgttttcgtgttaattacgattctgccattaccctttgcgactctgttttcatgagattgtttctgtcttgcgtcttttagattcgatgggaagaagatgttgaagatgctgagagggaaaagagttgtttttgttggtgattcattgaatagaaacatgtgggagtctctggtttgttcacttaggtcaacattggaagacaaaaacagagtttctaagattattggaaaacagagtaatcttcctaacgaaggcttttacggtttcaggttcaatgtaagtgtctcacagaacagaatcctccgttggtttattttagttttggtgatgaattttgatatttgctgttaggactttgaatgctctattgacttcatcaaatcaccattcctcgttcaagaatcagaagttgtagatgtatacgggaagagaagagagacactgagactcgatatgattcaaagatcgatgacgaagatatacaaaaacgcagacattgttatatttaacactggtcactggtggactcaccagaaaacctacgaagggtatgtgaactatgagaaaaaccttcttctttgtttttgattcgtatcacttcaaccgatttttcgatttgcaggaaaggttattaccaggaaggaaatagggtttacgaaagattagaagtgaaagaagcttatacaaaagctattcatacatgggctgactgggttgattccaatatcaacagtactaaaaccagagtcttcttcgttggttattcctcttcacattttaggtatgaactgctttctttcaatccaagcaatgtgttgaacggcttagggttagttttgattctgagttttaactgcagaaaaggggcgtggaatagcggaggacaatgcgatggagaaacaagaccgatacagaacgaaacgtacacaggagggtatccatggatgatgaaagttgta

SEQ ID NO: 168738 - DNA, 1277 bp, Arabidopsis thaliana landsberg
  unsure (1)..(1277): unsure at all n locations
ttttttaaaaattattcttttacggttttgtaaattacgtgattttagaagttttgggggtttggatgaacgattgaganattttatcgtcaaatcaatttggaaaccgagtgatttatataatagtaaaaaataagtcgaacatgctcatctctaatgatcaaaagataggatgttacgttctgtttattttcactattagacgattaacataggtttatacataattaatctgacaatatatagtatcttttattgataagaaaacaaaaatctgtaaaagcttatatattagccttggaaaaaacaattaagaaaagacgtagagaaacctagcaatagctaaatagctaccattatatatttcgtgtatttattatctcatgatagccggttaagtaaaacaaaaatgggcaaattttaacgttcaagtgagccactagctattgaatcttcttcggccatcttttattgggaaacaattgatcccccaattgcaaaaatacacgagagattgttatggggaattctggtgattttgatgttagttttcacttacaacttgcaagcttatttgaagatctgtgatttgcttgtgtacaatctctcaaacatgtccatttagtgcattgagtttcacaataaacgttacagagattgctatggggatatcttggtgtttcagttatctttgcatgctttagttatgtttatatatgattgtggttgaagatctgtctgcttgttggtgattttgatctttcaatgcttaaaaacgttcaggattttcgattcggtagaccatgattttgacaaattagaggtttcgagtggatctgaattgaagaataagcctgatggttgggaatcaacagcaaaggaacaagatggaaacctctgggagatgtcacaaagagaagaagacattcttctccaagaatttgatcgtcgcactgccttctgcaaatttcaggtaccaccacacaaatcttcatacaaatgttctgttctcttgcaatagaacctaccaaacttgagactttctagatttcatcagcatgttcttgaaatttgatgcgcagatagctagttttataaagcaacacatattcagtaggagaagaccgattgatgggtggaaatacatgattgaagtgattggtccaaatgcgaggaaagggaaaggaagtgtttctaggctcccggctttatcggatgtgtcgactcagccgtttaaagaagaaaccagcagtctcactaccttgaagcgtcggtag

SEQ ID NO: 168739 - DNA, 1916 bp, Arabidopsis thaliana landsberg; identical to SEQ ID NO: 1049

SEQ ID NO: 168740 - DNA, 4023 bp, Arabidopsis thaliana landsberg
atgtaaagcacaaaggacttggaatttgatcaagagcttgtagctgaggaagagcttgaagctgaggagcagcttgaacctgaggagcattttgaaccagaaaatgaacttataacggagaaagagtatgggaaagatgttatcttaacctcgttggttttgatacatgatcatcaaatgggcatgtgtctcatttgtactctttttcccttgtcaagttttgtcccaatgggttttcttaacaaggtttttaatgaggcaaatgattcacattcaaatcacccatttgatgatccaaaccatggtataacattcaaaagttggttagaatatatatgaagtccagccaattttatgaccatcacaagcccaagaagagcccaaaccaagtgagtaatttgctggtcaagaggagtgacgaaaatagcatttcaagagtcattttggagccaagaagtggaagagttgtttttaaactttcaaactagtttttatttcttttcattttccaatgtagtcttgtgagtgtgttccaagacttctctcttctttataaaccccttgtaatctcttatgagaactcatctatctttttataaaaaactctctcttaaaaatagatcatggatccattttcgtatgtcaaattttgatctttctcgacttatcaaaaggcttttccgcatccttttgtggcgtcattcaatcgatcatctcgtctttgagtcgtgtgtcgtctctatttcgagaatatccactccagatcttccaagtgccgaaattgggattgattcctcaccaggatcatatcatctaacaacaattgtcttgccaggataggtatgttattcagtaaatggcagattagtaaataatattaaggttgctgactaactcaaacagaaactaactagtaacagtcctctccgccttgtgcttaggtcaagacgaggtggcacactactactcagacctggacagaccactctgtatggcacctattaatactccaagggtgagtagaattgaccatcttgtaagggggaacatcatagcgactccagaccaagtgatggcgttaaataaacaggttagccggaggatggcagatatctatttgaaagaaacactagtaccaacagtgttgtatgacagagacgcaccaccatattttgacgacctaggaaaagaaagtaaaatattttataagctaattaataaattagaagctaaaatttatgttatcatgtgttatgcagtatacatgtggatatgtgattgtttacaattggttagctgctaatattaaaaattagatgtcaacgagtaactaataagttatctaataacgtggaacactgcagattatctacatcgagcgctactagatgccgactacaaaggtgacgacatctttattggtagattgttcaagaataaggaagactgcacgacaaaacttgcaatacatccgatacggcgaaagttccacttcatttacgccaagtcttgccctaacattgtctttgctgtgtgcgtgagccatacatgcccgtggcgtgtctatgcaacaaaaatggaggatagtgaacgattcaagataaaatgtgcaacccaacagcacacttgcagtgtagacgtaaggggagactttcacaaacaagcatctacagctgtgattgggaaattgatgagaacaaaatacctgggggttggtagggggtcaaggcctaacgagttgaggaagatgctccgtgatgagttcagcctaaatgtctcgtaccggaaatagctatggataatgccatgggctcgacaatgggaagctacgcattgatccagccttatttcaaacttctgctagaaacaaaccctaactcgctagtggcccttgatacggaaaaagataacaaaggtgtggagcggtttaggtacttattttttgccctagctgctacagtccaaggttattcttatatgagaaaggtgatagtgattgatgggaatcatcaggggggccgatacggaggctgcttaattgccctctatatcataaaattaacatcggtattatcaacgataacaacagttgaatggtgttaacaaaactgttagcgctagaatgaaaacaaagcgttacctcgcattttgcatccacatctttagcattgccgagcttgaggaccacgacctgacgaggacctacgacaacggcgggatcttcatcggaatcagaaccaacgacctcatctatttgagggccttcctgtatatcaggtgctgcttccaagacaatgagttgcaatgcgtaaagaagaccttgaaccgccacgcaagtggtagcgagctgtttaacttccctctctttaatggaagtcatcatcatctcgaaagacaatcgcacccaagggtatttcagaaatctctacagatcatcagccatttcggcggtaggcaacaaaaaaccatccacaagagccaaacaagcatatcttaacctaatttcccgatctgttaccaccttcttcttaagcatcgttataactctttcaatagttacgtcttcttcgaggccaaacaaggaactgtaatagggatctgcttcccagccgtccttttcttcttcttattttctacctttggatattttccacacggaaggccggtaacaatcttgaactccctcaacaaaaatcggacaggagtactagcgtaaactacccaaatttcatgcggtttggcaacttccaattgcctactcagtaaaaaaataccaaagctcgcagaaaacgccggcttattcagaaaatccaaaagtccccaagcgaactattaaggacgaaggaccgctcttcatcgtcaagggtgtttataatgccgcatagggtttcgattttgtgatagacattaaccctctcgccgagaggttcttctccaaaggcaatcaaacgattcggtaaatcaacttcacccatctgcaaaaaaaaaagggttttatcaccaacggcagagccaacgaaaaccctaaatcagagcaaattgaaatcaaatccataccatacaagcgaatcccagcggtaaatgagttagatcagatataaaggagtatactgcctaaacaatgaaagactgagcacggtattgaacaacgaaattcctgctatgaaagacggtttactctttcactctttctagggtacttcaataaacgaagataagaacagataagtagagatgaaaggtgacgacgcttcgggtttctagtaaagttcaactcagttcattattaggatcacgtttctccaaaacaaatttaccaaaaagattatgttgccgtctgacacaatactagtctagcggtaatgaaattttcgaaaatataatataggggtattatggtatttgccataggaacagcgtaagataaacagtcgaataacgatcgacttaattttcgagtcttccgagtacagataatgataatacccttattagttttcatatatctaattaaaatcttctatatcgaattatctcttttatttttttttccttttgggtcataaatatcttttttttggtcatcaaatatcttatatataggttcacttttaaaaaatcctaacgtaattatacaaactaaattagaaatatggtacgttttgtgaatctattaataataacaatccgaataaatgacatttgcacttccgaacagttgtgtctattaaaatattgacggttacttttttaacatttgtgtcttttcatcataaacagttgtgtctgttaaattgttgactggtacttttgtacattcgtgtcttttcatcgtaaacagttgtgtctgttaaattgttgacggttacatttttatatttgtgtcttttcatcgtaaacagttgtgtctgttaaaatattaacggttacttttttatatttgtgtcttttcattgacgaaaaattatattatattcgtgtcttttcatcataaacaattgtgtctattaaaatattgacggt

SEQ ID NO: 168741 - DNA, 776 bp, Arabidopsis thaliana landsberg; identical to SEQ ID NO: 13547

SEQ ID NO: 168742 - DNA, 596 bp, Arabidopsis thaliana landsberg
  unsure (1)..(596): unsure at all n locations
tttgtaacaatcaagattcttgtatcttataaaggttgacaaaagcaaagtggtatcacctaaaccgggaatacaagaacacaatggaaagattggagaaggcggtgaaactagactctttagtttcctaagccttccaagatcgcctggaaaagagagcaatgatgatttttctgatgatgatgacgaaaacaacaatgagattggtgtagagctcgatctcgaatcagtaatgtctgacacttttgtctctgtcgggaaataccgagtcagatcgggttcatccactatactaagtgctgtcatcgaaaagcacggagacattgctcaaaactgtaagctggaatcggattcaatgcgatnnnnnnnnnnnnnnnnnnnnnnnnnnnnnnnnnnnnnnnntaggtcaaccccggtagggcagttgagcaaagtcaaggtcaaagagatgcttgcggttctcaaagacttggagtctgtgaacattgaagtagcttggctacgttctgttcnnnnnnnnnnnnnnnnnnctcaagaagatgtagaaaatgagaaaaagagacatgatggtttagtgaaggctaagagagaagagc

SEQ ID NO: 168743 - DNA, 4166 bp, Arabidopsis thaliana landsberg
  unsure (1)..(4166): unsure at all n locations
atgtttgaatgcaatctatatgatgtaaggcattctggttatttactctcctagcgtgcggtgcgacataatgatgttgtcagatgtagcctggacagggcaatgggaaacagtgaatgggcagaaatgttccctaataaaagatccaagtatttgcagtttgagggttcggatcgcagacccttgatttcttattttgcattggagaaaaaagagaagcaaggccgatttagatatgaccgcaaacttaaagacaatgaagaagccaaggtgattattgagaaactttgctagaagatgttaacctctctgtgaatcagaggattgctagggtaaggcaagcgcttattctctagaatagagaacgtttcaggaatagtcaacttctgattgagcagttcaaggaggagttagaacatgtaatggtaagccctgtaaatgatgtacaagtcctattcaggattaattcagatttggagtcggcttatatggaagaagagagcttttggaagcaccggagtcgtcagttatgactttgtctcggggataagaacactgnnnnnnnnnnnnnnnnnnnnnnnnnnnattaataagttctttgttattaaagacgataatggcaaggctgtgtttgatgagcagggcattgtagaggtgatttccaattattttcacaagatgtttgtatctccaagtggggatcatgttggcatggaagatattgtccttgaagccctaagtccttgtatatcagaggagtctaaccagaccttgattaaggaacctactacagaggaaataagacaagctttgtttaatatctatcggggtaaggccccgaggcctgatggatttttggcctgttttttctagactaattggactacggttgggacagccattgttttggagattcgggatttgttcagaacatggatcatgcatgacaagcttaatgaaactcatataaggcttattcctaagatcgagggtcctaaaaaggtggcagattatagaccaattgccttgtgtagtgtctatgataagataatttcaaagatactatcgaagcgcctacaaccgctgctaaactcagttttctcagaaaatcagtccgctttcattccgggatgagctatttctgacaatgtgttaatcactcatgaggttctgcattttctcaaggtgtcaggtgctaagaagtactgttccatggcggttaagatggacatgagtaaggcgtacgaccatgttgaactttgtgaagctgctgtttcaaagcctagcttccatccaaggtggaacgattggacatacagtgcatttccactatgtcatactcttttttgataaatcactcccataaaggtttggttatccctttgagaggtattcgccaaggagacctgttgtcaccctatattttcataatatgcagcgaggttctctcaggtttgtgcaagaaggcgtaagatactgggcagctacatggtatcatagtggcactcggctgtccaaggatcaatcatcttctttttgcagatgataccatatttttctgcaaaaccagcgaaaattccttcttagctgatataaccctgtttttactgattttaactatgttttagatttaggattttgagtctttatgttatttttcgagtcttttcagggaattctacgcagtaggacaacaatggagatgaggagacattttggagcaagcgctaaggaaaagaaacctaaggatgattttctattccagaataagaggagtgtcgattgacacactcttggtgtcgatcgtcaccagttttggcctaacgaagtctatgacgctttcaagttacataagaggaaatttgccctagaagacttccatatttgcattattagtccgtagacgttttatagggttttatatacattgtttagacctaagtttctattcttcatagattcattcagttcttcatagattcattcagttcttaatacagtgaagagatcccttctttcccttatcttatttgttgtgtttatgctttcagatactcaattatgttgtttgcttcaatcaatatggctgagtagtctgcttgttagggatagggtttctcattagggattcatatggtttagtagattgccccctttgctaggttatccatagaattcatcatctttaattatgcttaatgctagatctagagtaattaactagatcttgaatccagacaatagatattccagccataggtatctatagttggatctattatttgatgggtctggtttataggtgtgtaataagaatcggcctatttactaagatgtacaattgaactcgttgagaatgcatatttaggttgatagtttctcggcttctccggttattattagctatagatatagggagtttcgcggcacgcccaccagttattccataattagagtttgagtttaagaatggttcgagaacaacctagctttcattagatctactaaccaatagtttcctgagaataccctgttcctagctctttattaaatcgtttacaacacagtcaatctgctgtctttttactttgttctctttttttttttactgataccatgctagctgaatctcgacatttaactcattgtttgaacaaaagaactccgtgaattcgatcctaaaatactgcaattgatctcttatttgagagagtagttctaggtaatttgaaccatatctgacacttcaaggtatatttcaagtatttccgcttcaaggaagaattatgagttttcatgcaaaaaggagtagaagtcaacaaaaatccgttttagaacagtttgtgtgcatcagatgtttcacatccagccaaggtcttacagatctcggcatgagggtatctcggtgtcattggaaagctagaagagtcaaaattaacgtcgaagttgaatcgaaacaatccatgaagacggtcagaagttatggtccaaagagtgaaaacatgtcaagaaccggctgtttggaaataaaaagtccaaaacacatccggccgatgagacttgaactcgggcagctccgagtggctcaccaccgaccattaggtcattcccaagtctttccctttttgcgccaccgccattaagctcttttcctgaagcccactactcggcccgatcacttacttatccggcggaatgacgttcttactcctaaacctaattcttgggcctcaagtataaatacttgtccttagccctaaccttaaatgtgcctttatcaccagcgaaccctagccgtcgccaagagctgcctcttagccgtcgcacctcttgaagcttgaaaaacaccatctctctctttctctttctcgttttcgtgtaagactctttaaggtggagctttgcctcttgtattctacattcaaagaagtaatctctaaaccccttttaagtttaattcatcttttagttatggtttactcaacccaactttggattagctcctttgccatgagcgagtagatctctagttggggttgaggggggtttcaaagggaaattcatggggaccaatagatcaaagatctaggttggcggtttctatggctttgtttgatcgtttacactatttcttctagttgagtttattcttaatgcttgtatgtccggaacgccacctagtacttgcctttaggtatttcattatttggcacaatctcgtttgaatgtttgacctaactcattgaataaagaactataaccgttgcacacccgccgagtgatagggacttatgaactagaattgaatctgaacttaatgcctgatcttgtattttgaaaccatgttagcacctactagccgacagggcaactgagtacgtaatatactagtgataatagccggttttcacctactagcagttaggattaactagttttgatagagtttcgtatgttcgggaatttggaagtaaacaaacctagccatgttatcacctagattgagatctataccttattattgaatcgtgaacatccggagaaacccccgatgacctaacgcttctctcttatagtttatcgtttagtttagttagtagtctcttagtttagttattcgtagcatacaacaacccctctcttttattttggtcctagcttcactc

SEQ ID NO: 168744 - DNA, 2239 bp, Arabidopsis thaliana landsberg
tatgcttcgagaattgtacggatctacatatttgaattaaaaggaaaccattgctttttgattggttaccattttatctcttgaaaatgtatagggatttatcaaataacaacttgactggagaagtgcctgaatttctagccaagatcaaaccgttattggtcatgtaagttgtctatatattattgtgttgtcttcattaattagtttctaatgatttctccacatcaacagacacttaagaggaaacaatcttaggggttctgttcctcaagcccttcaagatagagtaaaaaatgatggtttaaaactattgtaagaatctggtattcgatgatctaattttgattattatcgacacttttctataattaatattttgtcaataacgttttcattttttagtgttgatccaaatataaagcagcgtaggccacacaaaccaagatcttggctggtggcgattgttgcatctatatcttgtgtggtggttactataatcgtgttggttcttatcttcatcctcagaaggagaaagtcatcaacacgcaaaggtaagttaaaataaatatatggttcatattgaagtatgaaatctcatggatctacaaaattatatttgaagtcatcaacacgtaaaggtaagttaataaatatatgatcctaaatatataaatataaagaccctaggcgaaatttagaggtcgtcgattcgagtgacgcttgggacaaaactaatattacatgttgtggtttcgggtctgaaggattatcggcccagaacctcctagcattcaaagaaaaagaaaaagtatgaaacctaatggatagttaaatttattttctgcagttatacgtccatcattggaaatgaaaaatagaagatttaagtattcagaggttaaagaaatgactaataactttgaagttgttctcggtaaaggaggctttggtgttgtgtatcatggttttctcaataatgaacaagtagccgtcaaagttctctctcaatcatcaactcaaggctacaaggaattcaaaacagaagtacttatttacactaaaatcttccacttaatttttggacaatcgtgagctcatgaattataccaaattgttgatatattgttaggtcgaactacttctaagagttcaccacgtgaatttagtaagccttgtcggatactgtgatgaaggaaatgacttggctctcatctacgagttcatggaaaatggaaacttaaaggatcatctttcgggtaaaccattagagtatgatacaaagatttttgagttacatgccaaatgctttaaaattttgtattgatttctatccatgttgtgaattttggcaggaaaacgtggtggccctgtcttgaattggccgggtagacttaaaatagctattgagtctgcactaggtttgtcgaaatttcattaattccttgttatattactttttctaaagtttatatatattctttttccttcttcctttaaactatcttcataaatagttaacatatgaagatttttctgtgtactaggaattgagtacttgcatattggatgtaagccgccaatggttcacagagatgtaaaaagtaccaatatactgttaggtctacggtttgaagccaaacttgccgatttcggactttcaagatctttcctagtgggaagtcaaactcatgtatcaacaaatgttgctggaactcttggatatcttgatcccgagtaagttctagttcatatcacattatagtatcaagatttgttttcttgcttgtttagtaaacaaaaatcaaacatcttcgactacttttcttgcagatattatcaaaagaattggttaacagagaagagtgatgtttatagctttgggattgtgttacttgaaatcatcactggccaacctgtgattgaacaatcgcgtgataagtcttacatagtagaatgggccaagtctatgcttgcaaatggtgatattgaaagtattatggatcgaaatctccatcaagattacgacacaagttcatcttggaaagctcttgaattagcgatgttgtgcattaacccttcttccacactgagaccaaacatgactcgggttgctcatgagctaaatgagtgtttggaaatatataaccttactaaaagaaggagccaagatcaaaattcaagtaagtcctcgggacataccgtaacattcatcagtgatatcccttcagctcgttga

SEQ ID NO: 168745 - DNA, 512 bp, Arabidopsis thaliana landsberg
aaacttcgccgccacagatctcggccgtgattcagtcctcgccgcgccggaatactgcaacgccaattttcacttcatacttcacatcaaccttctggtctaatccgactctctctttaaccttcgccgatcggaaagcatgctacttcaacactggagtcatggtgatcgatctttcccggtggcgcgaaggcgcgtacacgtcacgcatcgaagagtggatggcgatgcaaaagagaatgagaatttacgagcttggttcgttaccaccgtttttattggtttttgccggtttgattaaaccggttaatcatcggtggaaccaacacggtttaggaggtgataatttcagaggactgtgtagagatctccatcctggtccggtgagtctgttgcattggagtgggaaaggtaagccatgggctaggcttgatgctggtcggccttgtcctttagacgcgctttgggctccgtatgatcttcttcaaacgccgttcgcgttggattcttga

SEQ ID NO: 168746 - DNA, 3253 bp, Arabidopsis thaliana landsberg
atgaccaacattcagtccatgtctaatgcgtttggctctaccacactccatcgatctgtgtctacaattatggaaggaaaaggttagtgttttgttcatatttttaatggagattcattgacaatataaaaatatttatgacgaaacacaagcctaacgcaattattacaatctgaatttttcaagtgagccaataccaaagtactacttcttgcactagcaatcacaaacagactcctttgcagccagaacaagatagttttccaaggaaaaatctgcaaaacgactttgagaatgcctttcaatctcatattactcaaggtacctattacatccaatttataatatctcatcacattagaatttatcatctaatccttacacattatgttttgatttattaggtcaaagttctgctgccatcaataatgactttcagtgtgaaatgtctgatgttgaatttatgcctcatttcgactatgatagttcatcaaacaatgcaacagatgaggaccaacactactatctcagttcaactgaagatgacattgatgacgaatctacattttctattccatttgctgacccatcatcagaatttgacaactgcgtgaacaatgcaaaccaaacagaacctacaacaccccatatcaccagacgtgcaaaacatgataaattcatggatactcttgacaaaattctaaagaaaaactattgcaaaagcagcacaaaatcagaatttgtcgcagccaaagaaaagaggaaggccacgattgaataaagatacaacctgtttggctgggaatacaaataaatcaggtataatgcggactttacagtataacaagtatgtataatattttagagttacttttgtttccctaatgattttctatttacatgtaaagcttaccttgatcatggtgatgcaacatacaagtgcaactattgtggggcgttgatgtggtttgctgagcgtataaataagaagcagaaaaacaaatctcctacgtttacactgtgttgtggaaaaggaagtgttaagttaccacttcttaaagattcgcctgcgcttataaacaagcttcttaccggtgatgatgcgctaagcagaaatttcagagaaaatatccgaatctacaatatgatttttgcaatgacttcacttggtggaagagttgataactctatgccaaaaggtaaaggaccaaacatgtttagactacaaggaggaaactaccatttgattggcagcttgaagtcctaatccgggtgattatgctaagtattcacaactttacatagttgatacagaaaacgaagttgataacagagctactgtcatcaagtaatcattttcgtctactattttatatattttattttccctgcagcagctcaaaacaataacatggtttaacaacaaccttcacgttttctgtattttgtagcaagggaaaaggtcgtcggaatacaccagcaaaacagaagctaaagaaagaagttattgaagccctcattgaaatgctaaacaaagtcaacccttatgttgacaaattcagacaagctagagagagaattcaagatgataatgatgaaccgtttcacatgcggattgttgcagatcgaaagggtgttgataggaggacatacagtatgcctacatcatctgaggttgccgctttaatacctggaggttttcagccatcgatgttcgaccgagatatagtccttgaagaaaagactacaggtcatctaacacggataagtcagattcatatctcctacttggcattgcaatatcctcttattttgtgctatggcgaagatggttacactcctggtatagagaaatgcttgccgaattcagccaagaagaaaaagaaaaagtgtataagtatgcgtcaatggtttgctttcaggatacaagagagaccaaatgagtgtaaaaccttgacacgctcaaagaggttatttcaaaaatttctctgtgatgcttatacaactattgaatctaaccgcctttcttatatcaagtttaaacaatcaaagctacgatgtgagaactacaacagtttgaaaaaggcctctgaagctggaactacctctatgaatgaagaaggtaaccaggttttaattccatcttccttcactggaggaccacgctatatggtccagaactactatgatgcaatggccatctgcaagcattatggctttccagatcttttcatcacctttacctgtaacccaaagtggccacatataacaagatactgcgataaaagaggtttaaatcctaaacacagacctgacattatagcccggatttttaaaatcaaactggattctctaatgaatgatttaactgtgaagaagatgcttgggaagactgttgcatgtaagtatggtttagtatactacattactatttatcaaaatcatctaatttgaaagcactcattctgttttgtttgtgcttgcagcgatgtatactgttgagtttcagaaaagaggcttgcctcatgcacacattctcttattcatgcatgctaagagtaaattaccaacatcagacgacattgataaacttatttctgctgagattcctgacaaagaaaaagaaccagagctatacgaagttatcaaaaactccatgattcacggtccatgtggttcagcaaatgtcaagtctccatgtatggttgatggagaatgttctaaactttatcccaaaaaacatcaagatataaccaaggttggtagtgatggttatcctatttatagaagaagaaaaactgatgactatgttgagaagggtggtattaaatgtgacaataggtatgttatgccttataataagaagttttctcttcgttataatgctcatatcaatgtcgaatggtgtaaccagaatggctccattaaatacttattcaagtatatcaacaaaggaccagacaaagttatcttcatagttgagccaactcagcaggctacagctggtgactctgaaacgccacagcaagaacaacgttcagctgagaagaagaagaacgagatcaaagattggttcgattgcaggttagtttatttctctgttttttcttaattatttagtttggtttcacattgaataaaaatttcattctaatacataatgaattgtttgcatataggtttccgcatctgaagctgtttgtagaatttttaaatatccaatttaacatagaacaacgcctgtcaagaaatt

SEQ ID NO: 168747 - DNA, 1277 bp, Arabidopsis thaliana landsberg; identical to SEQ ID NO: 62465

SEQ ID NO: 168748 - DNA, 436 bp, Arabidopsis thaliana landsberg
tcatcagaccttctacaaagactatggtaccaagttcacctttgagcatgcttgtagggtggtttgccatgagcagaaatggtgcagtgagtatactactaatggaacatcaaagagaagaaagtgctttgaacaatctatttagtcatcatcctctgttccagttggcattgaagagaaccaaagccaaagccaaatatgttcccctggtgttaaggcagcaaaagccaaagctaagccaagtattgtgtttggtgaaaaaaataacaatctgaaagaggtacaacttatttgggatattaaggagaaatatttggctttgcgagagaagctaattaacaaataagagaagatttgtctgactaaattgtttgatagtctctttgccatagagataactcttaataacaaggtaatcactgatctgttgtcttaa

SEQ ID NO: 168749 - DNA, 558 bp, Arabidopsis thaliana landsberg
tcatattctctatcaaaacgcctcatttatgtccctatcctggccatccaattcctcctcgtacgcagcgtttcatcactaaaccttaccaatgagtatcttaaccacaaatgcttcgtcagtgaagggaaatataagcatggtgataagtacgagaataacctcaacgttctcaacaagaatgtcctttcttatgatcttactagcggttttctacacgtttctcatggcgagggtcctgattccgtcaccatcatattacaatgtcgtggcgactccttcgggtcgaattgccgctcttgctataccaccgccatcgacggggtaatgtcactccaacatgtaaacgttaattagtaatgccatcgaaatatatgcatatatttttgggtatgataatttgatttaatttttatatttctacttttatttgatttttagaaaatggtaaaatgattgaataatattcaaatttcatattaaggaatattttcatatgataaaaataaaaaaggaaaattgaatcattttttaatgtaaaacaactatgtatatgac

SEQ ID NO: 168750 - DNA, 2125 bp, Arabidopsis thaliana landsberg; identical to SEQ ID NO: 3223
  unsure (1)..(2125): unsure at all n locations

SEQ ID NO: 168751 - DNA, 1237 bp, Arabidopsis thaliana landsberg; identical to SEQ ID NO: 32104

SEQ ID NO: 168752 - DNA, 2340 bp, Arabidopsis thaliana landsberg
gagattatccacaagaccatatctaagtctctccaggtctgtcttgttaagacaggaacaagctcacctatgattaatacgttagagctacgaccacttaaaaacaatacttacaatactcagagtggctctctgaagtatttcttccgatattatttcagcggttcaggccaaaacatacggtatgaatcacgccctttcacttaatcatgaacaaaatttggtttctggttcggtttgatccgtttaggataaactttttaacgaagattatttgttttaaacctttaataaatttagtgtatatattgaagtttaaagattataattacttattaggtttttggttgcacaaaactcggattgggttcatttggtatagacatttttctagcatcttggtttattaatatggattttgatttgtttcagtaagtttgtttttaagtaaaatgttagtctttaatacatgacaaaaatatttttgataggtaccctgatgatgtcaatgatcgtaaatggtatccattctttgatgcaaaagagtggacagagttaacaaccaatttgaatataaacagttctaatggttatgcaccaccagaagttgtgatggcgtcagcctcaacgcctataagtacttttggaacatggaacttctcatggttattgccatcttccacaacccaattttatgtgtacatgcattttgccgagattcaaactctacggtccctcgatacccgagagttcaaagtgacgttgaatggaaaacttgcttatgaacgctacagccctaaaacgttagccaccgaaaccattttctattcgacaccacaacaatgtgaagatgggacatgcctcttggagttgacgaaaacaccaaagtctactcttcctcctctcatgaacgctcttgaggttttcaccgtgatcgattttccacagatggaaacaaatccagatgatggtaagtctatatgtttcaatcaatttcctctataaatataatttcatgggttgttttttgatgcaacaataactttattctagttgctgctatcaagagtatccaaagcacttatggattaagtaaaatcagctggcaaggagatccatgcgttcctaaacattttttgtgggagggtttaaactgcaataatctagataactccacgccgcctattgtcactttcttgtaagatcaatcttaaattattgtattagttatgtcacatgattttatcatctgtaaatgaaatgtgtgcatgcataaatatgtctttagaaacttatcgtggggtcatttaacggggatcatcgcgcaaggcattcagaatctgacacacctacaagaactgtaagtatttcgtatttcaaaactgagcataatgaaaactatttgttcaccttaattgtatcttgtttataacatatttttgtacttacaaatgcttatgtagagacttgtcaaataacaatttgacgggaggaatacccgaatttcttgctgacataaaatcactcttagtaatgtgagtcgttttaaacaagacaattttttatatctattagcctcttctactacaagattgcctatgtttctagcattgtgtctatcttaacagagatttaagtgggaacaattttaatggctctattcctcaaatccttttacagaagaaaggactaaagcttatgtaagccttttctcatataatattttcatgactatataaaatttgtgttcaagtctcctaaatgactggtaaatttctttttttcctcaacattggtaactcatagtcttgaaggaaacgccaatctgatttgtcggatggattatgtgtaaacaaagctggcaatggtggtgccaagaaaatgaatgttgtaataccgattgttgcatcagttgcgtttgtggttgttcttggatctgcattggcgttcttttttattttcaaaaagaaaaagacatcaaacagtcaaggtatacacaaaaagaacctttaaattgccttgaacactgcaatacatatgttcactatgtataaaaagtctcattatactgttgcattgtaacatttgatttaggtccatcttcatatactcaagtatcagaagttagaacaatcagatcttcagagtcggcaataatgactaagaacagaagatttacatattcggaggttgtaacaatgacaaataactttgaaagagttcttggtaaaggaggatttggaatggtttatcatggaactctaaatcatactgaacaagtagccgttaaaataaattcaaactcatcttctcaaggatataaagaattcaaagcagagg

SEQ ID NO: 168753 - DNA, 2304 bp, Arabidopsis thaliana landsberg
gcctgcaaccattggcacagatgcggcttcccgtgtcaatccagactacactcgctgaaaaagacaagacaagctcatctacagtaccgttcttggagccatctccatgtcggttcaaccggcggtgtcaagagccactaccgatgctcagatctggtaaactctccgcaagatctacgccaacccaagatatgaccatgtcactcaatttcgttcgcatctaaaacaatggacgtaaggtccaaaacaattgatgactatatgcaaggctttgtaactcattttgaccagcttgcactcctcggtaaaccaatggatcatgacgaacaagtcgagcgagtgctggaaaacttaccagaggaatacaaacccgtcatagaccagatcgctgccaaagatactcctcccactctcaccgagatccatgagcgcctactgaatcaagaaagcaaaatcctcgccgtcagctcagccactgtcattccaatcaccgccaacgccgtctctcatcgcaacaccaccaccaccaccaacaacaacaatggcaaccgcaccaaccgttatgataaccgtaacaataacaacaactcaaagccgtggcaacagtcctcctcgaatttccgcccaaacaataaccaatccaaaccatatttgggaaagtgtcaaatctgtggcgttcaaggacatagcgccaaacgatgttctcaacttcaacattttctgtccagtgtcaattcacagcaaccaccatctccgttcactctgtggcagcctagagcaaatctcgcacttggctctccttactcctccaacagttggcttctcgatagtggcgctacacatcatatcacatccgacttcaacaatttgtctcttcatcagccctatactggtggtgacgatgtgatggttgttgatgggtctactatccccatatcacatactggttctacttctctatccacaaaatctcgtcccttaaatctacacaacattttatatgttcctaatatacacaagaatttaatttctgtgtatcgcttatgcaatgctaatggtgtctctgtcgaattctttctggcatcctttcaggtgaaggatctcaacacgggggtcccattactccaaggcaaaactaaggatgagttgtatgagtggcccatagcatcgtctcaaccggtctctctgtttgcgtctccaagctcgaaagctactcattcatcttggcatgctcgtttaggccatccggctccttcaattttaaattctgtcatttcaaattattctctctctgtgttaaacccatctcacaaatttctctcttgcttagattcccttatcaataaaagtaataaagtccctttctctcaatcaaccataaattcgaccagaccccttgaatacatttattctgatgtttggagctcacctattctttcacatgataattatcgatactatgtcatctttgttgatcactttacccgatatacttggctctatcctttaaaacagaaatctcaagttaaagagacgttcattacattcaaaaatctggtggaaaaatcgttcagacacggattggtactttttattcatacaatggtggtgagttcgtcgcactacgggaatactactcacaacatggtatctcgcatctaacttctgcggcagcatacaccagaacacaatgggctcttcgaacgtaaacatcgtcacattgttgaaaccggtctcaccgggctatctcacgcatccattccgaagacgtattggccttacgcatttgctgtagctgtttacttgatcaatcgactaccaacacctctacttcagcttgagtctccgtgtcagaaattatttggcacatcaccaaattacgataagctcagagtttttggatgcgcctgttatccgtggctgagaccttacaatcaacacaaactcgatgacaaatctagacagtgtgtgtctttgggttactcacttacccaaagtgcttatctctgtcttcatcttcaaacaagccgaatatacatctccagacatgtccgctttgatgaaaattgctttcccttctccaattatctcgcgactctctctccggtacaagaacagcgtcgtgaatcatcttgtgtttggtcccctcatacaactcttccaactcgcactccagttttgccggctccctcgtgttcagatcctcaccacgctgccacaccaccgtcatcgccgtcagctccatcccgcaactctcaggtatcgtcttctaaccttgactcgtctttctcctcttcttttcca

SEQ ID NO: 168754 - DNA, 694 bp, Arabidopsis thaliana landsberg
ggaacacatcttcacatatttccctccccctccccttaaaaacgactaattttttctaataaggcaacaaaactacaggatttgattgggttagggggcaaaacgtttctggtccctggaaacttcccattaggatgctatcccgcgtatctcactctatttcagaccgcggcagaagaagaccacgaccctttcacaggttgtatcccacggctcaatgaattcggagagtaccacaacgaacagctcaagacagaactcaaaagactccaagaactatacgatcatgtcaatatcatttacgccgactactacaactctttgttccggttatatcaagaaccagtcaaatatggtccgtttgtttctaaatttgttggcattgaccatcggttgatctcttgaccaacgttttatggttccttttttagggtttaagaacagacctttggctgcttgttgcggagtcggaggtcaatacaacttcactattggtaaagagtgtggacacagaggagttagctgttgtcaaaatccttctgaatatgtgaattgggacggttatcatttaaccgaggccacacaccagaagatggctcaagttatactcaacggtacctatgcatcacctgctttcgactggtcctgctctggctctgaatcagtggataaagagtattctttcagcagttaa

SEQ ID NO: 168755 - DNA, 1016 bp, Arabidopsis thaliana landsberg
atgaagaatcacgattgtgtatgcccgttcaagatcattccgtgtgagcagaactgctcagagagtatcataagacgtgaaatggataggcattgtataaccgtatgtcctatgaaacttgtcaactgtccatttcattctgttggttgtctctctgatgtacatcaatgtgaggtccaacaacatcatttggataatgttagctctcatttgatgtacattcttcggagtatttacaaggaagcatctctggatgatctcaaaccccgagctgaacagatacagcaggtgaaatatcagcaaatacatttttctccatttcaacctttctgagctaaactgctttgagcgcaaaacatgactttttgcttaaaactttttgtggtatgttgcagttgtctactaggttatctgaagctcgtaatgcaagatcactaacaaatctggtcaaggaaattgatggaaagctggggcctttagaaatcaaaccaaagattgttactgactcggaatccgataaacctgaaaatacagaaaagaaagccttagaagaagctgagattaaagaaaaaccagagacgagtaacttaaaagctgttacattggagcaaaccgcgagagaagctccggaagataaattggtttcaaaagaagtagatgctgcaatggtgaaagaagctgcaaagaaagtttcagaagctgagatagcagacaatgttaatgaagaaggcgaattaaaagcgcagaagcttttagaaataggcgagttcatcaaagaaggagacaacaactctgcagatgatttatcagagagaaccgaaaccaaagctccagaagttgtggtcatggatgaggctagagaggaggaggatagtgtagagacaaaagacacaagaacatatgaaacaatcagaggtttagagattgaagccaatgaaatgattgatgaagagacaaagaaatcgactgaaaccaaaaccgaagctccatcagaatagtcatgacaagaggggatg

SEQ ID NO: 168756 - DNA, 1886 bp, Arabidopsis thaliana landsberg
  unsure (1)..(1886): unsure at all n locations
gagacttgaggtctgcagctgaaaatatttgcactgacgaacaagctaggacagggtggatttggagaagtttacaaggtatagatatagtctttagttctctagctacctggttcattacagagttagggtaaactgatcatatcatcatccgtgtttagggcacgttagttaatggaacagaagttgcagtgaagaggctatcgaaaacatccgaacaaggtgcacaagagttcaagaacgaggttgttcttgtcgccaaacttcagcataggaatcttgttaagcttcttgggtattgtctggaaggagaagagaaaatacttgtttacgagtttgtccccaacaagagcctagactacttcctttttggtatgtggcattaccatatacatattaacctgagattctgagtagacttatatgattataaaatctaagtggctcatgactacttgtgtacgtgcagatcctacaaagcaagggctgttagactggacaaaacgatacaacattatcgggggaatcactagaggaattctatatcttcatcaagattcacgactcacaatcatacaccgtgatctcaaagccagcaacattctcctcgatgccgatatgatcccgaaaatcgctgattttggaatggcgaggatttctggaatagatcaaagtgtagctaacacaaaaaggatagctggaactttgtaaaatactaaccttatgaacagaagttttcaagaatattttcttggacattctaatttaatctttcttgtgtgttttatcttgtagcggttacatgcctccggaatatgtgattcacggccagttctcaatgaaatctgacgtctatagcttcggtgttttgattcttgagattatatgtggcaagaagaatagaagcttttaccaagcagatactaaagctgaaaatttggtcacatatgtgagtaccaaagaagaaacttagtgcatgatccaatctcactttgtttgttagttgttgattaatgattacattgttgtacaggtttggaggttgtggacaaacgggtcaccattagagctcgtggatctaaccatatcagagaattgtcaaacagaagaagtgataagatgcatccacatcgcactcctatgtgttcaagaagatcctaaagatggtcccaacttgtcaacaatcatgatgatgctcactaacagttccctcattttatctgttcctcaaccaccnnnnnnnnnnnnnnnnnnnnncaaagaacgtgatagctttgtgtcgagccaatttacaatgggatgtacttctcagactaaaaatgatgtaaccattacaaatctagatcctcgttgaagtagttgttccaattgacacattggaattgttactgaaaacaaggcagattccacatgtcaggtattatttcactttatgaaatgtgatgatccatagttatgtaagaattgtgagtcactcaaggtattttttcatacaaactctttatcatttctacattgtaacattggtttgtcgtattgaagatttctgatacgattatacgaatgacttcaaaattttataaacataccaattcatcatgaattcatgtatagtagtaacgcaaatgttgttatgcatgtaaaaaagctctgtaaattagacggattcggtttggctttaccggtagacgaatttctacgaatatttacccaaaccggtttatttactaaacctataccatatgaaccggaaaccaaacgctattaccgatattttcttcttcactctcttcgtcggaatcagcctttgcgcattcttctgagctcggatttagggtttagcattctggttctaaaagcgattactgatattgattatcggattt

SEQ ID NO: 168757 - DNA, 856 bp, Arabidopsis thaliana landsberg
atgaagcttagtttttcttcttataatctcacggctactgccgtgtcctcttcttgtttcggaagcgacgaacttctggtttcaaggaggctgttttccctgagagatgttcagattcttgagctctttattgcctttttcgtgtttgcgacaatacattccttgcgccagaagaaacaccaagggatgcccgtttggccgttggttggcatgcttccttcgttgatatccgcggtacgaagcaacatatacgaatggctgtctgatgttcttatcagccaaaacgggacattccggtttagaggtccttggtttagcaccctcaactgcgttgttacctgcgacccaagaaacgttgagcatcttctcaagacccgtttctctatctacccaaagggttcttacttccgtgagaccatgcaagatctactcggagacgggattttcaacaccgatgacggaacgtggcaacgacaaaggaaagcagcaagtgtcgaattccattcggctaaattcagacaattaaccagtcaatcattgcacgaactcgtgcataatcgacttttgccggttctagaaacttccggaaagattgatcttcaggacattttgttaagactaacgttcgacaatgtatgcatgattgctttcggggtcgatccaggctgtcttagtccaaaactacccgaaattccttttgcaaaagccttcgaggacgcaacagaagcaacagttgtgagatttgtgatgcctaaattcgtgtggaagctcatgaggtctcttaatttaagaacggagaagaagctaaaggaatcaataaatggtgtggatgatttcgctgaagaagtaatcccga

SEQ ID NO: 168758 - DNA, 2581 bp, Arabidopsis thaliana landsberg
  unsure (1)..(2581): unsure at all n locations
ggtttcgcagatgggtaagagcagcaaaacgggaaagagtaagaaggacaagggcattgtcgaggagactttggttgaggaggaaacgatgatcaacgagaaaaccagagtcgggacgatgctcgataggacaaactcggccggacctaaggccgggaagaagtccataaatgaggaagcaccggagagtagtggtgcaagggatagcacggataaccggaacaatactccaacggcccaagaacagtgagatttgatgaagggaatgatggcgcaactagccacattgaccaaggccgttgtagcggattcggtggtcctaaaagtggataaccaaaaggacgatgactcggaagttgtggaagtgaatccacaattgaatcatggacggaaaaggggagactatctgagtcttctcgaacatgtctcaaggttgggcacgagacacttcatgggcagtacggtcccgattgtggccgatgagtggaggagtagacttaagaggaacttcaagtctacccgctgccctgaggattaccaaagggacattgcggtccacttccttgaaggagacgcccataactggtggttaaccgtcgagaaacgtagaggggacgaggtccggtcctttgcggatttcgaagacgagtttaacaagaagtactttccaccggaggcttgggataggcttgaatgtgcgtacctcgacctagttcaagggaaccgcacggtgcgtgaatatgatgaggaatttaaccgcctaaggtgttatattggacgtgaacttgaggaggaacaagctcaagtgcgccgatttatccgtggactaaggatagagatccgcaaccattatttggtccggacattcaactcggtttccgaattggttgaaagggcagcaatgattgaggaagagatcgaggaggagaggtacttgaaccgggagaaagcaccgatccggaacaatcaatccaccaaacccgcggataagaaaaggaaatttgacaaggtggataacaccaagtccgatgctaagactggggaatgcatgacctgtggtaagagccacagcggaacttgctggaaggccataggtgcatgtggccggtgtggaagcaaggaccatacgatccaaagttgcccgagaatggaaccaggacagtccaaggttctcggtgaagagactggacatctaaagcgagagtgccctaagttgactgcggagaagcaggccggacaaagggacaatcgagggggaaatggactgccgcctcccccaaggcggcaagccgtggcaccgcgagtttatgagttgtcgaaggaagctaacgatgccggaaacttcagggcgatcactggtacgttctcacaactccctattcatttttcaataactgcatttgcattgcatcatgcatatcggaaaggggaggtactcaacattctaagggaatgtgtagggaccttgagagtaggtgacgtagaaacgcacactctatttgattctggggctacacattgttttgttagtccttaattggttgaatcaggtggattcaggaaagaaccaaacaccgattatggaagggtacgagcgccggcggacacgcaatgtatccgaccggacttgttcggggcatctcggttgtagtgaaaggtgtcaatatgcacgcggacctaatcattgttccactaaagagacatgatgttatcttagggatggaccggtcggggaagtacaaggctcacatagatataacaaaaaggacggatacaattcgagagggacgagggtatgttaaaattccaaggaataagaataacctcgggaagcttggtaatctcggcaatccaggctgaaaggatgctcgggaaaggttgtgaggcatatttagccacgatcacaaccaaggaagtgggggcgagtgcggagttgaaagacattccgatcgtcaacgagttctcggacgtgtttgcggccgttagtggtgtaccaccggaccggtcagacccgttcacgatagaactcgagcccgggacaacctccatatctaaagctccgtaccggatggcaccggcggaaatggcggagctaaagaaacagttggaggagttgttggataaaggattcatcaggccgagtagctcaccatggggtgcgccggttctgtttgtgactattggggattgaataaagttactgtgaaaaacaaatatcctttaccccggatagatgagttgatggatcaacttggaggtgcacagtggttttcaaaaatcgacttggcctcaggatatcaccaaattcccatagagccaacggacgtgaggaaaacggctttccggacaaggtacggccactttgagtttgtggtcatgccannnnnnnnnnnnnnnnnnnnnnnnnncttcatgaaaatgatgaatggggtattccgggatttcttagacgagtttgttatcatcttcattgacgatatccttgtttactcgaaatcttgggaagctcaccaagaacatctaagggcggtgctggaacggctaagggaacatgagctatttgggaagttaagtaaatgct

SEQ ID NO: 168759 - DNA, 1663 bp, Arabidopsis thaliana landsberg
tcttctaattccatgcgtcaagcttctagaagatcatcgccaagggtgacaaatgcagctgtacagcaggttttaaggggttttctaacaaattgctctttgtatcctggacttgtatctttaattactttcttactcaggttgatgcagtaaagaaatctgatcaccaccgttcaacagaagtaagtgttaggctacaagcccagcagaagaagcttaaccttcctgctcttccaacaactacaattggatcttttcctcagaccacagatctcagacggatacgcagggaattcaaggccaaaaagtaggcctatctaatccagtgatgtatctgaaatattctaacatatcattatataaatactgatgtatacgctgcatttgcaggatatcagaagttgactatgtccagactatcaaagaggaatatgaaaaggtaatcaagcttcaggaagaacttgggattgatgtattggtgcatggggaggcagaggtgggaatataccttaacctaggtttattattcaaactatttcatttttacccccctgatatgacatagtcctgcagagaaacgatatggtggagtttttcggtgagcagctgtctggctttgctttcacttcgaatgggtgggtccagtcatatgggtcccgctgtgtcaagccacctatcatctatggtgatatcacccggccaaaggcaatgacggttttctggtcgtcaatggcacagaaaatgacccaacgtcctatgaaggggatgctcacaggccctgttacaattctcaattggtcctttgttagaaatgaccaacccaggtgtgacatctaagcctctcaagcttcctttcgctgtatggtattccatttcaccattcttgttgtttgtaggcatgagacatgtttccaaattgcacttgccatcaaagatgaggttgaggaccttgaaaaggctggtgtcactgttatccagattgatgaagctgcattaagagagggattgcctctcagaaaatccgagcaaaagttttaccttgactgggccgtccacgcattcagaattacaaacagcggtgtgcaagacagtactcaggtatttgtatttcactttattgctccttcccacttaaagaatgttttttacgagtatgttgaccataatgtggtttctgccattttcgtggacaatagaatgtgatatcaagatgaaggacgtgaaacaattactaaataaaggaagagatctaatttattcaaatgacaccttaatgttcttcttgtacttcatgcagatccacacccacatgtgctactcaaatttcaaaaacatcatccactcaattattgatatggatgctgatgtgatcactattgagaactcacggtcagatgagaagctcttatcagtcttccatgaaggagtgaaatacggtgctggaattggtccaggggtttatgacattcactctcctcgtatcccatctactgaagaaatagctgaacgtatcaacaagatgcttgctgttctggacagcaaagtcctttgggtgaaccctgactgtggcctaaagacgcggaattactctgaagttaaatctgcacttagcaacatggttgcagctgccaagctaatccgctctcagctaaataagtcatga

SEQ ID NO: 168760 - DNA, 935 bp, Arabidopsis thaliana landsberg
actttttatctcttctatgattgtcctcaagacctttttttcatttttgacgttttctttgtgtggtttgggtgttatgggtcactgaagagcagcttgctggtttgtttgtgagctgtggacaggttgaaaatattttcttgaagctctcatctatgaactccatcattgtgcttggttgtgtgtcttactgtgtttggttttaacaggttgttgactgtcgcatatgcggtgacccaaactcggtccttcggtttgcattcatagagttcactgatgaaggtattatttcattttctcggttctggagtatcatcagtgtactacagtggttaaatgtcttgtggctttggttttcagagggtgcgatgactgctctaaatttatcggggactatgttgggattctatcctgtgaaagttttaccatccaaaacagctatagcaccggttaacccgacatttttgcctagggtgagattttcctctactatgcaaagtttctgatggttagcgactgaggaaaatgatttagtcttgtctatgcagactgaagatgagcgtgagatgtgtgcaagaactatctactgtactaacatagacaagaaggtgactctcttgaatcatttctcttaacttaaccgtacttgatgaagtatctccctttcacacttgtgtataaattgcttataggtgactcaatcagacgtgaagatcttttttgagtccttctgcggagaggtgaacaatgttgtagttgctaagaatgcaacaaagttgttattcttttgtgcaataattcactaattagattgttgttaatacaggtttatcgcctgaggctgcttggagattatcaacactcgactcgtattgcttttgtagagttcgtaatggtaataatcgaacacacctccacacatttctttgagtcat

SEQ ID NO: 168761 - DNA, 445 bp, Arabidopsis thaliana landsberg
ccgtgcgccgaactcgggccacgccgcccagcagatcagtggtacgggcaccgtggctggttcaggcaccggcaccggcaccggcaacggcaacggtacggcgccccccgcctccagaaccgccgccgccacgcgccccggcagcaccgacaccgcctggttcgtccgcggctgcctcaccaacgccttgaatcccaaggtaggcgtcttctacatcaccttcctgccccagttcatccccgccggcgccgacgtactgcgcttcagcctgtggctagccacggaccacgcgatcgtaggcatgctctggttcgtcctgctggtagccgacacccgccccctggtccgctggctttcccggcccgcagtcacccgcggactgtaccgtgtgaccggcgcggagtttatcgcgtttggattcaggatggcgctggaaaagcgctga

SEQ ID NO: 168762 - DNA, 891 bp, Arabidopsis thaliana landsberg
atggcgaggtaagctttgaaccctaattgatataaagccccagactttcgttgattttttcacacaaatcctgaatcggttttcgtaacgcgattcctcttccatttcgttcactgttcctcgaaaagggataaaatttatttttgagtgggttacgattcagcttttcctgggaagcaaaatgtgaaatttcccttacaagtttgagttacaaagattggatttttagagatatttcgtctgatttaggcatttactgtatccgcttgaatctctagtgtgtctctaactcagtagctgcttatgaacggatgatcttatcctcttttgttcttgtcacaaatatacagggcttggattgtcgatggtcgaggaattgcagccaaagttaaaaatgcctctctttcttcagctttgcagatccaagactgtggagctcatataaaatgccccaactgcacttaccgcattgacaatagcaatgtgagtgattatatccacacttctctctcttgtcttaaacttacacacactcacctgtgtttcgttggtttcaggtactgattccatggcctggccttcctaaaggtgtcaagtttgagccaactgatgaggacattatcgaatttttggaagctaaatgtgggattggtggctctgaacctcatgtgcttatcgaagagttcattcgtcctgtcactgaagatgttggaatcaattacactcaccctcaaaaccttcctggtaaatgatcaataaagacctttaaataagctcataattgatgttcttcaactgaaactgtaaatcattgtatcttgaatctctccaggtttattgattcctgctgagctttactgtttcaggtgcaaacaaagatggagtgagtgt

SEQ ID NO: 168763 - DNA, 697 bp, Arabidopsis thaliana landsberg
gttgagaagaccatacaatatctaattggttctggtatggtaagtatttcacatttatcgtgacaattgatcttattatttatttggttacattattttatttttttttgacaacgttacgctttaggattcgaaatttgagaacaatccatacaatggattcatctacacatcattccaagagcgagcaacattcatctctcacggcaacacggctaggctagccacaacatacggcgatgttaccctcgcgaagatctgcggcacaatcgctgccgacgagaagcgacacgagacggcgtacacgaagatagtggagaagctattcgagatcgaccctgacggatctgttcaggcgttagcgagtatgatgaagaaacggatcacaatgccggctcatcttatgcacgacggaagagataacgatttgtttgatcattacgccgccgtggcgcagcggattggagtttacacggcggcggattacgctgggatacttgagtttctgttgcggcggtggaaggtggagagtttgggattggggttatcaggggaaggaaggagagcacaggaatacttgtgcacattgccgcagaggatcaagaggttagaggaaagagctaatgatagggtcaaacttgtgtcaaaaccttctgtttcgtttagctgggtttttggtagagatgtgaaactatag

SEQ ID NO: 168764 - DNA, 3294 bp, Arabidopsis thaliana landsberg
ggcggagctcttgaagatgcaaggcaaatttttgagcgcatgtgtgatcgtgataatgtaacttggaacacaataattgggagttatgtccaagatgagaatgagagtgaagcttttgacttgttcaagaggatgaatttgtgtggtatagtgtctgatggagcatgtttggctagcacacttaaggcatgtacacatgttcatggtctttatcaaggaaaacaagttcactgcctctctgtcaaatgtggcctagacagagatcttcatactggtagctcgctcattgacatgtattccaagtgtggaatcatcaaagatgcacgtaaagttttctcttctctgcctgagtggagcgttgtgtcaatgaatgctctaattgcaggttattctcagaacaacttagaagaagctgtagttctctttcaagaaatgctgaccagaggtgttaacccatctgaaatcacttttgccaccattgttgaagcttgtcataaaccagaaagtttaactctaggaacgcaatttcatggtcagataacaaagaggggcttctcatctgaaggtgaatatctagggatttcccttttgggcatgtacatgaattcacgtggaatgacagaggcttgtgcactcttctcagagttatcaagccctaagagtattgttctttggacgggaatgatgtcaggtcacagtcagaatggattttatgaggaggccttgaagttttacaaagaaatgcgtcatgatggtgttctacctgaccaggcaacatttgtcactgttcttcgagtgtgttctgtcctttcctctttaagagaaggtagagctatccattctcttatttttcacttggcccatgacttggacgagttgacctctaacaccctaatagacatgtatgctaaatgtggggacatgaaaggttcgtcacaagttttcgatgaaatgaggcgtagaagcaacgttgtctcatggaactccttgatcaatggatatgcgaaaaatggttacgctgaagatgccctgaaaatctttgattctatgagacaatcccatatcatgccagatgaaatcactttcctaggtgttcttacagcttgtagccatgcagggaaagtgtcagatggacgaaagatttttgagatgatgattggtcaatatggtattgaagcgcgtgtagatcatgtagcttgtatggttgatcttcttgggagatggggatatcttcaagaagctgatgacttcatagaagcacaaaacctgaaaccagatgcaagactttggtcatctcttcttggtgcatgtaggattcatggagatgacattaggggagaaatttctgccgagaagctcattgaattagaaccacaaaactcgtcagcttatgttcttctttcgaacatatatgcctcacagggatgttgggaaaaggccaatgctttgaggaaagtcatgagagacagaggagtcaagaaggtacctggatatagctggattgatgtggaacagagaacacacatttttgctgcaggagacaaatctcattctgaaataggaaaaatcgagatgttcctcgaggatgtttataatttgatcccgcacaatgctgttgtcaatcatgatatagtggaacaaggttctcttgattgtgtgtaataaaacaaggaaacactaacggtgagcagcatctcgaccatatttgatttcgtacagagctgaagatcaccagatatgttcacaaaatcagatacaatggtaggagctcaaatttcatacgaacatgcgactatgtttctttcgcctttggtgatgtggactaagttttcatatagccaagaaaacaaggctttattctcgttccttgagtactatcagatcaggtaactgggtttgtttgcagccaaagctcaaggtcttataggaaatgagacgaaaatccaagtgaaggaagagagggatccatcgaaggagacccaattagcacagtacaaatatctgacatggcgagaacaaaaggtgatttaatttcctttgtgtaatttgtgcatgtttgaacagacactgtatctctatcgttacagtaaatcttgtttgttgctggcaggaatgtggacttagtgtgtttttacaaaactagttggtgtaagagagtatgatgattatttccattagcacgagtgacaaacgaagatggtcttttgaaacattatctttttagtatctgctttccttttgtttgtgtcccatgctgagtttagattcacattacatcagtctctatcttctggtggagacttacttacttataagcgacatagaagcaagtgacaactgatggacacatgtgaatgctgagttgtttctagacatttcaactctgttcacgagactttttttatgtactcatttcagatttcacattcctctgttgcaataaaacaccaaagtgagaagaagacaaagtgggtcctggttcttgactccgatccagaaacaaaaaattgataaatgcacagctcataatccaaatggatcaagaacaacatgaacaactaagttaatttgcaacatatcaataagcttacatcttctcacagtttagattttacatgtgaaaagtcatttcacaaaacctgcaactaagtaaacagacataagaatcactaaagagcgatcaagtaaacaagagggaagaagaagaagagaaagttcctaaatttacaccacaacacaagacaacttttcaacaccaaaaccgaactactcactacttcttgccttgttcaatagcacattcctctggaaccgcggccattgaccgcctaacacggcatatcgtccagagatacaaacccagcagtgcccctaaggctccacaagctgcaccaaagatcaaagcaccaagcattttccgcgtacactcacttctccctcgaccattttcctcctcctttgaaacttcattcggttcaagcggcactgaatgcatccacatcggaggaggatgtcttatttcaaatctccatgaatggagaaaatgtgccttggaagaagagttcccattggcagagcttaaacccacagtgacttcaccacctttccataacttggccaagtctaccgagaaagagaagaacggatcaaacagctttaccgaaccagattttctgaatcgaaccatcattctcttagaacttgcctcatactcaatcatacagctcagagtccttccattgtccatcatcaagtcacccacaaacgaaaggtttctaatttcagcagaatcag

SEQ ID NO: 168765 - DNA, 559 bp, Arabidopsis thaliana landsberg
caagcgctcccgcactaaatctgcgcacgcgggttgatggtgtcggagttcccgatcggggtgccggcacttgcggaaaattttccgcgccgcaatcgcatcatttcgggtctctcgctcggcacgctggtggtcgaggccgcacatggctccggttcgctgattaccgcgcgctatgcgctggagcagagccgcgaagtgtttgcgattccgggctcgattcacaacccgcaggcgcgtggctgccacgccctgattcgccagggtgcgaagctggtcgaaaccgtcaacgatattttcgaggagctgggcccgctgctcggctcgctgctgccacgcgccgcgccgccaccggaggctgcggccagcgcctcgtccgccgggcatgacgcggctgcgtccgcgatcctcgacgcgctgggcgacgagctgctcgatcttgatcaactgctggcacgcagcggacagggcatcaccgatctgcaggtgacgctgacacggctggaactcgatggtcaggtcgcaacggcgcccggcgggcgttatcaacgcttgcgcg

SEQ ID NO: 168766 - DNA, 569 bp, Arabidopsis thaliana landsberg
tttctttgataaagaatgtccaaaggttctgatcatatatatgtggtggagatgctgtggcgaaagacaagagcatactgaaaaacaatggaatcacgcatatcttgaactgcgttggttttatctgtccggaatatttcaagtctgatttttgttacagatccttgtggttacaggatagtccgtcagaggatataactagtattctgtacgatgtgtttgactactttgaagatgtgagggagcaaagtggaaggatctttgttcattgttgtcaaggggtttcacgatctacctcgttggtaatagcatatctgatgtggagagaagggcaaagttttgatgatgcatttcagtatgtgaagtctgctagaggtattgctgatcctaacatgggctttgcttgccaattgttacaatgccaaaagagggttcatgcgttcccgcttagccctacctccttacttagaatgtacaaaatgtctccacactctccttatgaccctttgcatcttgttccaaaactgttgaatgatccatgcccgggttctctggattcaagaggtgca

SEQ ID NO: 168767 - DNA, 928 bp, Arabidopsis thaliana landsberg
  unsure (1)..(928): unsure at all n locations
agctgctcaatgcgaatcgatgagactatcaaaaaccatctttacttcgcatcgccatctccatctgccatctctctctcctnttcttcactcccgtgaagaaatcaagtccccgatacctaaaccaccatcaccaaactcgatgcccacctccacagtttttccttcttctcatctctctttctctcgttttctcgggaatttcgtttctcacattttctttagaccctggatcgtcaacttgcgtctccacatcttccacttcgtctctcaaattcttcatctccgacgtcgaccaccgtcagatcttaacctccctcgctgtctccggagcttccacattgtttccgttaccggcgagaggaggacattccgggaatatgacggaggaagagaaagagttttggaaacaacccaatggcgaaggatacaagccttgtttggattttagtttggattacaggaagaaatcagctagggtttctaaagagaagaaacgattccttgttgttgttgtctctggaggacttaatcaacaacgaaatcaaatcgttgatgctgttgtaatcgctatgattcttgaagctgctcttgttgttcctgttttgcaagtgaatcgagtctggggagacgaaaggtaacaaaaacacaacttgatcatctctcttttctgggtttatgattcgagttactgatgatctcttgttgtgttttctcagtgaattctcagatcttttcgatgtagagcatttcaagaaaacgctgagatctgatgttcgtatcgtttcttctctaccgtcaacgcatcttatgtctagacaaacaattgagaatcagattccttgggatgtttctccggtttggatccgtgctaaaaacttcaaacaaggttgaatctaatgtttactaggttaagggttaagttttc

SEQ ID NO: 168768 - DNA, 1137 bp, Arabidopsis thaliana landsberg
ggagcagctggacattgccctaaagatcttctagtcttcaccaagaacaaaatgcctatgaaggatgacacaaacgatgcctcaccatcaatgcatttattgaatcatctttgtggtttcaggaaatgggcactagcgaataagcataagagaaccatttctataggaggggtgataacacctatactaatggcttgtggagtgccactttagtcgactcccgttgccccaagatggatcgacattcctcacctgagatgggctttgttcattgagcatcagtgtcatgaggggatgcatattctcaagtttcagcacaggacggaatgggatgccaaatttctcctacccagccaagagctcacaaccatcgtagtgagaggtaacatcgatttcaacccgcctaatgaaaaactttttttcatggatagagcacccccgacgagagaagctccggacaatgaaaaaagggttaagattgaagaaggagctgagaatgaagaagtggaggagatggattgggagaactacaatgcgagtaggttccattttgaggaacacaaaccaccaccaagagtgagtaagagtgtgagtgtagctcataagaatgttggttcgatgagtgcttggaagaagtttcaagaccggatgttggaaaaatgtgtcaaggccatcaccgcgattcaggctgtactgagctgttcatcctcagacgccaccatggtgagacaaaaccgccctaaagaagtggtttcaagaaggcacagagtttcaccttcaagataatctgcctatgagcaacgagaggtaagtcgcccccaagctcctgcaagacattcatctcatgagcacttcgagcagaaaagaagaaaaaaaacaagaatgcttcggacaaggagcaaggaccttcttatgtccagcagaagatcactcgaccaagatacttgacgtgatatcgagcagagtgtcgagctggatccgtcggttcagaacgagcagagtgtcgagcaggatccgtgggttcagaacgagcagagcatcgggcaaaatcagtgggatcaagatgggcagtactcgggaatgaattgggatgcttaccatggcatcaacgagcaggaacccacctctgacaactga

SEQ ID NO: 168769 - DNA, 1199 bp, Arabidopsis thaliana landsberg
taaggtaagagttgtcctagttatatcttattatatgtgactatgagctttaatatgattattttgatgtttgagtttgtacaggttatctctagcattttggaaccggataacgaagagaaagatttgttgagacacattgtcgatggtgatgatgctgatgatgggataggtttcgttgatccggttttcgatagctggagaaaccgtttgatcaaagagaggaagagaatctggtggaaggacatgtttgaagcggatgtgcgggctcgaagcggcgagcaaatggaggaagaacatgtctcagagaatgttccgagacatgttccggatgtttcgggcagcagtagctctttgaaggaagctatcgatgaaggctttaagagagtgatggagatgttggcggaacacaattaaaggcttttaaccattgaaaggagacaagccggtgagagtgtgcctccatttgagaagaaggtgaattccgatgtgaataaggagaagaaagatggtggtaagaatgagaagaacgtgaatgtggctgttgagactgatggtgttgagactgatcgtgttaagactgagggttttgagacaaagggtgttgagcctgaggctgttgagaccgagggtgttgagcccgaggatgttgagacggagggtctgaatactgccatcgttctttatgctgcaggctctccaaaaggtatgttttttttgtcaatctttgatctttttaatatatgatgtttgttggttatgaatggttcccttttcttttgaaggacatgttcatgatgagaccgaaagtggataaaggcgatgatgagacgccgaagaaggaaacgaagaagaaagggaagaagggaaaagggaagtgcaacgatacgaagaatgacaagaaaaaaagagatgaggatcctgaagacgcggatgatggtggcaaaaagaagcgtaggtaaatcaatcgagattccacaagccaccttataccgcagaaaggatgagaaggaccaagggtccggtttatgtttggagaaaaatgtattgaacacttgtttttgtgggaacgatttatttatgtatttcactaggatgatgtttgttatttgggatgattgatcttgttttttaggatttatggtatttatggtatttatttatgtgaatatcatgatgaaagtgatttagtgaattag

SEQ ID NO: 168770 - DNA, 427 bp, Arabidopsis thaliana landsberg
ttgtacgtacacgtaatacttatatcttttattacatacacgagatgtgattgttgcgctacttgaggttggcaacttgaccgaagactaccgtgggctgaagctttcttttaagataatggatcaatagtaagtgcttctgtgttaatttttaaaaaagttttcacctttatgtttctgatcttccgtataatatatatattctctgtagcaaggaagttcttcaatgtgaatcacacaaactacaagctttggaatttcaaagattcttccaaaggctaactggtccttaaaatgttattgctctcgtttcctggcgtctgagcgggacttataaactgaagattgtgagcaattgccccatctccaaagtcgttgtgtattagtttttctgttgtttctgttattcttaaaaactacagatttg

SEQ ID NO: 168771 - DNA, 156 bp, Arabidopsis thaliana landsberg
tccccaccccgtaacagtgcggcgactcgtcttcacagccgcagcgttccgtccgcaacaatgagagctcaccatgcagtcattgcacagtctggacacatcccacgggaaatggttctgggatgtttgttgcccgcggccacaagatcaggttgg

SEQ ID NO: 168772 - DNA, 463 bp, Arabidopsis thaliana landsberg; identical to SEQ ID NO: 24349

SEQ ID NO: 168773 - DNA, 1199 bp, Arabidopsis thaliana landsberg; identical to SEQ ID NO: 1096

SEQ ID NO: 168774 - DNA, 1197 bp, Arabidopsis thaliana landsberg
tacgttgatacacttctccaatggaaccaggtctctctctatctctcgacccttttgctagataaacatgttggaactttggaattattcgtgggcattatttgtttgaaaagattcgtgaatttctaatcaaattgaaagctttagaatccaattttgggtttaatggttggtttaagcttgttgcccaccaagtatttgttataagtccttactgggtcaaagcatgacaagtcgaatgcttttacctgcacaatgaaaaaaattcaatcttgttgtcccttttttggcgcacttcactttaacatctgagtgtttggtttgctttatattcctacctcaaactcaaactgatgttactcaattgaaatcactggtgaatgtctatgttacaattgggtttaaagtatgttttgcttgggaaatctatgtgagtttgagtaggccttgtgattattaatgtgcagaaaatgaaccttacagcaactaaagaagctgatgaagtaatggagaggcatatcgaagattctcttgcgatattgcctcctataaagacttgttacaacttgcattccagtgatttgtttgatcacatcaatttaatcgatgttggaagcggggcaggtcttcctgggttggttctagccattgcatgcccaggtgctctttcattacaaatatgattatgcaaattttgtcagatttgcttgttatggtattctagattattaaaaaagccaagttcttttgctcagattggagagttactctactggagtctataaataagcgttgtgttttcttggagcacgttgtgaatgttaccgggcttacaaatgttaaaatcgttaggggaagagcagaggtacagttttagcccctttttttctttgtgatgagtttgtgctataagcataagtaggttcacttgttagttgacttgtctactatctctgggtaactagatgcagtttcttacattctgaaataactgattttttttttttttgttttgtttcaaagctaagaacttaacgtaatactctaaatgcatgaattagctagagagtttcctgagattagaatcggtttccattaaatctatggtttagaatgtataattagagtatattagatgatggtatttatataaagcttctgttggaaactatgattcctgatttagaaaaacttttc

SEQ ID NO: 168775 - DNA, 3058 bp, Arabidopsis thaliana landsberg
ctacaaataaccaatctgctacttctagtcctcctccggtaaacttttagttagttatgaccgagttatctgaatattattcggctgcgttataacttttagttagttatggctgagttatctgaattatacggctgagttatctgaatattttacggctgacttatctaaatattttacggctgagttataaacgtttgttagttatggctgagttgttttcatgttataaatttagttagttatggctgagttatatgaatattacacggttgagttataaatttaattagtcatggctgagttatatgaatatgatacggctgagtttagttagttatggctgaggtatatgattatgatacggctgagtttagttagttatgactgagttatatttatacataggtatgagttttcattatttaacgcctgagttttcgttacgtttatgtagtcgaaacaagctgatgttggggtaagtaggaatcttgaaggagaatttgataaggtctccattgtgcctgattttgatttcgttgagactgtttctcctctcaatcgccgtttacgctctaggaagccaccatccccaaatgtgccaaagcataaaaaggagaaaacattaaatgagctaatccagaaaccgccaacgagaagagaagaggaagaaagcctttggagcagcctaaaaaggtgcctcctactgcgccaaagattagaataaagaaaccaaaaccatctgaggaagctaaggaaaaagctgaggaagctaaggaaaaagctgaggaagattcggatgtagttgatgtcacggataaggttgtatccgagtataatgaaatccttcctgagtctgatgaagatgaggaggaaaccgagaggctaaagagtgtaaaagaaattcggctcaaaactgttaagctggccccggatgggagctcattgattaaccccgaagatatgcccactcacacttttccagttattggagacaacgggctgagctgcatgagaaagggttgtctgccttcacgagcaatctatgatcctctggcaccggttgatccggccaaactgcagaagcttaaggcttatttgacaggtcccgaaaggtatggccctttatacgttactaagttgttaaatacgacatgcttacactatttgtttatattaactttctttattatttgttagcaaacattattacaaaacatatgggttcgacgatgtgctgttctactctgttatcatagccgaaagaaaggactggccagacgagaaacatggatggctgggtgatgatgtaagttattgttatgttctgtctgagtttggctaatgttatggctgagttatcgtgtcattatgtctgagttatagtagataatgactgatttacgatgtaagttattgttatattctgtctgagtttgtctaaggttatggctgagttatcgtgtcgttctgtctgagttaatttagctaatggcagatttatttaggtgttaaggctgagttttacttggttacgactgagttaatgttgtgttttgtcttggttttattttagtacaacatattgctgcgtagatgaaagtccccgcccagaggctcctgcgagatccctgcccataccacagcgaactcgtcatgattctagacccgtggttcacgtcaatgtgggttaatgattacaagcagtggaggatgtgaccgaagaggtttctttcagagataccccgtatctaggttggatgaacggtacggctggaggaagacccggcaaataagaagtggataacagatgtggatcacttgtatcttgtctgccaaaccggaggtaaccattgggtgacccttcacgtgaacttgcctaggtctcacatcgattgctatgattgcatcgtcggagagcatactccgattagcgatggaaacatcgtggaagcttgtaggccgttcatgaggatgattccacagatgatgagcaaaattcttcctctcaaagttcgtatcccgcaatacgaccaattttcattctgacggaggcacaagacaaaggtcacgcaaaatattatcaccggggcctgcggcgtttacacgttaaagattcttaaatgtttattgcttggtgtttgttttgatggcattactgattcaaatattcagggtctacggattagaatggcagcagagatcttcaatgaagcacctgcaaggatggtcattcggttttttgagcagtgatttgctttttcgaacatatgtctgtgtcttttcggatttttagcatgtgattgtactaaataatgacactttaggattgatatgtctgtatgaatcgattattatgttaattataacaaaaaaacaatgtaatgactgacttatcatcgctcgattcgtgctacggctgagttatgataccgtcacggctgagttctcgttgtttaattcgatgtttagctgagttattctaacgcggtggctgacttgtcatcacacaaatcgtgtgatggctgagttattctaacgtggtggttgacttgtcaaacccaaacttccctcccatcaaagaaaccaaacgtcactgtaggactatacatacaccagtttacgacaactgaatagtcaagaaccccaatgtcgttagagaaccaaacgtcgttagaggaccaaacgacgttagaggactatatatatactggttccctcttgtcttttctcttgtcgattcttagcaactagaactcttcctttcttgtcttgtcttctaatctctaagaaataaaactcttccgagatcatggatgcatcaggttccaataagcggcggtgtgtggatgacggttccaacaagaggccgtgtgtggatgacggttccagcaaaaggctgtttgaaatggagaatagtttcgaagccatcatctctttcatcaggagcaacataagggagacggccgagttaaagaagcaagggacgtttcgtatttccgttgacgatgctgacatggaatattacagccgacgtccttttgaagtgatgaggtga

SEQ ID NO: 168776 - DNA, 1660 bp, Arabidopsis thaliana landsberg
tcggcaaaagtatcacaatgttaaacatcttaccgtttttcttgttctttcttccgtttctcatcggaaacaaccgcatttgcgtcgccgtaaagacaggctttgtcgggagaaacggcacgcagttcgtgttgaacggagaacaagtttacttaaacggcttcaatgcttattggatgatgaccaccgcggctgacacggcatctaaaggaagagctaccgtcacgacggcgctccggcaagcctccgcggtgggaatgaacgtcgctaggatttggggtttcaacgaaggagattacattgctgttcagatctctcctggctcctatagtgaagacgttttcaaggtaacacgcatgcatatacatacatacacatatatacttaatattttgagaactttggtggctcgttgcaaaacatgctgaaatcaccatttcgtatgtgtttatcaattatagcagcaacttaatatttttaatcatgaattgatcgttgctgactgagttgataaataatcattgtttatttacttaattattttgtattgattcactagtaacgggaattataaagaaaaatattgactgttattttttattgtcatgatcatatgtatattaatctttggatgaccgttgtttgttgaatctaaattgaaggattcaaatttcaaattatacttccgacataagaccttcaaacctttttgttttttttctcgtaaaaaaatcgtcgtctactccttttcatacgctaatataaagtggataatcgcaaaaaatgacaaaagcatagatagactttcacattgttaatcatatttatattaattagaagcataatttggtactagacacctttaatttttgttgacctaataaagagactctcacaattgattgatagaaaaactaacaacaaattgtaattgggttttatgagtactaatactgatacaaagttttgtgacagcaggggctagactttgtcgtctatgaagctggacgatttaatattaaattgataattagtttagtcaataatttcgaagactatggagggagaaaaaagtacgtggaatgggccggtttagatgaaccggatgaattctacacaaactcagctgtcaagcaattctacaagaatcacgtgaaggttagtaataatatgaaaattaaacccatgttaattacataaatatcagttaaatttaatatctagagatcatcatatgtaacacgacacgttaaaggcaaaatattcaggttatatttgtacacgttaacgcgagataaacgacggttttgaaatgtcaaaagttaggttttgatcaattaaaagtaatcaacaaacatgacaaatgtaccaatctaaaaatgtttgttaacttattattgaacaaatgtcccaaattaaatatctcgtaaaaggattagatcatatatagaattttgtatactagtaccgacttaaaaatcaaactaaaccgacggtttgacaaaaccatgaaacagaccgtgttgacgaggaaaaacacaatcactggtcgaatgtacaaagatgaccctaccatcttctcatgggaactcatcaacgaacctcgctgcaatgattccactgcttcgaatattcttcaggtatctatgtctctcctctg

SEQ ID NO: 168777 - DNA, 284 bp, Arabidopsis thaliana landsberg
  unsure (1)..(284): unsure at all n locations
gcttcattgaaactcattcaacgagtgccacgacgggtatgttggattttggcgtctctaaagagcgctctactggaactaaggactaccagacactgccaactacgacgtcatggtttctggcgatgatacaaggcgcggaagggtttgtcnagaaaaacactgacactgcttccaagacgcttatggagatgacactgcagatggagcagcttcttgatctcgctgctggagccaccgatgctgctgacgacgacgatgagaacttacatcgtcgcgcttga

SEQ ID NO: 168778 - DNA, 950 bp, Arabidopsis thaliana landsberg
atgttcgaggattttttttctgcgaaatatccatgcttgcccgaaaaagaactctacgcaaaaagagctctacgcgaaaatagctgaagaatatcatctatgggttaaagaatatgtaagtctaaatcattttggtatattcgaaaagtgatcatttaatttatagatattgatattgtttatttattatgtaggtaacatattggaacactacttctccatttcctacttgggttcaagagattatgcatggacctttgaacaaggttaaaacttggccaatgtatttcacaagatgatatttgtttcatacgcaaaatcacggcacaggacgaaagacatgtaactatggggtatgtgttaaaggtgaaaactacgcggattcatctgatgaagcggatttctgtggtaccttaacagatatcatagaactcgagtatgagggcatcgtcaatttgaggatcacactttttaagtgtaagtggtatgatcttaagatcggtagaggcactcggttcaagttcctacgatgcagccggctcatgctgccgtcccttcaacgtcagcccccactaccgcaactatccaccgctgcaggactgttccaaaacaccaccactcaaccacagcgtgtagatctgcagcctcgatctgaagaggtccatttcaatccaccaccaacagagcctgctctgcaagaccctccttattcgccaaatccagacactcaatctcacagtcacccttcgtctcaaggcaacaacttccaaaaggaagctcctgcaacgttgtcggagctacaagaagactcgatggtggctctgaatacgatactctcagtgcctggcagggaaatgtggacttttgtattgtctcccattccccagccaaaaactgaatgctatgttctcttcctctactttgttctcgtgctctgcctgtgtagataa

SEQ ID NO: 168779 - DNA, 703 bp, Arabidopsis thaliana landsberg
atggtcaacattcaaatccccggtaacacagttgacgtagagggaaacccgatccctccaaaccaaacagacgttcctgaagccaccgctcctgcgatcctagcagaattgaggagcatgatggctcaacttcagaagaaagtaaaagatcaagaacaggcaaatcggtctttggcgcaacaactcgaagcagctacctcccaaggacagatcaagactactcgtttcggcgcgcgcatcctcaagatcgacgactgcagcagatctctactcaacacgactcgtgtccacacgcctggcaatactgcaacgcccgtccaccgaccggcaccagaaatcagatgagatcgaaccgagccggcgatcttgggaaatcgggaaataaattgagcagaaggaaacaaaccgcagctccctcctccccgagcagaagttgccgaggccgatcagatcggggtctcggacgatgaagattcggaagagaacgttaggtgggctgaggaatacgccagagaacaggaaataagcgccatcaagctctccctagccaaggcagagaacgagatgaagctcgtaagatcccaaatgcataacgcagtctccgcggccccgaacatcgactgcattctggaagactcccacaacatgccattcacacataggatctccaacgcgataatctcagatccaagaaaactaagaa

SEQ ID NO: 168780 - DNA, 673 bp, Arabidopsis thaliana landsberg
gatgttcaatgatgatgatgacgaagaatcaggagaccaactttcagagtcagagtttgtggattggattgagccttcgttgcagctttgcaatactagccttctacagccttttatgctggacagactctatgacgcctttcatgtgtttcagaccgacccatctgttcaggttctctcttttctcgcagtcttgagatccatggtttgagaaacaaataactgagacatacattggtgtctaatgttgcagagaatggttatgtcattgacttcagacaaggctgtttgggatgcggtgatgaacaatgaggttgtccgggagcttataagcaacggtaagaatataagatacaatgggctatggttctaaacgatgattatgtaagagttttacttgttgtataatgcagctgagaggtcagaagaagactctggttcagccgcaaatttcttaagaaggttgtttgagagaagtgccgtcaaaatcatggacgcaatggagagagtcacaaagtatgtcactgaccttttcaacgttgttcctggagatgagacggttgtgttagcctcaggtgctgcgcctaagatggagaagcttcaaatgacggttctgctcgccattgttgtcctgcttatcgtgttagttacacgagtaacaagaggtagatag

SEQ ID NO: 168781 - DNA, 544 bp, Arabidopsis thaliana landsberg; identical to SEQ ID NO: 42299

SEQ ID NO: 168782 - DNA, 687 bp, Arabidopsis thaliana landsberg
gggaaacatggaacaggctgttttaatgtaaaatgtccaggatttgttcaagtagccaaaaatggtccaataagtgtacctctcaagtttgattatcttctctggcttactatacatcaggtacagaatttcttataccaaatcataagtttttttcttatacatatgaagatagagcatagactaagagcataatttggaatcaacaattgaaaacaatgaattatgcttgacaatactattagacgaatactttgtaattatttttgcaactgctaattcatgtaaaaggacaaggaaacaaaaaactggtggcttacacaaacaaatccagatgatgatactaaaaatcatttgggatattggccaaaggagttgtttaatcttctaggagatggtgctgatttcgttggatttggaggaatggtttcaggtgatccaagaactccaagcccaccgatgggtaatggtcgtcttccaaacaaagatgaccgtctatggtctggttatcttgaccatcttaccataatccaaccggactatgaacatgccggatttaattaccctatgatttagcctttggcggacagcaacgtatgctatgatgttaatttagtaggatatgttgatcatcaggttggtattgctatgtcttatggtggtcctggaggtattaaatgcggtgat

SEQ ID NO: 168783 - DNA, 1481 bp, Arabidopsis thaliana landsberg
atgttggacaagacatgggtgcagctatgcaggtaaggaattatctaatataggttaggtttacaaatgggttttggatactttaagaggcttctatttggctttctttattcattgaagagctgatcccaattacgagagaggtgctcggagttttgtacgtgatgtggttgcggctctaggagatattgatatgattatatgtccctgcaaagagtgtcgtaacgtataccggcagtcaagcagtgatgtggttgtccatctggtaaccaaagggatggatgaggcatacaagttgcaaagtgaatggtatcatcatggagactctgtggcttcagctgaaggcgtaagtaccacaaatcagaggaatgatgaaattcttgagctatacaaggctgctgaatattttgatgaagagctggctagcaagcgggacttagtagacactccattgggtgacttagctgagatagcagaagacgaggacaggagagaagatgaattcctagccaaactagcagatgctgaaacccctttatacccgagttgtttaaaccacagcaagctctcgacgattgtgtctctctttaggattaaaacacgtaatggatggtctgacaagagcttcaatgagctgcttgagacattgccaaatatgttgcctaaagataatgtgctgcacacatcattttatgatgtcaagaaagttttgaagagcttcgacatgggatatgaaaagatccatgcttgtgtgaatgtatgctgcctattcagaaagaagtacaagaagctggacaattgtcccaaatgcaaagcttctcggtggaagattaatactcacagtggtgtagtaaagaaaggtgtcccacagaaggttctgcggtactttccgattatcctgcgacttatgagaatgttcaggacagctgaaatggcgaaggacttaaggtggcatttcactaacaagagtagtgatggaaaactccgtcatcctgtggattctgtgactttggataaaatgaatgataagtatccaacatttgcagctgaagcaaggaacatgcgacttggactgtctacagatggcttcaatccgttcaatatgaagaatacacagtacagttgttggccggttcttttagttaactataacttgcctcctgacctatgtatgaagaaggagaacataatgcttacactgctcattcctggtccacaacagcctggtaatagcatcgatgtgtacttaaaacctcttattgatgagttgaatcatttgtggaagaagggagaggtcacttatgacgcttacagtaaaagcacattcacgctaaaggcaatgcttctttggactataagtgaccttccggcttatggaaacttaactggttgtaaggtaaagggtaaaataggttgtcctatttgttgtaaaaacatagatagtttgcggttgaagtttagcatgaagcatgtgtatatga

SEQ ID NO: 168784 - DNA, 2542 bp, Arabidopsis thaliana landsberg; identical to SEQ ID NO: 531
  unsure (1)..(2542): unsure at all n locations

SEQ ID NO: 168785 - DNA, 1070 bp, Arabidopsis thaliana landsberg
acgaattagtgagccgtatgcatctgaaaggtgatgcctctctgagttcggcttctgatagatatgtactgcaaatatggtatcattgagcgggcttttatggttttcaacacagctaccgagaaagatgtcgcgctatggacatcaatgataactgggttggccttccacggaaatggccagcaagctctgcagctattcggaagaatgcaagaagaaggtgtgacgccaaacaatgtcactctgctcgctgtcctgacagcttgcagtcatagcggactcgtggaggaagggctacacgttttcaaccacatgaaggataaattcggctttgaccctgaaactgagcattacggaagccttgtggatctgttgtgtagggcagggagagtagaggaagcgaaagacatagtgcaaaagaagatgccaatgagaccaagtcagtcaatgtggggatcaatcttaagtgcttgtcggggaggtgaagacattgaaaccgcagagttggctttaactgaattgcttaagttggaacctgaaaaagaaggcggatacgttttgttgtctaatatatatgcaaccgttggaagatggggatattcagacaagacgagagaagcaatggagaatcgcggagtaaagaagactgcaggatatagtagtgtagttggagtagagggacttcataggtttgtggctgcagagaagcaaaaccatccaagatggacggagataaaaagaatattgcagcatctgtataatgaaatgaagccaaaattggattgtttggacttgttagaaatagagatcaaatagcaatctaagcatttgagagagcatgcatcagggaggagatttctcgacacaaagtaattaaagcatgatttcaaagttgaaaactcccgagagaacaaatgccggtgctggttggcttacggtgtgttgataaaacaatcctcctccttgaaagagatatcacctcatttggatcaaccttatcatcaatcaattcagagacagtgccgccagcaatatcctctgtatttgaagatgaagctagcaaaggataa

SEQ ID NO: 168786 - DNA, 2074 bp, Arabidopsis thaliana landsberg
  unsure (1)..(2074): unsure at all n locations
ctttggtagcaaatttaaaagatgcagaatggcatagtcgaattcaaggcctgcaaatttcctgtgctagcccctcaacctctcatcttttgtttgatgatgacagtctctttttttgtaaagcagatcctttacaaggacaagaaattgtaaagattctacgtacttatggtgaggtctcgggacaacaactaaacattgctaaatcttctatcatgtttggacatgatgtggaaaactccatccgtaatagcataaaatcagctattggcatccataaggatggtggtatgggctcatatttgggattaccagagaaaattcatggctccaaaacccaagtgttctcttttgttagggatcgtctccaaaaacgtttgaatacatggtcagccaaattcttgtccaagggtggcaaagaagtacttattaagtttgtggctcaggcccttccgacatatgttatgtcatgtttcctcctccctaaagcaatccgctccaagttaagtagtaccattgcaaacttctggtggaaatccaatgaaaatagcaatagtattcattggatagcgtgggataccctttgtaaccctcattcggaggggggcttggtttttaaacgcttgaagaatttaatttagctcttctagccaaacaactttaatgtctgatcacattcccgaattctcttctgagtagggtcgtacgaggaagatactttcgtttcagtgacccactacatataggtgcctctaatcggcccttttatggatggagaagcattatgacggcgaaacctcttcttcttttgggtcttcgcatgaccataggatctggaatgctgactcgggtctgggaagatccttggatccctacaattcccgcgaggccagctaagagtatccttgaaacaagagatccccacctttacgtaaatgatttgattgatcaaaatacaccgatgtggaagcttgatagccttcgagccttgattgatcctgctgatattccactcattttaggaaattcggccaagtcgtacctacttgagtgacgggtttagttggtcttatacaaaatcaggtaattatactattaagtccggatattgggccgcgagagatttatctcatcctacttgtgatccctctttcagggaccaggtgtttnggcacttcaggcacaagtatggaagcttaagcatttcgcgtggcaatgtttctctgggtgtctagctacttgtcaaatgctagcttacagacatatgggtacagatatgagttgccctcggtgcggtgagatggaagagtcgattaaccatcttctctttcattgtccaccttcacgccagatttgggcgctatcgcctattccctcttcagggaatattttccctagaaattccctcttttataatttcgattttcttctttggcgtggccacgaattcggaatagaagaggaggttattaatatatttccatggatacttaggtatatctagaaaagcagaaaccgctttgtctttgaaaacatcagagaaccccctcctgaaactctcgctttggcccttcaagaggctgcagtttggaaaaaagcaacctcaattgacgaggaccacatcgaagattctatcccccctgttttcgtgcaagctccccctgctgagttccctgaatgtcagtttgacgcttcttggcatgcagatgattctctaagcggtcatggctgggttcttgtccgacacgacgccgtcctccatatgggactcaaaagtgatcgccggagtttatcaccgctccacgcggaatttgactccttgttatgggcgatggagtgcttgatctctattggtgagacgtctggcgtatttgcctccaattgctcaaatttgattactattctcgacaaccaagacgattggccaacattcgcagcggaattggcatcttatcgttcattagtgtgttttttcttttcttttagtattcgtttctttcctcgtaatttaaatactcgagcacattatttagctaagaaagctcgagctcgtaattgtctttttcccatgtaa

SEQ ID NO: 168787 - DNA, 3059 bp, Arabidopsis thaliana landsberg
tttgaatttttaaaagatcctctccaatccaacaccactaactactacagttgtggcgtcaacggtcctgaattttccttcaagacccctccatcaacttttcctgtcgagttcgcaatcgtaggtaaacttcctcaaagactcttttctcaagttaccttaatgcaatatgccaatatatatgttaattaggttgagtttcatctatagatagtgacttggttcagatacacctaacgcataaaacactaaatccatgacagtttggttggattgtatttattttcacaccactatactatttgttgggttctggtttgaaccggttaaggaccaaattttcatgccaaactaatgaaagaccgatttttgatgtgatattgaaggcgacctaggccaaaccgaatggtcagcagcaacgttatctcatataaatagccaagactacgacgtgtttctacttcctggagacctatcctacgccgacactcaccagccactctgggactcctttggtcgcctagtggagccactagcgagcaagcgtccttggatggttactgaaggaaaccacgagatcgaattcttcccaatcattgaacacacaaccttcaagtcatacaatgctcggtggctcatgcctcacaccgagagcttctctacctccaacctgtactactcttttgacgtagccggtgtccacactgttatgcttggttcttacaccgactttgactgtgaatccgatcagtatcaatggctccaggccgatctagcaaaggttagtttgtagataatgcaactaaagttggaaaaatgcttaacacttgatcatagtataccttacacacacacacacacaaaaaaacctacttcaaacatttaatcaaatctattaatcttaatatgtatcatattaaatagaaacatattggtatatataatacgtaaaatatttttttggtgctgtataaattatcaaaatatgacatacctgatacattatgaagaagttgctttcaaaaatatatatgttcaagcattatcggtaaaataaatattacatgaaaaaggccgaaagattttttaacgcaataacccatatttataacatgttacgtaatagttcaaaatttctatcaattcttgaaacttgtttttttttttaattaattgaaaaaaggttgaccgtaaaacgacgccgtgggtggtggtgttgctgcacgccccgtggtacaacacaaacgaggcacatgaaggtgaaggagagagcatgagggaagctatggagtctctgctctttaatgctcgagtcgacgtcgtcttttctggccatgttcatgcctacgaacgtttcgtaagtcctcaatcatcgctaatcaatctctctttttttactattgacttcattgaatcattattgtaccatgtggattaatagatgtcgaattgtgattgatgcagaaacgtgtatataataacaaggccgacccctgtgggcctatacacattaccatcggtgacggcggtaaccgagagggccttgctttatcgtaagtcacctagctctcattataaatccaaatttaatttcatattcttcccaccaatccaaatgttttttttcttctaataaatttgatcatttaaatgaattcaatagactcactgaaatatgttttctcttttcataacttgaattatagattcaagaagcctccttcacctttatcggaatttcgcgaatcgagttttggacatgggagattgaaggttatggacgggaaacgagcacattggtcatggcatagaaacaatgactcgaactcacttcttgctgatgaggtctggcttgatagtcttagcacatcatcatcatgttggccttcaagtcgctccaatgatgagctctagatcatcatacccgaaaacgtcttgtacttcttttgctcatcggagcgctcgtagaatagtaaggaactacgaatattcattttgttacaaattttactattttaggcatttctttttgtgtttaaggatgtatttggagtttctatttaagtactgcgtgcttttgttttaggatccaacaaggtttagtatatcatatcataccagataaatgtctgtctgatctacgcttacatattcgatcaataagaattttcctactcgttaaatattccttttctttgaattatttggaaaaggatgcgggagggagtgtatatattcaatcaaaatttttggataaaaaataaaactattagcttatgaaaattacaaaacccttcacatttcttatttattttgttttcttataggcaaaaggaagatgaataaagctacaagctaattaagctttttataaacaaattaacaaacaaacactgtgacttgacgagttgtataaacaaacctgaagcatccacggatcttttcaatatttgatcaatccatcccatcttcttctccttcatctttcaccaacatcaactctttgaaaatgaagaagatgaaaatatttggtttcttaattagcttttctctctttttcctctctccgtttgtatgtcaagctaactatgattcaaacttcacccgcccgccgcctcgtcctctcttcattgtctctcacgggcgtccaaagttctatcctcaacaggttcattaatttacttctctttctcattgccctctgctctcgatatagtttcaatttgttaatgttgatcgtctatatattaattgtatacacatataggtgcacatatcattggcgggtaaagaccacatgagagtaacatacacaacagacgacttgaatgtggcatcgatggtggagtacggtaaacatccaaaaaagtatgacaaaaaaacggccggagaatccacttcttacacatacttcttctacaactctggaaagatccatcatgtcaagattggtcctcttaaacccaacaccaaatactattaccgttgtggtggtcacggtgacgaattttctttcaaaactcccccatccaaattttcaatcgaattcgccgtcgctg

SEQ ID NO: 168788 - DNA, 522 bp, Arabidopsis thaliana landsberg; identical to SEQ ID NO: 1321

SEQ ID NO: 168789 - DNA, 667 bp, Arabidopsis thaliana landsberg; identical to SEQ ID NO: 45197

SEQ ID NO: 168790 - DNA, 507 bp, Arabidopsis thaliana landsberg
ccgtgcgcgggtctccttacccttccaaggtgttcaagggcatgcgcatggccggccgcatgggtggcgaccgcgtgaaggtaaaaggactgcgcatcgtaaaaatattccctgaaaagagttatatcctggtcagcggatctgtccggggtcataatggttcaatcgttttaattcagaattgatatgcaactgcacgttttaaatagcgaaggaacacaaacgggacgaccggttaacctgcccaacgagatctttggtataaagcccaatgaccacgtgatttacctgtcggtcaaggcacacctggcagctagccatcagggcacgcccaatgtcaaggatcgcagtgatgtgcagggatcttccaacaatgtgcaccgacagaaaggtaccgtcggatcccgcaaaggaaacatccgcaaccccctgtaccggggcggtgagaccatctcggacaccaaaccccatacctatgacctgaagctcaaccggaaggaaaaggac

SEQ ID NO: 168791 - DNA, 3045 bp, Arabidopsis thaliana landsberg
attctccgattataaataaaaagtaaatgtaaatgtaagcgagagttaaattaaaagagcccaaccttcaaggccaagcttagaaagcatgagtcgtcctcctggctgcataaactcacccatcattctctctggttctctcatatccctctctatcacaagtactcggcgcccgtcctatatataattggaaattaggaataaggttatattatgcaaaaacaaaatattgcaatagaattctactatgaaacaataaaaacagtcatatatagtactaaacttattcctatcatttttttgcaaaactatgacgccactttacaaaccttagcaagagaatatgcgagagccgagccacccacaccagccccgacgatgataacatcagcagcactgtctcttctctcctctgctgccgcatccgccaattccggcgccttcttcttcctgttggtaacgtagaacaccgtccaggtcagcacgaaggcgagtagcgtccatagacaaacgtgcgtaaaggccatatccatatctattagctagttctcaatatggtttagattactataaaaggagtaaaacatgcctataaaatgcaaagttatatcagtttggacgtggcatcaccacaataaagttatcttttctgttgtccacataactcgttttcattgttgacataaacaaatgatatttatatacatttcagatacaaacacaagacattgaccaccctaataaatgattttgttagtatatagaaggtaccgcttaaattattgacatctttgaaaatattgaatgacgattttaaatagtaaggaaattagctaaatctgaatatatcaatcaattgtttgataacagaaggtcggtccagaagttagtgtaacaacccgtccccgtgggacccgcacacgtggccactctctgccacgtggcatcctgttggctctgcagcgcatctaccctaacatcgacacgaattcatgcctatgataactcgaagctctacaaggaacgcacaaaagcttaccacgacaaaaagatcctcactcggacctttgagcctaatgaccaggtacttttttatgattctaggttgacaatatttcctggaaaattgtcttctccttggtcaggtccctacacagtccacttggttaggccatctggaacagtcattctcaaaaacaacaatggaaaaccatttgccgtgaatggatagagagtcaatcattactgggctgaagccaagattccagtagaaaagcctttggatcttcaggacctacttgttgattaagcaactgcagagtcaagctattaactataaacaagcgcttagtgggaggcaacccactggtaagtacttctccgttttattcatttcattcatttgattcttaacattaagattttttattttataggactattcagaaagaaaaaaaaacgtgtgttgaccaaaaacgcgatagtgtcgatcgacaccctcattttctaggtaagtcgatttaacctaaacttcatcttcttcatttcagttttttttcaaaatcgccgaaatcactcttttctctctagattcttcgattcttcactgtttctagtgatttcaggctctaaactcactagaatctcatcctctatcttccccaagtgtcaactccatcgatctgcaagatgacagggcagaaaaagaaggcgaggaagagcgttggaccttcctcctcctccgtcgcccctcaccccgcctgcgcttatccactgctgtcggtttccgcccttcccaaccgatatcccaagttgcagctcctcaacctcctgtttatcgatttccatggccaaagcttccaaaagagagaattccttctcaaagggtttgggagaaagatgtcaacagggaattcactaaaggtggctatatcaatcgccatttttctccagattaggatgattatgatactctgttctataatgcctagatgagtgtagaaattttgcctactcggtttgcgaatttcggtttgatgcagcgtttgcagatagagaaatctgttttaggactgctagatgacataggtttgggaatcatctattgtaggcagtacgatttgtatcctgagctggtttgacaattcatggtttttgttagggtctactatgtgaatgacaggaaacacaacgctcaggaaggagctcttatctacttcattcgcggtgtcagatagagtctaccaccgagagatttgtgtgacatctatggttttgattttgatctcactagagtttccctgcctggacagtttaaggatgctcaggttatctggtgcaggtttggtaatggaatttttgattccaaggacgcagttcactcagagattcgtcacccggtttttgcgatatttggttaggctgattagaagcacactgttgtgcaagatgaagcctggcaagatgagactttctgtgctgttgttgctctatcatgctgttcatgatttctttcctgacagctttggagttgaggaggttgtccgcgatataaactttggcgttttgtttgctcatcacttggtctcactcaagaccaagcccttacacggtaaagggaggaaatctaagagagttggcagtcttctcactcctatatttgagcatttttgcatcagctttgaaggagaagaggtcaacaccacgagattcacaatggatgagagtaatcttaaaaactttcactggctgaaaggcaacttcctttggtgtttcagagacgagacacgacaccatatgattcagttaccttgccctgcacttacaaagattacaggagagcatgaggagattggttttcatcatgatccttcccgtctgcattccgcgccatgctccaggagacagagaggttcagcttcaagatccgcaccgactcagactgaggatgagttcattgaccctactaggggtccgagagttggatcttcttctttagctctaccatatgagctgccttctcctcctcctatcccgatggagcaa

SEQ ID NO: 168792 - DNA, 673 bp, Arabidopsis thaliana landsberg
  unsure (1)..(673): unsure at all n locations
cgcacctaaccatcatctctctcactcgattcgtttagcaaaaatcattccccaaaatttcaatcttcacttttcttcaagaaatcgcccatcccctattttactcgatccaaactacaagtgtgtttttgtttgagacttatctactaagctttagttttgatttctgagagtttagcttcaccatgagttcgaacagcaacgaatcctcannnnnnnnnnnnnnnnnnnnnnnnnnngctgaatcttggtctactaggcctgagagggagatggaagtgtataggcggttcagtcaacacgccaccaaggtcctagctcgtgatagaagaagagcggaaattgcaagacgtaagagagctatggccgaagagagaagtctcgtcgatgaagaccttggtggggatgaagactatgtcccttaaataactccaagagccaataaatccttgatgaagaagactaagctatcaccggatggatactatgagcttttggcagctcacgaattccatggcactcgatacccccacaccgaaaccatgaatgagcttggcataacagaggatgtcgagtacctctttgaaaagagtggtcttttgggtctcatgaccaaccctcacttagcctacaaacaaaagcgcttcagtttcttgctttcactggaagtgga

SEQ ID NO: 168793 - DNA, 1592 bp, Arabidopsis thaliana landsberg
cggacaacggtttcacgtacgatcatatctacggcactaagatcggtggtacaatctttgtaccgtgctggtcatagacataccgcggcgaatctgttagagtatgctaatcccaaccggattgttgtttacttgcatgcttctgttcacaaagtcctcttcaccaccgaaggtatttttgactactattcatatttgttttaggaaggttttggaaaacatgtaattattatatgttgatttcctaatataatttttcttcgacagatttacaaaagtagttagaaaagctcccgaaatcagttgtagaaaatgttatgaccattatagagatgatagtattcctaaaagttggaatacaacataaaaaatggtattttgtgctatctttttttttataaaatcgagctagcattattagtgtaaaatctaatgcattgactttttaaaaaggaatacttatttataacctcatgagctggtcattaggaattatggagtgagcccactttcctaaatgacttttatatgttttattttaattgtgtgtactttaaaagtttcttacttttctaatttttttttttttaacttattagtttttcaattctacataagaaagtatattgacaaattcaattaatataattttgaagaatatagaaattaaaaatatatattttagtttcaattagtatatgatttttactttatgaatgattgtttgctaaaactacttgctgcaaaaatgaacattaaaaaaaaaaacaggtaaccagaagccaaaagcgtatgaagtgctatttgaggatgcaaatggagtgttccacaaggcaaatctagcaaataaggcaacgaacgaagtgatcttgtcagctggagccctgggtatcccacaactattaatgttgagtggagtaggtcctgccgtccatcttgaggctcacggcgtgaacccactcgtcctagatcagcccatggttgggcaggggatggctgataatcccatgaactttgtagccattccttctcctcaaccagtagaactatccctcatacaagctgttgggatcacaaagtttgatagttacattgaaggtctaagtggcttgagtctctcttttgatataactcgtaggtttttcgatggtgttttgaatcttttaaacgaggtatataacataaatacatttaaaggttatttagttatgacttatgagattgtatgttgtctaactatgacgcattatgcagacaagtcatactacatctaggaaaatcctgacccaatccattgcagtccttttaaaatcttttgatgttaaattggaagtgaggatgaatgggggtttgatctttcaaaaagtcgatggaccggcctcaaaaggacatatgaagctacggaacacgaacccaagggataatccttcagtgacattcaactactatcaagaaccagaggatttgaacaagtgtgttaaagggcttaacaccattattagaatgataaattccaaagctttctccaagtacaagtatccgggtgtgacggcacgtgaactgctcaatctcatgttggcccttcccatcaa

SEQ ID NO: 168794 - DNA, 682 bp, Arabidopsis thaliana landsberg
ctaactagccataaatgatggagacaccgaagagagcagagatcgacacaacggcaccgtttagaaccgtcaaagaagccgttgctttgttcggcgagagagtcttagccagtcaagtctactcgaaccatctcaaagtggcaagtctttagctctctctctttgtaaatttgaactttgtattattgtttgaatctaaaaacttatgataataacattagtgaagatacagatgcatgatgagaaatgggaagatccatcagggattaagatagagcttcaagagacaagatatgatctcaaaagggcaaaagaagaaagcatacaaatgaggaactctttgtcttgtctcaaggaagagcttgaacgaacaaaacaagagctccagaagctgagagttgatcctggggtaaacgaaacgaaactcgacgagactgtttttaaaaccaagtttgaagtgttagttcctcgggttgatgatgagccaattagaagtccgaggttgagatcgatgagtgagaagagatacgtgaaatttgcaaaccctactggtaataatggctcggtgtttcttgagagacatccttcaatgaaaaagaaggagaagaagacaaaggataagaagaagaagagtttaatccctttgtttattggagggattttttctaagaaaaaggtttaa

SEQ ID NO: 168795 - DNA, 948 bp, Arabidopsis thaliana landsberg
tatatttttagaaacatttaagtttgattggtcttgaaaggcaattgagttagtaatttattggttatatttaggtttctgaacaaagctgcggtgatactagacggtgatcttacatctgaaggagttccggcaaataagtggcggctatgtagcgtccaagaagttgaagaggtcaagtgcctgatcagagttgttccggtttggtctgctggaataatttcaatcgttgcaatgaccacgcaagcaactttcatggtctttcaagctacaaaaatggatcgacacatgggtccacactttgagatcccggccgcctccataaccgtcatttcttacatcactataggcatttgggtgcctatctacgaacacctcttagtcccgttcctttggcgaatgagaaagttcagggtcactctccttcaacggatggggatagggatcgtcttcgccagtctctccatgttcactgcagggtttgtagagggagtgaggcggacacgggctactgaaatgactcaaatgtcggtgttttggctggctttgccactgattctgatggggctctgcgagtcatttaatttcattggactgatcgagttcttcaacagtcagtttccagagcacatgagaagcatagcgaattcgctatttccactctcatttgctgcagctaattatctgagcagtctgctggtgaccaccgtgcataaagtctcaggcacaaaagaccaccctgactggctgaacaaggaccttgatagagggaagttggactacttctactatctgattgccgttttgggtgtggttaaccttgtgtatttctggtactgtgcccatagataccagtataaagccggttcgcaaattgaagatttcaatgaggagaagtctcttctagacatcgaaccaaaccagagacacgatcaatctccaagttag

SEQ ID NO: 168796 - DNA, 637 bp, Arabidopsis thaliana landsberg
cgatcttcacccgctgctcaagcagggcctgtacgacagcggtttcacccgctgcacgccgatccaggaaatgaccttgccgctcgccttggccgggcgagacgtcgccggccaggcgcagaccggcaccggcaagacctgcgccttcctggtcgcgctgatgaatcgcctgctgaccacgccggccgtggccggccgcaaggacagcgacccgcgcgcgctggtgatcgccccgacccgcgagctggcgatccagatcgagaaggatgcccgcgcgatcggccagcataccggcctgcgcatcgcgctgatctacggcggcgttgactacgacaagcagcgccagcagttgaaggacggctgcgacatcatcatcgccacgcccggccgcatgctcgattaccacaagcagggcgtgttcggtctcaacagcgtcgaagtgatggtgattgacgaagccgatcgcatgttcgacctcggcttcatcgccgacgtgcgcttcatcttccgccgcttgccgccgcgcgagcagcgccaggtgctgctgttctccgccacgctgagccatcgcgtgctggagctggcctacgagcacatgcacgaagccgaaaagctggtggtggagagcgacaacgtc

SEQ ID NO: 168797 - DNA, 2939 bp, Arabidopsis thaliana landsberg
  unsure (1)..(2939): unsure at all n locations
gtcactttcattttcacttcgggggcatccttccttctcgcagtcttcccgcggccttctcttcttcttttcttgtggtagccccctacctggcgcgccaattgttggtgtataaaaccgaccctctaaaccaaagaaggaaatgacgagcctgaaggaagatctttattaatatcactgaagttcggccgtttacagagtatttctacaaccgagattagatttctgatctcttaacgtaaatacaaacttcacaagtcaaaattagacttatgtttctgaatcagaatgagaagtttctattgcttttctctgcagatttcaggtgtcctttcctgacattcctttgtcagtatttataatactgcaaggacaatctatagtacaattttcttctcgatttgggactctctcctgaccagcagctccctgaaggtgggcttcgtctggtgttgggctctttcgtctttaaacgggccgatcttctcttctttcctccctcgttgccaattacgatatgttgggctttaaccatgttgttggggcgaagcccatatccaacaacactggaggactagtcaagtggtcaaaaatgcggattacactttggttataagagaaaaataatattagtaataatatttttttcctttaagattcagtcaacgataaacagaagtaagatattctgaacagtgaacaccgaaattttgaggagtcttttgtgggtacggagacgaaaaaaaaaaagagttcgttgtagtgcggttcttcaattactttgacacatatttagccttttgcaagaaaggtgatgatcattatactgacattcctctacattacggtgttaccaaggattttcaaggtatattttccgaggttaccttctagacattgtaactatcgatgctaaaataagattccttgatttatcatccgacttacagatttttttttttgaaagtttcagcatctacaagaagaattctaattaaaatcggcacaactacgcggttgctgataggtgcattccttcggtgagtaaactatatttgttgacttgggtatcattatgcatgctaatcataacattaatgctatcaaaccaaactccatatacttcactagtatatatatcagggatcattgccgaaataacatagatattgtatttgttatagaagattggtcatggtgagttcaatgggaagaggaagagagatcagttttaattaatgttgttgatgcaacatatatgaagtttgtttggatgttttggtgactattttgatctaatgattatttgcctcctctcatggaatcaggcctggcctgtccataaggcaagtgaagcacttcctttaggccacaaatataaaattaataatcggaaggccataattttaaaattacttgtgtgatccgctggttaagtacatcaatgttttgatagaaaaaagtcttcaataaatcaatatatttgctgcaataatttagaaagttagtttttataaaaagtagaatattttatactttcttaaaaataatcaacaatttttcaatacttttctaatatttgaatacaatttttttaacccaaatatttgtattaaaggtcaaatgttttaaaaatgctttaagccacctgaatcataggacaccattgcatggaatgcataaatcactatgaaagggaaatcaagaccaaatcgagtaagaagaggacttagaagaagaagaagccgtctcactagaagaagattcgatggttgatacatacgctaatggcgggagctataaaactcaagaagggcatgctcagggtcatcagactgaagattgttcaaaaagtactgatgggctcaccgattcttcaagaaagaagatagtttcgcaagatttaaggacacctactcctgcatgactatcatgattctcgatgaagaaactctcgaagagtatggtttcggacaacctgaaaccctaaaagaaactatcattagaggaaaccatgatgatgccccgcctaatgcttccccaccctcgggaagaggaaagagctcgggcagtaaaagccaaaggggcaaggacctgttcagcttgaaccgatcggttcaaccatttcgtcacccgatttcgtctctataagatcactctcacataccatggagacaaaagannnnnnnnnnnnnnnnnnnnnnnntgatgagccaatacttggatcaacaagcgctagacacgaggactctccacttcaagatggataaggtcgatggcattctctcaggtatgatcgacgagctttccttgagctttaggagaatgaagatcaagctcacgaaagacgttgccaccttgacaaagaaggtaaaaactatagaaaagaactgagggaaggatttagagaataatcaaggaagtgctcaaaccatcggagaattggccatccggatagccgaggaaaagaaaggtcatgctcgaccgttagagagctccttgacaagaatacggtcttggaagaaagactcaaaatgcttgaagagagagctaacaagaacgaagagaaactccatgaggagatctttctccttcgtgagctagccgactgccaaagagaagccggaaagaatcacatgtctgattttaaagttctctttagtaacgatttgagttcggcggctcaaataaagaagtatgaggacaaggctaaggcgaccatggtcaagatcaagaatttagaagatagctataaacttctaaccgagacaatccatgtcgaattcgataagtccctcaacctgttgcatgggataaagtctaagctgggatctacggagacgacctttaacgagacaatcgagaggttggataagaagtacaactcgttactcctacgtgctaccatctgcgagaaacgcataaaagagaactcatga

SEQ ID NO: 168798 - DNA, 543 bp, Arabidopsis thaliana landsberg
cagttccataggcgatgatccactcgacttcttgcaacgaatcttacctgtttattacaaacacagcaatactagcagctgtgttcggcaactcaacacctatgtaagggaattcataaccgaaactcatacatgagactggaaacaggggattacgaactaatgatcctttctttatttactttaggggtttaggaaagtggatccggaccggtgggagtttgcgaacgagcattttctaaggggacagaagcatttgttgaataacgtagcgcgtaagaaacacgcgcgggggatgcgcggtcaaaattgggaggacggtgagattgtgagggagatcgaacggttaaaagaacagcaaagggagctagaggcagagattcagaggatgaaccgaaggatcgaagcgacggagaagagaccggagcagatgatggcgtttatttacaaagtcgtagaagatcctgaacttgttccaagaatgatgctcgataaagaacggtcaaagcaagacacaacaagattttcaacgagaagaagcgc

SEQ ID NO: 168799 - DNA, 207 bp, Arabidopsis thaliana landsberg
aggaattccggtaacagcgacaaagcgcaaaacgatggcaaaggtgtaccatctgcctacagaggagtccggaagagaaaatgggggaaatgggtgtctgaaatccgtgaaccggggaccaagaaccgtatctggctaggcagtttcgagactcctgaaatggctgcaacgcatacgacgtggcagcatttcatttcagagggagag

SEQ ID NO: 168800 - DNA, 336 bp, Arabidopsis thaliana landsberg
atgttcggggctactattatgaatgtacttatcatcgaccatcacaccactctctttctcgggatgcgtgacctttttaacacgctgcccggcaggtatcggctgtttgaggcaacggattttgaatctgcgatacatttgttaaaaactaaaacgctcggcctgattattactgaaattggtattggtaaaataaagacactcggggctgtggccgaactgctcaggtatcagcccgatgtcccaatccttttctattcgtcatttccagaaaagagttttgcattgcccttgctaaaagccggggcttgtggattcatttctaaaagatgcgcc

SEQ ID NO: 168801 - DNA, 1080 bp, Arabidopsis thaliana landsberg
ttaggtatggccagtgcactaggaacattatgtggtcaagcctacggagccaaacaataccatatgctcgggattcacctccaaaggtcatggatcgtccttacaggttgtaccatttgcatcatgcccatcttcatcttttcaggcccgatcctcttagccttaggtcaagaggaccacattgttcgtgtggctcgggtcatagccctatggctcatagccatcaacttcaccttcgtacccgccttcacttgccaaatattcctccaatctcagagcaagaacaagatcatcgcctacgtgtctgctgtaaccttagggctccatgttttcttctcgtggctcctagtggttcatttcaatttcgggatcactggtgcaatgacctctacgctagttgcgttctggatgcctaacattgtgcagctcttgtatgtcacatccggtgggtgtaaggatacatggagaggattcactatgttggccttcaaagatttatggcccgtcttcaaactatctttgtcttccggtggaatggtttggtaaggtttcctaaaagcttatggaatctaaaagctctgcaaacaatataaatatcaattagtgatacttttttttgagaatatgatccgaccgttacagatacgcatatatattatacactgaatattttattataatgtcaagttactatgcttttgctatatgtttgattgattcttgtcaatacactttactttttttaatttatgatgattacttggcggtcgttattttttacagctaggagttatggtacaactcgatattagtattgctcactgggaatttgaaaaacgcagaggtggcgattgatgcactatcaatttggtgaataaacaagaattgaccttatatttcttatggtttacatactacacattatctttatactaactcgactcttaagttaaaatatggtatgagtataaatagagtgacatacaacttattacatcttaccaaatcgactaatctttcccatttctttcttgcagcatcaacgtaaatgcactgcacatgatgatagcacttgggttt

SEQ ID NO: 168802 - DNA, 1356 bp, Arabidopsis thaliana landsberg
acagttccaatccaaccggaactctggaccatgtttttcgacgggtcgctgatgaagacaggggcaggcgcgggcctgctcttcatctcgcccctcgggaagcacctacgctacgtgctacgcctccacttcccggtgtccaacaatgtggccgagtacgaggctctggtcaacgggttctgcatcgccatcgagatgggggtccgacgcctcgacgctcgcggtgactcgcagctcgtcatcgaccaagtcatgaagaactcccactgccgcgacccgaagatggaagcctactgcgatgaggttcggcgcctggaagacaagttctacgggctcgagctcaaccacatcgcccgagtctacaacgagactgcggatgagctagctaagatagcttcggggcgaacaacggtttccccggacgtcttctcccgagacatacatcaaccctctgtcaagaccgacgacacgcccgagcccgaggagccttggccaaccccgaggagcctcggcccagcccaaggtatcctcgtccgccgagggtgaggcactgcgcatcgaggaagagcggaatggggtcgcgcctaatcgaaattggcaaaccccgtacctgcaatatctccaccgaggagagctacccctcgacaaggccgaagctcggcgactcggcggcgcgccaagtcgttcgtcttactgggtgatgaaaaggagctctaccaccgcagcccctcaggcattctccaacaatgcatatccatcgccgaaggataggagctattacaagaaatacactcgggggcttgcggccaccatgcagcacctcgagccctcgttgggaacgccttccgacaaggcttctactggccgaccgcagtgccgacgccaccaggattgtacgctcctgtcaagggtgtcaattctacgcaaggcagacgcacctgtccgctcaggccctgcaaacaatacccatcacctggttgtttgctgtgtggggtctgacctcgtcggtcccttgcagaaggcacccgggggttcacgcacatgctggtcgccatcgacaaattctccaagtggatcgaggtccgacccctaaccagcatccggtctgagcaggcggtggcattcttcaccaacatcatccatcgctttggggtcccgaactccatcatcaccgacaatggcacctagtacactggcaagaagttcctggacttctgcgaggaccaccacatccgtgtggactgggccgccgtagctcaccccatgacgaatgggcaggtagagcgtgccaacggtatgcttctacagggactaaaactgaggctctacaatgacctcaacaagttcggcaagcga

SEQ ID NO: 168803 - DNA, 1219 bp, Arabidopsis thaliana landsberg
caaacactatccactttttcttaaatttcttgtaaaccatacaaaacatgttgtgtgtttctcaagcatcaacaacaaccctttgctcaaccatggatcaaacctcacaaccttcttcttcttcttcagccacgatccggctcggtggtcgagccattgaccgtcataacccaatcatacgtgacggtcggagactcactccttcaccttccccaaaccttaatccctcttcttcgtcttcttctacttatcatactcctcttatgactagactaggtctcgagagtagtgaacaaaaacggttagcgaagaggaagagcaagaaaggtgacagtgatgttggtaagtcaccggttagttgttttagcagtgacacacctcagggttcttcaaggtacttattgagtaacccggttttctttgacgggtttgtggattccgacccgattccaatacctattgatgaaccggagataaccaaagctgatgatttaaataattttcatgaagatcgactcataataaacgcctcaaagtatctatcaacttctgcttctttcttggagaagaagcaacccgatttcttcgaggggttcttggattatgaaccggttctatctcccgataatcctttctctgaacccacaaaagcttctcctacagcttctctgagctctcttgaagataaagatgtttcgtccccggatttcaaattttctcctcctcctcccccacctccttctcctgctcagtcgtcgccgccatcaccaccgaagaaaaactcatcttccgatcaagtgagtaatcgaacaaaaccataatatttaatcatgagttaatgttttgagattaaacttgacaatctttctttcgttgcttaaaggtggtggttttgagagtgtcacttcattgcaaaggctgtgcagggaaagttaaaaaacatctatcgaaactgaaaggtaactatcaactaaagtatttctattcattaaaattgtattcttgatttgtaaaaatactctgttttttggtcctttgatcattgttgaacgcaggagtgacgtcgtataacatagacttcgcagcaaagaaggttaccgtgacgggagacgtgacgccattaactgtgttggcgagtatttccaaagttaaaaacgctcagttttggcctgagattattcagaagtaattctcttcttttttccctctgttttcttct

SEQ ID NO: 168804 - DNA, 923 bp, Arabidopsis thaliana landsberg
tgggaggttcacgatgttggctgcaattctaccggaatgggaatgcacacaatgtgtttgcgataatgcctgaaagaaacgttttatacggagaatcctctttcaggcgggtatgggtcaggttcatgaccagtagcaagcgggttcaagataggagcagggaaaagagagtccaagagctcgaaatagcgacagagaaatggaagatagcttctaaagtgattttcttgatggaggtgttgaagggtgagcgagatatgataatgaccgttcaggtcgtttgaacagtataggcggcagatcaatttgcctaaaccacataagattagtgatttcatcagaaagtctccgaagttgtttgaattgtataaagatcagagaggagtcttgtggtgcgggttgacagagggaggggaagatttgttggacgagcatgacaagttacttgaagagaatggagacaaggctgcagaacatgtgactaggtgtttgatgatgtctgttgataagaagcttccattggataagattgttcatttccggagggatttcgggttgccgcttgattttaggataaactgggtctacaattttcctcagcattttaaagttgtgaaacttggggatggagaagagtatcttgagcttgtttcatggaatccagcttgggctatcacagagttggagaaaaagactttaggtataaccgaggattgcgaacacaagccaggtatgctttcactggctttccccatgaagtttcctccgtcgtacaagaaaatgtaccgatacagagggaagatcgaacattttcagaaacgatcttatctgtctccttatgccgatgcacgtggacttgaagctggttcaaaggaattcgacaagcgggcaattgctgttatgcacgaactgacttagtttta

SEQ ID NO: 168805 - DNA, 1362 bp, Arabidopsis thaliana landsberg
catgagcgcaagaagtttagcaagatgccccttcgatatccccgtatctctaagcgcactcctctacttttcgttcccttaggcaaaccaccatattttgatggtgaggatttatggatgtggagtgacaaaatgaggcatcatctaacctcactccacacaagcatttgggatattgttgagtttggagcgcaggtacctacggtgggggacgaaggctacgactcggacgaggttgcgcaaatacgacactttaactctcaagcaaccactatactcctcacctctttatgtcgagaggaatataataaggtgcaagggttaaagagcgccaaggagatttgggacgtccttaaaaccgtgcacgaaggggatgaggtgaacaagatcaccaagagggagacgatcgagggggagctcggtcggttccggcttcacaagggagaggagccacaacacatgtacaaccggctcaaaactttggtaaaccaagtgcgcaacctcgggagcaagaagtgggatgaccacgaagtggtaaatgttattttaagatctctcatttttctaaatcccactcaagttcaattgattcgtggtaatcctagatatactaaaatgacccccgaggaagttatcgggcattttgtaagttttgagtgcatgatagaaggctcgaggaaaatcaacgagcttggcgacccatccgaagctcaacccgttgcattcaaggcgacggaagagaagaaggaggagtctacaccaagtcgacaaccaatcgacgcctccaagcttgacaatgaggagatggcgctcgtcatcaagagcttccgccaaatcctcaggcaaaggagagggaaagattacaagtcccactccaagaaggtttgctacaaatgtggtaagcccggtcattttattgctaaatgtcctatatcaagtgacagtgaccgaggcgacgacaagaaggggagaagaaaggagaagaagaggtactacaagaagaagggcgcgatgcccatgtttgtcgggagtgggactccgacgaaagctcaagcgactcctcctccgacgaggacgccgccaacatcgccgtcaccaagggacttctcttccccaacgtcggccacaagtgctcatggcaaaggacggcaaatggaagaaggttaaatctaactccttcaattaattatgaatcttctagtgatgataatgctagtgatgaggaggataatttacgaaccctgtttgccaacctcaacatgcaacaaaaagagaaacttaatgaattgattagtgctattcatgaaaaggatgaccttttggatactcaagaggacttcctcattaaagaaaacaagaagc

SEQ ID NO: 168806 - DNA, 782 bp, Arabidopsis thaliana landsberg; identical to SEQ ID NO: 48559

SEQ ID NO: 168807 - DNA, 676 bp, Arabidopsis thaliana landsberg
aattaataaactttcatctaattgcagtacgaagcttgtagaaggagattcatcaagaaaaatagtggagataatctgcagaacaagctggttaaagtcagagaaccaatgtggaagaatcgatagagttttaaaagtacacaacatgcagaagacattagctagattcgaggaatacagagaaacagttaaaatcagagcaagcaaacttcagaagaagcatccaagatgtctcgcagacggtaacgagctacttaggttccacggaaccaccgtggcttgtggtttaggtataaacgggtcaacaagtgtttgcacggcggagaaatgttgtgtctgtcggattatacgaaacgggttctcgtcgaaacgggagaagaataatggggttggtgttttcacggcgtctactagtggaagagcgttcgagtcgattttggttaacggtggagatgagagtggagatgttgatcggacggtgaggaaagtgttgattgtgtgtagggttatcgccggaagagttcatcggccggtggagaatgtggaggagatgaatgggttgatgagtgggtttgattctttggctggtaaagttggtttgtatacaaatgtggaagagctttatttgcttaatcctaaagctttgcttccttgctttgtggttatttgcaagccc

SEQ ID NO: 168808 - DNA, 495 bp, Arabidopsis thaliana landsberg
tagtgatgggaagggtgatcaaacctgcgtgggtaacaaggttgattgcacagtctccaccttatgtgggctagactaaacttaatacggacgatgtttctaagggtaatccatgacttgcatcggcgggaggagtgctacgagatggggacgggaattggcgaggaggctttgcattgaacatagggatatgttcaaaacttttggctgagctatggggggggggttactacgggttatatattgcgtgggagaaagggatcacgcgattggaacgcaaagtcgacttggagatagtggtgggttttctaacgacagagattggtgagaaccatccgttgtttttcctaatacgtttgtgctatggctttctttcaagggactggatagtccatatttctcatgtgtatagaaaaactaatcgtttagccgatgtattaccgaactatgcgtttactttacctttcggttttcattctcttgacattcagctag

SEQ ID NO: 168809 - DNA, 485 bp, Arabidopsis thaliana landsberg
ataattattttaattaattaatatttttttttaacttaaccgctaccgcccgcaaccgcaaatgcttgcgggaaggagcttttgaaatctggcgatttcgagcggtccgaagcggtatctagcggtttctatgattggtgccaaccgctaataaccgctatcacccgcaaacgcagcgtttgcgggtggcagagggagaaccaatcaagcccttacttacgtcttccggcttatcaatatttcaaacattgactcccaccttagtattattcttcgtagatatatcaaagagcataaactcttttagatactaaatgattgataaatgataaatgattcattcatataaagcatgtcctaaaacagatgaaataaataatagttgtaaaaggagaaaagaaagtagacaaatccaactggtttaactaaattaagcaatgaagtgacaaaaatttccctaaaaaagggtctatcaatgcaaacat

SEQ ID NO: 168810 - DNA, 338 bp, Arabidopsis thaliana landsberg
  unsure (1)..(338): unsure at all n locations
cagagtgctctggagagtgaaatnnnnnnnnnnnnnnnnnnnnnnnnncactgttggagtcatggttacaaacgggtttgctatgaaggagataacaagatgctgtttgacctaattaacggatccaaggtacattttggcgttcacaactggatacgggatattcattggtggtcaaggaagtttgaatcaatccatttcaattggataaaaagacatcacaatactccagctgatattcttactaaagctcttctccaaaaccaatctttattcctgaatcatttatgagtttctaatgtaataatctatgctatagtaactacactactgattta

SEQ ID NO: 168811 - DNA, 1054 bp, Arabidopsis thaliana landsberg
  unsure (1)..(1054): unsure at all n locations
atgaatctaccaccgggatttagttttttccgaccgatgaagagctcgtcgttcacttcctccaccggaaagcttccctcttgccttgtcaccctgatgtcatccccgaccttgatctttaccattacgatccttgggaccttcccggtatatacatacacatatctctctatatatgcatcatgatcgcaatgatccatagttcactaaacatgcatgtacttgtgcatatgtgtagttgttattgtcatgtgtgtatataatgatccaaattaaaggacatagattgattgttgtcaccaacttaagtaaccaaactgtcttttttttttttagtagtacacttttgttgggttgctctttttaaggattgttttagtttccaaatcttaccatacacacaaatattaatagtaccagtctttacctaataactttcttttttattccctcggaaggaatctattaattggtgaaccattatcaacattgctttgttcatagtcatacatgtgcaccaatttcaatcattcgaaattggtgcgatctcatgatacaccaacacaatcaatcatatacatattatacacactcaccaaagcatgtacgtagacatacatacgaacaaattacaaatacacacataaaaatatattgatgtttcatccactaaactagtttttactgtgtggataatggtcaatactctgctaaacttcataagaatctcagataagcgtgtatcaacactaactttttatacgtataaactacagggaaagctttgggagaagggaggcaatggtacttctatagtagaaagacacaagagagagtgacaagcaatggatattggggatcaatgggaatggacgagccaatctacacaagctccacacacaagaaagtgggaatcaaaaagtatctaactttctatctcggagattctcagactaattggatcatgcaagaatattccctcccggattcctcttcttcatctagtcgatcttctaagagatcaagccgtgcttttagttctagtcacanaccc

SEQ ID NO: 168812 - DNA, 276 bp, Arabidopsis thaliana landsberg
gggacagcttttctttagatcaggtggatggctgggcttactgagaaaataaattggaggacctaacatcatatgtttatttaccaaaaactactagaacacccctgccattctgaggtgacagacggatcccaccggtcgagcccttttttgatgttatctatacatagtctaccaatgggagcagggactataaaggcactcatagcgtccactggaccaccaggaggagttactcaccgctcatgtcattcttttaaattactctaccccaca

SEQ ID NO: 168813 - DNA, 333 bp, Arabidopsis thaliana landsberg
gtcatctacaaatcattgattctccgacgaacgttgactgtactcgtgaagtcggacttcgaagaaccctccgttcactcatggagtgcgtaatcccatattgttgcacgtaccaacctcctcccaccgaccaaaacgacaccgtctctgtctcttcatccacttcttcctccgaccaaacaggcgttgtcgtcacgggtactttctatggtcaccgacgtggccacgttagcttctgcctccaagacgacactcgtccctcctctccacatcttctcctcctcgagctagccgttccaacggcggctctcgctcgagagatggaagagggtt

SEQ ID NO: 168814 - DNA, 696 bp, Arabidopsis thaliana landsberg
gcatcaaaacttcttggttctgtccttgtctttgctatgatttccgtacaaagggtttttatacactgtgttatgtccctgaatgaaaccaattcgctgaaccaaaccaatgcttatctgcaccacatatgcatcaacagtcaagggacatacaaaccagggagtccatacgaggaaaacctcaaccgtgtcatccgtgcaatatctatcacaatttctaactatggtttcgttcatggttccaatggtgatgctcccaataccgtttttggaaagctccaatgtcaggcgactcctacttgtccaagtgccgctcttgcctcaccaccgctttctccgaggtaaagtagtttgaaaattattaagtttcatgaacttctaactctacaccggttggcaatgaatgcactgtccaatgtccatgccccgtatatattacgttttgtccatctcaatgggatcttaacacatctttgagatgataactcttatcagctgttgattacaacttgaaaatctcactctaaaaccgacaataaaccctactttgggatttatttgggtcaacaaccatattaatatcatttgttttttttgtcaagcgcattcattgatctccgcaatcatttgcttaaaattcatcataattggcaaaaacagttaatatctcatgtcctgtttttttttttttaaagt

SEQ ID NO: 168815 - DNA, 341 bp, Arabidopsis thaliana landsberg
  unsure (1)..(341): unsure at all n locations
atgatagcactccagaaaatatataaatggcataactcgggaaacaacagggtgtttatactgaaagacatcaaccttacagtagctgaaggagaatttatttccatcatgggtccnnnnnnnnnnnnnnnnnncaccctgctcaatatcattggtatgctggacgaaccttcagaaggcagttaccattttatggggaaggatgtatataccctgaaagacaaacaacgctcggaactgtacaaacagaatatcggttttgttttccaggcctatcacctgatcgatgagctgacggtgtatgaaaacattgaaacaccgctgctttaccagaacatcaa

SEQ ID NO: 168816 - DNA, 104 bp, Arabidopsis thaliana landsberg
acacaatcagggcggttggtggcacagacgagcttcaagtggctatagacaagttcgaaggccaaaaacatgtggacactttcaccaaggttccatctaaggtc

SEQ ID NO: 168817 - DNA, 927 bp, Arabidopsis thaliana landsberg
atcctcagggtgtgcttgatatcttcaacaaagcttctcagcagaaaggttttaaccataacaatgctacatactctgttcttttagataatctcgttaggcacaagaagtttctagctgttgatgccattcttcatcagatgaagtatgagacttgcaggttccaagaaagtttgtttcttaacctgatgagacatttctccaggtctgatttgcatgataaagttatggagatgtttaacttgattcaagtgattgctcgtgtcaagccttctctcaatgccattagtacttgtttgaatctccttattgattcaggggaggttaatttgtcccggaaactactcttgtatgccaaacacaatcttggattgcagccaaatacttgcattttcaatattctagtgaagcaccactgcaagaatggggatatcaattttgcgtttctagttgtggaggagatgaaaaggtctgggatttcgtatcccaattcgatcacttactcaacccttatggactgtctgtttgcacactcgagatcgaaagaagcggtggaattgttcgaggatatgatctcgaaagaagggatttcgccagaccctgtgactttcaatgttatgatcaacggattctgtcgtgcaggggaagttgagagagccaagaagattttagacttcatgaagaagaatgggtgcaacccaaatgtgtacaattactcagctctaatgaatgggttttgtaaagtgggaaagattcaggaagctaaacaaacttttgacgaggtgaagaaaaccgggttgaaactcgacactgttggttataccacattgatgaactgcttttgtagaaatggtgaaactgatgaggctatgaaactacttggagagatgaaagcatccagatgcagagctgatacataactataat

SEQ ID NO: 168818 - DNA, 5118 bp, Arabidopsis thaliana landsberg
  unsure (1)..(5118): unsure at all n locations
ggaattccttgcaatccttgagatacaaaagcagagctcgtgtaaatcagtttaagttatatgtattatacttccctctcaagtagtttcataattggtgtaatatataggatcttaaagatgcaggtgggaagagttggaaaaaacctggcaccatctagctgtagattttgatttctttgtaagaaaccaggcatggagattgccacattttttacacgctatctgtctacactctctaaatgcttcctctccttcaccttctgagcttccaaaacccgacccagagaaaccgtgtccccgagtgtcctggttcatgattatacattgcagcttaaaataaacacatatatccgagtagagagaaacatgcctacttgtttacaagtgtgaaggacaaaaaacctgatactttaagcaagaaagatgcacttcagagtaagacaacaataaacataccttttgagaagagttctgaaacctccgaaagtagttcagtagttcttccctcttcaattcatcatcatatgatttttgctttacagaatcaagtaatacctaaaggccagctaaggagattagagatgcgggttcttgatgcagcgattacaaattgatgaaacggaaagggaaacaaaacattacctcatatgcattctgaagtttcttaaaagcttcagctgctctctcattccccatattcttatcaggatggactagcatcgcctattgaatcatccacaatgcttataaacccaacatacctttttgctgctcaggagtatccaataaacattcacttcaaatagaaaaataagcagcattacctttttcctatattctcgtttgagataagccatatcaacattcccatatcgagctaagcccaaagctgaatagtggtcaggacaattcagtaaccgagcaatttcatcttcagatgttaactcagagtctgttccgctagttgacgcgactcctgggccacggtctcccggaaagccagggccattttcaaaagatgaatcatttacgggctcagtgggtctatcagcagtgctctgctgatttattttattcttgaagaaatatatgagagcatcggttgagatgaaagcaagattaaaagccaatagaagacctagccatccaacataactcaatgcactatagactgaatacactgtgattataaacagtgcaacgcgctcgtgcttcatcatgaatgccagacctttatattaacgaacaatgcacactgtattagacaaaataatgcaagagattggtcgttgctacaagattgagacaggaaggacttttacctccaaagaagaggaagagcagtgttgtccaaaagctaccatagagccatagcaaaaccaaaccagaaatggcaagcgtaacagacccaactacgaagccaatgaacaatgccaccaaaacagttgcaacctgtatttatcgaatatttaacatatgcataaagagtaaacatataaagaaatcacatttgagattcttaccgaaatcagtataaatttggtcatgccgaacatcgaaaacgctgaaaagagaccacaccacatgatagagaaaaaagatgctgttcccatccgaatgaatgaatcaaaaccccggattgcacagtccaaccaaaccagagatagaagaagaattatgctgccaaagtgcataagccacctgaagacaaccgggaatacttgccgcattttcgttagaacaagatcacgacctttatatactcgtaatttgacagaatctatcaaaggcctgtgtctttccatacacttagtcatttcccttgatacagtagcagtggatatcctcagtttcctcagtactgcattatatgctaactcaatattctctgacgggctattcgtgctcaatatatccagcaagcttctcataacactgtcaatgtgttcacgaccaaacggaatatatctagtttcttctgttgtaaaaccaggttcattacgaggtctactacctccagctaaatcgctctccgaagcaacagactgatctatatccttgagagaagcagcgccttttgcctcatccatatctctttctaaagtttcacaaactggactacttttagtctgcttatcatcttgacaattctctttcagaacactctcagcctcattatttttcccttgtcccttattagacagcaaagaatcagaagcagtcttctttttttgcttcgtttggttatccattccattcttctgatgacttccttttcgtgccattatcaaattcaaacacaattcaacttctaccactcaagcttaaactttctctaacattccctgacactggagaagaagaactaatccaaataagtaactagaagtgatcatatcgaagatgcaacacagaaagttcaaatctttgagcaaaacgacgaaatcaaacaagcttttgtagtaattgagatcaaacccataagtaaagcttttgaatttcgtctgattgtggaaattaagcaaaaactaaccaagaatcgaattgagattataagagcaaaattggggaattgcccagaagagtacctgaaactctgattcgaaacgagtggcgtagagggaggaaaaggagattccattagagtaaagaaaagtcaatttaaaggtcgtagaagaagaagaagaagaaggcccacaagaagaagatgacgaaactagtgtgccctaaaggatcaatttttttcctgcttataatcgatgaaaccaatttgggatttatctgtggcttttggtgactgatttgattatgattaaagaggtgaaaggaaggaagaaaagaaaaaggttcgctttcaatttttgccgaatgatttggaaaagaaacgatcagaaaaacggtggtttcgaccggcggtgtcactgttttaagatgagctggtgaaattcagtttttgttcaaaatcacctatatttttagaacatacatttaatagaaattaaaaaaaaaacaaagacaaaaaaggttaaataagttaatattattcttaacaacaaaaattgattactggtatgaaagtagttacggcaagcctcttggtaattcatctgttatttgtagatgatagtttattcttttgcaaagctagcaaaaagcagtgtggagtaattttggaaattttaaagcattatgaaacggtttcaggacaacaaataaattttacaaagtcttcgatacagtttggtcataaggtcgatcattcacttcaggcagaaataaaagcaacataaagaatcaaaaatcttggtggtatgggctcctatcttggtttaccagaaagtctaggtggatctaaaacaaaaatcttctcttttgttagagatagattgcaaaataggataaatggatggtcagctaagtttttatcgaaaggaggaaaagaggtgatgattaaatcggtagctacggcattaccaacttatgttatgtcttgttatagactaccgaaaacaatcacatcgaagctcacgagtgcgatcgcaaaattctggtggagttcaaatggtgaatctagaggtatgcattgaatggcatgggataaggtgtgttatagtaaatcggaagagggtttgggttttcataatgttggcgattttaattcggctcttctaactaaacaaatatggcgtttaatcacggttccagattcactctttgcgagggtttttaaatgacgttattttctgaaatccaaccctttggataatataaaatcatactctccatcatatggttgtaggagtatttgctcagctagatctctggttaataaatgacttattaaaagagtcggttctggagaatccatctcagtttgggaggatccgtggattccaattcaattcccgagaccagcattaaaaaatggttacgcttttgatccttctttgaaggtgaaaaatcttatagactcacggacaaatttctggaatattgatctttcacaaaagctttttgatccggaagatgtctcgttaataagtgcactgcacttgggtgcgtcaacaagggcagattccccgggttggcatttcacaaaaaccggaatctatacagttaaatccggctaccatacagcacggatggaaatcttgggaattaactcctcttccattggcccagagatcaaagctctcaaagcccaagtgtggaaagtgcaatgcccgcctaagttgcaccattttttatggcaaatattagcaggctgcgtgccagtaacagagaatttgcggagacgaggaataaattgtgattcaggatgtgtcagatgtggcactatagaggaaacaataaaccatactctttttcagtgccatccggcaagacaaatatgggctctttctaagattcctacggtaccaagggttttttccacttcttccatttatgcaaatttggatcacttattctcaagaatccctttagaatttgattcattcgcatatctgtggataatttggtatatttggaaagcaatgaatgaaaaagtatttgaaaatatcgaaaaagatccgttagatgtgttatatctagcagaaatataggcacaatcgtggcagttagctcaagttgagttcaacaatgaaaaccatgtttctttgtgatcggaaaaacaaattcgggtgagggatatctcacaagataataggtagtctagccttcgttgttttatggacggttcatggaaagaaagcaaaaaaaattcaggtatagggtggttttgtacnnnnnnnnnnnnnnnnnnnnctatggagctgctaatattcgtagaagtctttctcctctccatgccgaagtcgacgctttattctggacaatgaagtgtatgattggtgccgacaaccaagaagtaggtttttcacagactgttcagacctgatgaagatggtgtctttcccaaccaaatggtcagcattttcatcgtatttggaggagtttcagagcgataaggaagagttcacttctttttctttatctttaatttttcgtattgcaaatgtaaaagtagataatttagcacgaaaaattcgtatcaaaccgtatcataccatatat

SEQ ID NO: 168819 - DNA, 534 bp, Arabidopsis thaliana landsberg
atgattcagttactgtttctagttctatttgtggaaggtgcgattgcattcttactgttgataaagattggtcctttgagagagcttgtgattaaaagtcttgaccagatgaagatgggtaaaggtcctgccactgtgaaaacaatcgctggaactatgtctgttattctcttttctaatcttatgagcattgtcaagatccagaataaaggtgcaaagcttgggacaatgtctcctatggatcaggttctttggagaacacacttgcttgaagcttctttattgggtcagtttctctctttttttctcttgacgtgataaaaattgaaccatagggctttgttatttgattgttgtcttaatttgtctttagctgttggcttctgaacaacagttgaaccataggactttgttgtttgattagtttttagttatggtttctgaacaagagttgaaatcttggctagactttgtgttgatcatggctctcaagtagggctaatacagcttttactgaattcttgtaggctttgt

SEQ ID NO: 168820 - DNA, 681 bp, Arabidopsis thaliana landsberg
tatgtgcattttggaacattaatatgtgattggtgcatctaggtgtttcacggggctgacaacgatgttatctggcttcaaagagacttccatatatatgttgttaatatgtttgatactgccaaggtatacatttctctatcctgctctaaatatttaagcttttggaatgagtcagcatagaagaatttgtgtgttctgctaactccgccgtttttagaaaatgttgttctttgttattctgttatatgcatatacccatgtatttttatagtaaggtgtgaataaagttggtgttgcagtattctaaaagggttccactaaattgcgataaatcaggcatgtgaagtgttgtcaaagcctcaacgatcactggcatacttacttgagacagtatgtggagtggctactaacaaattgctgcaggtcagtgctttaacattacactagtcttttagccatgtcttactcttttctatcgaagcttaagttggtgactttaactcttttgctttgatattttcaatgaagcgtgaagattggagacagcgtcctctgtccgaagagatggtgcgatatgctagaacagatgcacactatctgttttatattgcagatagtttgacaactgaactcaaacaattagccactggtaggcatctttgctatggagaaacattt

SEQ ID NO: 168821 - DNA, 798 bp, Arabidopsis thaliana landsberg
gtcgacagatttccagcgaattcaaacccgatccatcgagattctggatcaacccgattacccaagatccaatctttctaattgatgaatcaatcgatcccttctaccgtatcttcttctccgacgactgatacgatggacgcttcgccgcttcttggccggaacagacgtaaccgcccacggtcctctcagccgattcgtggcgcggcgtcgagacttctccgccgtgctagcaaccgccggatgatgctccgtgagccctccgttcgagtccgtgaggtggcggctgagcagcttgaggaacggcagagtcaatgggcttactctaaacccattatagttctcgatatactttggaatttcctatttgtgattgtttcaatcgcgattctagggtttagttctgatgaagatcctgatgttcctcttaggttgtggatcattgggtataatgttcagtgtttgtttcatgttggatgtgtcattgctgagtataaacgtcgccgtgttgctaattctcctcctcctagtggtgaagattcctccaatcacgagtctcttagcggaagtgaagatgaatctgatggctatagcattaacaacactgatgatgatgaccatggaactaggttcaatttctttcttatggctacagcattatactagcttagattcagagcaatgttggttcttgtgatagacttatactagcttagaattcagagccatgttaggttgaaggaaacttttaggattgtatagaaataaagaactgaatgagaactgtttcccattgat

SEQ ID NO: 168822 - DNA, 2187 bp, Arabidopsis thaliana landsberg; identical to SEQ ID NO: 34787

SEQ ID NO: 168823 - DNA, 294 bp, Arabidopsis thaliana landsberg
  unsure (1)..(294): unsure at all n locations
atgctgaaaaaggaaccattaaaggtgttgtttggttatgcgctgaaactgaaagaagctgcatggccgggccttaccctttattacgctctgttctatctcgccatgggcggcattaatgaattggtctggcgcactcagactgaaaatatttggtttgcctggaagatgggatccatgatcggtggnnnnnnnnnnnnnnnnnnnnnnnnnnnnnnnnnnnnnnnnnnnnnnnnnnnnnnnnnnnnnnnnnnnnataaagcacaatagtcacttcctccgtgttcggattga

SEQ ID NO: 168824 - DNA, 582 bp, Arabidopsis thaliana landsberg
  unsure (1)..(582): unsure at all n locations
tctgcttattataataaaggcaatgcccttgttcagcttgaccgctttgccgaagcaattgaggtttataaacagacctttgaatatgaaaagccaaacgcagatacctattgcgcaataggggagtgctatgaaaagctggagcgtatggatgaagcacgcagttattataagaaatcagtaaagatggatcccaaaatggccgacgcctggtttggcattggggtgacgctcaactttgaagaacgtttttttgaatcacttcatttttacaaaaaagcgattgaccttgatgatgagaaccccgacttttggtttgcnnnnnnnnnnnnnnnnnnnnnnnntggccagatagaacaatctgtggaggcttattataaggttcttgaatataatcnnnnnnnnnnnnnnnnnnnnnnnnnnttttcgaccgtattatatgaacagggcaaactggtagaggcatcagaaacaatagccgatggtattaaaaataatcccgatgcgacggaacataaattaccggatggtggcatacctgtttgcgatgggagaaaaaaatgaagcactggtgtatctgga

SEQ ID NO: 168825 - DNA, 141 bp, Arabidopsis thaliana landsberg
accagcatcactaagaccatttgcatttgctcaccgaccactcacccggggtcattcaggtgcaagcttcgccggactccttcgctgcagcgtaacaaaagcgttgagactaacattcttcaaagtctcatgacaaagcca

SEQ ID NO: 168826 - DNA, 292 bp, Arabidopsis thaliana landsberg
accaaacggaagaaaccgtaattctgatttgccttgggaactaaggatggtgtatgatctacataatgtgtgtctaatgtgttccaatgtttgtgttaaaacagaggagacactccgttctgtagtgaagagtgtagagaagttcagatagtgagagccgaagcaaaagagaagaatcagagtctgtggacatctgtgaaagctatgagaagcaatgaaaagcgaagctcttcttcttctgccaactagatctcgtgactatgctttccgcactggaactgttgctgctgcg

SEQ ID NO: 168827 - DNA, 1315 bp, Arabidopsis thaliana landsberg
ctggccttcaacgagtaatattggaccggactccgattgagcaaactaacgcgtctcacactcaaatgcattgaaataactagcttgaaggcttgaacatattgtttgcaattgcaagtgtagttttggttttagaatgttttgttggcacaacgttggagatttgaatacaatgaaaatgagattcaatttaaagcatatctgtctctctttttcttttggaagagattaaaggcttatttaaagcatatatgttacggattaaaaagattgtgtgtagctaatttttgtgttgtacccgttaccgcatatttttgttttaagcttggcacatacatatatatatatatatatgttgattacccatgcatatcaaagcggataagggatactgttaactttttggactatccttgttgcaaattttgcaatggtcaaagagaatttgcttagttgctatatcttcaaatgccaagcaacttccactcgtttgtgtatctccgatttaagactcaacacactcctatacaaaatataatatatgcttatatcattcaagtatattataatgaacccactaaaagataaagataaactacatgtaacttaataaacaaggaaaaatatattatttaagtaatcattctcctataaattcattaccctcaactcaccacctctcacaaactcaaaaaacaatttgtgccttctttttatattgtctccataaccaccagataatatcaatattcttcaaagcaatggaccaagaacaaacaccacatagcccaacccgccatagtcgctcacccccatcctccgcctccggttccacctcagcagaaccggttcggtcgcgatggtcacctaaaccggaacaaatactcatacttgagtcgatcttccacagtggtatggttaacctcccaaagaagagacggtaaggataagaaagatgctcgagaaatttggcgcggtgggagatgcaaatgtcttctattggttcaaaaccggcggtcaaggtcctgtcggagaagcgacagtacaggctgcagctgcagcagcggccgcaaccaccaacacttgtgaccagactatgatggtgagcaacagcttaccacatcatagtgggagtgatttggggtttggaggttgtagcacttcttctaattacttatttgggggtcatctcaagttccttccttttttcttggtctctcttcttctccttcttcttgttcaagctcctcttccacttcttcttcagctagctcttcttcttcttatggtggtggatgtgataatcaaagcaata

SEQ ID NO: 168828 - DNA, 437 bp, Arabidopsis thaliana landsberg
  unsure (1)..(437): unsure at all n locations
aagtaagaaataaattcaacacatgacatggagtgtatattatatatattcttacaaatttaaccacttaaggttttgagtntgtanaatggttcttctttgggggttgtattggagcagggaagagatcaggaggttaaaggctcagaatccaagcatggctcacaaggaagctttcagcttagctgccaaaaatgtacttaagcttaattagtcttaagatttaaaagaaaaccctaatatagttttcatctttttgttagcttaattgacagatcgagttagctaataacattttatgatttcaattttttgatttggggatggcgaagtgggcccattttcctccagctcacaacaagagagctgcttcagatcaatgtttttgtgaggaagataacaatgcgatactaccatgcaatgtttttgaggtaatc

SEQ ID NO: 168829 - DNA, 315 bp, Arabidopsis thaliana landsberg
ggggcgtgtgggtgggcattttctgtggccccgtaggatgcaagtagagagtttctgttgcgtatgtcgtacctggagatttataatgaagatattaacgatttgctggctcctgagcacagaaaactacagattcatgaaaatctagaggtacttattatatgtcttcttagaatcccctgtaaccaaattctctagcgattctgatgtgctttccaatcttaatgttatagaaaggaatatttgttgctggattacgagaagagattgtcgcttcccctcaacaagtccttgaaatgatggaatttggagaat

SEQ ID NO: 168830 - DNA, 349 bp, Arabidopsis thaliana landsberg
atgccaatcactagcagctctgaaacttttgcgagcttcttcaatgactggctctgccgtcacaggcaattcgtccaacaacttgcacaccttgctgatgaaacaaccattgtaactccaatagaagaagaatctcttgtgagtaactttctttctcactatctccaatactacgaagagaaatcagttgccatgtccgtggccggtgacgatatatatgatttcttctctccaccatggctcagctcatacgagaaactcatcctctggatcggaggttttaaaccaggtatggtttttaagctcataaccacttctgttaatgaccttacgagccaccaaatagacc

SEQ ID NO: 168831 - DNA, 835 bp, Arabidopsis thaliana landsberg
aaaaaatacgtttgggttaaaacaccaaaaacttgaggcaaatcatcttcttgatgtgattcgaaatatttacatgcctgatgttcctaaagaagaaaaagagtcaaatcatcttcttgatatgatgatccggcagatatgtatgcctagagaatcaaaacaagaattggatgtcatgctcaagaaagaaaaacaggaagtggatatttccatgctggaagaaggaataccaaaatcagattcgctcgaagaagaagatagtactactggtcgccatcatctgaaaatggttctttcagcaagaaaacttcagttgaaggggataaagttcaaaccgaggaaaaaagcagaaacactaatggacataaggcataaggggaaactcctccagataccaccattgatcttggatgactttctcattgctgtcttacttaactgtgttgcatttgaacagtattattcttattgtaccaagcagcacatgacgagctatgtagctttcatgggatgtcttctcaaaagcgaggctgatgcgatgtttctaagcgaagtagggattctagagaactatttcgggtcaggggatgaagtctcccgattctttgaagttgttggtaaagatgtcttatttgacattgatgaaagttacttagctcgtgttttcgaaggagttaataagtatacttcaagtggatggcatgtacaatgggcgggattcaagcatacccattttgatagtccttggacagctctttcatcttgcgctgctttgacgcttgtcattctcacgataattcaagccttttttgcagcgtatggctattttcatccg

SEQ ID NO: 168832 - DNA, 1217 bp, Arabidopsis thaliana landsberg
caaaaaatggatcatgacatcacgacgaaagtcagggcgatgtttgatcaccgtaggttaaaccgctctggatcatcactcttcacagcgtttgcttccacggttatagctctggtcgttttcaccatcgttctcgtctctaatttatcggtgagagaagatttctcagcgaaggtggtgacaatagagatcaagacaattgttccttacttacctctaagctcagagaaggaggtaagtgatcaagtcaacaataactattcgatcaagcaacaaatcacagtcaaagaagagattaacaaactgcaagttcttgaagtttttggaggcaaagacgtgtcggagaagtttcaacagagagcaacagagtttttgagagatgattgtgaggtcaagttcatgatgacatggatctcacctgcggaattgttcggtaagagagagatattatctgtagaaagcgtattcaaatctcatgctagaggttgtttgatgattttatcatccacaatggattctcttcaagggtttagaatcctgaaaccgtttcttgatcgaggttacagagttatggcggtcacgccggatttgccttttcttctcaaggacacagccggagaatcttggcttgaagagattcagaccggtaaaagagatccaggaaagatctctctagctcagaatctatcaaacctcatgagacttgcttatttgttcaaattcggaggtgtttatctagacacagacatgattgttttaaagagctttaaaactctaaggaacgtgatcggtgcgcagactctggagccggtttcgagaaactggacaagattgaacaatgcggtattgatcttcgacaagaatcatccattcttgctcaaatccattgaagaatttgcgttgacttttaatggaaacgtttggggacataacggaccgtatcttgtttcacgagtggctcgagccgtggaaggaaccgatggctataacttcaccatcttgacacctcctgcgttttatccagtgaattgggttgagattgagaagctattcaaggttccaagaacagagaaagattcaaagagagttcaagtcaaggttcttgaaatgcagaagagaagctatggattgcatttgtggaataagtttaacagaaaattccaaattgaacaaggaagtgccatggataaattggttgcaaatcagatgtataattt

SEQ ID NO: 168833 - DNA, 136 bp, Arabidopsis thaliana landsberg
ccagggatcaatttcatactagggaaccctacgagagcccccaactgggactaccgtgcatgtacgatcaaaactagatctgaccaactgaccatcctacctcctctacgttcttgacagcccatctttgtctcag

SEQ ID NO: 168834 - DNA, 478 bp, Arabidopsis thaliana landsberg
gaaatttgcaaaaataaatgagggtgtgaacaagtatggggaagctttatgcctgcaaccaaacaccaaacaagtggccaaaatgatgatgatttggtgaacttggctcatcagattttctacgaggactatggcgccaatttcacccttgaacatgcttggagtgcggttcgctatgagcagaactggttaagtgagtttcctacaacaggaacagcaaagagaagaaagtgcaaagaacaacaaagagaagaaagtgtctctgttccagctggcattgaagagaaccaaagccaaagcaaaattcgttcccctggagttaaggcagctaataccaaattccaagccaagccgagtagtgcgtctggtgacaatctgaaagagttacaacttatttgggatattaaggagaaagatttggctgcgagagagaagctaattaacaaagaagagaagagaagagaatattagtctgact

SEQ ID NO: 168835 - DNA, 1018 bp, Arabidopsis thaliana landsberg
cttacggtcggagaaaaggggcgtccaccaggggatcccccgaataagttggagtcgtgggctacgaaagtgaagggtagtgctggggaaggtatcttgaacccagaagacgtgattgatgatgagtttgtgagggagcggctgaggctggagtttctagatggtcagcacgaggagccagttattaccattggtgaggaggtgttggaagccatgaatgggctttggaagaagtgtatgatagtgaaggtgcttgggagccagattccgatctcggtgttgaatcgcaagctaagggagctttggaaaccgtcgggagtgatgacagtgatggatttgccccgccagtttttcatgattaggtttgaactggaagaggagtatatggctgctttaaccggaggcccatggagagtttttgggaactatctgttggtccaagactggtcgtcaaggtttgatccgttgagggatgatattgtgactaccccggtgtgggttagattatcgaatatcccgtataactactatcatcggtgtttactcatggagattgctcgtgggttgggtagatgtatccagttctgatattgatttgatcacacttgttacaacgtttgccccgtctggatatatcccctaagtcgtaggttaaaggccctgtcacaagaaactgaacagttctatggggatagatacttcgtagcatatgaaggactgtttaaaatctgttcttcgtgtggtatttacggtcatttggttcattcttgtccaagaaatgtggtggtgaaagtttcggctggggcagagacggttacggatagagctgtgatgcctgttgggatggagggagatgacgggttcacagtggttcaacgctccgctagacggccggcggcaccggtgcagaagatggtgtttgcggtgggtgcgtctggtggtaggtcaaaacagaggttaagggaactccctaaaaatcagggggtggatctcgcaaatcgatttggtggattggatg

SEQ ID NO: 168836 - DNA, 648 bp, Arabidopsis thaliana landsberg
aaccaataagcctcattgctctgtttttgatttcaggatactaagagtaagagacatgtagcaacaccgagcatgacaatggctccgtaccaacgttatccaagaccggtacgacagccattaatcccacctcaacatgaatcggaaaaagaagaaggatttctcggttcgcttggaaagctagtcgtgaaaaccggttcttcggtttccgagatgatgtccggttctagaaatgtaattcccccaaactttcatcagtaccaccatcagcaagaaccgaaccaatggccggtacaagagagtttcgctataccggaagaagatggaccaccagctttagaaccgagatcaggtacaaatccagataaaccctaccttagagcacaaggaaccaaccaaaaccggtcttattaccaagactatgatcaataccaaaaccagcagaaacgcaatgtgaacgatacagcgtcgttcgaagataaccgagagaagaacgagattgtttttggggcagttcaggagcaggacggtcgccgagaagccatggtgatcaaggccgttgatttcaacgaagccattaacgatcagcgcaatctacggcccagaattaattatatgggatattcttcacaagtttactgattaaag

SEQ ID NO: 168837 - DNA, 800 bp, Arabidopsis thaliana landsberg; identical to SEQ ID NO: 49652

SEQ ID NO: 168838 - DNA, 714 bp, Arabidopsis thaliana landsberg
atgagctctgtcacacagctattcaagaacaaccccgtgaaccgtgaccggatcatcccactagatttcaccaacaccaaaaccctacccgactcccacgtctggtccaaacccgaacccgaaaccacgagcggacccattcccgtcatcagcttgtccaacccggaggaacatgggctactacgacaagcctgtgaggaatggggtgtgtttcatatcacagaccatgaagtctcacactcgttactccataacgttgattgccaaatgaagaggcttttctctttacccatgcatcgtaagatcttagccgatctatctcccgacgagtccactggttacggtgtggttcggatctccatgttctatgataagctcatgtggtctgaaggattctccggcatgggttcctctcttcgacgtcacgctacactcttatggcccgatgatcatgccgagttctggtaatatccaaattaatatcgtctccaaatataaacaatgattttatcattattgcccctagaaaaatgctcattaccaaatttatttggaagaaactaaaccttaagaccatgaatggtctatatttaatttacacagcatcttgcccaaatctaaacaccttgtaatattgaaacaaatgaataagaatatgatacctaatatcataacttatccagaaaataaaaaattcccttgatcgtttttttg

SEQ ID NO: 168839 - DNA, 518 bp, Arabidopsis thaliana landsberg
tgttcatagactcccctctattgagaatccacagctttggtatatacaagcaaaacccggaggtggagctggagccagttcaagatccaaatcttgttctagacccagtcatgacatgttctcagattggagttgggaaagacagcgttagtggaagttataaactagtatggatgtataatacttctcctgctactcctcctacgtgcgaggttttggatttagatggaaaaaaatggaggttcgtgaatactacttctcttgatcatcatcagatcttgtgcgatcagaggccggtgtttgcaaacggatcactctactggctcacgggagatgaggaaggatatgcaacaacacaaaccaaactcatagttttagatttacacacagagatgtttcaagtcatccaaacaccgccttttattacccgtgatgcctctggtgacaagattggtttatgcaatcttgatggtcgtctctgtatttcagagttgaagaaagattgcaagcaagagttt

SEQ ID NO: 168840 - DNA, 621 bp, Arabidopsis thaliana landsberg
attgctgaaggtgttgtgtcctcatctaactccaaaagaaggttaacaatatacctctaggaccaagtgctgttagtattcaagttgtgaaggtgttcaatggtaatgctcatttgtggaggccaactactgatatttgtttaatgggtgatgcaattaacgagaaaatcgcatggccagtcctaaagattgacgtcacggctgccaccactacagatgcaacactacctaaagtccaggtttgttattgtaaccttgttaattcatttgtttgtctgctggttgatgttagaactttcattgatgttggaacttgcttttattattggctttgagttgtagagtccaggcagcaacagttccacaaaaagtccaaagtagaagtgttttcttttagattgcagcaattctggacataaggtagctgaaggaagagtactttcaacagacccgaacgatgcttgccataatgtacccctaggtcctaatgcaagcaaggtctgggttgaagtggctaagattggtaatgcaatggtctggaggcaaaattcagagatcgaatacatttctgatgcaataggttcagttgtagcatggccaaatgatgaaataaagttcgtg

SEQ ID NO: 168841 - DNA, 342 bp, Arabidopsis thaliana landsberg
ggtgtgcaaaaagggaaattgctttatcacagcgcgctcgcggacagcgccgatttgtcgggctgggtgatggaagggccgggtactttgcggttccgggcaggttggatggaaatgtacgcgccccgcgataaatgggattatgtcttttggtgcccggtggttttcccggctgatttcctggcgagctgggaggtaaagaatctgaagtctgaaggattggccatcgtcttttttgcagctacgggagaaggggagaaaagtatttttgatccttccatgcccaaacgggacggtacttttcgctattataacaaaggccttattgattgctatcatatt

SEQ ID NO: 168842 - DNA, 339 bp, Arabidopsis thaliana landsberg
gagatggcaaaggagcttagggaccacacggacgcattcattgtgatcatgttcgttggcaacaaagctgatgttcgtcaccttcgagccatctcaaccgaagaagctaaagcttttgcagagagggagaatacctttttcatggagacttctgcacttgaagctgtgaatgttgataatgctttcactgaagttctcactcagatttacagagttgttagcaagaaggctcttgaagctggagatgatccaaccactgctttgcctaaaggacagatgattaatgttggaggccgagatgatatctcagccgttaaaaaacctggttgctgctctgca

SEQ ID NO: 168843 - DNA, 1882 bp, Arabidopsis thaliana landsberg
  unsure (1)..(1882): unsure at all n locations
gcgatgatgacgtgtttacatcaatatgaaagtctgtctgggcaattgattaataaacagaaatctgctatcacttttggctctaaatcagataaggatgtatgggaatggatanagttgaacacatgaattgaattggaaggaggtacagggaagtatttgggtcttccagagtgtttgagtggttccaagcaacttcttttaggttttattaaggaacgattacaagcaaagttgacaggttggtatgcaaaagtcttgtctcaaggaggcaaagatatcctgttaaaatctgttgctatggctttacctatatacgctatgtcatgttttaagcttcctaagagtaccattaagaaattgatttctgtgatgatggagactgcatcatgatccataatgtcttttttccaggttttttaaaagccgctactttgtcaattcaccatttctgtcagcctcaatgggttcacgtccttcttacgcttggaggagtttgcagtttggaaagattttgttgactaaaggtcttaaacgaatcattggtaatggggaagatactctgttatggatcgacaactagttgtatgatggtaaagctagaagacccgtaagttatcacccccttacaaatattaatcttaaagttgctgatcttttcaatcaacagtctggtgtgtgggatgatactttgctaaggtccttgtttcaccattctgaaataaatcgcatcaaagcaataaaacccaggattggatattcagattctttttgttggggggaaactagaaatggcatctaatctgctaagtcgggttatgacttaatgtttagatttgtccataaagacagattacgaatagaagaatcatgtccctctagaaatccagttcttcatgtttgttggaaggtagaaactgctcctaaaattagagtttttctttggaaagctctcaaaggtgctcttgcggttcatgatagattgcgatcaagaggactcaaagtgacggatggttgtttgttttgtgatgaagagattgaaaccatcaatcacattctctttctttgtccttttgcaagacaagtttgggcattatccaacatcccttctccaattttgggttatggtaactcagaatttcagaatttgcattatcttctcagtttgaaatcttgtgaggctacttgttttgaatctaattcagcttttccgtggaccttatggcatatatggaagaacagaaattcattgcttttcaatggatttcatttgccttctcatctattaatccagaaagcttgggatgatactaaggattggtatttagcacattcactggacttaaaacaagaaaaatcgtcttcccttgtcgaatcaatatggcagccaccttggaaaaatgagttgaaatgcaacattggcttttcttggtgtaaaaagttatctctttctggtgcttcatgggtggtaaggggactcttatggcaatgtcctttttcatagttgaagatcttattctctggttcgctctatgtttgaagctaagattttgagctgggaatgggctttaaaaagtatgaatagtttacatatggagaaagtgacttttgctgcatccactatgaacatcaccaacgctattcacaagcctactgaatggccattgattttaagtcacattgctcctctccttgtcttaggcacgtggccaaacaggatcggtttgttctgtttgagcctacacaaaatgcaatactggagctttttttattgcaaaaagtgtgacattagatcccacgttgagttcttatgttgcctcgccacgctcctagatggttagcaggctttttcgaacacgaaaagagtttgcttttaaatcct

SEQ ID NO: 168844 - DNA, 779 bp, Arabidopsis thaliana landsberg
tatgtaatctctcgttggaaaaacagaacaaagttaagatcgtacggtcaggatttgttcctctgttgatcgatgttttgaaatcgggaacgacggaggcgcaggaacatgttgccggagctttgtttagtttggcgttggaagatgagaacaaaatggtgatcggagttcttggtgcggtggagccgcttcttcacgcgcttcggtcgtcggagagtgaaagagcgcggcaagatgcagctcttgcgctttaccatttgtccctgattccgagcaatagaactaggctggttagagctggtgcggtgccgactctgctttcgatggtaagatcgggtgattcgactagccggattttgctggtactatgtaacctggccgcttgtccagacggaaaaggtgcgatgttagatggaaacgcggtggcgattttggtagggaagcttagagaagtcggaggtggtgattcagaggcggcgcgtgagaattgtgtggcggttctgttgacgttgtgtcaagggaatttgaggtttagggggttggcgagtgaggcgggagcggaggaagtgttgatggaagtggaagagaatgggaatgaacgggtgaaggagaaggcgtcgaagattctgctggcgatgagaggaggatgcggaggagagagtgagtttggggaaaatgcggaggcgcgtgagtggaaccgtatgcttgaagcgactgggctaagtcggactcagtttcaaggagggcaaaatgggggttttgcttattcctcccagttc

SEQ ID NO: 168845 - DNA, 390 bp, Arabidopsis thaliana landsberg
caacgcccaaacctcgaaacgaatgctgacatcattcacatcaagatgttgaggaacaacacttttgtcacggttacagattccaaaggaaacgtcaaatgcaaagctacatccggtagtttacccgatctgaaaggtggaaggaagatgacgaattacaccgctgatgcaactgctgaaaacattgggagaagagctaaggctatggggctgaaatctgtggttgttaaggtgaacggatttacgcatttcgggaagaagaagaaagctattatcgcgtttagagacggtttcaccaactcgaggtctgatcagaatccgatagtctacatcgaggacactactaggaaagctcataatggttgcagattaccaaggaaacgtcgggtg

SEQ ID NO: 168846 - DNA, 276 bp, Arabidopsis thaliana landsberg
tttcacattgatccgttccttgaagccatcagaatccaaaaccaactaggaggactacctgaggggactgtaataatgaagatacaggcaagcagacaaaactgcttgtcagaagagagcaagattgtatggcacaaaggaaagattgtccagaacatgttccttaagcttcagaatgttgaacgaggggagatagagctgcagcttgagtggatcgatgtctccggcgccttgactgatgatgcggaggatgttgctttctagatcgactctata

SEQ ID NO: 168847 - DNA, 618 bp, Arabidopsis thaliana landsberg
tctgtcaaagagaagcaaaggaactccgataggataagcaatttacctgattccttgttatgtcagattctctcagatctctccacaaaagaatcggtttgcacaagcgttttatcaaaacgatggagaaatctctggttacatgttcctgtattggatttggattccaataacttcccagatgatgatgtttttgtgagtttcgtaaataggtttctgggttctgaaaatgagcaacacttggagagattcaagttgatctatgaggttaatgagcacgatgcttctcgtttcaagtcttggatcaatgctgtgattaagcgtagagtttgtcattttaatgttcataatgaggtggatgatgatgacgagttagttgagaggcctttatctctctattcatgtgagagattggtgaccttacagctctgccgcgtagccttggatcatccggaatctgtttcgctgccttgtgtcatgattatgcatcttgatatggtcaagtgacgaggctgatgcgactctggagattctaatatcaggaagtccagttttggaagagttaaccatagttcgtgatccccatgattctcttggagctgtgtgggtgcgatccca

SEQ ID NO: 168848 - DNA, 631 bp, Arabidopsis thaliana landsberg
ggaatagaaaaaacaaatggagcatgaacattatgggtatatgcaacttagacatgttctttacatatatataaatatatatgttggtgtacttggttatgcacatgatgcaaaggttctcgcattggccatgcaaggcgatcccaatttttcacatccacctataagtaaatattatcttgttgattcaggatatggtttacatcgtggatatctcatatcatataggcaatctcagtatcatcccagccattttcaaaatcaagcaccacccaacaattataaagaaaaatttaatcgacttcattcttcacttcgattagtcactgaaagaacatttagagtgtggaaaggaaaatggaagataatgcacgatcgagcaaggtatgatgtccgaacaacaaaaaaacttgtagtagaaattctggcactacataactttgtaagaaaatcaaatatactagatcccgattttgaagcaaattgggagcaagatgataatcatcaaccatcattgaaagaagaggtcgaagtacaagccgatggtcaaatatttgattcttggcaatatatggaaggaattcgagatgatattgcaatgaatttatggaataatcataggtaaaattag

SEQ ID NO: 168849 - DNA, 1323 bp, Arabidopsis thaliana landsberg
cagaagcaatattctatccttatggggaaaagcacttcggatgctgatctttagaacttgtcacaaggaccaaacgattcgctccgaacttacatcaccaaggttcaaagccatgctcactaagctcccaaaggtgtcacatcaattgactttatctgccctaagaaaaagatttgtgtaggaatcaagattcaaggaagaattgatagtccataaaccgcccacaatcctagatgcactattttgagctaacaagtggatggaagtggaggatgagaaggaaagctttgataaaagaactaagcaagttaagctagtggttacttttcctccaaagaagtttgaaccaagagataatcgaggatcaaagaggttcggagtcaacccatccaacaacaatgtcggaagaccattccaaggaaagagaaaacccacaacgtggacttgagatgaaatttcatattgcgacatccatagagtgaacaggcacatgacgaaggattgcagcgtattaaaaatacatttggcggagttaggaagaatggtgatctcgcaaaatttgatattgaaagttttgtaaagaagtatcatgaagcaagagtcaccgccgaaaatcaaactccaataactaaaaggtcaaggtcagcaaatgatgaagagccaaggagttcaaaaggaaagataaatataatcattggaggatcgtagctttgtcgggattctgtcagtgctatcaagaagcataggcgtaattttcttataaaagcaaattttagccaggaaatcgacatcctgggagcttcaatttcattcgatgaagaagaaacacgccatctcgagaggcaaacgacgatgcattagtcttgacactcgatgtcgccaattttaaagtctcaagaatcctcatcgatacaagaagttcggtggacctaatattcttaagcactttagaaagaatgagaataagctgagctgacataattggaccgccatcttcgcttgtcgcttttacaagtgacaccgccatgtctcttgggacgatcaaactccctattcttgggaaaagtgtcaaagatcgtggaacttaccgttttggataggccagcggcttataacattatcctctggactctgttgatctaccaaatgaatgcagtaccatcaacctatcatcaatgcgtcaaatttccaaccccaagtggtgtagaaacgattaggggagatcaagaggcttcccgaacttgttatctcacttatatggtgttaaatatcaaaataaaagaaagttaaacattggttccttatattgaatttgaaatagtt

SEQ ID NO: 168850 - DNA, 268 bp, Arabidopsis thaliana landsberg
taacaaagagaatgatatgcataagtgtacaatttgcgatcaaatgtttgggaccggtcaagctctaggcggtcacatgagaaagcataggacgagcatgatagccgagcaatcggttgtcccttctgtggtttattccagaccggtttttaatcgttgcagtagcagcaaggagatcttggacttaaatctaactccattggaaaatgatcttgtgttaatctttgggaagaatttggttccacaaattgatttgaagtttgtgaat

SEQ ID NO: 168851 - DNA, 1754 bp, Arabidopsis thaliana landsberg
ttcagagtggagctacatagaaagctgatttgaatctctatagtctgctactacaggtcaggtagacacaggatcagaagagaatcagagaactcgacatgtagcaagagatcgaccaagaagacaagttatactaccatcaagactaaaggattatgagatggatgaggaagtgttagatgagatagcaggctatgcttacctcataacataagatggaggaaatcctgagcctgctagctttcaagaagcacttcaagattctgatagtggtaaatggttagaagttgctgatgaggaaatacaatcacttttcaagaacaagacatgggtatagtagaaagaaacaagtcacagaaaccaatcgaatgtaagtgggtattcaagaggaaagcaaacattgcaggagtagaaaagccgaggtttaaagctagactagtagcaaaaggctactcatagaaagagggaatagattttcaagaaattttttcacctgtggtaaaatatgtctccatacgtctactgttgtctattgttgtacacttggatatggagcttcaacaaatggattttaagacggcattcttacatgggtacttagatgaaatgattatcatggatcagccagagggatatgttcatgagaaatatccagagagggtgtgtttgctgaagagatatttgaatgggttgatacagcctccgagagtggaataacaggtttaatgaattcatgcacaagattgtttatgagagaagcaagtatgatagttgtgtgtactttaagggtttacagaatggagagtatatatatctacttctgtacgtagatgatatactgatagcttctaaggataagaagcatgtatgtgagttaaaggtcttattaaactcggagtttgaaatgaaggacttaggcgatgcaaagaagatactgggaatggagatcataagagacaaagaagctggtacactcactatatcacaagagggttatctgctaaaggtttgaagagattttggaatggatcaagctaagtcagttaacactcctatgggaattcatttcaagttaagatctgctacagatgaagaagtacaaaagcagtcagaagttatgagaacgatcccctatcaaagtacagttgggagtctcattattctatgataggcacaagaccagatctagctcattctgttgggttggtatgcatgtttatgagcaaacctctaaaagatactcatgtgtattgtgggtactatggatcgaaagctttgctataagaatgagggggggcttgctctagaaggttattgtgattcatattatgcagcagacaaagagaaaagaaggtctacttcaggagtagtattcacgtttggtgggaacacaataagctggagatctagtctgtagaaggtagtagcttgatcgagtactaaagctgaatacatggcattgactgatgcgactaaggaagcagtgtggttaaaaggtctcgtgaatgagttaggcttcacacagagatcagtaaacattcattgtgactcacaaagtgcgattactttagcaaagaatgcaatttaccacgagagaaccaaacacattgatgttaagtatcatttcatcagagagttggtgagtaatggtgaaatacaagtactgaagattgttactcaaagtgtctcacaactaaggtggagcttgtgttccggataacagctgagtgggtttactcagggagaagaagctg

SEQ ID NO: 168852 - DNA, 160 bp, Arabidopsis thaliana landsberg
ctctatcgcgctattcagtgttcctgtatctcagatgtaaaatggatggatctctcatatattcggtagcttctccaaggcggaggcagttgcagataatctgattcaggctaagaaagtggtcgagatccactctccttgtcaatcatcagtgcctaag

SEQ ID NO: 168853 - DNA, 439 bp, Arabidopsis thaliana landsberg
ctcttatatcttctcctggaaacaacgaccaaaaccgcaacaatcaagtgttcaaaactgagcaatctccaccatcaaactcaatagaacagataattaataatcatccacaatgctaatggcagggatcaacaacaacaatcctttgaagaagctgagagtaatggtgttgcctaagtgctggaccaggaagattccggtggaggtgaacgcgggtgataacgttggagagctgaggaaagagctggctaagattcaacagaggtttcagttaaatctgcctcaagatggctatttctttatatacaaacagaatgtaatggatgatgaccggtctttccggtggcaccgtgttgatcacggtgatacaattgagattttcaatggaagtgtttccggtggttcttaataccctataatttagaagctcaagtctttg

SEQ ID NO: 168854 - DNA, 478 bp, Arabidopsis thaliana landsberg
ttgaacatggatggagcctcgagagagaatcccgggttagcagcagcgggaggtgcggtgcgtgatgggaacgagaactgggttggggtttttgctttgaatatcggaatctgttcagcgccactagtagagttgtggggactctactatgggttacacatagtctgggagccaggaataacacgccttgagctggaagtggatttcaagatcgtggttgagttcttacagacagggataccggattctcatcctctatctttcctagtacgtttgtgttattggtttcatatcaagggactagttagtccgtatttctcacgtgtatagggaggtcaatcgtcttgcggacgggttagctaactatgcgttttctttacctcatggtttgtatgtttttaattcagttccggattctattgcttcttttgttttggaggatgtaaatgggcatgcgttttcaagaactatccgaatg

SEQ ID NO: 168855 - DNA, 1275 bp, Arabidopsis thaliana landsberg
tccagggctaaaactagggtttcacagttcatgatgaagaagagacagatggtaatcaagcagagatcaagaaactccaacacatcttcctcttggactactacttcgtcttcttcttcttcctccgagatcagtaacgtccgttacgtggagtgtcagaagaatcacgctgctaacatcggaggctacgccgtcgacggttgccgtgagttcatggccgccggagttgaaggaaccgttgatgctttgagatgcgcggcttgtggttgtcaccggaattttcaccggaaggaagttgatactgaggttgtttgtgagtattctccacctaacgcttgatttttagaggattttacttttttcttcttttggtttggatttatcgattgatttttaaagatgaatttgttagaggatatttgtatatgaatattgatgtgtatatcaaaaacagcataccgcccatctatatctataggtatatataaaattgcttgttggtttgacatatagtatagttctgtttatgatgtaaacaatattttacttttaagtttagctttttggttcaatgagccagcttcatgaaatagcatacgtgaccctatgccgatttaatttataaaatcttaagatcgagtgtagatttttattttttttgttaatttggagaatgaaagtggaatttttttgtttcataagtcgaatttaggatcacatttacaggaaagaagcatcagtcgagtttaggatcacgtcacactatatgtattttttatatatcgactatttctcgatcttatttatgaaatactttgtataggaggtctctttgttaaaagtatacaactaagtattatatcagtctaaaacacgaatacaagttcccatacatgtgccctctctcttcttttttctttgaatattgaacctctgaagtcgaagcttaaatttgtatatagttatatagtacttttccaaacgttagtaaacctcaacaatcgttttacatttatgttttttcaacccaaaaaaaatatattgtattttcaacatagattctagaatcatattatatctgcaatcacgaccagttgtgaatatgaggatgttgatagtacgtcgccggataaatcagataattatcttgcagatagttgaatctaattccatttttttttggcttcttgaatctaattccatttatgatataatcatatatgttacgtgtatatatatgaaagcaagatatgtttttgtataaactatatatgt

SEQ ID NO: 168856 - DNA, 296 bp, Arabidopsis thaliana landsberg
gccgtcatcatgggtcaattttccctgcatcccgccgtcgacaacagtatcgcccccggcaagcccgccttctcgggtggtacgctgaaatgccattgcgccgagaaccccgtggtggtgcgggtgtcatcgcaaagcctgcacaaccatctgtgcggctgctcgcgctgctggaaacccgccggtgccttgttctcgcaggtggcggtggtgccgcgcgacaaggtcgaggtcctggaaaacggcgacaagctcgcgcccgtcgatgccagggcaaccataaagcgctacgcatg

SEQ ID NO: 168857 - DNA, 492 bp, Arabidopsis thaliana landsberg
gtccgcaaggatggcccggtcaagactttcaaggaccttgccggcaagaatgtcgcgctgacgtcggcgtcaacctccatcggcttgctgaacgcatacgagaaaaagcatgatttcaagacggtcagggtgctgagcgccgaccatgccggatcgttcctggcgctgacgaccggacgcgccgatgcgttcgtcatggacgatattttgttggccagcatggtggccaatagcgcggatccggggaaatggcgtttgctggatgatgccttgcgcgtcgagccttacggcctgatccttcgcaaggatgacatccagttcaagaccctggtcgaccagacgctggtcggcctgatgcggtcgggcgagttccaggctttgtacgacacctggttcacgcagccgattccgcccaagggcctgaatttgaacttccccatgacgcagcccctgaaggacgcgatcgcgcatcccaacgacaagggagtctga

SEQ ID NO: 168858 - DNA, 564 bp, Arabidopsis thaliana landsberg; identical to SEQ ID NO: 19428

SEQ ID NO: 168859 - DNA, 267 bp, Arabidopsis thaliana landsberg
gttttctataatgacttgtttgtatttcaaaattgtttagcatgataaggtgacaagagagctcccaaatatggttacttttatgaaagcaactcataagagaaagtctaatggtgtatttgtgtgcaaaaaagctgagttgatcgcaaaaaaatgtcggaacatggagcaccaaattctcagtcaaagagataatgacgatgatgacactttggagactaaccatcttacaccaaaagaatttgatgccatttacccaggggtaaa

SEQ ID NO: 168860 - DNA, 469 bp, Arabidopsis thaliana landsberg
tcaaacatggttgtccacttgatctctctcctcacacaaaccctagccctaatcattctgtctcttccctctatcatcaacacttctcaacttgattacgacactcttgttttcaaacaatgcgatcaattggacgcaaacatcctccaaaaagcaacaacaaaatctccaaattactggaatcagaatctctttcttcgtgcacaagcccttttttttttcttacgcaaactcgaatcagaatcctctcgatctaaattcttgaagactctagttggtaacgaaaaacacgctgtctctggatggttccaatgcagagaagattatccgagtgagatctgccataaatgtgttggtgatcttcgtgaaatttcgtctagattgtgtggaaatgctacgtcagctcgtattcatcttcgaggatgtcatttgatatacaaattcgaacgtattgatacccctggtgctc

SEQ ID NO: 168861 - DNA, 769 bp, Arabidopsis thaliana landsberg
tagttttcaagtttcttgccaagctgccaaaatagatttcatatccactcatgaggtgaaattgatgttacagaatcagagcactgctttgatgagcagaatcctaccttgggttatacattcccttatgaactccttgtggaagatggtggatttctggtaaacgaagatctcatgattattgttgaagttattggtgcatcagatgtatttgaggattcctctacccagggaaaggtagatgtcaatggctttcaagttcttccttcacaggtaagaaacttaagaatggcgcaaacttcttgttattactttacaagatttctcttcgaatctttatacttgctttgtttttcgctcgcaggtggaatatgtgagatcaatatttgaaagacaccctgacattgcagtagagttccgagcaaagaaccaacatctgaggacatcatgcatgatttttctgcttagtttaattgagacactgtgccagtcacttgaagagctctcaaatgaagatcttgtggaagcagacattgcattgacatatgtgaaagatgcaggatttaaggtggattggttggagaagaagctggaccaagtaaaagaaaagaaggagaaagaactgtctgatatggttcagctacaagaaatggaggaccatttactgaaactgaagcaaagctgttcagatcttgatgatctagtggtgaagaagaaggacgagttgtcggttaccagatctccgctgtcattcgatgatgttgtttga

SEQ ID NO: 168862 - DNA, 2145 bp, Arabidopsis thaliana landsberg
aaaatctgtattcttgcaaatcatctttcttatttaaagagaaaatagaaaattagaaattgctccctcttgttaaaaaaaaaaaaaaaagaaaaagaaactgcatcttctagtggacaaaaaaaaacttgttcttctcgtaaaacccaacaagagaataatcaaataagtaaagtaagcaagtagcagagcaactagaaagttttataaattttagttgaaagttgactttgagatcttcgttcttacaaaacagaaccaaacttcgacaatgtcactcatgttttcttcccctgtcgtcaccccagcactcggatctttcaccttctcatctcgaccacgctccaattacatcgtgatgtccgccgtccgatctaactctgcttcgacgtgtcctatactgaccaagtttcagaaagactgcgaaatcttcttctggaatcacggtagtatagatttttatttttactcgaatatctcaaaattaaaatgtaaatatttttaacatgatttagttatttaattatttttttaatttgttaaaccaatcatttgatgaaaacgtagatatagtttctacagagtttttaaaggagaaacgtatctacactctcttctcatttttttatttttctagtctagtggggagtctcttatgtgagagacccccaatggagctgctcttaggtttgtcaatgttctaatgcttaaaactgttttcattcagaatcagatcataaacactgagtggggaggattctctaaggttcttccgcagaccatttttgaccaagagatggatgcggaaagcccgaatcgtggtgaacatgtaatagaatttatcctttctttagatgcatttatgtttggctttaattttttttttttatttttttaggtaccgtctattgccacaagactcactatactttactgttttgtgtgtgtatgaagttatatgagaagatggtctcagggatgcaccttggtgaaattgtcaggagggttttgctccaaatgtgtgaaactagtgacttgttcggtcaattcgttcctggcggcaatctctccaaaccctttgtactcaagtacttctctctcacattctttatccgattccatttgcactcaagtacttctctctcacattctttatccgattccatttgcactcaagtacttgttcggtcaatgtgcagtttggtttatggttttgtttcggctcaatatttttggttttggttatatttgtagaaaatagaaagtgaaaccaaatgataaccacttgtacacgtgtacttcagtttcttcaatttgttgcaatttcgtttattaaacgaaaacaattggatttttttcaactttagtgtattttgatttctttggctcagtttgatttatcggttttggttacgtttcgatgttggttcagtacgattttaaaccaggaaaatcaatttggtcacaaacacattttgatacaaacattttggttcagctttggtttatatgcttatatccctaagattaaatatcctaaaatcaatactatctcaaagtggccgtgtgttttgcttttaaggacctttgaaacttgaaattaaaaaaattcctaactgataattttaattatatttgtgtaaattttgtataggaccgagcatctaaacaaaatgcaagaggacactacagatgatcttcagactgttggattagtcctatacaacattttggaggtaagttgttatatacaaataatgacatttagagagtggataaactgtataaaactaatcaagatattggaaacaggtagaggcaaatctgcaggaaaggaggagagtggtggaagtgtgtgacacagtagtgaaacgcggagggcgtctagcaggagctggtatagttgcaattgtggagaagattgaagaagagaccaaaagaatggattcaggtaaaagaaccgttgtggctatggacggttcactctacgagaactacccacagtatcaacagtatatggaagaagcactagtcgagcttcttggctataatcgaagttacattgcgatcgaacatgcgaaagacgtatctgggcttggtgctgctcttttggctgctactaactctatttatagtacttgaacg

SEQ ID NO: 168863 - DNA, 1126 bp, Arabidopsis thaliana landsberg
atgcctaccaacgccgggacaagtttgtcttcttacaagcatattgtagccatcggaacgacggtgaaatccgagagccttgaatctgccgcatatgagattccgcggaagagaaagatgagatcggattcagcggcggtgtctggtaattcagtctctacgccgaagaaattgaaatctcatctaccaagttctgttcccaatcccggaatgtcagaaaaggtaaattgttgatgtgcataagttcaattgttggatcaagtttctttagggaatcgaataagtatcaatcctcagatgttatttgtttgcaggaagttgtggaagattctaatgaaattctgagatatccagtgaatttggctgtgtctgattgtttaggcactaaatctaagtggagtcctagaggtaaaccaacgtgatccattagattcttcaattgtcttatgttaatcatatgtgatgatgatatatatatcagtctatagatgaagagcaaatgagagctgtgaaagaggcattgcacgtgtccaaagcaccatcaacaattctttgccgtgaggacgaacaaattcggattttcgagtttgtgaaaggctgcatagatcagcaaaaggctgggagtttatacatatgtggttgtcctggaactggaaaatcactgtccatggagaaagtagtacaacaagttggtgattggtcaactcaggtatcgatttttgtagttataccataacttgtaagtttctaagcaatgtcatcgacggaaagattgaacattggtgcattttatcaggcaggtttgccaccagtggatacattgtctgtgaattgcacgtcgctgagtaaaacaacagatattttcagcaaggtataactatagaccttagagttcttgatttcagtttgatattgatgcttataggcttattttgttgttagattcttggtgaaatcaagcctggcaagaatgctaacaccaactcttcacctctacaacatcttcagaatttgttttctcaaaaacaagaatcttccagctcaagaatgatgtacggttgttgtgctttgattacataacaatatttctgaaacaaggcagtgttatcttaattcaaactctttt

SEQ ID NO: 168864 - DNA, 1105 bp, Arabidopsis thaliana landsberg
atggccggagcttacgatccaagcttgccggaggttcctgaatggctcaacaaaggagacaacgcgtggcagctcacggcagcgactctggttggtctacagagtatgccaggtcttgttatcctctatgcctccatcgtcaagaagaaatgggctgtgaattcagcttttatggctctttacgctttcgccgccgttcttctctgttgggtcctcctctgttacaaaatggcttttggagaagagcttttgccgttttggggcaaaggtggtccagctttcaaccaaggataccttaagggacaagcaaaggtcttgaatttggttatgcacacaaagtgttcgataaaatgcctgaatgagaatttgatttgatatttttttcttacagatcccaaatagtaatgtggcggcgccgtattttccgatggcgacgttggtgtattttcagttcacattcgcggcgataacgacgatacttgtggcgggatctgtgttggggaggatgaatattaaagcatggatggcttttgtgccattgtggttgatctttagctacacagttggagcttatagtatatggggaggtgggtttctgtatcagtggggagttattgattattccggcggttatgttattcatctctcctccggtgttgccggtttcgtcgctgcttactgggtacgtttattacataaaatattcaagttcagagtttctttagtttgttagaggttagtttatttagttagggaaactattaaattctcaggctattgtttgatatttgggtattattactagaaatataatgaaagattgaagaagatgtttgtttgttgaaaatattggaattaattaatgtacggtagtcggtagatgacatagtctcaaaaaaaattcttaagaaataattcgatgtagactggtctttaattgccaagttttgtttggctttctctttcggtatgattacgtatttaaggtccatagtttatagataagtagtaagttctatgattgtctggtccactaacaaaaggttactaatttccaagtaatagattaattaaatcaaatcaattttggatttgacaacgcgat

SEQ ID NO: 168865 - DNA, 495 bp, Arabidopsis thaliana landsberg
gcgcctgcggcaagtacgacatggtgctggtgtcgggacagaagattgcagaccgcttgctgcgcgccggcctgctcaagccggatggctacacgatcgtcggctatccgaaattcgatctgcacggcggcaccgccgcgccagccaaactgttcgacaacgaccggcccactgtcctctacaacccgcattgctcgccgagcctctcgtcctggtatcgcgacggactcgcggtactcgaagcgttctaccaatcggacaaatacaacctgatcttcgcgccgcacgtcatgctgttcagcaagggcgtgcaggtgtcgctcgatcgtctgcggattgactggccgggccggatccccgagcgctaccgcaactgtccgcacatgctgatcgacaccggcagcgtgcgcagctgtgacatgagctacacgcgagctgccgatctgtatctcggcgacgccagcagtcaggtctatgagttcctgttgcgtccac

SEQ ID NO: 168866 - DNA, 724 bp, Arabidopsis thaliana landsberg
agaaaagccgaaatggcacgccactcggattgtttcattgttttaccaggtacaacataataactaactaacttagatactttgtaaagcttgaaaaatgtttgtcattcgttaggtacaaatttgaaactaggtacagtttgatctttcttccaaaacaagactcattttgtaattgactttaaaattgatctgttcttgcaaatggttatcaggtgggtatggaacactggaggagttattggaagtaatagcatgggcacaacttggaatccacgacaagcctgtaagtgaaataaaccggttcactttccactgttggaattgctctctgaatcacacactataaccaaaatataataatgtcttgatctttgtttgtttccactttgggggaaaaaacctgcaggtgggtttgctcaatgttgatggatactacaactctttgctctctttcattgataaagccgttgaagaaggcttcatcagtacaaacgcacgccagatcataatttctgcacctactgccaaggagcttgtaaagaagctggaggttcgtgacaattgacaatttgacattttaatggatccaaaaatattcatgttcaaaccatataatttgtgttgttgttgttgtttgcaggaatattcgccttgccatgaaagtgttgcgactaagctttgttgggagatagagcggattgactactcttctgaagactag

SEQ ID NO: 168867 - DNA, 942 bp, Arabidopsis thaliana landsberg
atggctgggaggtcgttggggccatccgagttagtcgatgagagagctgaacgatacaaagggaaagtcaccggctttgtcattatcacttgctttgttgcagccattggtggatgcatctttggatatgacattggtgtctcaggttctataccattccctctttaaacacaatttgtagtcactacatgacttcataaaacacctcggatttttgtttttttaacaggaggtgtcacgtcgatggatgaattccttagagagtttttccatggtgtgtatgagaaaaagagacatgctcatgaaaataactactgcaaattcaacaatcaaggcttggcggcgtttaactcgttactgtacatcgctggtttagttgcaactcttatagcctcaccagttactaggaactatggacgacttgcaagcattatatgtgctgggatcttctatatgattggagctgttgtaaatgctggatctatgaaccttccctatgcttttttttggacggatcatgatcggttttggcgttggctttgaaaatcaggttttgtgaagaggacgttattgttaattaatgagaaaaccaaactataatctaatgatgcaacttaacttttttttttaggcagttcctatgtacttatcagaagtggcaccagccaatttaagaggtggtctaaacagtatgtttcagttggcaacaactcttgggatattttcagccaacatggttagttacgccacacaaactctcaagccatggggctggaggctctctcttggttcggctgcttttccggctcttctgatgacccttggcggttatttccttcccgagactcccaccagcttgatcgaaagaggattaacagagagaggacgacaagtcctcgagaaactaagaggaacaagagatgtcaacactgagttaaagac

SEQ ID NO: 168868 - DNA, 463 bp, Arabidopsis thaliana landsberg
cacggctcacgggaacccgggtttagctacgacaggtggagttctaagggatgtagaagggaagtggattcagggatttgccttgaatataggggtttgctcagcctcgttggcagaactatgggaggtttactatgggctctttatagcgtgggataagatgataacaaagctggaggtagaggtggattacgaagtggtggtcggttatttcaagacagagataagtgagactaatcttttgtctttcctaatacgtttgcgctatggctttctgaaaaaggattggacagttcgtttaacttatatgtatagggagtctaatcatcttgtagaaggattagcaaactatgcattttctcgacctttgggcttgcagcttttggacccatgcccgaagagtgtttattcttcatgtttggaggatgctcgtggatcgtcatggccccgatgtgttcgtttg

SEQ ID NO: 168869 - DNA, 682 bp, Arabidopsis thaliana landsberg; identical to SEQ ID NO: 14539

SEQ ID NO: 168870 - DNA, 673 bp, Arabidopsis thaliana landsberg
gaagagaagttgggaagaccggtccatcttggtgaggtgttcatcgaaacacacactaagtcggatggctcatttgttgatcagaagtcggagaagattgctcaagcttatcagcagaatgtgagagataggctgtcagcactagaggcgtctgcttctgctgtctctgatggctcttcacgacctccggagctcacactagatgattatacagccatctttctcgaggtaagatgttttagtataattatgagtcttagagtccaattaatattctgtcactaatgagcttcttctctatttcttgcagtccacagaaaaggattcaagaggcaatccttatggactaggatgtctaaaagacactctaggcagcgccaaccgccatcactccggttcctcatcatcctttcaagccctagaagaacggctgcaggaagctcaaaggaaaatagaagagcaggctgcatataatgagaagagagatgctgagattgctgcccgagaagctgagtcatcccgagtcacagctgagcaaaaggacaagctcgagcaattgtctttagtcgagaagtatctccgccaaaccgatccgcagttcttggacttcatggcaagtcactctaccacaaccacagaacgtctaccaagtcctccacctaatgatccttag

SEQ ID NO: 168871 - DNA, 2541 bp, Arabidopsis thaliana landsberg
atggctatcgattgtctcgtacttggtaacagtttttgttgttcttcttcttcttctctctttgcttcttcaaagtttcacaatttcaatttctgtataagagtattctatcttttttgtgttgtatccaggtgctggacaagagattggaaagagctgtgtggtagtgacgattaatggtaaaaagataatgttcgattgtgggatgcatatgggctgtgatgatcacaatcgttacccagatttttctctcatatctaaatccggtgattttgacaacgcgatctcttgtatcatcatcacacacttgtattgattcttcaaacccagaatttgtcccttttttaaaattcacttttttagtttttgtgggttttaattgtgagtgttaatagccatatggatcatgttggagcgcttccttacttcacggaagtttgtgggtacaatggtccgatttatatgtcggtgagttatattgtcctcaaggtgttcgatgaaatgtttgactgactgtttttttttttgtgaaggtaaaggttgtttactttgatttgtctcttttgtagtatcccacaaaggctttgtctccattaatgcttgaggactaccgaagagtgatggtggatagaagaggcgaggaggagctattcaccactacccatatcgcaaactgcatgaaaaagggtacttgaatatttgatttagttcatttgaggtctttgtgcacgaattcagatgcagtgtctataacttgacttcctcttgttttttttctatatgtagtgatcgcaatagatttaaagcaaacaattcaagttgatgaagatcttcaaatccgggcttattatgcaggacatgtaagacattcgttgtggttttagagaatttcttaagtttgttatgttcagagtttctgtatttcttaaagcttatttttaaatgataataaggtccttggagcagtgatggtttatgcaaaggtgggagatgcagcgattgtgtacactggagattacaatatgacgacagatagacatcttggagcagctaaaattgacagactccagttggatcttctcatatcagagtatggaaaacaaatacaaacttgttcgttggtatttttttcaacaaacttagaaagaacaagttaacctgatatatgtttaactatgccgttttaggtccacatatgcaactaccattcgcggctcaaaatatccccgggagagagagtttcttcaagctgtatgtctacttgtaactattaacacatggtttctaaatttgtttttaaatggtttttgattataattcccggcatcgcttttggcttgttcctgatcaatatacccctttaggaaatgcttaagctttcgtttggtaattttctgatatctcagaaaactcttccaggttcataaatgtgttgctggcggagggaaggcgctgattccttcatttgctcttggaagggctcaggtctgtcttcttacagagctttgaagtcagttacttaaacttgtctttacttctcttatgtctcattgacaattgcctttccttgttcaggaactctgcatgctgcttgatgattactgggagcgcatgaatataaaggttccaatttacttctcatcaggtctgttaaatcaccaccaatcctcatatgaaatcagttcagcagattagtcagctcaacaaagttgtgactttatttcatgaatagtgatctctatcttctgaagattgctgtccctgaagataaatttgtatgtttgcaggtttgaccatccaagcaaatatgtattacaaaatgctcatcagctggacaagccagaacgttaaagaaaagcacaatacgcataacccatttgattttaagaatggtatgtgtactaccatttgcaaataactttagaacgttgaagatgaaatttatatcaaatggaaccgaaactctgatgtgcttgaaaaataagatccaaactagtggttctaatacatcctttgcgtccattttttgttcttatccactaccttagctgtacaactgcttgctttctaactactaccttcacattctgcagttaaagattttgatcgatctcttatacatgctcctgggccatgtgttctctttgccacacctggtatgctttgtgctggcttttcacttgaagtgttcaagcactgggctccttctcccttgaatcttgttgcattacccgggtactatacctattgtgtttcccctttattagcaattcagttttttcctagcatagcatctaacacgaaattgtatctcttttcatcccatttatggatccgttttttacagatactctgtggctgggaccgttgggcacaaactgatggctggtaaacccacgacggttgatctctacagtggcaccaaagtcgatgttcgttgcaaggtttgtttacactttgttgtgcttctcacaaaaactatgctaacttaacacgaatacagcagtgcatccaattcacacgttgtacctacactaaaat

SEQ ID NO: 168872 - DNA, 485 bp, Arabidopsis thaliana landsberg
gtgaccgtgccgcgcctccattccctcaacgggcgaatcaagctgcgccatctggtcgccttcctcgaggtggcgcggctgaagagcgtggtgaaggcggcggcgctgctaggcttgagccagcctgccgtctccaagaccgtccaggagctggagaacgtgctgggcgtggcgttgttcgagccgaatcgccgcccgatggccctgaccggacccggggaggtgttcttccgctatgccggggcgagcgtgacggcgctgaagcagggcgtcagcatggtcgggcatgacggcgccaataccgacatcgccttttccgtcggggccttgccgaccgtttcggcccatgtgctgccgcgggcgctggcggaggtcgtgcagcgctacggagcgatgcggccgcgggtcgtcccggcccgaacgacgtgctgatgtcgcagcaaaggataagggacctcgacctcgtcatcggccgcatgcccgac

SEQ ID NO: 168873 - DNA, 866 bp, Arabidopsis thaliana landsberg
tttacaatggagaagttacttgctggacaaacaaacaatggatccctcaagtcaaagacgaagatcgtctgtactctcggaccggcttcgagatcggttgagatggttgagaagcttctcaaagccggtatgaacgtagcccggttcaacttctcccatggttctcactcataccatcaagaaactcttgacaatctcagaaccgccatggagaacacttgtattccctgtgccgtcatgctcgacaccaaggtaacctaattttgaaccgtcttttcaacttctccttatgttgttttaagattctattagggtctagggacataatctaactcggtttaatcttttctggtttatagggtcctgagatccgaaccgggtttctcaaagaaggcaaaccggttgagctaattcaaggtcaagagattacaatctcaactgattacaccatggaaggagattcaaacacaatctcaatgagttacaagaaacttgctgaagatctcaagtccggtgacgtgattctctgttccgacggtacaatctctcttaccgtcttgtcttgtgacaagaatctcggtcttgttcgtgcccgttgcgagaactctgcagttcttggagaaagaaagaacgtgaacctccctggaatcgtagttgatcttccaacactcacagagaaggatcaagaggatattctccaatggggagttccgaataagatcgatatcatcgctctttcctttgttcgtaaaggatctgatctggtcgaggtcaggaagttgcttggagagaacgcaaagagtatcatgctcatgtcaaaggtaagagttaaaaaacagaacacattttttttttttaagtgaaat

SEQ ID NO: 168874 - DNA, 706 bp, Arabidopsis thaliana landsberg
taccccgtggagtgggttggggtttctttatttccagcgatggctatattctgaccaatacccacgtggtgaaagattccaacggtatttatgtcacacttaccgatggcaaggaatacaaggcgaaggtcatcggtaccgatccacgcaccgatattgctcttatcaagatcgacatccatggggtcacgccgatgccgattggcgattcagacaagctcaagaaggggcagtgggtgctggctatcggttcgccgtttggcctggactccaccgttaccgccggtattgtcagcgccataaaccgcgatacaggtgattatctgccgttcatccagaccgatgtcgccgtcaatcccggtaattcgggcggcccgcttataaacctggacggcaaagttgtgggcatcaattccgaaatcatctcgcgcagtggtggcttcatgggcatttcccttgcgatccccattgatgaagtcatgcgtgtggtacgccaactcaaggcacatggcaaagttacgcgtggccgcataggtgtgcagatcggcgaagtgtccgtccacgtggccaaggcaataggcctggatatagccgagggcgccatggtcagcaaagttgctaacgatgcccctgcagacagcgcgggggttgagcccggcgacgtgattctgaagttcaatggcataaacatcgcacggggtctgac

SEQ ID NO: 168875 - DNA, 973 bp, Arabidopsis thaliana landsberg; identical to SEQ ID NO: 1776

SEQ ID NO: 168876 - DNA, 760 bp, Arabidopsis thaliana landsberg
  unsure (1)..(760): unsure at all n locations
ggctagaggtgatttaggaatggagattccgattgaaaagatgtttcttgctcagaagatgatgattcagaaggctaatgctcttgggaagccaatcgtcacagccacacagatgcttgagtcaatgaccaaatctcctcgtccaactagagcagaagccaccgatgtagctaacgctgtccttgacggcactgattgcgtcatgctcagtggagaaaccgccgccggagctcaccctgaaaccgccgtgctaacaatgtcaagaatctgtaaggaagcagaggatttcatcgattacgacacaatgcacaagaagattcaagatatcgtttcgttgcctttatctcctattgagagcttggnnnnnnnnnnnnnnnnnncggcgaggagtctttgtgcggctgcgattgtcgttctaaccaagggaggttacacggtggagcttgtggccaagtacaggcctagtgttccgattctgtccgtaattgtgccggagattactcgtacggatgatttcgagtggtcgtgctctgaatctgcggctcatgtggcaagacgtggtttgatctaccgtggaattgttcctgtgatggcgacgggagcatccgctaggtcttcgaacaaggactcgacggaggagacgattcaattcgccattgaattcgcgaagaagaagggaatatgtaaggcaggagactcgattgtggcgttgcacaagatcgatggctcctctgttgtcaagattttgaacgtggagtag

SEQ ID NO: 168877 - DNA, 2818 bp, Arabidopsis thaliana landsberg
atgacacgtcagttacgtatcgggcctaaatgccaatggcccaacgtcatggaaagtaggaactaaacgacacgcatgtttaaattcgaaggttttaacggcaagcttttcgcacccatcccttttcttcccgtctacaaaaattcgtcgaccattgcatttttcagttttgaaactcgaaagagatggagggaaaattcgctatttcagaatcgactaatttgcttcaaaggatcaaaggtatcagaaaatcccaaaaatttccgaatcatattgagtaatttgtcctctaatctatgtcgaaatttctagtcgatgacttcgctggctcttccgttgttcatcactatgtttcggttttttgagcagattttactcaatcggtcgttgtagatctggctgaaggaagatctccaaaaatttccatcaatcaattcaggaactattgcatgaatccagaagctgattggtttgtctctcttcgatctcgattattcaattttgttttcactttctttgattgaagaatcagacgtgtttggtctttggttcgagacatttttgaaggatttaagcacaacgtcaacgagtattgaaaactaagacctcatgaatttaccattttattctgctgtctatagcttatgcagctctgataaaccaaagggtcaggaaattttcactcttaagaaggaaccacaaacctacagaatcggtgagtcaggtttcagataattctacaagtacattagtgttatcttaatatagcatcacattgcggtgtttttactttcagatatgttgctaagagtattgttgatagtccaacaacttctgcaagaaaatagacatgcttcgaaaagagatatctactacatgcatccatcagctttcaaaggtgaatttggaagcaacgtataatgttttagttatgtttttcttctaaacgaatacgtattgagatttttatacggatattagttatgcatccctctttgttgtgttcttggccttctagtaacactgttttcgtctacttcacagcacaatccattgtggaccgtgcaattggtgatatatgcattctttttcagtgtagtcggtacaacttgaatgtggttagtactttaatactttcaccttcaattttccttctgaagagttattataagctgcgattgaagatgtgattactttttcattcatgtgatattttgcaggtttctgttggaaacgggtgggtgctcttgataacgagtgcaatgcttctatcttgaggcatgtccttattttaagatccacctcattattcttttgtgttgtaggttggtgatgggttggttaaaatttagggaagctggaaggaaatttgattgtttaaacagcttgaacactgtaagaatttgaacataagattcactttttatattggcatcaggaagtataactctgcaagtgatttcatttcaggcatatcccgttcctgttcttgtagaggaagtcgaaggtacatatatttgcaatcattttaagtgatgctttatgctctttagagaagtcaaatccttatctcagctgatatcaggaagtataagattcactatctatgttggcatcaggaactataattggatgtcattttcctgcttgcagatattgttagcttagctgagtacatactggttgtggaaaaagaaacaggtaagaaagacctcttatttatgtagtaactaggaagatggttttcgttcttcatgactaaatcactttcatccatggtttatagtattccagcgtttagcaaatgacatgttttgcaagacgaaccgctgcattgttatcacagtaagaaatctgcttcattcttactgatttcagttttgactagttttcatttccattttatgtttgacatcaaagttacgattgtttttggcagggaagaggatatccagatgtctcaacaagaaggtacataacttaatcccaggttcctggaatactattttatcagacattatcttctattgattaatatatcagcgaataacacagattctttccaggttcttgcgactcctgatggagaagttgcatctacctgtgcattgtctagtcgactgtgatccatatggctttgagatcctagccacataccgttttggctccatggttagattctgttacaaaatatagatgactgaactcggaaaatttcaccgcttgcattgtttttgttgatagtgataatgtgatatggcactgacccatttcattttgaaccattttccttatgtcacttgttttctttctgtaagcaaatggcctatgatattgaatcattacgagcaccagatatgaaatggttgggagcttttccttcagactctgaggtatatagtgttcccaaacagtgtcttttgccactgacagaagaaggtaagagatcattaaacaccttatcgccttaaatctttagattttcctatttttcactgcttccttttttgagattgtaacaacttccccggacagataagaaaagaactgaagcaatgttgcttagatgctacctaaagcgtgaaatgccacaatggaggtatgaaaaacttccctgacttttttatatttacatttcaaccaaatgacaaaaactagtcttgatcaaaacgattttggtcgtctaaggttggaacttgaaacgatgttgaaaagaggggtcaagtttgagatcgaagcactctcagttcactcactgtcctttttgtcagaggtatatattccttctaagattcgtcgtgaagtaagctctccttga

SEQ ID NO: 168878 - DNA, 2429 bp, Arabidopsis thaliana landsberg
  unsure (1)..(2429): unsure at all n locations
ttgcaggtcgactctagaggatcccctcgggcatcgacttcgcgtttgagacgaagacgagcgtcgtttccccgcaacacgccaactccaagcggacggacgacgccaacacgctcgcaaaggacttgctgggcgtcaccctcgtaccggagacaatggtgcagtctgcccctgacgtgacttcgtcaccgcccgtcgaccaagaggtaccgaccgattcccatctcgtgccttttggattcagcctcgacccaccaagcgacttcgcttcggtggacgctttcacagaggcgagtccaaaccctccagggtacggtatgcggtcaccctgggaccggctgacagcgtctcgacctacagggccctcgggttccgaggaagatgacaagcccgacttttgttgggatttctccggacttggtaacccagtgccatgcgggacttcatgaccgcatgcgactactgcctttccgactgttccgacggtagccgcagcctcggcgacgaggactgtggcccaagtcgcgaatgtttccacgtcgatctagggggtctcgacgaaggcaaccaccttggtatgccggaggacggcgatccctcataggctgcgcctctcgttgacatccttcgggagctagctgtggtcccaagtcctgcggggggtcaggacacacagctcgagcaaatccgcgagatgcaggccaggctnnnnnnnnnnnnnnnnnnnnnnnnnnngctccggcagaacatcgggcaggaatgggcaggccaagctccgaccggagaagcacgtcatctaccccagggcatccagcaccgcattgccgataatgccagggcaaggccgccaccggcttctagtggggtcggccagaacctggctgcagcagcaatactactccacgcgatgccggaaccatccaccaccgagggacggcgtatccagggagaactcaagaatctcctggaggatgccgcggtccgatgggccgaaagctctgcctcccgaaggcaggggtaccccttggagcttcgcaccgcgacttcccgattcatgcgggaagcctcggtccacaccgggcgcatgcgcaacatagcgcctgcggccccgagttgcctcggcaacgagcaccatcaccgcgaccgtcgggcccacctcgacgagagggtgcgccgaggctaccaccccaggcatgggggactctatgacagcggggaggatcggagtccctcgcccgagccacccggtcctcaggccttcagccgagccatacgacgggcgccgttcccgacccggttccgaaccccgactactatcacaaagtactcgggggaaacgagaccggaactgtggctcgcggactatcggctggcctgccaactgggtggaacggacgatgacaacctcatcatccgcaacctccccctgttcctctccgacaccgctcgagcctggttggagcacctgcctccggggcagatctccaactgggacgacctggtccaagctttcgccggcaatttccagggcacgtacgtgcgccccgggaattcctgggacctccgaagctgcagacagcagccaggagagtctctccgggactatatccggcgattctcggagcagcgcaccgagctgcccaacatcaccgactcggatgtcatcggcgcgttcctcgctggcaccacctgccgcgacctggtgagcaagctgggtcgcaagacccccaccagggcgagcgagctgatggacatggccaccaagttcgcctctggtcaggaggcggtcgaggctatcttccggaaggacaagcagcttcaggggcgccagccgaaagatgtccccgaggcgttcgctcagcgcggcgcgaggaagaagggcaagaagaagtcgcaagcgaaacgcgacgtcgcagacgcggaccttgtcgccgccgccgagcacaggaaccctcggaagcctccatgaggcgccaacctggtcaacaagatgctcaaggagtcgtgcccttatcatcaggggcccgtcaagcacacccttgaggagtgcgccatgcttcggcgccactttcacaaggtcgggccactcgcggagggtgacagggctcgcaacaacgataagaaggaagatcacaaggcaggagagttccccgaggtccacgactgctacatgatctatggtgggcgagtggcgaacgcctcggctcggcaccgcaagcaagagcgtcgggaggtctgctcggtaaaggtggcggcgccagtctacctagactggtccgacaagcccatcaccttcgaccagggcgaccatcctgaccgcgtgccgagcccggggaaatacccgctcgttgtcgaccctgtcatcggcaacgtcaggctcaccaaggtcctcatggacggaggcagcagcctcaacatcatctacgtcg

SEQ ID NO: 168879 - DNA, 531 bp, Arabidopsis thaliana landsberg; identical to SEQ ID NO: 65155

SEQ ID NO: 168880 - DNA, 753 bp, Arabidopsis thaliana landsberg
  unsure (1)..(753): unsure at all n locations
cgtgctcagatggaagtccaaagaagactacacgatcaattggaggttaggtctcttcatttctcttttcattgatattgaagatacaaaccaccatgtttacaaaaagtttgactcaaaagtaaatgtccaatccagaaattaggatggagttgctaccaaattattcgttcttttactgatgtacatatgaacatctgtcctggatctctacctaggtggaatgaataaacacgcccttgagattgaaacaatgaccacttttgtaggagtttatgcaacaggctgtgctgttaaagtgcaaacgtttgattggtcttttagtatgggcaggtgcaacggaggctccagctgaggatagaggcacaaggaaaatacctgcaatcgattcttgaaaaagcttgcaaggcctttgacgagcaagctgctacttttgctggacttgaggctgctagggaagagctatcagagctagccatcaaagtctccaatagctctcaaggaacatcagtcccgtacttcgatgcaacaaagatgatgatgatgccatcattgtcagagcttgcagtagcaatagacaacaaaaacaacatcacaaccaactgttcagtagaaagctctctgacttccatcacacatgggagctctatatctgctgcatcaatgaagaagcgtcaacgtggagacaatttgggcgtagggtannnnnnnnnnnnnnnnnnnnnnnnnnnnnnnnnnnnataaagtttagga

SEQ ID NO: 168881 - DNA, 570 bp, Arabidopsis thaliana landsberg
tatgtcctttacggttatgttctagaatcgaaaaccaacaaatcttgcgagagctacaaaatcttgaattttgaaattcttcttagctccccagcttattctcttggtaagtttgaaatctatgagttcaactctgattcatggagaattcttgatggcgtctctcctaattgtttcctgcattttgatggtgtgactttgaaaggaaatacttattggtcttcttcagataaagaaggcaaattcatactcaagtttgatttcacaacaaagagattccgacgtctatcgcttcctattgagaataatcatgatgattaaaaggtggttcatcagttgttagagaagagaaatttgccttgatgaaacataggtttgatacaattcatcaaagatgaatatatggttgaccgaaagtaagatcgattatgacaaagacttgtcttggagcaaattcttggtagtggattttggtaaagttacgttaacaagtgagacgttaagttacgtgagtttcagagattggtcccattgaaaggaaggttagaatttattttgctaaagaggcgg

SEQ ID NO: 168882 - DNA, 806 bp, Arabidopsis thaliana landsberg
gttccaccggatttctacataccggattttgatgaagacgaatgaaacccggatgtactttgtaacaacccgtcccgtgggacccgcccacgtggccactctctacaacgtggcatctcgttggcgctgtagcgcatcgaccctaacctctctccttggaccccaaagcccaccaggtaggttattggtgcgcttggcgaacccaagacctcacattttaacaaccttccacaggacaagctgcttaacctgaaaattcaatgaaaatattctgaatatcttctaaaaagagttcttaagtccagaaaggtcaatctggcacgcacgaaaccagaaagtgttcaatcatcaacagatccaacctgaggaaatcatgctccttgctatcttaagagtgaaagaatggcaaaaagcacaaaccaacaaagctaaagggcaagtgatcaaaacccgaacctgtaccaagacttcccatcccgagcttgtgatctacaatacgaatgcagcgtggaaggaccacaggtttggcttgggttttcaagagatctgagatccaatttggaaaaggatcaaaagggattcgaaatattggctcgccattaatggcggaagcttcagcagtcctctcggcaatccaacatgcaattgagcttgggattcgccatcttcacttcgcttcagatttgtcttcactaatcaaagcgctaaattcggagactctctcaaaagaactccatgggattcaatacgatatccttcacctatcctttaattttgatgtactctcttttaatttatcaccagag

SEQ ID NO: 168883 - DNA, 1250 bp, Arabidopsis thaliana landsberg
ctcatctgaagattctcgtttgatgggagccaagaatttgcatttgtttctctctgagatcatgagaaaactgaaacatgcaatcagaaaggagaaaccggacaagagattgttagggaagaagaaaagctttgagaagagtttgtcaactaaagatcatttctttctcgagcgcatgacttcaatatctcaaaagagatttcatcaagaacataatgatccaaacttggcaacaagcaaacaggttcaaagaaatcacgaaaggattgtatggcttcccgagtattcgtctccttttagcagcccgggaagaatatggaaacagaattcaaccgtgcttttgaggtcttcttcatatgatttcatcaagtccgaaacaattgcaggtagtttatcttttctctcatttgagatttaaagtagttattgactatccaatgattctttgagactctgcagatgattcaataactttgaaagagataggaactgcttcatcaagtgaaggtagtagtagccctcttctatctaaaagcaatcagattgttgatgagatgtcaaaagttgcagcttatggtgcagagaatgaaggtgaattcttggaagaggcaagttcacttttgatttctatacaaatttttacatgaaaaaaacacagagaataactataaactaatttggttgcttttgtttcttctaacagacactgtctctcccctctgtgggctcaccatctcactatatatctaaaactgaggaatatgactttgttcttgaaccactattcataagtccagcaagaggtatgaaaagaaaggtccaatattactggagttagattttaacatgaactaacattgactcatcttaacacttgctcaggtgaagcaaagatacaacctttgtgtaaccaattgcaagaaaagaatcgtcacaaagaatcagtgtttaagtatgtaaaagcggtgttagaggcaatagactcaaactgggaagagctgtatctgaaaacagaaatctctgaccagcttctatatccggcattgatcagcaacataccattctatccaaatcagctttgtgttgaacatgagctcctcttcgactgcatcaatgaagttctcttcgaattctgcaggtttcctcaatgggtttcctttgctgaaaccaggacccaagtcaagccatatagtgttgaaagcattgttcccgaggttcaagaaaaggtgtattgtcatctcagccaatca

SEQ ID NO: 168884 - DNA, 3527 bp, Arabidopsis thaliana landsberg
atgtttgttgttttggatatgtcaaacgatattcaggttttagaagcaagaacaggtttctatgaaaagccaattgcaactttggattttgcttcactgtacccgtcaattatgatggcatataatctgtgctactgcaccttggtaattcttttgatattttcttttcaatttctatttattttatcatctattgtttatacaccttattaatttgggagcattatttccatgttcttgtctttgaaggtgacacctgaagatgtacgcaaactgaatcttccacctgaacatgtcactaaaactccatcaggggaaacatttgttaagcaaactttgcaaaaggtgtccgcatttagttagatttttattatcctcaagttccgcaaattctgttgaatgagttctttcaggaaatacaaccaattaataaattcagggaagacagcagtttattaacaaaatgaataatttatttcagggtatacttccagaaattctcgaagagcttcttactgtccgtaagagagctaaagcagatttaaaggtaaaacatttgattccgaagaaactcttgcagtgtgtgcgtatctgtatacagcctttaactactactattgaaactggtattgtctaatctaggaggctaaggatccccttgagaaggctgttttagatggtagacagttagcgttgaaggtgaacttctttactgccagcttctttaacttggtcattcagaaaaatgattacaatcctcggaaaatttcgaacaatatcctccctgtaaattgctcttttacatttgttttctattttttctcagatcagtgcaaattctgtctacgggtttacgggagccactgttgggcagttaccatgcttagaaatatcctcgagtgtaactagctatggtatttcttttgtgaaactgcaacttttctagacacgtagccttttaggttcgttctgatggatttgtatctttttgaaggtcgtcagatgattgaacatacaaagaaacttgttgaagacaaattcacaacactgggagggtttcaatacaatgcagaggtacatgttcattgaattattcgttgtattgaaaagacttgagtgaatcattaagtttgctcttagatttctcgaatttgatggactatgatgtattaggtcatttatggagacacggattcagtcatggtgcaatttggagtatcggatgtagaagctgcgatgaccttggggagggaagctgcagaacacattagtggaacttttatcaaagtaagtgattttctaggagcatgtcttaaacttctccggttctccctaatccttggggtagaggtgcaagattacgtgatttcttgaaaacaaaatataacaggctgaatcgttctctgtttcttgattgtgtatgatgtcataaagcccatcaaattggagtttgaaaaggtctatttcccatatcttctcattaacaagaagaggtatgctggtttgctatggacaaatcctcaacagtttgacaaaatggacaccaaaggtaaatcttcgtgattttacagcctctctcttattcatttcctgactaaatttcaatatcaccgactttggcaggaatcgagacagtacgaagggataattgtttactggttaagaacctcgtgactgagagtcttaacaaaatacttattgatagagatgttccaggggcagctgaaaatgtcaagaaaaccatttcggatcttctcatgaaccgtattgacttgtcacttttggtgattactaaggtaatatgttttacttgatttattgtcctgtgatgtttgtatcgcctgaaagtgtattttaatgattaaagccatctgttaaaactaaaacaagaatcaaatggataatgctcctgatgtgtttcctcaaatcatagggtctaacgaaaacaggagatgattatgaagttaaatcagctcatggtgaacttgctgaacgcatgcgtaaggtttgtggtactctttatctattttcgtctatcatttgcaggattaagcattttcattacatgttaagataactcttgaccgtttccgttcgtgaagaaacatgtacaaatgtgtctaggggaattttcgttcctttactctaattccagcatctcatggacactctcaaactgaaaaatgggagtgctaaacaattaaattttaatttttggcttgtataatattttaatatggttctttggtcgtctttttatagctgcacaagtgcagggatttttcttaagtcatgcataattttgctgaatatatgaattttttttccggctttttggtgaatatataatatcatacaaaggttgctctgaaacttagatctgttttacggtgtctgatgatctatcatgtgaatatgacagtgtttgcttacatatgtgacagagggatgctgctacagcgccaaatgttggagatcgagtaccgtatgttatcataaaagctgctaaaggtgccaaggtagttttcatgtcaagcttgtgttagcttttccataagatgttaaggtcattctcttcttccgtgcttatctcattttgacgtctgataggcttatgaacgatcagaagatccaatctacgtgctacagaataatatccctatagacccaaattactacttggagaatcagattagcaaggtcagttcaacatggcgtttgtgtataagtttattctatactctttattctggtgattgtaggttaaaggagatgttgttttcagccacttcttaggatttttgagccagtcctgaaaaatgctagcaaggagcttctccatggaagtcacacgaggtcaatatcaatcactactccttcaaacagcggtataatgaagtttgctaaaaaacaactgagctgtgttggctgcaaagttccgatcaggtactttgtggtcccttgcctatgtattatctgatttcatatatgggatctgtttatcaatattcgcttttaacttcaaccagcaatggaacactatgcgcaagttgcaagggaagagaagccgagttatattgcaaaaacgtgtctcaaggtatgctgccgtttttccctttcctatagactctttgatatatctataaaatttgatactttcgttgtgttattcagtggctgagcatgaagaggtttttgggagcctgtggacacagtgccaggagtgtcaagcctctcttcatcaagatgtcttgtgccccaggtttgcttatatttttatcgatatcgatttcttttagaaatctttcagcaggtaaataggttctgatccaatttcctttctggatttcttattggtcttttacagtcgagattgtccaatattttaccggagaatgaaagcacaaaaatacatgtctgtagccaggcagcaactcgaccgttggagcttctaataagtatttaaggttgtttttagctctctcttttttccattggtatcgttgctgttacactttccgcttgat

SEQ ID NO: 168885 - DNA, 1420 bp, Arabidopsis thaliana landsberg
ggaatactgttttcagagacaatcccttacaatggtctcaaccgacacacacctggtgtcgatcgacacttgattcggattgcaccatatgaggtgagaatcctgatgcagcccgagtctgtctacactcctcatgttccttatctgcagaagcgtcgctctaagaaggagattcatgttgctaagtgcacatctaccatggaaaagatcctcacctcacttcctaaggatactcctgagacatcctctgctccactcaacaggtatgtcaagcgccttgttgacaatgaaattagctctaaggaaactaaactgctgataagagacatctgttcgataattttgcctcagatcaagaaaaagaaggcacagagagtggacaatgcagagaacatccgtactatcactcccgatcagaccattgagaagctcccagatccaggtagcttcgttcatgattgctctatctccacgagcaggttcaacaactccttctgtgatgtgggatctagtataaacgtcatgtcgaggtctgttgctgagatattaggcatgactaactacatgctgactagaatcactctcctcttcggggatcgttccaaatgaatccctgaaggaatccttaaggatgttcctgttaaggttggtaactgtttaatccctgctgactttgtggtctcggattatgataaggagtccaaggatcttcttatcggtggaagagctttccttgctacagctggtgctaggattgatgtgaagagagatatatctctcaaaatatgtgatttggagatggagtttggcatgaatggttcagacgtcactaagcctatcagtagtatggcctccagcacaaacacaacccctgagaatgttcagaatccccaaacagagccaaccacaacgctacattcagcgcagctcgccaacgagagctttaaagcatcagtgtggatcgacacacatcctcttgccgatcaacaccctcgggtttcacaaacagaggattctgcaaaccctcttcatcccacgcccatttcagacctttgcgagaagttctcttctatctcttctcctgttatacctttgattacttctttcgaatcttcaaagtgtgcttcaccactaaacgagcctcgagtccctcaaaagcttgtttcttctgttgatcttgcaggtaacgaagagagtgtcgatcgacacaaccaacagtgtcgatcgacacctgcagctacacagcctggaaccgtttacacaccgccttggaaggcaaggttgcagcagaagtcttccaccactctgttcacatcttgaactccgtcaagtcaagctatagactcaaaacaagcgcttagtgggaggcaacccattggtttgaatttctttttcttctcttttcttttattttttgatt

SEQ ID NO: 168886 - DNA, 952 bp, Arabidopsis thaliana landsberg
tcagtcacacaagttcaaaaagctgcaatggccatcaatgctcaagtcctctcagaaatggaaatacctgagagctacatcgactctctcccaaaggtaaatcaatgtcacgtttttattcaatttgtatcttttgttattctatgtttggctcttaagatttgatttttattgacagaacggaagagccagcctcggggattcgatatacaagagcataacagaggaatggtttgatcctgagcagttcttagcgatgttggacatgtcgacagagcacaaagtgttggatttgaagaacagaattgaggcatctgttgtgatttggaagaggaagcttcacacaaaggacaccaaatcttcgtggggctcagcagttagcttggagaagagagaattgttcgaagagagagcagaaacaatcttggtcttgctcaaacaaaaatttcccggtcttcctcaatcttcccttgacatctccaagattcagtttaacaaggtaaatcaatcataatgataagctctcatatattgtagatgccttgaatggcaagaaacaactcatttttgttttggttataagaaaactgatcttttatcaatggatacaggacgttgggcaagcggtgttggaaagttactctaggatacttgagagcttggcttacacagtgatgtcaagaatagaagatgttctttacacagatacattggcactaaagcaaactttattggctgaagaaacatcagatggtgggagaacaacagagacggattccgagtcagcgggatcttctaactcgggagaagaagccgagaagcttgacccacactccaagaccttgttggattttatgggttggaacgataatagttccaaaggaggcgataaacctactaaatctccaaaccttacgccgaaaaagctcggggatcctctagagtcgacctg

SEQ ID NO: 168887 - DNA, 1135 bp, Arabidopsis thaliana landsberg
atgtctatcgtctcatctagagatattcgagtggagacattacaaggggacaaagcaagaaagaaaagtggcatagtacatactagcaaaagcgagttgtctaaaggtggcaatattctcttcggtatgtatagagaagaatctggttttcaagaagttagaaaatgtggacagaggttcaaaagcatgtgagcttgtgtttcaataacatgttttcttttttgctatcttcaacaacatttttcattgttaacatcttctgaaacaatgatttgactatatatattaagttttcgatatgtctttacaaaaatattgtggctgtacaaccaatcaacaccgaagaaagaaatattcctcataataaatttaaacttatctttatgtaaaaaaaaaacataaaaaaaaatcagagtttcatatctctccttcttctaatctaatgagccgcctattcctcaactcttcagccaaaaattagggttttcatattcctccttcagatctaacgacttggcgatggaagctgcaagatctggaatcgaagatgttacatctcctgataggatcagccagttacctaacgatttactttttcgaatactctcattaatcccggtaagcgatgcaatgtccacaagtttattgtctaaacgttggaaatctgtgtggaagatgttgccaacgcttgtatacaatgaaaactcttgttccaatattggttctcttggatttgaccaattttgtggtaggtccttgcaattacatgaagctccacttctcaaaaccctaaccctagaacttaggaagcaaactgattccttagattcttccatatttccaaacattcattctactctccttgaattctcaatcaaatctactggttatcctgtttattacagtactatcagtttcccaaacaaccttgatgtcttccaaacactagttgtcttgaaactccaaggcaatatctgtcttgatgttgttgattctccggtttgtttccagtccttgaagagtttgtacctcacatgtgtgaatttcgagaatgaagaatctttttccaaacttttatctgcttgtcctgttcttgaagacctcttcctccaaagactttgtagtgtgggcgttt

SEQ ID NO: 168888 - DNA, 748 bp, Arabidopsis thaliana landsberg
ttattatgcttgctatatttttcatattatttcccttaagcatctctgtgaaaaatgaagtttcctgttgtgattaatgattaacaggggttccggctaatatgcctctgtatgatattctgaatgagtttcaaaaagggagcagtcacatggctgcagttgtgaaggttaaggggaaaagcaaaggtcatccttcaactttgcatgaagaaaatagcggtgaaagcaacgtctcaagtaacaactccgagttgactgcacctcttttactaaagcgagaaggaaaccacgacagtgtcattgtccgcatcgacaaggctaatggacaatcgttcatcagcgaggccggcagacaggggttctcacatacttcagaggagattgaggatggagacgtaattggtatcatcacattacaagatgtgtttgaagaacttttgcaggaggagattgtggatgaaacagatgagtatatagacgtgcataaaaggattcgtgtggcaactgtagcagcagtggccatttcatcattagcgagagcaccttcaggccggaggttacttggctcaaaaggaagtgtaagtgacactctcttgcagaacgaatggttatgttgaaagatccgtggagataagagccggttttttttttgcagggaggaccaaaaacgccaaaggcatcttctactcccaaaccggatgataaactgatgggaaccatgaccggtcctcctcaaggaaacaactga

SEQ ID NO: 168889 - DNA, 3013 bp, Arabidopsis thaliana landsberg
  unsure (1)..(3013): unsure at all n locations
ccatctcttcttcatgggatacgtaatccgaggctcggtgcagggcgtctcggattgtcggtggtttggacaagtttagttcctttcaaaattcggattnnnnnnnnnnnnnnnnnnnnnnnnnnnnnnnnnnnnnnnnnnnnnngattccttctactttggctagggtggatcagaattttgcgaggaaatctcgaagtggctcattaggctgctgagatagtgaccatagatcggcgtctgatgtgccgggatcgattagcaccgaacattgctttaggaaaagagtcgatagctcctgaaaactatccacagaatttccttcgagtctcgagaaccagtccagggctggccctttcaagtgctcgacgaacaggtgacagagaccagcgtctctttcttctggtctgaatttggctcgggccacagagatgatgaacgacttnnnnnnnnnnnnnnnnnnnnnnnnnnnnnnnnnnnnnnnnnttcttagttttcctggatccgagattattgcattggagattttgtgtgtgaacggcgtgttgtgggattcttccagaatgcagtcgatgttcggtgctgaggagactgcgttatgcatttgggatcttacgagcttcatctcgttttctgcctttactagggataatttgatggcgcttatttcctgctctctggcgtattcttcagcccatctaatgttctcctcggagtcttcattgtccaaagcgtcgatacgatcggcttcggtaaactccgctcggagaggagggagttgtggttcgtttcgatgtgtttcccgatttctcaaaattgccggctcggttcggtcccgtccgatttccgatgccgttctgcggacgggtcttgtggtattgccaggtgtttggaatacgagccgtgtgggattgagatccgctgccgcccgtcgatcgtgaatgtgcctcgcgccgaaacgggtagtcctgatttgtccttgagaggttgctgcttcgagttgctgtgctaaggaccgatttgcttgttcttgatcgtttaccttctgttgaagttgagccatcatactcctcagttctgctagggtcgcgggagcggcggcttcaggagcatctgtctggattggagggattgggttcccctctgtatcaactacgctactggagacttgattgttgaccattgtgaattgggtgattggttccgtgttccgggtgttagagaaacacccatttggattgacaaccttcagtactacaacgacatgatagtgctttaggtttaattgacttaaaaacctattatcaatttggcgccgttgccaattgggtgtttgtttgttaaatttgagatttcagacttgcttagatcaagttctttttcaattttcttttcggttactaactgtgtgtttttcatgttgtcttcttgatccaggtacacctctgctgtatgcgaacttgatcaacaggcaatcagaacctccttttcaacgacaacatcgaccgcatagctcgcgaactcagagaaggagaaacacagtcaaccttgtacctcggcaaccactcgaaatggctgaagaacagaatcaacaaccaatgccctcatcatggctttactaaagcctctctgctcagcactctttacagaggagtcctaccacgcatcagaatgcttctggataccgccagcaatgggaatttccagaacaaggatgttgaagaaggctgggaattggttgagaaccttgctcaatcagatggcaattacaacgaggactgtgataggaccgtcagagaaacagctgactctgatgacaaacacaggaaagatatcaatgcgctgaatgacaagctggacaggattcttcttagccagcagaagcatgtgcacttccttgttgatgacgagcagtatcaagtccaaaatggggaggttaaccagttagaagaagttaggtacatcaacaatcaaggtggctacaaagggtacaacaacttcaagatgaacaaccccaacctctcttaccgcagcaccaacgttgctaatcctgaggatcaactgtatcctccacaacaacaacaaggtcataataaaccttttgttctctacaatcaaggttttgttcccaaggagcaatttcaagggaactaccagcagcaaccaccacttgggtttgcacctcagcaaaaccaaggtcctgctgcccctgacgctgatatgaaacaaatggtacaacagctacttcacgggcaagcctctggctccatggagatggcaaagaagatatgtgagttacataacaagctggactgtagcaacaatgatctcaatgttaagatggaaacactgaataccaaagtccgttacttagagggacattctgcatcttcttcagctacacaacaaacaagccaactaccaggcaaagtagttcagaatccaaaagaatatgctcatgctatcaccttgcgtagtgtaaaagcacttgcaactagggaggaaccaaacacggtcactgaggacagtgaagatcaagatggggaggatttaagtctcgagaaagatcaagctgacaaaccactcgaccagtcactcgagcaaccactcgagctgccactcgacagcgttactcgaccgaccactcgacctgtcatcccagcagcatcaccaactgctccaaagccagttgctgtcaaaaacaaagaaaaggtctttgtccctcctccctacaaaccgcagcttccatttcctggccgtcacaagaaagcgttggcagacaaatatagagctatgtttgccaagaacattaaggaggttgagttgcgaatacctcttgttgacgctctagcgctaattccagactctcacaagtttctgaaagacttgattgtggagagaattcaagaagtgcaagagatggtggtattgagtcatgaatgcagcgctatcatacagaagaaaatcattcctaagaagcttagtgatcctggttcgttcactctaccgtgct

SEQ ID NO: 168890 - DNA, 1514 bp, Arabidopsis thaliana landsberg
atgaaccgtggtagagagacgagttggacaaaccgagttgtttgctggtgtagacgagctgggcgacgagataggtggactatgcagtcaatggacgaactgccgctaggcgaggaggtagatgagttttgcagtcgagggatgagctgatagctagacgaggagttggacaagctgactagctgacagctaggcgaggagatggtcgctgagtgatgggaagagcttaaaggcgagctgaagagcttgacaaagaggagcgaactaacgagctacatgagacagacgagctacttgagacggacgagctaacgagcttcgtgagacgactcccgccattcgcctcgctcatctcgtccccgacttgaggagaagaatactggtgcgggaaaaataaagaagacccgaaacaggttcctccaagcctcgttctttcgtctcgggaatctgaagctcgcaggtcggaacctcgcagcactcccccagaacgtatttttattccgaattgacatgacggtatactatggcatctcacattgttatgcttttgccgtagctaccccgtcttcctttgccgacatcatgaggactctcgtggcccccagttctgccatcgcccccttcgacgaaatgagggaggtgaacaaggataacttcgcttcgctcggaaactcggcaaggcaaaagcctcgtttgatttaccaggaaatccgacgtaaaaccgagactaacgtcacctttgatcttgcagctaatcttggaattcaactccgtcttctgcagccacgaagatcagctttctgacaaggatagcgaacttgacagcttttaggcgaaatgaagacgagaacgctcatacggtggagagggccagcatggtgctgaagcggatgaaagacgccgagctgcgggtccaggaactcgaggtgaacaatattgatctcatggcgaaactggaagtaggtaaaaatgcctatcttgctgcggtcgacaacgagagccaggcccgagctgaactcaaggttcgcgaggagaagctaaagaaacttgaagaggagcaagccacaaaaattgacgtcgccaggaaggaagagaggaagaaggtcaaatctcggtttcacgagttctcgtcgaagtatgggaacttcttccgggagtccgaagaagttgaaacgctgaaggtccgggtagcagagaccagggcaaaccgggaattgctcgaagagattcaaaagggtgaaattcccgacatcgctatggagcttgagtcggttcgcgctaacgaagcaaagttcgtgcaacgagctaccgaaccgaagactccccgacctgaccctgttgagcttacctcgctcctagctgacactcccccggagacgattgcggaaagcgctcctcaagatgaagcgatagcgatcaacgaaaggggttccaacaagggttcgacctcggaggctggaatcgtggctatgttcccggtcgatgttgaaaaagagtccgagcaggcggaataa

SEQ ID NO: 168891 - DNA, 873 bp, Arabidopsis thaliana landsberg; identical to SEQ ID NO: 39768

SEQ ID NO: 168892 - DNA, 4105 bp, Arabidopsis thaliana landsberg; identical to SEQ ID NO: 6533

SEQ ID NO: 168893 - DNA, 871 bp, Arabidopsis thaliana landsberg
  unsure (1)..(871): unsure at all n locations
catttctcataaaatcttgggatgacaatatggttttggtcacactcatattctctggttctgcaactgttctctactttgtttatttggtaatgattcacaccttcaaaaaaatgatgtaaagcttcaagattcatatatttttgtgcctaatcttttttttttcaaaacccgcagtattttgataaagcggaccaagtgaagagcctagaatacgcgaagtttgagctcatgtcagaagttcataagcacttgcagaatttttcgcctcaaagccttataagaaatggacaactatgtcaagagagcttgaaaaggtttgtttctacattttttcctttgttattctaattttatgaaacgctctttttatttgattctgtttctgtattcttactggttatttttattcagtttgttcaaaaagtttgatgtcaacaaagacggaaagatccaagtatcagagttaaaagatctgacagtggactttggggtattagggagagtgaagtgtgatataaatgagcttgccactactttgcttgctgatttcgacagtaatnnnnnnnnnnnnnnnnnnnnnnnnnnnnnnnnnnnnnnnnnnnnaaaatggctgaaacagtacaaatttagcttcaatggcaccgagtcacaaggagaggacatagccgtaagtgcagcacaatcttctcataacattttttacatgtttgatcagattaagaaattgggaagtgttaactgcaggaggatgatggagttttgaaggtggaacaattactaaagggatgtctttttactaagttgcttacaaagagaaccttgaaagctgtcattgaagtcattatagggattactattgtcagctttc

SEQ ID NO: 168894 - DNA, 740 bp, Arabidopsis thaliana landsberg
  unsure (1)..(740): unsure at all n locations
ttgaaaaaaaagactagttaccgaaaggttccatacacggtaatcgagacatcccttgcaaccatgccttcctgagccggtgagactcatgttcgtcgcgtaggaatttgccaaatctctgtaatcttcttcagttcttcgtaatcttatggcccatgttatcttcctctttaagtgcatcttccttgcaaaatcctaagcttttcccttcttttggtcttcttctctgagggtcttctctacgacggaagagtgaattgatactctacaagctctgttccgaatcataactccgacgaagatccgcctttgaacccgataaaagaagaatcgcaatactccaacattgtcttttcccaaactccagagtagtccttcaccgacacgtcatttggctctagatatgtactagcaccggcatcgcctttagttccttctcaccgggtttcgttgatggcccgcgaatatcttggaccatcagttgtgctttttccggtgagaaagtcgacggcacatgacgagctcctttgttggcaggtggtttcccaggtgcttcacgtcgatcatcacttcagatttnnnnnnnnnnnnnnnnnnnncgtcccttctcccaaccgcagcaaccctagggtttggtgggatgggacttaatccttttgaccgccaaatgaacaatcttcgctcttggtgggctgggctcaatccgctggctgtcactactctaaactaatttaaccata

SEQ ID NO: 168895 - DNA, 1283 bp, Arabidopsis thaliana landsberg
tgacatcttcaccttcttcttttctcaatgcactctttttcttttctctgtatctggtggctattggacaaagtggacacaagccttgtgttcaagcttttggtgctgaccagtttgatgaaaaagactctcaagagaaatctgacagaagctccttcttcaactggtggtaccttagtctgtctgcaggaatctgctttgcgattttagttgttgtatacatccaggaagagttcagctgggcttttgggtttggaatcccatgtgtgttcatggtgatctctcttgttcttttcgtattagggagaaggatttataggtacagtaaaagaagacatgaagaggaaataaacccgtttacgaggataggtagagtcttctttctagcattcaagaaccagagaatgaattcatcagattcgtgcaaagttgagctagaggcaaatacatctccagagtttctcaacaaagcattgcttgtacccaatgattcttctcaaggagaaaacgcatgcaagtctagtgatgtagaagatgccacagctcttatcaggctaattccagtatggtttacgactctggcttacgcgataccctacgcgcagtacatgacatttttcactaagcaaggcgtcacaatggatagaacaattcttcctggtgttaagatcccacctgcttctcttcaggtctttatcggcatatcaatagtcctctttgtccccatctacgaccgagttttcgtccccatcgccaggttaataaccaaagaaccttgtggcatcacaaccctcaaaagaattggaactggaattgtactgtcgactatcactatggtaattgcagctctggttgagttcaagcggctcgagactgcgaaagaacacgggcttatagaccaaccggaagcaactcttccaatgtcgatatggtggttaatccctcagtacttgttgctgggattggctgacgtatatactttagtgggaatgcaagagttcttctacagccaagtccctactgagctgagaagcatcggtctcgcgctttacttaagcgcgttgggcgtgggaagcttattaagcagcttactcatctctctgatagacttggccactggaggagacgcaggaaacagctggtttaacagtaatctgaacagagctcatcttgattacttctattggttactagcgattgttagcgccgttgggttctttacgttcttgttcatttccaagtcgtacatctatcgtcgagtggacgtagtgtagtttccaaat

SEQ ID NO: 168896 - DNA, 1191 bp, Arabidopsis thaliana landsberg
ataaagcaatggaacgatattatcaaccaataacatcccaaccaacaacatccacttcaaattcttatcataatttggatgatttgccatcagatcttgctcaaagaaaaagaatattggattatcatccaaatgaaagggacaaggtaaggcgcaaatacttaactagaggtccatgtcaaccttatgatcatatttttcctcagaaaagaataggaactgcattgaggcgatttaatgcaagttggtttggtaaatatcctagttggctagagtatagtacatcgaccaataaagcatattgcttgtattgttatttatttaaagacgacataccaaaaagaggcaataattatgcgtttctggaagaaggtttttctctgtggaataaccctgagacactaagagagcatgtgggtgtgacgcccaacacatttcataatatttctgctaagaaatgtgataatttgatgaatcaagctcagtctattgtgcattctctgcataagcaagatgatgtggtaaaaaaagaatatcgtgtccggttgaatgcttctattgatgcttcaaggtatttgttgagacaagggttaccttttcgtggtcacgatgagtcaaaagagtctactaatagaggaaattttttggaactcattaaatacactggtgaacagaatgatgctacaagtaaggttattttggagaatgctccaaaaaataaacaagtgatttctccagtgattcaaaaggatactgtgaattctcttccataagaagttgtgaaatctatcatagaagaaatcgatcatgatgtgtttgctttgttggttgatgagtccgctgatatttctgacaaagaacatatggctattgttttttgatttgttgataagagtagagcagttaaagaaagatttgttgcagttattcatataaaagatagatattctttatctcttaaatctgcagttgatgggctattggcaaaatatgggttaagtttgacaaaggtgagaggacaaggttatgacggagcaagtaacatgaagagtgagttcagtggacttagatcattgatttctagggaaaatatttttgcatattacgtccattgttttgctcatcaacttcaggtggtcgtcggtgcagttgcaaaaaaacactttgatagtgtagtttttttacatgatt

SEQ ID NO: 168897 - DNA, 498 bp, Arabidopsis thaliana landsberg; identical to SEQ ID NO: 3019

SEQ ID NO: 168898 - DNA, 797 bp, Arabidopsis thaliana landsberg
aaaccggaaatcatgaagtgttcctagatgagaagttcttcagagaatgcatggagttatattctggggaaactggagttgttgaagccagcaggaaatattttcctgtaaaatattacaacatactggatcctctgaaacacagtaacaaccttggacgtagtgtgacaaaaggtactatattaaccagagatttctaagcatgattattggtatctcaagtaatattttctatcttttgtgtaatcttgctaggaaatatggtacgtttaagaaattgttttatgctgggagttcagaaactcagagatgtgcttacactgcctggagagaacgtgggttggaaactggagaagttctttaatgtttcactggagaggaacggtaagggacaaagacaagacgtagaggagcctgtcgtcgcgtttggcactggagcagcagactactctcaacttaaaggagattttgacagataccgcaataatcttatatacgggaagtggtttcacggtgagagcctgcataactggctccctccgagtctagacacaacttcctgggcaaatatcagcttctatatgagcagggtaaggaatggtttcaatgggaggaatcaggagggaccaacatccatgccaaatatcaaacagtcaccaaacaatcggagatcaaacggaacaggcacttacattcctggaatggtacattcaccgtttactctttcactcatattcctattttggaaaagaagttgtttttcaaaatgtattgatccatcggtttcttttgcagag

SEQ ID NO: 168899 - DNA, 1781 bp, Arabidopsis thaliana landsberg
agaaacgtttacgaaacctcgcggatgggttttctctaacaatgggaaagaactcaagattggcgtgcctcttcgcgttagttacaaggagtttgtatcacaaattcgcggaaccgagaatatgttcaaagggttttgcattgatgtcttcacggctgcagtgaatcttttaccgtacgcagttcctgtcaagtttattccttatggaaatggaaaggagaatccgagctacacgcatatggttgagatgataacaactggtgtgagtgcttattacattctttttcatagaagttacttttaccatttctacttactgtaaaaatggatttactgcagaattttgatggggtagtaggtgatgttgccattgtaacaaaccggacaaagattgtagatttcacacaaccatatgcagcatcaggactagttgtagttgcaccttttaaaaaactgaattcaggagcctgggcttttcttcgacctttcaaccgtcttatgtgggctgtcacgggttgttgctttctctttgttggcattgttgtttggatcttggaacataggactaacgatgaattcagaggcccacctaagagacaatgtgtcacaattctctggtcagtttactatatatttcagagaagtagcttagagacaactgcttgttatcttttggctgatccatttattgtttgtttgatatctgcaggtttagcttctcgaccatgtttttcgcgcatagtatgtcgaaagaaaacttactgtgccactggttattgtttggcttttgactgatatgactctttcccttggttttgacaggagagaacacagttagtacacttggacggttggttctgatcatatggctattcgttgtactaatcatcaactcgagctacacggctagtctgacatcgatattgacggttcagcagctctcttcacccatcaagggaattgaaagccttagagaaagagatgatccaatagggtaccaggttggttcatttgcagagagttatttgaggaacgaactcaacatatcagagtcacgcctagtcccacttggaacacctgaagcctatgctaaggcattaaaagatggaccaagcaaaggaggcgttgccgcgattgttgacgaacgtccttatgtcgaactcttcctctccagcaactgcgcttatagaatcgttggtcaagagttcaccaaaagtggctggggatttgtaagtataaagatattgtcaccatttggtttggttagattctgttacttatgtataaatggttttacgtaggcctttcctagagactctcctctagcaatagatctatcaacagcgatcttagagctagcagagaacggagatttgcaaaggatccacgacaaatggctaatgaagaacgcatgcactctagagaacgcggagctcgaatcagacaggcttcatctaaaaagcttttggggactatttctcatatgcggcgtcgcgtgcctcctcgctctcttcctatactttgttcagatcatccgtcagctctataaaaagccaaccgatgatgccattgcaagagatcaacagcagaatcatgactcttcctccatgcgctccactcgtttgcaaagattcttgtctctcatggatgagaaagaagagtccaagcacgaaagcaagaagagaaagatcgatggttcaatgaacgatacatcgggatcaagacgatcacgaggtttcgatagagaaagaagcttcaattcggtaaatccattagactga

SEQ ID NO: 168900 - DNA, 1589 bp, Arabidopsis thaliana landsberg
aagacttttctgttatacattcgaaaaacaggtcttattggatttttactggttttttaacaattttttttatggaatttgttttatcaggtggtgacagatactgagaagtcacagtcaaaaattgaaggtggcgcgaaaacatatggaccatggggcggaaccggtggaatcatgtttgacgatgggatttataccggtattcgacaaatcaatttgtcacgcaatgtcgggattgtgtcgatgaaggtctgttatgattttagaggacaagctgtgtggggaagcaaacatggtggcgtgggaggattcaaacatgataaggtgcgtgaatttgaaacgatttttggtctacttaagtttaattacacttcatatttcacaggtttaaatgtaacttgcagattgtatttgactacccttcagaggttttaacacatgtaacgggaacatatgggccgctgatgtatatgggacctaatgtgataaagtcactgactttccgcaccaacagaggaaagcatggaccttatggagaagaacaaggaccgtcttttacacatcaaatggacgagggtaaagttgttggattccttggaagagagggtttatttcttgattccataggtgttcatgttatggaatgcaaaataagttcccttaagccatcatctcctcacaatgcaattgttcctcataataactccggcactgcgcaaatagaaaattccccatgggctaataagctagtccttgcagcaaacggccatggcgaagaggtaacttgtagattctatcaccatggtattttccggtttttcaagttttcgatttcatgaatagcagccactgtataacaactctactatggctcagtttatatggtttcggttttaatacgttatatatatcttagccaaattaagacctgtttgatttttaaatcgttcgtttcaagtttggttcggtttatctagattaaacaccctaatagcagcctacttgttgggtaatcgttttcacaggttgatcgtggagtcgtcaaagaaccaacaccgagcgggcctggaccgtggggaggtgacggaggtcaagcttgggacgatggagtattttcagggatcaagcagatatttgtgacaagaggaaatgatgctatcacttcaatacaaattgagtacgatagaaatggacaatctgtttggtccattaaacatggtggtgacagcaatggagtcgctacacacagagtaaacaacaatatttctcctttcacataaagctacttttgtgtttgatgctttagaaccatttctaatgctctcaaatctgtgttgcagattaaatttgagtatccagatgaatcgatcacctgcatttcagggtattacggacctctgaacaattcagaccgatataatgttgtcaagtctctgagtttctacacgagccgtgggaggtacgggccatacggtgaagaaaccgggacgtttttcacttcgactacaacacaaggaaaagttttggggttccatggaaggagtagctttcacttggacgccattggagtgcatatgcagcattggctt

SEQ ID NO: 168901 - DNA, 656 bp, Arabidopsis thaliana landsberg; identical to SEQ ID NO: 45128

SEQ ID NO: 168902 - DNA, 532 bp, Arabidopsis thaliana landsberg
atggagtttacattgagtaagtcgaagtggtctgaatgactatatagagtatttttgagatggcttacagaaacaacatttccatacaacaaggccatagaacttacttatgcaacatccaaccttcactattccaattccaaagctgttcagctttgccgaatgcctgtggttcctcgacaggaatctggacgattgcatgcatgaagtgaaggataaccgcgtccgtaaacttttaaaggtgaatcgaaagcctgtgctgaacagatttcggaagttcaaaaagaattgcaggtagaggtactttatggaaaagtaccgaatcctgagcctgttatccattttatcaaagaatggttcgatatggaccgggatctccggcctttctatgctttactaagaaaggacagggagctttctccactggccgaacagtacaagggacttcacatggtaggtattcccgatttttttgaggcgctttgctggagtattatcgggcagcagataaatttacagtttgcctaccgtg

SEQ ID NO: 168903 - DNA, 717 bp, Arabidopsis thaliana landsberg
ctatcatatcaaaaacaatgagaaagaaaatgatgatttccgatcttccacacgatttggaatcggaaatactctctagggttccggcgaagtccctagcaaaatggaagactacttgcaaacgatggtaagctttattcagagatccgagattcgtcaagaagaactttgataaagcaggaggaagggaaatgatagtactgatgaattcgagggtttattcaaacagcttcaatctccaagggattaacaatagagttgatccaactatggaggttacaggtaaactcatcaagctaaatgattcaaaaggtgtcgatatttctgctatctttcactgcgacgggttgatattatgcactacgacggaaagcactggacttgtggtttggaacccgtgtaccggtgaaattagatgtatcaaacccagaatattttaccggtgtaatgataggtatgctcttggttacggaaacagcaaatcttcttgccatagctacaaaatcttgaggtcttgctgttattacgtcgaccagaacctcagcctcatggctgctgagtttgagatctatgactttagcactgattcttggagagatcttggtgacatcactcgtgacatgatcgtatattccagtggcgtgtctttgaaaggaaatacttactgggtttctggcatctaaagaaaaaggttttttcatgcaaaattaaaatttt

SEQ ID NO: 168904 - DNA, 2201 bp, Arabidopsis thaliana landsberg
  unsure (1)..(2201): unsure at all n locations
atgtcatatagctctgcagacgtgggatccgatgcaggtgacaattcttcttaaaagacaactaattctctgactttcctcttagtgactataagaatagttgaactcctctattaaatttttcgtttaacaattcccttagtaccggaccacattatgactcaatcaagaattctcttctctgtatttctcctctccatctttatcttacctctccgaaacgccttgaaccctcaaaaatgtccttcatcctactcggattcatatcttaataaatgtgaaccacttggaatccccattcgttttcctttctgcggccatccaggattcaatctccactgcaacaacctcgataagacagtcctagagcttcctatgtccggaacatttcttgtcgatgaaatcaactaccaaaagcagcagatttctatcagcgaccctgaaaactgtatggtaaaaggcttttaaccttgagatacttgaggatctcctttctcttatggcttcagtttctactacacgttcttgacctgtccgaatgaggtcgtgataccggtttggtctctgatgtccatcccttgcctaagcaattctacctcctccttcttcgccacgtctaatttgactttttcaaaattgttgccgccttcttgtcagattgtgaaaggactatacgttcctgttgatgtgatatataaagatgtgataactgaagaaaaagggttctctacagtgccctggcttggaaacgtcttgttggaatggagctcgccgaattgcagaggttgtgaaaaggagtccttgagatgtggtttcaagaacaaggcctccctcgaagtcaaatgcttggctgatccacccggtatgatccttattggnttaacttcttcttcttcttcttcttcttcacttataagttataatcgaagaaaactccattattggtaaggctgaagaagttttggtagaaaacttcaaatccaggttcttttaggtttagattaatcaagaagttttttacaaagagaaatcctagtaggaattaaatatggaaattatgaattgactaattagttttttatggtcgaagattagttataatttaaccaaccgaagtattctcaatttctaattccccacgctagctagcgatcgctagaatacttaacgcatattttttgtttttattaaactgacatttgttgaaataagcaaatatcaaacaaaaatcgtaatcaattaatttctctacttcgactgtttaaaacacattcttgatatgttatccggcagatgaaacaaaaagtagattacgaccactgataataaccctttgcataatcggaggaatcaccgcaacttgtattgctgctatccgcatttacaattccgagaggtttgtcaatcagagaagacaaaatgcagctattacagccagaaacacaacgcaacaaccacgaggggttgtggtcactacaggtcttgaccaatctacaatagaatcatacaagaaagtggagttgggagaaagtagaaggcttccaggtactaatggtatcatctgtcccatttgtttatcagaatatgctagcaaagagactgtacggtgcatgccagaatgtgatcactgtttccacgtccaatgtatcgatgagtggctcaagattcatagttcatgtcctgtttgtcgcaactcacgctcgtaaaggaacttgttgtttgttgttgtttgaatatgaagtatttcgacattttaatgaatgtcactaattcttctgcttgtaaatcgatcaaataattcaggagtttctgtaaatcaggttacatattcaaacaaatcaaaaaaacaactcaagagcaaaaaaacaaacaactgaacagagcatatatagctaatgatcaaatgattaatagttttatttattcgcaaggcataatactcaaagggcacagtaatcggtgagatcagatatgtctttccttgcattaggtaagttgctgaatttcaagaaaccccaaaaatcaaaaggcttatagagacgaggatgttcatcatctaccatcttctcaggcgcatttatgatcactccttctttaagaatcgtgaacagtgcagccacataccgatctttttttgcggttataaccacaccgcgaagcggaggaaataccccaccattcaacagtacctacaacaacgt

SEQ ID NO: 168905 - DNA, 2567 bp, Arabidopsis thaliana landsberg
tatagacttcggctaaaccatcaagtcttttaaaagcaagaaaaagctttgttagcggttttggagtcaaatataacgagatgtcatgtgtatgattgagtataagaactagaaccgtaactagatcccggaagctatattgggaaaaatgtcagaaaaagcaccaactttcaaatttgggatgaaaaaaccctcaactttcaatgcgtcattttaatcacgaagtttctgttgacttttacagaaaacaccaaagttttgttgaccgggacggggttaatttcgctgttaacaggcatcgttagataaaacgacagcgtcttcgtaaccattaaacgttgtcgttttgtaatagaaagaaactaaaaatcccaaatcgatttcacattcccaaatcgaaaaccctaactctctctcaaccccaaactctacaattgattgaatctgatggctaggacgcgtggaggacgacagaggactcgtcagtcggcgagactggctgcgggaaacgcatttgctggaagaaacgatcccgaaccatcgacggttcaaatccgagagattgttgagagctcaccatcgacgactgattcaatggaaataacagaggaaagggttaaaatcccggagattgttgaggaaccaccatcagagaatgttgaggaaccaccatcagagaatgtacagaacccataaagaagcgagcttataaaaagagaaaggggagagcttctgaagatatggaagaagagcaggtggtttttagcgatgatgattgtgcggttgtagaagatgaagactgtgaagaggttgagtgtgcagcgactggtttagaggaaaataatgaggaacaagggtcgattgaagcttttccagaacggtattgtgatccacctgtagggttagaagaatgtaatgaggaagaaaatggaaatggaggtgtaggtttagaggcagaacaatgtgatccagctgtagggttagaggaaggtaatgaggaagaaaatggaaatagaggtgtaggcgatggaggagtagatgaagactatggtgatgtaggcttagaggaagaacaatgtgacgactttgcagccgaatttggagaggctgcgagagaagatgacaatagaagtgatagtgatgcagatagtggagatgaaatatgggatgatgagaagattccagatcctgtatcacatagtgatgatgaaggaagtcctgaagacaatgctgcgagagaagccgaatctgatttgcctgaagagccgctgcggctggggaaaactttcaatggccctgaagaattcaagatagctgtgctaaggtactctctcaaaaccagatacgacatcaaactatacaggtcacaatgcttgagaattggtgcaaagtgctcttctactgatgtcaaatgtccatggagatgctactgctcgtatgataggaagaaacataagatgcaagtgaagatatatgataatgaacatgtttgtgtgaggtccggttactccaagatgttgaagcaaggcacaattgcttggttatatagagacaggttgaggaagaatccaaaaattacaaagcaagagatggttgctgagatccagagagagtataaccttatagtgactgaagatcaatgttcgaaggcgaagactgtagattcacagagaggaaggggagattcacagggaagatgcttatcatggtttcagtgttcgaactaaaaacttgtcttgattctgtcttttgtcttttgtcttttgtctttgagatggtttgagtgtttcaactaaaaacatatttgtttgttttgtttggaatttggtcggatattgagttcatgtatggattgatttggttattaagacatgcttcttttcttttggaatgtcttaaaacatgattaaatgttgcacttccattcatttgatttcaaaagatgatacaatcgatacattcttgcttcatatcatagttcaaaagatgcatacaattcatacacttaataaccaatagcgagtttcttttggttcccttgaccaaacattccataaacaactacaattgtgataacaaaaagccacacaaaacaaactttcaagcaccaaatacacttgtggagttcctttttcctgagaagtgcttcttccttcaattcttgtatttgttcttttaccacatttgtctctgattttcccttgctaacctcatttgcaatgatgacaattcttggtagagcatcttcatttcttcaaacacagcatcctctacccatttgaacaagtgaccctaatgcatcctctacccattgacactttgttagcttgtagaacaaatgcttggctaagaaattggtataacatactcacctcttttttgctagtccacacgctcggatctcgtttgctaacgcagcggaagaatggtcgtcctgggtttcttgcatcttggatgtaaagatcgtgactcctaatccacacacacactttgacggcacaccacgctctctaacgacaccagatgtgacagagctagaactcatcgttacaaagagagatacttga

SEQ ID NO: 168906 - DNA, 2944 bp, Arabidopsis thaliana landsberg; identical to SEQ ID NO: 8556

SEQ ID NO: 168907 - DNA, 574 bp, Arabidopsis thaliana landsberg
ttcagcagcagtattttcatcaaattccactgtatactgacgttggtggtagggtgctacttctagtggaaattggttaacatggtaggacatgtgattcacttacattgttggccagttgttctgtcctttgattggtagagtttgggcttttgttccatgggggaagtgaagtgatgtatcttgtcatgattctcagattgttccaagaggacggatgtaccgttacccaactggtcgcaacatgcctgaagctccggcgatgccaggggttgctggaggtatgatgcaggcatacgatatgggcggcttccctgtgagggatgctgccttatccccggctgcccaaattgggactctgacttctgcccttgcaaatgctaatcctgaacagcaaagaacggtatgtccctgtttgggtgtcagtttctacctgcatagtcagtagtatctagcacttggtattcagttgattggtttatcatccattttgacattaaataactcaagttcacttggatctgcatggcctttctgcttcagctgattttttttaggtttaaaaacatttaca

SEQ ID NO: 168908 - DNA, 1113 bp, Arabidopsis thaliana landsberg
gggctcatcaatcttcctaaaacaggagaggtaacttatctaccccatctgaaacatttgttgcattgcataaagcacctatgtgcctgatcttaccaaaaaaattgaaatgatagttcttaagtctacgttacaactcaataaggttcatcatctttgtaagcttgggcagattaatgaaatctaattagaaatctcttcgtttcttatcatagttttcaggaaggaaaaaggaaaatcttgatgtctggttttctgacccaactcaacctttcaatatgtattcacagcaacctgaagttgttaaggtatagtgcatctggacatctggttgctctgctgctcagatattttctcgtaggaaacattttttgtggttgccaataatctaattctactcgtataagaggctctatgtcattatctatttggtgggtaactaaacccacctgtcaatatgtacaggctatactatgcgcaggactatatcctaatatagcagccaatgataaaggaattacagagacaacgtttaacagtttgacaaagcaaggaaaccaaacaaagagctactcggcatggtacgatggcagaagggaagttcatatccatccatcttccataaacagcaacttcaaagcatttcaaaaccctttccttgtattccttgagaaggtaacctgagttttaatatgtgaagcgtttgattttactctgattacttatgatctacaagcctccgaattcatacttagctttgtacatattaaaaaagcatggtagcttgttattaacttcttattcaatttgatgttactaggcagattctggtgttaatttgtaggcatcatctaatcgtgggtaaatattatatcttgtaggtggaaacgaacaaagtatatttgcgagatacaaccattgtttctcctttctccattctactttttggcggctcaatcaatgttcatcatcaggtacagttagccatatcgtgttctctcgctgttagcaaaacaaagatgaaatattctgcttattctttgattttatctgttctttaccttaaaaaccttacctttcattgcagagtggatcagtcactattgatgggtg

SEQ ID NO: 168909 - DNA, 828 bp, Arabidopsis thaliana landsberg
ctgcaaaccattatcttacgttatcaatatggtttatcttgttcaggcactgaggaagaagcagcagaagcttacgatatagctgcaataaagtttagaggacttaatgcagtgaccaacttcgagatcaaccggtacgacgtgaaagccattctagagagtagcactcttcccatcggaggaggcgcagctaaacggctcaaagaagctcaagctcttgagtcttcaaggaaacgcgaggcggagatgatagcccttggttcaagtttccagtacggtggtggctcgagcacaggctctggctccacctcatcaagacttcagcttcaaccttaccctctaagcattcaacaaccattagagccttttctatctcttcagaacaatgacatctctcattacaacaacaacaatgctcacgattcctcctcttttaatcaccatagctatatccagacacaacttcatctccaccaacagaccaacaattacttgcagcaacagtcgagccagaactctcagcagctctacaatgcgtatcttcatagcaatccggctctgcttcatggacttgtctctacctctatcgttgacaacaataataacaatggaggctctagtgggagctacaacactgcagcatttcttgggaaccacggtattggtattgggtccagctcgactgttggatcgaccgaggagtttccaaccgttaaaacagattacgatatgccttccagtgatggaaccggagggtatagtggttggaccagtgagtctgttcaggggtcaaaccctggtggtgttttcactatgtggaatgagtaa

SEQ ID NO: 168910 - DNA, 459 bp, Arabidopsis thaliana landsberg
  unsure (1)..(459): unsure at all n locations
aaccaaactatatttactgataaattaattgattgttattgtgcagaattgcttggggcgattgtgggtgtggggattttgagaaattattctggcaacgttgaagacgttaatggttacacacttcggttcaagatcatggatcgctagtaagtaaaataactttatattgtttatataaaattgtctgcataaatttgtatacaagattttgatcatacttattgcaacagcaaagaggtattgtcgtgtgaagcttttgggcagacagctattgactttgaaaaaaacttttgattgtatggaaagccaaatatgattgttgcactagggtggtggaaggttttgaagttaaatgggtggccaaatggagnnnnnnnnnnnnnnnnnnnnnnnnnnnnnnnnntatttcctaatccagagattcttgaagttgaagaaataaaaatggttatagat

SEQ ID NO: 168911 - DNA, 769 bp, Arabidopsis thaliana landsberg
atggacgcggagaagatggatctcttcagcaagttaccggacgaggttatttctcatatcttgtcatcccttccaaccaaagaggctgcttcaacatcggttctcgcaaagaagtggcgttatctgtttgcgtttgtcccaagtctcgatttcaatgactctgattttcttcatccccaagagggtaaacgggaaaaggacggaattcttcggagtttcatggatttcgtggatagggttttggcattgcagggcgcttctcccattaagaaattctccctctgttgtggcggcggttcttattcggatagagtggattgttggatacagaatgtgatggtgcgtggtgtttcagagctttatctatcaatgatttttgatacctcttatcatatgtatccacaagttttcgagaacaagaaactagttaagctggaattatctggatttgatattcgttgcttggatgggagcattttcttaccaatgcttaaaactctcgttcttgaaaatgtttcgttgtcttctgataagtttgagattcttctccatgctttgcctgcgcttgaggaattagtcatgaatcatatatactggaaagaattggatgtgaatgtgcatgtatctgtatcaagtgcaagcctcaagaccctaacaataaaatgcatcgtttgtccacacactatgtcatttgatacacctagtcttgattacttatcttactctgattatgccatgggagattatcccgtagctgaaatggaaaact

SEQ ID NO: 168912 - DNA, 821 bp, Arabidopsis thaliana landsberg
gtaagttcacgtatggccagtaatactttgaaagagatgaatagtcttcatgtaactgagaagataagtgactgtaaagctagcttgaccaagccatgtgttggtaaaatgaatggaaaatctgaagatagaccattaccaaactctgcctccttggattccagtgattctaaagttgtagaagcagagaaacccgagccagagatagctattgtggaagttgaatatattgaatctgaaaacttggataatgtagacgatgctgatgcagttctgaaggtatgtgcttctgtcttgtgattacatcaattcccattagtatcataactgtgatgaatttgttgtatctgtctattttagagatttggaactacattgtttacgccattaagaatctgtttggtcttattgtttcagtctgttttagctggactagagtccaaggactggatttcactctgtgatgctcttaataacgttcgccgactttcgatattccacaaggaagaaatgatgcatatgctgtaagctttgttctctatgctgatgtttctaaataattgtctcttaaagtagattggaaaatgcaagtctcaccatatcccattaacagtgaaaaagtgataccacttgtcgtgaaatcactgaaaaatccaagaagtgcggtgtgtaaaacggcatgcatgacatctgcagatatcttcagtgcatataataatcatataacagatctgttggagcctctggtaacttttctatctttgctatattctttcactgtaaactgcgaactttacttgttcttacagctggttcatacc

SEQ ID NO: 168913 - DNA, 1304 bp, Arabidopsis thaliana landsberg
ctgactgcaaaatcttaatctttacaatattttggtaggtggtggacggaattagaccatacatcaaaccttccaccaaacttcagagagagaactgtagagacatggtttgcagcattgatgatgtacttcgagccacaattttcacttgggagaattatgtcggctaagttatacttagtaataacatttctagacgacgcttgcgatacttatggttcaatttctgaagttgaaagcctggccgattgtttggaaaggtaccttaactatatctattgcaatgattgaatcacactaaacaattaaatatgagtggagtgtttgataaccaatgttttgtgatatatgaacagatgggatccagattacatggaaaatcttcaaggtcacatgaagactgccttcaaatttgtgatgtatctttttaaagagtatgaagaaatactaaggtcacaaggaagatcttttgtgttggagaaaatgatagaagaggtgattacttaaaaaaattattattcatgggatggtaataacttgtaacatgtttaattttttttggtaagcagttcaagattattgctaggaaaaacctcgaacttgtcaaatgggcacgtggaggtcatgttcctagctttgatgagtatataagaatggtggagccaagaaaggtacatatgcaaccatagcatgttccatcatgggacttggagagattggtaagaaggaagcttttgagtggctaatatctagaccaaagctcgttcggattttaggtgcaaagacccgtctcatggatgacatagccgactttgaggtactagttttcagtatgtttggtttttttattgcttaaaatttgacattatatataagaatactataccaattaggccatgaaatttcaaacaatgtggcgcataaattttataaaatatatggactgttttagtcaatttcattattctcttcgcatagattatgttgaaagttttggtataaatcatcaggaggacatggaaaaaggttacactgcaaatgcactcaactattacatgaacgaacacggagttacaaaagaagaagccagtagagaacttgaaaagatgaatggagatatgaacaagatcgtaaacgaagaatgcttgaagataactaccatgccacgccgaattcttatgcaatccgtcaattatgcacgttcattggatgttctctatactgcggatgatgtttacaaccaccgggaaggaaaactcaaagagtatatgaggcttttgctcgtagatcctatacttctttag

SEQ ID NO: 168914 - DNA, 2462 bp, Arabidopsis thaliana landsberg
atgactaagtttcggatcatgttctttgaagaagattttgcttgtcacaagagagatctgagttgtgtcacaaagcaatctgtatccgactataaacccatagtctctcgaatcctagatgatgctctactccctatagagcttctcgtgccggcgagaatcacagctttgatttcttcatcaacatcactatgtcgatgcacactgaccaccatgttttccatcgatttgttcgtggaagatcgttcgactaaccgtgatctcacatgtgataaaacgcaatctagtctttgtctcaaatctctcgtggaatcattgttgatttactttatctattttgttttgacattgaggaatgcctttctttttgttgtcttaaacctttggagctttgccttttatcgccttgtagttggattatttgaatgagtgaataaatataagaggaatatttccttattaatcagataaagtatcaattcctaatttctgctactctacttgattcttattttactctacatagaaatataagaaagattttttttaagaaatacaatctaagcaattttccttactattttcactttaattctccaaagaaaaaaatatagaaatacatacctaatatagttcttcctaacatatttcttctaaatatacacctaaacaaaatctaatgcaaccaaatattttcaaagttgctttcaattttatatcatagatgatgtgatcatggaaagcacaaaggacttggaatttgatcaagagcttgtagccgaggaagagctgaagcagatgagcagcttgaacctgaagagcattttgaagcagaaaatgtacttatagcggagaaagagtatgggaaagatgttatcttaacctcattggttttgatacatgatcatcaaatgggcatgtgtctcatttgtactctttttcccttgtcaagttttgtcccaatgggtttttttcataaggtttttaatgaggcaaatgattcacattcaaatcacccatttgatgatccaaaccatggtataactttcagaagttggtctcaaggaatatctatcaagtccaagtcattttatgcccattacaagcccaagaagagcccaaaccaagtggttaatttatggtcaagaggagtgacgaaaatggaagtttaagggtcatctttaaagtcaaagagtcttttctattcaaattctatctttaatattatgttgtgtttctaggcagccttggagtatgttccaagacttgtctctttctcttcttttcttcttctctttataaactcatgtaatctcttatgagaacccatctatctttttatcaaaaactctcttttaaaaatagatcatagatccatttttgtatgtcgaattttgatcttttctcaacttatcaaaaggcttttccgcatccttttgtggcgtcattcaatccatcatctcgtctttgagtcgtgtgtcgtctctatttcgagaatatccactccagatcttccaagtgccgaaattgggattgattcctcaccaggatcatatcatctaacaacaattgtcttgccaggataggtatgttattcagtaaatggcagattagtaaataatattaaggttgctgactaactcaaacagaaactaactagtaacagtcctctccgccttgtgcttaggtcaagacgaggtggcacactactactcagacctggacagaccgctgtgtatggcaccaatgaacacccccaaaataagtagagtcaacaacattgttaggggggagattgttgcaactgaggcacaagttaatgagttaaatacccatgttcgccggaggttggcagatatatatttgaaagaaacactagtgccaacagttttgtatgatagggacgccccaccatatttcgacgaccctggagaagaaggtaacacatgttaggatattatatttattagcatctatatgttagagtatctgataattgtggattaaaaatattatcctataagtcgggtatttatccagtaaaccttaacatatctctatctctgtaaatttcagattacttgcatcgagctctaaagtacgcagactatgaaggggtcgatatcttcatcggaagattgttcaagaacaaagaagcctgtgcagcaaatctagctattcatgcgattaggcaaaagtttaacttcattactgtcaaatcttgccccaacattgtactcgcggtgtgtgtgagtcatacatgtccgtggcgggtttatgcgaccaaactggaggacagtgaaaggttcgagataaagtgtgcaacccagcaacacacctgcagcgtagacgctagaggagatatccacaaacaagtgtcaacagcagtgatagggcaactcatgagaacaaagtaccttggtgttggaaaaggaacgacgacacgaactgagattaagtaa

SEQ ID NO: 168915 - DNA, 1360 bp, Arabidopsis thaliana landsberg
acccaaactttgctatcgattcttcttgtatggctactctgcatctccaggtcttttgcttctactcaaaacgacgacgttgatggaggtaaacgggttcagatccgggtcgggttggctttggattcgggctccttggaagggaagatagtgaaaaactctgattccatggctctttcctatttctacgctattcataatgattacaaaacaagactctctgtttcagtcagaaactctcatggagagcctcttcttgctcttgcttcaggtaacatactccattactcttgcacctctctatataaatcaccttttcctatttttgttttgtgattattcatacactcacaatctttgtgaatgaaacagttgtagatttgctgcaaacagaaggagtgcaagcaataattggcgggaactcgttgctagaagcgaagcttttggcggaacttggagagaaagctagggttcctgtgatttcacttaactctcccatgtcattgtcattgagcaaatacactcacttgatccaaaccacacataactctgcctctgaggttaaaggaattacagctttcctccatgggtctgattggaccagtgttgctcttgttttagaagaactcgatgaaaggagagagagtatgcattttatggtggaccatttccatgagaacaacgttcatgtacagtccaaggttgcttttagtgtcacttcgagtgaggattctttgatggatcgattacgggagcttaaggacttgggaacaactgtctttgttgttcacttgtctgaagttattgcaactcgtctcttcccatgtgctgagaaattagggatgatgggtgaagggtttgcttggattcttacttccagaagcatgagcagttttcatgatcagttcattgacgatttaacaaaggaggcaatggaaggtgtggttggtttcaagtcttatataccaatgtcaaaagagcttcacaacttcactttgagatggagaaaaacactccctgttgaagaagttactgggagtgagattactcggttgagtatctctggcgtatgggctcatgatgtcgcttggagtctggcgagtgcagctgaagtgacaaggatgccaactgtgacatcaactctccttgaggccataaaagaaagcaggtttaagggtctgagtggtaactttcagttggatgatatgaagttgttatcagacaagtttgagattgtgaatatgataggatcaggtgagagaagggtaggattctggaattctaatggtagtttcagcaatagaagacaaaaatattctactcatgacaatctggaggccataatttggcccggtgggtg

SEQ ID NO: 168916 - DNA, 1475 bp, Arabidopsis thaliana landsberg
  unsure (1)..(1475): unsure at all n locations
ttccaagaaannnnnnnnnnnnnnnnnnnnnnnnnnnncttgcactgtctgttggagtaacaggtcatttaagtgataaaagttttcgacgtttaacttttgatatgatggtcgcttgggaggtgccttccgctgctagccagacattactcagtgtaagtaaggacttttgatttctgtgtctgtggtctattgagtcaagacttggtccttatattttcaaacatggaagcaggttgatgaagatccaaccgttggtttagaagccttctcacggattgctccagcagttccgataatagctgatgtgatcatatgtgagaatttgtttgggatactgacttccgtctcaaacagtgttcggcttcagttttatgtttatgacaagtatttgtatggacttgaaaggtaaatataatctttcatccttataaacattctccagaagaacattgtgaatctgaatccgggatcactttctagagcaataaagaagatgaagagccagtccgagtcatctttactttctggtgttcgatcaaaaggagaaaagattcttgagctcgatggtacagttactacccaaccagttcttgaacatattggaatatctacatggccaggtatgtttttctctgcacaagcaaagtgtgaaaattctcctctctatttggttgattgaatttagtattgttaaatgcaggtcgcttgattcttactgatcattcactatattttgaggctataaaggttgtatccttcgacacaccaaagcgttatagcctatctgatgatctgaaacaagtcattaaacccgagttaaccggtccttgggggactcggctttttgataaggccgtctcttacaagtctatttccctgtaaggaatgatgttattatgacttgttttgtattcacttcttttcttactggttcagttacatattttaatgtctcttgttctgtagaccagaaccagtagtaatggagttccctgagcttaagggtcacacacgaagagattactggctcgcgataatcctagaagttttatatgttcacagatacataaagaagttcaagatcaacactgtggcgaaagatgaagctatctcaaaagctgtcctcggcatattacgcgtgcaggccattcaagaagttggtttgacaaaccctgtgcgttacgagaatcttcttccgttcaatctctgcgatcagcttcctggtggagatcgtatattggagacgcttgcagagatgtcgagttctagagtacttgaccgaactgccaaagccaaagaaggtaacattatttacgtattatgcaaactgtaatttcctggttttacagaattctatgttgataaaaattcttttatcagggacattgcactcgatctcggcctcggatatggtttcgcagttgggtttggtgtttggagcaccatgtccaaagagcataagttggctactg

SEQ ID NO: 168917 - DNA, 783 bp, Arabidopsis thaliana landsberg
ctgcaggtcgactctagaggatcccctcggtcctcacgtccacttctctgggccaaagtctttccaagaaatccaaattgaattggtaagtgtttccgcaatcttcccatgtgttttagtgatgttcgttttactgtgtgatgtttagtctgttgatagtaatgaagattgtgatctgtgtttgcaagaagaaaaaatgggaagacctgtccctcttggtgaggtgttcatccagacacacacttagtcggatgggacttatgttgatcagaaggcagagaagattgctctggcgtatgagcaaaatgtgagagagaagttatctgaactagaagcagctgcttctgctgtgtctgatggctcttcacttcctcgggatctcacactagatgagtatacaaccatatttctcgaggtaagatgttctttgtctttttcagagtcttagagactttgaggatctgtcactaattatcttcctctttatttcttgcagtccacagaaagggatacaagaggcaatccttatggacttggatgtcttaaagaaactctaggcagtgccaaccgccaactccccggagactcaacctttaaagccttagaagaacggctgtaggaagctcagcggcaaattgaagagcaagctgcatataacgcccagcgccatgctgagattgctgcccgagaagaagagtcagcccgagtcacagctgagcaaaaggacaagctcaagcgtttgtccttagtcaagaagatatgtgacgtgaacgccattttttt

SEQ ID NO: 168918 - DNA, 2507 bp, Arabidopsis thaliana landsberg
atgtccaacaaggttcacgtagggaacattgagatggaggaaggtttgagcaagacgaagtggatggttctagaaccttctgagaagatcaagaagattccgaaaaggctttggagtgttggaaaagaagatccgaggagagtgatacatgcatttaaagtaggtcattccttgacactcgtttctttgctatatttcatggagaatctcttcaaaggcattggaagcaatgctatttgggcagtcatgactgtcgtcgtcgtcctcctcgagttctctgccggtaagttatatactatttattatttttactaagattgtataaatattcatttcacaatcaaaagtaaggttacacaaatgaatagcataacctatacatggtcccatgccaaaaaaaagtaaaagtttactaaacatggaagcatacacattcttgaatccaaaattagttcactccttaagcaaagatgctcttggaagaagaattgaatcaagatctaaagaatccctaaagtgaactgggaagagaaacaagagcgaaagagggtacatacagtggagggcttgacgataagcgagaaagtaatcctttcgatggcagcccgaggcagagaatcagctgcggaaccacacgagcggaatgaggcaggcaatgtttgccactctatcaagttcctcccgaagtcaatagcacgggcaaagcaacatcatgtccttaaccagccatactagcatcaccagccgctaagaccaaacccacatgaaccttaacctatttcgacgcttaacatggagcaaacacttatctgaagcagagatctaacatgagactgagccttagtgcaacaaggaaacaatgaacttggacgccaaagcagaaaacgagcacgacatgcccaagagatgcaaggagatactaaaggcattagcgatctaaggcagccctcaatcctttgatcaagtatagccttaaaatctccatcctagacgaaactcacaagaacagcctgctgaagcaaacctagtctcggacaagaagcaatatagtaagttatatactatatatctccttatatacatacatttattacaatcaacaataaacctactaattgatgtttaatttcattctaatggttataggagcggctgctacttatataagatttgtaccatacataaagaagaattacgattaatgtgttgtgatatttctcttgacgttcaatctataacggtgtcaagctgtcgagtagatagtgtgataaacatagcacacgtcacacgtacaatagattctacactatagctattggttgcggaatctgtcttttcatgagccttcttgtttttcctatttggtctggtgaagatctacacaagaccaccgtcggtaaactccaaggcctctctcgctctatagaaggtaattctcggaaatatcatttctatgatttgttaacattaacaccaaacttataattccaaaaatattacttaatttaatcttttttaatatatatatatataattgtgtttgtacgtatatagaatgtgtgaatgagttgaagagaaagagaaagaaaaaccagattcaaaaacggaatctactaaaggtatcaagctgttttggattctaaatcaactgatgaaacacttgtaagtctcatttttttatatatgatcactatttcaagattttgtttttggtaaaagatagaattatatgaaattaaaatggaactatttaggcattatatgcaaattgcaagttatatgaaagtttaagccatatttggagagacgtgttatgttgaggaaaaaaaaaacagagttaacatgttatgtcgtttctttctccgaaacagaaacatcgtagcgtttttgcactctactacaaacacaatatcaaagaaactaacagtattgatcatgggctcgtatttaaaagcccaccacaccatgggcttgttagcaacagaattgatttatttgaccgtactataaatatggaatttgaagtctctgtatttaaaaattcttttctctgaagcattttcaagcaaaagcaacaatggaggcgaacggtacgatttggagcaatgattctctcagaaactcatatgaatattctccagccatgcagaatcatcttaagcgggtaacgtcttcagaatcttccacgaaaagttgttgttgtttcttggaatgagatttgtgatacgattgattagtgaatcatttcgtttcaatgcaatagtttgttttgtgatcttgttttcagttttgtattgttcttggttctcatcgttgtgttattgatcgttgtgtttattagtgaaaagaaacacttctttgagaatgtttattggtgtttcttgattctatatatgttcgttaagtgtaggtctatctcacgttattctttgctcttcttgcgtctgcgattggagcttacattcacatggtctggaatatcggtggaaaagtcagtactcttggat

SEQ ID NO: 168919 - DNA, 617 bp, Arabidopsis thaliana landsberg
cagagaggtgactgaggagtttgcaaagcatgcaaagcagctagcggaagagatcctcggtttgctatccgaagggttagctaggtttacaacgtgagatgttgaagttagcattcggggacgatagtgctggttatcttatgaagatcaactattaccggccgtgtccagagccagattgggtcatgggaataaaagcccacactgatttcaatggactcacacttctcattcccattgaaattttcggacttcaagtgttcaaggaagaccgctggctcgatgtagattatatatatcccgcggttattatcatcatcggagatcagatcatggtaagtcatatgagttattataggtttcatttttcttttctttttttccaaaaataatgtttatagtttgactaaaaattttagatgagatttgttttgggatttgtagaagatgagcaacggaaggtacaacaatgtgttgcatagagccttgatggataaaaagaaaacgaggatgtcgtcggtggttcatatcaagcctccttatgatatggttgtgaagccatttcccaaactcaccagcggcgataatcctcccaagttcgagcggttttcgtacca

SEQ ID NO: 168920 - DNA, 1405 bp, Arabidopsis thaliana landsberg
gctctaaggataagatacggacaccaaaaatcaaagctgctgcttttcatctggctgccgctgctgctgccgctattgtaactcctactcatagtggtcactcttctccagttgctactcttccccgaagtggatcttctgatttgagcattgatgatagttttaacattgtagttgatccaaagaatgctcccaggtttttttttttttttgtcttcttctcctccgagccactacttaatcctgtgtcggttcataattgttgtaaatttcttcctagtctgcttgcaactgttacgcttctgatgtgccattattttattaaggtatgatggaatgatatttgaagctctttcaaacttgacggatgctaatggatctgatgtcagcgcaattttcaacttcattgaggttagacatatttttcagtgctctttatcctgacattggtcatcactgaaatacttatccactccgcaagctgcttattcagtaatgttgaacgcatagtcgaactaaatgagcctgataaacacctttgcattctgaacaaactacctaatcattgtaccatttaaagatgagaatgaacctttggttttagatacttttgcttatcaaaagattgaaattgcttgagtaatctctatttttatacttgagtaatctctattcatatcagttagagctcccaatgtaaagttttatactattcaactattctttgctgttatagattgatcggagttattgcatagaagtccactatgattatctttaagagataacatagctctattaggttcagtatccgttattattgtcttagcagctaacctgtcatgatcaagttcatgataatagtctggtatgtgtatagcagcaacgacaagaagtgccaccaaatttcaggaggatgcttagttcaagattgaggaggcttgcagctcagggaaagcttgaaaaggttagccacttaaaatcagtaagtcttgaaagccttgcttgaacaagtgtgcaacctttcttgtggtctgtgttgtttcctcattcctgctttttttttttttaatgttttgttccttcaacaatgcaacaatacacacaacagacacagaacttctataagatgaatgataatagcttggtacaaagaacaccacatgtagcgagaccaaaagagagcaacacgaaatcccggcagcagacaaacagtcagggaccctctatttcacagcagattgttgaagcttcaataacagcagcttataagctcgtagaagtagagaacaaattagatgtgtcgaaaggagctgcagaagagatagagagactgatgaaactggcagaagaggctgatgagatgctagtgatagcgagagagatgcacgaagaatgtaaataa

SEQ ID NO: 168921 - DNA, 665 bp, Arabidopsis thaliana landsberg
agatctacaaatatggagagattttcactaaggtttgtgctaatgatggtgagcatcatcctcacgttatcgatttgtcaagcacaactttctccaacattctacgatcaatcgtgtcggaatgctctttataagatcagatcctccgttagaacggccatcgctcgtgagagaagaatggccgcgtctctaatccgcatgcacttccatgactgttttgttcatgtaagtttttattcttctaaatactaattccacatttttatagaaccttacccaatcatttaataatagttttgtgtatgtttaggggtgtgacgcgtcgatattgctcgagggtacatcaacgatagagagtgaacgagatgcattgccaaacttcaaatcagtaagaggttttgaagtcatagatacagccaaatccgaagtcgagaaagtttgttccggcattgtttcttgcgctgatatcatagcggttgcggcaagagacgcttctgaatacgtatgtttgtgattatatatgaatatacccaatatcctttatatatataatccatgcatatgtataacaactctccaaccaatacttaggtggtaggtccaaaatgggcagtgaaagtcggaagacgagattcgacagctgcgttcaaggctctagcaaatag

SEQ ID NO: 168922 - DNA, 1694 bp, Arabidopsis thaliana landsberg
gaacgagcgcttcgattgtttcacggcgtttcttgcccctccagctcagaatcttcagatcaccgaccccaattcttcatcgacatgcacactagcaaacctacaataagggaggtttatgagaggaagaggcttgccgcaaaggagaagcgtgtcgcgaaagagaaacatgctgccgagagtgtgaatgtcgatcccgatacagccagggattgggaagttactcttgaggttgttttgcctgctgcgttggagcctgctgaggtgggtgataccggcttatctctgacagatccgccggttgaagtagctagtcaagcgatcgtcgcgattccgaccggcgacaaggcctcgggaaaacgtccacaggttgacgactccaaggagaagaaaaggaagaagaagaagaagaagaagaagacagcgaaaagggaggacaagcctcctatttttgaggataaggctgcttcggcgaatctcctcagaaagtgcgcgagtagcctacttccggcttcagatactctactggagtctagaaagtacgctgagacggcgtcacattttctaagggtaagtgccttaatcattttagctacttggcgcgttctctgagctattatgaacgtggatgtctgtctttttgtttcaggccgttggttagatgaatgggatggtccagtcctataactcggcaatgcaaaacaatctggaggcggttaataagttggttgaagctgaggccagggcgaaagaggtcgagcaggcgagtgacgtggtgatctcccaggccatcgagggaaaattggcgagagaagaggctgagaaagaagccttggtcaataaggagaatgccatcaagatggtcgagcgcgacctgaagatggactctgaggttgttcgttgtaggcgacttctcgccgaggcgagaggacttaggaacatgaaagtggctcgggctatgcaaacagcaaggcgagaacttcggaggccttcaccgccaagttcagggtggccgaggagaagatgtcgctcttcgaggatgctaacgaccagtttatgtatttgtcccaagcgtgggctaatccacaactgatcaaggcgcttgaagatggcagatctttggcgaccgagaaaaaacaggtcgaggagtggctgaaggatttcgccgatgcagaggtcaaccttgttcgtctcacatctgaactgaaggaagagctcaaagcccctgctcctgaaccagctcctctaagccctcgaggtaatagatcgatcgagactcttgcggattaggtggaggtcaccgatcagtctggattgtacttgcctgccgtaggcattctcctgatcgaacagcttgagtaaatattcgtggtaggacggcttttatcttaagactttgtgcctggacggttttatccatatttctatagaacctatgcctggatggctttatccacttatttttctttaagaacttggtttcgctcctatgaccctgatgcattctatttgtttgttgtaatctaatcgtgtcgttctttcggagaattgcttgctaattccgtagcgctttattggttagggccagtgtgaatgaactgggtttaagtttttagtgaaaattgtttcggttgcgactcgatccgactcactctttggtagcgtttagcaacgagctagggtaccggtgttaa

SEQ ID NO: 168923 - DNA, 558 bp, Arabidopsis thaliana landsberg; identical to SEQ ID NO: 8412
  unsure (1)..(558): unsure at all n locations

SEQ ID NO: 168924 - DNA, 745 bp, Arabidopsis thaliana landsberg
tcatgcatctaaactatgtttggtttcccaatgatgccactttcgagagacttgtctcttcttgccctgctttagaagacttaaagattgatgtattatggaatgatggaagagtttatcgagtgaaatctcgttcgcttaagagactccgtttactacgaagttctactatggtgtttgattctgttccgggtgttgttattgatgctcctctaatatgctatttgagaatcaatgatcgtgtatcagaaacctatatattaaatgatctggagtccaatgccaagttagatatacatctagactttggttctgaagattttggcgaaccaagcgtttcatcgaggagaagtcgcatccgtagttttctgcccgcaatatcgaaggtcatgggtttgaaaatatctgagaacactttcaaggtatatatataatatgttttgaacatgcacatttttgttgtaatgaatagtttctaacccacaagtcctctgtttggtttcaggtcattcatcactattccaatttagcacaactacctcaatttgataacacgtcccgcttgcacgttactctccgtgtatccgaattaaaatggttgccgaattttcttgagtgttgcccgaatctgaaatccctcattgtggcttttaatggtgactttgagaagatgggttctgaggagatgaatcaaataagtttccttctccggatgaaaaggattgtggatatggggatattcatg

SEQ ID NO: 168925 - DNA, 449 bp, Arabidopsis thaliana landsberg
attgatgatcagatcaacatatgcttaacttaagtacatcttgtcccaagtaggagtaagcaaggacgggcaagtacggcacttcttccaccggccatcaaaggcttatacgaccggaacacgaaaacgaagaaaagtgagcacagatgaggaaggccatgaaacaaggtggcacaaaacaggcaagactcgacctgttttgtctcaatcaggagaaaccggtttcaagaagatcctagtgctctacaccaactatggtcgccagaagaagcctgagaagacgaattgggtgatgcatcagtatcatttaggtagcagcgaggacgaaaaagacggtgaaccagtcctctctaaagtcttctaccaaacacagcctatgcaatgcggttcgatggaacctaaaccgaaaaatctcgtaaacctaaacccggttagttatgaaaatattc

SEQ ID NO: 168926 - DNA, 3135 bp, Arabidopsis thaliana landsberg
atggatatgataaaaccagattttcaacaaatccgaagagataagtttagagttgagcaaatgaatgattttcccaacacttggactcagcagcagcatcagaacatcagaattcccaacaaccttgatttgattggtatcttacagaaccagatttccgtaccggttcaaaccgatttgtatcaagattctgccgcaacctttatgaacatgcctcagtcgatacatagagacccacaaggccctagtaattggagaatcagtgatttgtcacaacctagtaccgtgaatcacggatatgatcaggctggtattaggccaaacaacgttgcagatttgttgtccgatcatttcagttctcgaaaccaaatattggaccgtcctctttatgtcggccgggactctattcctcagtctagcatgattaggagaagtgaagtttcttgtctagatgataatcaaaagggttgtgtaacggtggcttgttcgggtactggtaatgagattttaaggagcagttatgatcaaggttcttcttctggaagttaccgaggagaattttcgtttctcccaagtttggagaatcaatcagttgcgcacaatgcaagcaactggaaccacggaccagtgaatgttactgccacttctcatactaataataagaaaggctttccactctcacttttgtctgatatccctccatctagagacgttggaaatgcagctgttttgtcaacaatgaatattcacggcccgctcgggcctttcacgggatatgcatcgatactgaagagttcgaggttcttggagccggctcagaaaatgttagaagagttttgtatctcttatgcttcaaagattattagaagtgaatctacttccatggaggatgatgatgatgatgatgataacttgtcagggtttagtagttcttctgagccattagaacccaagaatagactaaagaaagcaaaacttctctttctgcaagaagaggtttgtgaaactatattcttacacagtcatgttttaatctatagattcgttacaaaactaacatgttataacttgtgacattgaaaaggtttgcaagtggtacaaactatacaatcatcagttgcaaacagttatgtcttccttcaatacagtggctggtctaaacaccgcaacaccgtatatctcgttggctctcaaacggacttcacgaagtttcaaggcccttagaaccgcaatagctgaacatgtgaagcaaatctcaagtcactcatcaaacggtaacaacaacaaccgattccaaaagaggcaaagatctttgattggtaacaatgtcgggtttgaatctcaacaacaacatatctggaggcctcaaaggggattgcccgaacgtgcagtggctgttcttagagcatggctctttgaccattttcttcatccgtaaagcctcacaatttttttgatgtaatttgattttatttgatatgatgttttgatgtgatttctcatatcctttattgctaatactgttattaagtaccccactgattctgataagcagatgctagccactcaaactggtctctctcgtaaccaggtagctcaattatgtaattctttgtttggtgaaacctttaaatatgcttgtctcttgaattattgctcttggccggtcctgttttcttctattggtttaaagcatgttgatgggacaataacctaatggttttagaatttcttactctcaaataacatcaatcttatatgttaaagtaaagcatgcatatatagaattagtctagattttatgaaagacaagtgcatgtgtaactaaaaactgaaattgttcaacgtgtaaatagaagattaacttttttcaaacatttccaccatgaaccatgtcaggacaaagagcgtctcattatcctcacatgcaaaaactctttagtatagacttcacctaattttaggtttggtttttgacaagatttgctgacttggtttcgtttttttttttaaaggtatcaaattggttcataaacgcccgtgtgcgattatggaaacctatggtggaagaaatacacacacttgagaccagagcaattaaaaatgcagatactagtcacaacattgagccatcaaatagaccgaatactgttagcagtccgagccatgaacaaacgctaacgggcctctccgggacaaaacggtcgaggttagagtacatggacatggtggggttcaatagagggaacgtgtcactcacgttagagcttaggcgtggtgtggacaatgttatccaaacgcagactcaggatcatcagtttggaactggaagccaaatgtttcatgactttgtgggttgaaaatcctctgcttttgtttcacctttatgtattttgggtagagtgaaaataacaaagttgtcttgaaatggttactcctaacttagggccacaaagttctctgatcacctttttagttattttttttgttaaagacctttttaattatttcttttatgttatactaagattaagatccgtcccttgtgggtttaaaatttttaagttaaattaaacttaacaaaactttgatttttaaaattttattgtataacttgccaatttggctaataaggagaggcagtccaccagacaacgagtggaaagaatgatagggtgggtggcaccgagtgtgggctggatgaagttggtgaagttatccgagatatagctggaggttcgtgtaaggatttactctaaatattggtcgttgttcggctctcttggcagaattgtggggggaggaggggagggggttattatgacatgtacatcgcgtgggagaggaaagcgaactttttggaagtggaagttaatcggaggtggcggttggatttctcacgacatgccacatccgctgtctttcttggtatgtttgcgccatgacggtatatattcaagggactgaattgtccggatttctcatgtgtataagaaagctaattaactcgcaaatgataattaactatgctattttttacagctaggttatcattttgattatgttccgccaattttagagacacttgttagtgataacaagactgtgaatacgtgtcctagacaaatttttata

SEQ ID NO: 168927 - DNA, 2698 bp, Arabidopsis thaliana landsberg
atgatctcggctttctgcaaggacaagaagttaacagaagcatatgaccttctatcagaaatggaggagaaaggactagagcctgatcggtttacatacaacagtattatcagtttgcttatggaagatggtaagctgagtgaagcagatgaattgttaaagaaattttccggaaagtttggatcgatgaagcgggatttacaggtagagacagagaaaaatccagcaacaagtgaatcaaaggaggaacttaacactgaagctattgcttattcagatgtaatagatgaactttgtagtagaggaagattaaaggagcattctagatcttacactagttgaaggagaaactccttttttgtggtttcttttttgtatttcgattttctcaaagcatacttattacttgttacagaaagacattgtaatgtagtttttatgtgatgatgatgattattatgtttagattgattaaaaaattgtgtattaacatatcaggaaactttcaaaatgtcgtgtactcgtacgtataatattttactgacaacaaaagagagaaaaaaacgatctgaattccttttttgtaatcggtgaccggttcggaaggctggaccgatcgggttaccgaatttttttataattttggtgaattgtttccatttttgggtttaaaatcgagcctaaccgtgacaaattctccaaaaactaccgaaatatatcaaaactaccaaacataaaccgaaattacccacataaaccgatattgttttttaaaccgaacttgggttccaattgagaattattttctcgaaacagaacttcatcgttctttctcaaacgtcaacggtcaatgaataggccatctccatttttgtacatcttctgagcttcaacttttctcgctgctctctatctcatggcttcttcttcatcgtctcgcacctggaattaccgagtctttgcgagcttccacggaccagacgtccgtaaaagctttctgagtcattttcgcaaacagttcatctgcaatgggattacaatgttcgatgatcaaaagatcgtgagaagtcaaaccatcgctccttcactcacgcaagggattagagaatcgaagatctcgatcgtcattctctccaagaactatgcttcttctacttggtgtttgaatgagctcctggagattttgaagtgcagggaagatattgggcaaattgtgatgactgtattctacggagtagatccatctgatgtccgcaaacaaaccggtgaatttggaacagttttcaataaaacttgtgctcgtagaacagagaaagagaggcgaaattggagccaagctttgaatgttgtgggaaacatagccggagaacacttccttaactggtttgtgattaatcaaaaatgatacttctatgatttgatgggaacaatatttatgtttctcttttgttagggacaatgaagcggagatgatcgagaaaattgcaagagatgtatcggaaaaactgaatatgacaccgtctagtgattttgatggcatggttgggattgaagctcatttgaaggagatggaggttttgctagactttgattatgatggagttaagattgtaggaatctttggtcctgcaggtattggtaagacaactattgcgagagctttgcatagcggactctctagcagttttcagcttacttgttttatggagaatattaggggaagctataatagtggtcttgacgagtatggtttgaagctgcgattacaagaacaacttctttccaaagttctaaaccaagatggtataaggataaaccatttaggtgcgattccagaaaggttatgtgaccaaaaagttcttatcattcttgatgatgtggaggatttgcagcaacttgaggctttggctaatgaaactaactggtttggtcctggaagcaggattattgtaaccacggaggatcaagagcttttggagcaacatgatattaacaataaatatcatgttgattttccaactagagaagaagcttgtaagatcttttgtacatatgctttcagaaggagctttgcaccatatggttttgagaagcttgcagaaagagtaacatggctttgtagcaaccttcctctaggtctccgtgtcatgggttcaactttacgcggaaagaaagaagatgactgggaaggtatattgcgtaggctagaaaatagccttgatcgaaagatcgatggagttcttagagtcggatacgaccatttatgtgaggacgatcagtttctatatctcctcattgcattcttcttcaactacgtcgacgatgatcatgtgaaagcaatgctcgttgaagatagtttggatgtcaaactcgggttgaaaacgctcgcgtataaatctctcatacaaatatcggcggaaggaaatatagtgatgcacaagttactacaacgagtgggtagagaagctattcaaagacaagagcccacgcaacggagaatcttgattgatgctcgtgagatttgcgatgtccttcgatatgggaaagtaagttgtattttcttgttctgttttattcatttttcccttacaagacctttgtaatgacattttttttgttctttgtgacatcagacatcagtgaagtgactataagtgatgacgcttttaaaagactgcatgatcttcgattcctcaaa

SEQ ID NO: 168928 - DNA, 561 bp, Arabidopsis thaliana landsberg
cgggtcgcatgcgcatcgtctcggccgatggcgatctctcggcgccgctgagtggagtgccgccggtgttcagccagggccagggtggcttgctgaacgtggtactggacccgcagttcgcgacaagccgtcgcgtctatttcagttacagcgaaccgcgcggcgaagatggcaatggcaccacggtggcctatgcggagcttgctggcgaccggctgcggaatctgaaggtgatcttccgccagcagccggcgatgaaaagcgacaagcattttggctcacgcctggcgtttgctccggatggcacgttgttcatcaccactggcgaacgctactacggcatgcagcaagcgcagacgctggacaacgatctgggcaagatcatccgtctcgaccgcgaaggcgaggtgccttccggcaatccgttcatcgaccgtccggatgcgcggccggagttgtggtcctacgggcatcgcaatgtgcagggtgccgcgaacaataaatggagcggcaggctgtggaccgaagaacatgggccgcagggtggtacgaaataaatgt

SEQ ID NO: 168929 - DNA, 461 bp, Arabidopsis thaliana landsberg
ttctcctcttcccttccacaactcctggagagccgtgggatctcaagcttgctgatttcggttcatccaaagagcctgacaccgatcatgatcctacgtcccttggtactgttgagtacatgcccccggactcttttgtaccaaacggactgatcgatccgggacatatcgatccagcccttgatatagatcctctagggtgtgcggttaatgagatgtttggagctatacctatccaggagtactttgacgaatttgacgtatggcatttgcgtgacgtaatctctccgcaggctcaagatttcttaaggcgatgcgatcacatgcgttcacgcaggcccaccgcgactgagctcttgaaacatccttttattacacaaggacttccatcgccaacaccagaagacaacaaggagatatctaggtcggtgactccaagtttctcgaagcttcttttgacc

SEQ ID NO: 168930 - DNA, 1676 bp, Arabidopsis thaliana landsberg
aacgaaaccgaaaccgagagaagaaagtagtgaaaatggtgagaacctccgagaaaagagaagaaaatattactcttgccattgacagagacaaagagagccaaaacgcgttgaaatgggcggttagcaatcttcttagccgaggacagactcttactcttcttcatgttaaactcaaacaaccctcctctcttccctattctggtatgacgacaaagcctatattttaacattagttaacttctttgtttgaggcttaatattcatattaacataaggttgattcaatgcaggatctaactttagtaagccaggcgatgatccgtcagaattgtttcttccttttcgttgctactgtgctagaaaagatgtgcgttttcggcttttcgcttcactttttttatcttgtcaagcatttcatttcatttgactgacattatcttgttactgtggcagatcaactgccaagatgtggttgtggaggacgttagtgcggctaaaggaatagttgactacgtgcaacagaatgcaatcgagactttaatactcggttcttcgaagatgactcttttaaggtgattaggcaaacgcttttctccttacttaagactaaatctgagcatccttatatatatgttttatttgatagaaggttcaaagcagcggatgtttcaagcactgtcatgaaaaaggcaccgagtttctgtacagtatatgttatctctaaagggaaaatctcgtctctgagatcagctacaagttcacctccccattccaatatgccatctatgcgacatcattcacacgctcagacgagcaatatgaatggtatatatgaccaagttttttcaaggacatcatataagctaaaatagcttttccttaactgatcaaatgtctttcatgttgcagttgaaaggaggcaacaaacaatgcaaagaacacatgatgagatcaagatagagatcaagtatgtttcttacctacataagttgttttatttttttccataagttacattttacttatggtaaacacacatgttgagtaggtctcccttttcgagaagaggatacgaaggcgtttaccagccctcaataacagactctgatatatcatttgtgagtagtggaagaccgagtgtggatcagatgtttccttccttgtatgacgatgtggatgttccacggctctcagtcacctctgagtatggagaaaatcgattgagttttgctacaacatactcaaagcagtccatagatcttggctcaccatatgcaccaaactcttcaacctcatttgaaagtgggagacaatcattttcactacagggccaagtattttactactctaagaccagatatgtgcacatgagaaatgtttttttcatttgtttaattctaaaatctgacaggatgagcttgaaaccgagatgagaaggctgaagatggagctaaagcatacaatggaaatgtataacagtgcctgcaaggaagcaatctctgcaaagaaagcggtatgtatgagttttcaacaatcaaaagctaatttttctgtcagattctcaccaaacttataatccaatacatttctttctcaggctaacgagttactcaagtggaaagcagagaaggaacataaattagaagaagtgagactttccaaggaagcagcga

SEQ ID NO: 168931 - DNA, 1165 bp, Arabidopsis thaliana landsberg
  unsure (1)..(1165): unsure at all n locations
aaaactcatggctttgtcgaatggcatnggacattcttttactttaatggggctgctactacggcttctgttggggaagctgcggatagaaaactgatgggacttatctgcgatgcgaaaggtgattatgaagttgcgctcgagcattatgttttagcgagcatggcaatgtcatctcagaaccatagagaagatgttgctgctgtagattgcagtattggtgatgcttacatgtctctatctcggtttgatgaagcgatattcgcataccaaaaggctttagctgtgtttaagcaagcaaaaggtgagactcattcctctgttgctttggtttacgttaggcttgctgacttgtacaacaagattgggaaaacacgcgattccaaatcgtactgcgaaaacgctcttaagatttacctaaaaccgactccgggaactcctatggaagaggttgctacaggttttatagagatttctgcgatatatcagtcaatgaacgaacttgatcaatctcttaagttgttgagacgggcgttgaagatatatgcaaacgctccaggtcaacagaacacgattgcaggtattgaagctcaaatgggtgtgattacttacatgatggggaattactccgagtcctacgacatattcaagagcgcgatatcaaagttccgcaatagcggagagaaaaaaaccgctcttttcgggattgctttgaatcagatgggactagcttgcgttcagcttttcaagatcaacgaagctgcagatttgtttgaagaagcgaaaactattcttgagaaagagtatggaccgtaccatcccgatacattagcggtttacagtaacctcgccggaacatacgacgcaatgggaaggtaaatttggaacttaaaacacattttcttgctaggttatgtcttttgggatttcctgcggtacaagcaatgtgtttacttgccttacaggttagatgatgctatcgagatattcgagtatgttgtgggtacaagggacgagaagctcgggacggcgaatcccgaggttgaggacgagaagctgaggcttgctgcgttgttgtaagaagctggaagacggaaggagtaatagaaacagtgcacttcttacccttttggacaacaaccctgaaattgcaatatggacagag

SEQ ID NO: 168932 - DNA, 1368 bp, Arabidopsis thaliana landsberg
gttattgtggctgccatattaaaaagaaagcttgcgtctccctctgacccaagaatgctccatggagaccaccatgtcgcaaacgacgtcgtaccctcctccactttaccacacactcctcgtttcaggtcatagtcatacattgaactcattatctcactttttctatcattcatgtttcactttttggtcattttttgatttgatcatttatagatagttatatatattttcttattagactgaacaaaaacttcaatcgaaagattccaaacattggtattttgtttacatttccgtccacgtgtaatgtctcctttttttttttttttttaatttaacaaaaactttaaaggttgtaatcaaaatatcatttctaaatcgtaaaggcgtaagttaaaggaaatattaagactttttaaaaatgttacaatgtagtttttatataaaaaaatgtctcatgtaatcagatatacgcatgaaatccgacaagaataataaaatctaaggattgtatttgaaaatttgggcaggttcttggacaaggcatgcatcaaaatccaagacacaaacacaaaggagagtccatggaggctatgcacagtaacacaagtagagcaagtaaaaaccctaatctcacttgtccctatctttgcaagcaccatagtcttcaacaccatcttggcacagctccaaacgttttcagtccaacaaggaagttccatgaacactcgtctctcaaattccttccacatccctccggcttcactccaggccatcccttacataatgctcatattccttgtccctctctacgactctttcttagtcccttttgcacgtaagctcacaggacataactcaggtattcctccattgactcggataggaattggactcttcctctccactttctccatggtttcagctgccatgctcgagaagaaacgtagagactcttcggttcttgacggtagaatcttgagtatcttctggatcacgccacagttcttgatctttggtatctccgagatgtttacagctgttggattaatcgagtttttttacaagcaatctgcaaagggcatggaatcattcttgatggcattgacttattgttcctactcctttgggttttacttcagctcggtgctcgtttcggtcgtaaacaagatcacttccacgtcagtcgactctaaagggtggctcggggagaacgacctaaataaggacaggctcgatctattttactggcttttagcggttcttaatcttttgaactttcttagctatctcttttggtctcgttggaacattaagtcttcgagacgcaacaacactaatgttgtgggtgatgagaacaattag

SEQ ID NO: 168933 - DNA, 902 bp, Arabidopsis thaliana landsberg
gagagcaccaggagaggagttaggggagttcttcaagatcttctttgattgagcggaaacaatgagcgtagacgatgcgagcgagtacatatacaccttatttctgcttgctaacgaaacaacaccacgtattcttgcagctacaataaagctcataagtgacaaccctaaagtcatgaaggagttgcatagagagcatgagggaattgtccggggtaagactgagaaggagaccagcataacatgggaagagtacaaatctatgacatttacccaaatggtgagtttaaatcaatataagattggctaagacatagtaagtagctcatacaaatatggttgtttgttttaggtgatcaatgagtcccttaggatcacaagcacggcgccaacagtatttagaataattgatcatgagttccaagttggttcttataaaattccagctggttggatcttcatgggctatccaaacaatcatttcaatccaaaaacttacgatgaccctttagtattcaatccatggcgttgggaggtgaatgtcatatgatcttttacttatttactacaaatttagtaaaccaattcatagaatttttaagctaaatgtttagcgaaaagacttgggcgcgatcgtctctcggacttacattccctttggtgctggctctagacaatgtgtagcagctgagtttgctaagctgcaaatgaccatttttatccatcatttgtctagacacaggttcattttcataaactaatgattgtgattagatttcatttttgcttgcaaccaaagttttaactcacatgtaatataccttatatatggtttgaaggtggtcaatgaagataggaaccacaatacttcgaatcgttgtactcatgtttccaaatggatg

SEQ ID NO: 168934 - DNA, 903 bp, Arabidopsis thaliana landsberg
ctcgtccttcctcgccggatcgattccttagatcggcttcgacttgtctccggtcaccggtcgagcctcaggagtacgaggagctcaggcggcccctaccgtccgatcagctaacgccgtcatgctcgcatgtcctcttccgccattcattcgccaacaccatcaacagacctccttttaccactccatacactcccccttccagctgcatatcgccgccgtggtcttatgttgtacttgacctacgcgccgcctcgagtggcgatcagtacgatcgtatctccggcttgtggctcggcggagtggagctacttcgcaccagtacggcggagccgagtccatccggaatcttctggaatgttcggaaagacgtctctaggtattcctcgctctttatgagatccgatttaaatgtcacaatgatgcttgagaacatagtcaacgatgtttacacaggcatctatcatatcaatgtcaccctcatcttctacgaattcaatcctattgcgtcaaatttgaagattagtaacagattagggtttgtggattcccagaaaagagatcaaacccctgcggatttgataattccggtatgtgacggagggaacagagggttctggttcatgatcgagaaccccagagaaacttactcaaaaggaattcaaattccgtccaacactcgtcagattgtgctggaactatatgtatcgttccatggaaacgatgagttctggtattcaaacccgccaaattcttatatcagaacgaacaatctagcaaccgggcgtggcaatggtgcataccgggaagtttttgttaagatagatgggagatacgtgggatccgaggtgccatttccggtgatctttactggtggaatcaatcccttgttctgggaaccag

SEQ ID NO: 168935 - DNA, 1910 bp, Arabidopsis thaliana landsberg
tttgttagtgggatggggtatgtctctatggtttaaatggattgtcttcctgatgatcttcttgtccaaatgttgtcctttcttcccacgaaacaagccgtgtcaacctctcttctctccaagaggtggaggactatgtttactttaacacataatcttgtggttgacacctccatctttttgcacaccaaacggaagagtttcatggatttcgtggatagaacattggctttgcaaggctgtaaccatataaagaagttctcacataatcttagagtaagatgtgaagataaacatgacttgcaccactggatacgtagttccctgaaacatggtgtctctgagcttcatctagccacaaactctatgtggctttttgttctcccatccaaagtcttctccagcacaacactgcttaaactgtcattgggaacaagttcttgcttccttagtgttccttcggatacatatcttccagcacttaaggttctcttccttgactcagtgtggtttgactttcatcaattcgctaatgttttttttcctgcttgtcctgcacttgaggactttgcaatacatatcaagtcattcaggaggaaagcaagttattatatccagcaaaaccaaatagcgttgtccaaacctaaaaattatggttctcttgatatgaagcaaacttactttatatgtatgactgatgcatgaatattaaaattagtctcgttcctcttgatgcttcaggatttagattgttacacatttaggaccatccgtttgtagggattcgaattccctcaaataaccaaataaagatgttatgtgtcatgcagtgcagaggaagtgaaaacgagcttgaacatataagccatttctcactgaaaatggagtttcttgaagtgctaaaagtttacgttgcacttacaatggatgacaccaaaaaggtggaactcacaaaggaactgttgaagcttcccatatcctcatccaagctcattatacaagtcatgtgatcattatgttattccaaaattcaaatagtaaggtttcttgttttagtgatttataatttattatttgggtgaatcaaatagtaagttaattttctgattttttcatagttgtttcgttaggtctttttaaactccacatagttcatcaacaaaatccttctcagttttcagccaaaaacaactatgtttattttcttataatgagaagtatcaagagtaaacttgggtttctctgaactttgagcccttaaaaaacagtgaaaaagtttttataggaaaaaacctggacccaaaaacccgaaccaaaaccgacccaaaaaccggttcagggcgggtacgaacattatacatatacaatcttactgtatatttaatatttgaactaaatacatttatatccaaatatccaaaatgaattaccaaaaactaaatgcatttgtatttatatgcaagatacttataatttttttggatattgagacaaaattttggtttttttgggtaaattttggtattagggtaaaattttcggatattttggtgaatttttggctacttgggtaaaaacttcgggtatttggataaaatttcgtgtatttgaataaagtttcaactataaggatataaaatatctgaacccgaaggatacctaattttttcgagtattcagcagttttgaaattatatacccgaaccgacacgaacccgattagacctgaaccaaaaccaaaccgatactttagatttaccctattaaatgctaaacttctttactcgaaagacacatacccgatcggattttacccgaacctgaccagcatacccgaatacccagccctaatttcagtaattaaagagaaagaaacccaaagcataatagcgactgagtatatcatgtaa

SEQ ID NO: 168936 - DNA, 1357 bp, Arabidopsis thaliana landsberg; identical to SEQ ID NO: 33457

SEQ ID NO: 168937 - DNA, 775 bp, Arabidopsis thaliana landsberg
tctaaggaggaacattgactcaaagcattctcctttatgtttgcactgcgaaactacttatatgtatctgacataaggtgtgtgtgccttacaaatttcttccgatctgatttcgtgtacttatgctgcttccttcctctgagtgataaatcatgtggtcaccgaacttgcagtgaagttcgagttgagggtttggagacactggattatctagacaacttgattggtaaagaaagattcactgagcaagcagacgcgattacctttgacggggaggtgagtaatgtcagccattgttttccccttaatagtttcaaagaagagaaaaaaaaccaaagattgatatagagtcagtgtgctgtgcaggtcgatagagtgtacttgaacacaccaacaaagattgcggtcatagatcatgagcgaaagaggaccatcgagttgcgaaaggaaggcatgcccaatgcaggtaaaggataccatttgttcttcgtattttttttttatgaatgaaaccttttgagagttggtttctaatggattgagttggaaacgagcagttgtgtggaacccctgggacaaaaaggcaaagaccatagctgatatgggagatgaagattacaaaacaatgctttgtgtagattctggagtaatcgaacctctggtattgttaaagcctcgtgaagagtggaaaggcagacaagaactatccatcgtctcatcaagttactgcagcggacagcttgatccacgcaaggttctttacggagatatctga

SEQ ID NO: 168938 - DNA, 729 bp, Arabidopsis thaliana landsberg; identical to SEQ ID NO: 14791
  unsure (1)..(729): unsure at all n locations

SEQ ID NO: 168939 - DNA, 895 bp, Arabidopsis thaliana landsberg
  unsure (1)..(895): unsure at all n locations
atgaacccaacacagacacttttctctcccggcggtaactcgccggcgtcttctccggcgagtcatccatcttcactctttcctcaaatcaacaactgtcgaactataagagacctctctcaaatccatgccgttttcattaaatctggtcaaatgcgagacactctcgccgccgcagagattctccgattctgtgctacctccgatctccaccaccgtgaccttgactacgcacataagatctttaatcaaatgcctcaacgaaattgcttctcttggaatactataatcagaggtttcagtgagagtgacgaagacaaagctctgatcgcaatcacattattctacgagatgatgagtgatgagtttgttgaaccgaatcggtttacgtttccctctgttcttaaggcttgtgcgaaaactgggaagattcaagaaggtaagcagattcatggtttggctttgaagtatggatttggtggtgatgaatttgtgatgagtaatcttgttagaatgtatgtgatgtgtggttttatgaaagatgcttgtgtgttgttttataagaacattatagagaaagatatggtggtgatgactgatagaagaaagagagatggtgaaatagttttgtggaatgttatgattgatggttatatgagacttggtgattgtaaagctgcacggatgttgtttgataaaatgcgtcaaaggagcgttgtttcgtggaatacgatgatatcgggttattcgctgaacgggtttttcaaagatgctgttgaggtttttcgtgagatgaagaaaggggatattagcccgaattatgttactttggttagtgttctaactaaaatttcncggcttgggtctttagagttgggagtatggttgcgtttgt

SEQ ID NO: 168940 - DNA, 217 bp, Arabidopsis thaliana landsberg
cctggtgatcaggcacgtcggcgaccgcggcacgctgttcgacctggtccgcgccgcctaccacctgggccagcggcacgtcgcgctggagctcgcgccggaccacctgaagatcgaacccgacccggcgctggccgacctgctgcgcgccatgcacctggtggtgcacgagacctcggcgcccttcgaaccggaagccacccttgttccgcgtggg

SEQ ID NO: 168941 - DNA, 741 bp, Arabidopsis thaliana landsberg; identical to SEQ ID NO: 39002

SEQ ID NO: 168942 - DNA, 932 bp, Arabidopsis thaliana landsberg
atggagaatgtggtggtggttcgtgatggagatgaagaactctctctatttctggagatgcgaagacgcgagaagcttcaaggcgtttcttctctttcacaacctggtgagttttatccgatcttcgtttctctaaattttgacttcgatttctctgaatctgagctcctggaacctaaatctaagaataggactaagtaattatgcttaatctctgcttatttgaactagtttcgtgcatttggattcactttagagttgactggtcagctcttgttgctgatttcttgtcaacattttaatttcacggcgttttgttgtgtgtgtgtgctcgtggtgactgtagctatgattgatttgatcaagttgatgaatttttgacaggagcaaacagtgttgagaagactagcacaaagagtttggagcttttgaaaacgagctgtgttaagttgcgtaggagttctgttgaaaagttcttggactctgagaacgacaagtcagattatgagtggtaacttctttggttgttgtttttttcttgtggattttgagatgtttgtgtgttatctgtcacagtagagtttccaatgtgatgcttctaataggcttatatgtctgcatgactggtcacatctggttgccattggatagaatcttcgaatagagtactctcgttattgttgagatatattcatctagagatgatttgattccaggttacttgcggctcctgagatcacactactaggaggaaaagagaactcaatggttaaactcaaggagcctaaagctaagtccactgctttaaaacaacgggtgagaactagtccccttcttagccatcttttgtctttactaaagactctttagggaacatataagattgatatgtgtcatgttatttaaggtttttagccagtctatcctagact

SEQ ID NO: 168943 - DNA, 2709 bp, Arabidopsis thaliana landsberg
  unsure (1)..(2709): unsure at all n locations
acaaaggatgccccctcatagcatttgcacaagacgagaactttcaaattttttttagcttttggtgttgtcgacggcgagaccgaggcttcggggatttggttctttgacaatttatcaaagattgttccagatactgacgatttgatgattgtctcggacatgcattcttccatatataaaggcgtcagtgtggtgtattcgaaagctcatcatggagtatgtatagtaacctggagcgaaacatatcagtgtcttacgctaggtacggtgtgtcttgtttattctttagcgccgctaaagcatatcgggttagagattttgaaaaatactttgaagagttaggaggtcggagtccgggatgcagaaagtatttagagaatgttggatttgagcattggacaaggacatactacaaaggggagcggtacaatatcatgtctagcaacaactctgagtccatgaatcatgtgttaacaaaagcaaaaacttatccgattgtttacatgatcgagttcattcgggatgtcctaatgcgatggttcgcatcgaggaggaagaaagttgctaggtgcaaatcttctgtgacacctgaggttgatgagagatttctacaagagttgcctgcgtcaggtaaatacgctgtgaagatgtctggaccgtgcagctatcaagtgacaagtaaatccnnnnnnnnnnnnnnnnnnnnnnnnnnccagtgtacgtgtacgtgtcttaggtacaccaagttaagaatcccatgtgaacacgctctagcagctgcaatcgagcatggaattgatccgaagtcttgtgtcggatggtggtatggccttcaaacgttttctgattctttccaagaaccaattctacctatcgcggatccgtaagatgttgtcatcccacaacatatagtggatttgatactcattcctccatacagtagacggccaccaggaagaccactgtccaaaaggatcccatctagaggtgaaaaccgggtatgtactaacatcgttcattcatctacttgtattttgaagtattaccatgcggagatttgtaacttcctgtctttgtcacttcagaaaaagagacagaaaagacttttaccaaatcagtgctcacgctgtcgacaagcaggtcataacaagaagacgtgcaaaaatccaatctagttccggtgacaagtttctgagccggcccatatagtgtacgcttctgtgttttctcggtgtacgtaagtttatatataatccacctataactatgtacgttgtgtacgtacgtttaaactctacgttcgtataactatgtacgtttttgtctgtgtacgtgttanagttcatgtaataagggtacatagaggtggttgctcaatattttgagtaatttgaaataagttttttgaaaatctaacttattccccctcttaaatgaacggagttgcagatatggttgggtatattgtggttatgttggtatttaatggaaaggacgtaactgttgctgtttattgtcaaatcaacgttataattaccctatatgacggttaccaggctattaccaaaaatttgaatcaagtgtagttggaaccgcattaataactgtagctgttccagatttcctctatttaagtctcctcccttccttaattttatccacaatcctcattctaaatccatttcttctgccggcagttatatcattcacaaaaaaaaattttgtctttcgattcgcttgttcttgctatccgtgagatggaggggtttcatatggtctcagaattgtctcctctgatcactgggtggcgaatttatgtctttgtcgtgagagtcttcaagatggttatatcgcccaacgtcttcgaactcggccttatcctggcagattaagaggtaatttccgttaaatcattatgtgtttttctcgttcattcgcttaacttatatattaaactctctactatcatgttctgtatgtaaagaataaccgtattgaggccaccgttgatcgtcgccttgctccgttttacgaagaccgattcgttgaaaatgagtggaagacgatcacctctttcttggtccgtaagtcaactgacttagtcagagcaacaaagcatgaatacggcatactgtttatggatcggaccgtcgtcgttcatgccccaccgagatcaccaccagttctagatttcgatttcactcccttcgactacattttggataaatctgcatacaagaacgttttagtcggtgaggaggaataactctgacgcttcatttattacatttttgaaaatgtttgtttattatctttgtttctccatcatctagatgtcattggagcgttggttgatgttggcgcattgactacagactattacggtctcaaactgaggttcaagttaaaagatagatagtaagtgttcttttcatttgttttatttacaatgtcactctaaatgctaacagtccttatttctaacgtagcaatgaagtcttggagtgcgaagcccgcaatcaacaggcggagtacttggatggttactttcagagtttgggtaagagaaattttgttgtcgcactcagcttttggcgtctaaccgaactgtctaacccgaagcttgagagccatggtgctatttcaaaggtggttgccaatccggacagagcagaagttgcggatatctcgatggtggttttttag

SEQ ID NO: 168944 - DNA, 1392 bp, Arabidopsis thaliana landsberg
agaatcctaatgccgtctctaaggaagaaaattaggttaaagaggaggagaggagtaggaacgacggaggagccgacaacaaagccaatcgatgggggaacgatggaggagccgacaacgacagaggagccatcatcgacggagcaaaatccaaaattgagagagaaggagttgaagaacaatcccgaccataagtccggttttagaatcactggaagaagagaagtctgacaagaatgaggaagaaaattctgagaaggatcaggaagaagagagtgaagaagaagagaaaggggaagaagggaatcgcgacggaggagagtcctccgatgatagtagtagaagcttgggcgaagagtcctcctccgatgagaatatggaagatgagattgtagaagtgagtttggtgggaaatccggcagaaaatgatatggtaagtatgtgaatggtatgaaactggtagaaccggataatactatgattcctggataatactgtcagtactaggatataactatgtgtatgaattctgggtaacattggtagtagtactaagatagaactatgtgtatgatttttgtgtaatactgtcattactaggatatataactatgtgtttctcggtaatattgtcattactatgatacaacaaggtgtatgatttctgggtaatactgtcattactaggatataactatgtgtttctgggtaatattatcattattaggatacaactaagtgtatgatttctgggtagtcattactaagatataactatgtgtatgattcttggtaacatttgtagtaatatgaatgaatgtctgttgcaggaaattgacgaggaaatggaaacaataccaccgctgagtatgtatttcccgccctcggaatatgcgaagaaaatcaagctatcaactcggtgctatattcacgaagtgttgactactttcgataagttggagcctccgatgagcaagtttgagagggcatggttttagaaccatccgagtttctaacacatctttcgcaagcctagagacccaaaccaccgacttatggggatgtggatgctccttcttcgcacggcgcattgaaaggaaaaacgaagcgtgggtcatcgtcaatggcgttccaatccgatatggaatattggaacaagcattgatatctggcttcaattgcaagaactataaacttgggtatcagaatatgggaagtttggagttcaagacaaagcatttcaagaatactgttgtgaaatgcaaagacgtaagagagaagctcttaaatatagtaccgacgggtgaaagatccacagccaggttgaggatgatggtcctctatttcataaacaacattattatagcgtctatcaagaccagggaaaaggca

SEQ ID NO: 168945 - DNA, 957 bp, Arabidopsis thaliana landsberg
cttctcggagttgttgggctcctttgatccctctccccgttcagcctgccaccataacgattatgagaatcccatccacaaagacatcaaagaccaacctctcgtaattacatcttccttctttttttatcaccctacatctaccaaaatttcatcttaaacccaatcaacaatatggatcgagtgcttgatatattttatattatggcatggatttctaagtttcgtttgtttttgccataaaaccacaatttttactatcgaaacaacattttctttgtcagaacctacacgggaggaaaaagcatgtttgagttttatttacactgtacaaaaatatttgatgaaaaaaataaaagattgtctaggttttaaatgaaaatttacatgtaaatgtgattgacttaaaaacattagcaatatcttgattcctaaatccgccatcatatataagatttttttgtattggaaaaccacaggagatgtcgatggcgcaatacatagtaaagcagtacatagcagcggtaggaggcgatcgagcgttaaacgcggtagagagcatgtatgcgatgggaaaagtgaggatgacagcatcagagttttgcacaggagaaggaagcttgaacagcaaaatggtaaaggcaaggagtatcaagagtggaggaggagaagtaggaggctttgtgctgtggcaaaaggggatagagttatggtgtcttgagcttgtcgtttcaggctgcaaaatcagtgccggtagtgacgccaaagtcgcttggagacaaactccgtggcatccttctcatgcctctcgtggtctcctagaccattgcgccgttcctccaggtaatcattttctttttattcctttccgttgtttattagtcaaccatcaatcaatatatttaggggaacaaagggtcgactcgatcgaacatggcatactgttctgtggaatgt

SEQ ID NO: 168946 - DNA, 611 bp, Arabidopsis thaliana landsberg
atgagtgctgagacgttggcgaatccggcaggagcagtagcgggtcggtttggagtttatggctggcggtatgttccggagacgctgatggcggcgcttgaggaactggaggccgcgtatgccgaggcgaaggtcgacccggcttttcaggcggagctgaacgatctgctgcacaactactgtggtcgacccactcctctttacttcgccaagcggctgtcggagcagctcggcggcgccaagatttacctgaagcgcgaagacctgctgcataccggcgcgcataagatcaacaacgccttggggcagggcttgcttgctcggcggatgggcaagcaacggatcatcgccgagaccggcgcggggcaacatggggtggcgacggctacggtgtgcgctttgctcgggatggagtgcgtgatctacatgggcgatgtggatatgcgacggcaggagctgaatgtctaccgaatgcggctgctgggggccgaggtgcgcggagtttcggcggggtcggctacgctgaaggacgcgatctcagaggcgatgcgcgactgggtgaccaacgtccgcaccacctactacatcctcggcagtgcactgggagcaca

SEQ ID NO: 168947 - DNA, 1815 bp, Arabidopsis thaliana landsberg
gccttaggagattcacggtcttgaatacaactctctgtttaagattagtctggttattatttttctgaaaaagagtctttgtgggctgcgtggcacaaatttcacaactttagaaacaagtctttttcacaacagactcctggacttggagatctctgttaagaactgttgctggcagattcttgtttagtgtattaggggatgggaaaaaaatatcctttttgttcgataactggagtccccttggccctctgtttaagttgtttgggtcgtcgggccctagagcattgtgtatccctatccaggctaaggttgctgacgcttgctctagatgttggttggctcatctctccgcctagaacggaccaggcacttgccttgcatattcacctaacaaccattgcgttgccttgttatgactcttcaccggatacctttgtctggattgttgatgattccacttgtcacagtttctctgctgctagaacttgggaagctatgagaccaaagaaacctgttaaggattggaccaagtctgtatggtttaagggttcagtccccaaacatgccttcaacatgtgggtctctcacctaaacagattgccaacaagacaaaggtttgcagcctggggtgtcacaactacaacagactgttgtctatgttcttctcggcctgaatctatagaccatctactgctgtattgtgtcttctcggctgtaatctggaaacttgttttcttcagattgaccccttcgcaagccattttcaactcttgggctgagctactgtcctggactcgtattaattcgtctaaggctccttctctccttcgcaaaattgcagctcaagcttctgtcttccacctctggaaacaaagaaacaatgtgctttacaactcgatctttatctctcctgctactgtttttcacttcatcgaccgagaggttcgtaatattatcactgctcgaagaaaaagaaaacgttggcgaaatttaatgattcgatggatccgatagatttacccaaatcttttccaaaattattgtaatcttgtttttaccttttttttgccaagattacatttgttttaggtactccaatatgtaagtccgaactttcatttatatgaatattaacattttagcaaaaaacaaagttaagaaaatctcagcttcattttgatgccttgaatcaataactttcttcccaagttacaatgccctcttcccatttttcgtttcgggagtattaaggaaattacttaacaatctccttttttccgataagaacaacttctattttgttaatggaagagttggagtccttttcacttgtattttcctttcttcttgggttaagcctcctataaatatgttttgcatctaagaacacaagacataaacaatttttctttctactatcaaaagatctagggttaaaattttagcaagatgaattatgccagagatgaactagacggggctatgatcatatcaaagactctaacaaagagtgacattgttggtaatgtggcattaccaaaagcgcaagtgatgtctgtcctcacgaggatgaatggtgtcacagatgagggtttggacaacggttttgaagtgcaagtccacgacataatggaagacgatctatacacagttaccctgaaaagaattgacgacatgaagtattatttcgggactggttggagtactatgaagcattcattagatctcgtagaaggcgatgttctgaagctctattgggatcagtgtgaaaacaaattcattgatctcaattttcagcataagactatggga

SEQ ID NO: 168948 - DNA, 1159 bp, Arabidopsis thaliana landsberg
atgagttctagccagtctcttttgatcccgagcgcctctctcgccgattccagtgactcgaatcatctagatgaccttccccccatctacaaacggagagcggtttggatgtcttctgaagatgatgctgtgtcttcttcgagtgcccacgagcagatgatctcttttacggctcgggaagataccaatgccgatattgctcaggaattggatttgcccgatgatcccgagccgcctctcgttcggaggccccttgccttgatggccgacgaagacaagacgtccaattggcgagacgtgcccgagcccttaatgccgacgataaagattgaggactttctttatttctgcccgaacgagacggaagacattctgcatctcaacgagaagacggcttttgagataggcgagaaaaagaagaggaagaagaacaaaaaagtggttaggccgaatcctcccggctcgtctttatgcaccgagcggtcattgtctgatttaaaggctcggttcggttttggcaacgtcactcttcgtgttcctagcccagatgagcgagccgacaatccccccgagggctttttcactctatacgaaggatttttctaccattgcttcctttggttgcccgtcccgaggctgattttggattacgtgacctcgtatcaaatagccctttggcagataaccgccccatcgctgagatatcttatcgggatactagtgcgtggttatgaaaccgatattatttggagatccggcgagttccaaagtccgaggcggacaaatactatatttctccggccaagaccaggaagattatcgagagttttccgagcaaggatgatgcctacaccgactacttcttcttcgtggcattggaagatgctgtccttgaagatctcgtcgggaaagttctgacgaaatggggacttttgggtagtttagacattccgtgattgatttgtctgtgcccgaggtgattactgtgatttatgctgacattatttcgttgatctaattctgcagatcgcccaattaggtttctcgagccgtgtcccgacaatctcatttcctgccatcgagagctatcggcccgcaagtgtcattggacgaaacatctctctcaagatcgagttgaacgagcgcttagattatttca

SEQ ID NO: 168949 - DNA, 1333 bp, Arabidopsis thaliana landsberg
aatccagttcttcattcactccagctgataactacctcatcgattgtggctcctccgatgaaacaaaactctccgacggtcgtaatttcaaatccgatcaacaatccgtcgcgtttcttcaaacagatgaagacatcaaaacctccgtcgactcaattccgatcatccgactctaatgccagtacccttcccttatacttaaccgctagaatcttcgccggaaaatcaacttactccttctacatttcacgacctggtcgtcactggatccgtctccatttttatcctctcaatcatcctctctacaatctaacaaactccgtcttctccgtcaccaccgacaccaccgtcctcttacacgatttctccgccggagatacttcttctatcgtcttcaaagaatatctaatctacgccgcagagaaactctctctttatttcaaaccacataaaggctccaccgcttttatcaacgccgttgaaatcgtctctgttccggacgagcttgttccggactctgcttcctctgttcctcaagctcctgacttcaaaggcttaagtagcttctctcttgagatccttcatcggataaatatcggaggagatttgatttctccgaagatagatcctctctcacgcacttggctctctgataaaccttacaatacgttccctgaaggttcgagaaatgtcactgttgatcctagtacgattacttatccagacggtggagctacggcgttgatcgctcctaatccggtttacgccaccgcggaggaaatggccgatgcacaaacctcgcaacctaatttcaatctctcatggagaatgagtgttgattttggtcatgattacttcattaggttacatttttgtgacattgtaagcaaatcgcttaacgaccttatcttcaatgttttcatcaacaagctctctgcaatctctgcacttgacctctcctcactaaccagcgctttaggtacagcgtattacgcggatttcgtgcttaatgcgtctacgatcaccaatggttcgatcttggttcaggttggtccgactccgaatcttcagtcgggtaaaccgaatgcgatacttaacggtttagagatcatgaagctgaacaatgctgctgggagtttagatggactttttggagttgatgggaaatacaaaggaccgatcggtggtatgtcatctaagaagcttgctattgcgggtattgggtttgtgatggcgctaaccgctttcttaggggttgtcgtgttgcttgttagatggcagagacgtcctaaagactggcaaaaacagaatagtttctcgtcatggttgcttc

SEQ ID NO: 168950 - DNA, 797 bp, Arabidopsis thaliana landsberg
ctctcgaaactggaaggaaggatagtgcagcagcctacagggattttgcagaacacgagcttcctgttccagacgctactctttcgatgattcttcaacgtttttctttcagaggattcaacgagagagaaaccgtgagcttattcggtaatttctcacttttcgatgtcagcatctctctttgcttagctaaatctttcggtattggggtatgactcacttctttggaatggctctctttgtgacatgattcttttcttctgaatgatcttaatgcaggagcacacagcattggtatcacgcattgcacattttttaagaaccgcctctacaacttctcagcaaccgggaagcctgatcctgaactcaatccagggttcctccaagaactgaaaacgaaatgccccttctctgtctcggcttcatctccatctgcttcccctgacattggtttaccaccgtccttacctgcatcagattccgaaaacagctacggtatgagctcaggaaacaggaatgatgaagtgatcgacttgagctacaacaatgaaggtggtgatgaaaattttggaacacgctacttccgaagactaatgcagaatagagggttgatgtcttctgaccagcaactaatgggtagtgaagtgactgagatgtgggtgagggcatatgcttctgatccgttgttgttccgcagagaatttgctatgtcaatgatgaaactttcaagctataatgtcttgactggtcctctaggtcaagtgagaacaagctgaacaaaggccctccccaggaac

SEQ ID NO: 168951 - DNA, 1089 bp, Arabidopsis thaliana landsberg
ttacaattagaaagagaacatattaatatgtcaaatataacaaagaagaagtgtaatggaaatgaagagggtgcagagcagaggaaagggccttggacactcgaggaagacactcttctcaccaattacatttcccataacggtgaaggccgatggaatctgctcgctaaatcttctggtaatattcttttcttttatgttttctttgtactattccaacaaaatgcaattggtgaaaatgtcttcctcccacttcatatttttgtattaaaagtttgatctctttttacaaaaaaacaaacaaacagggctaaagagagcaggaaaaagttgtagattgagatggttgaattaccttaaacccgacataaagcgtgggaatctcactcctcaagaacaacttttaatccttgagctccattctaaatggggtaataggtaagttagttactcaaatgctctctttagctttataattttcttataatctaacgtgtaacatgttgcttcttaattaggtggtcaaaaatttcgaagtatttaccaggaagaacagacaacgatatcaaaaactactggagaactagagtccagaaacaagcacgccagctcaacatagattccaatagccacaagttcatagaagttgttcgtagcttttggtttccaagactgatcaacgagattaaagacaactcatacaccaacaatattaaagctaatgctcctgatttacttggaccaattttacgagacagcaaagatttgggtttcaacaacatggattgttccacttccatgtcagaagatctcaagaaaacttcacaattcatggatttttctgatcttgaaaccacaatgtccttggaaggatcacgagggggtagtagtcaatgtgtgagtgaggtttatagctccttcccttgcctagaggaggagtacatggtggccgttatgggcagttcagacatttcagcattgcatgattgtcacgtggctgattccaagtacgaggatgatgtgacacaagatctaatgtggaacatggatgacatttggcagtttaacgagtatgcacactttaattag

SEQ ID NO: 168952 - DNA, 703 bp, Arabidopsis thaliana landsberg
atggaagcagctattactcagaggattcagtacccatcatgggttgattgtagaaaagttgagagtaagccgcagcgtggttcattgcggtattctcagcaggttaaggtagatagaaggtttagaggtctttctttggctcgcttgcaacctgaaagaagaaatgatcaacgaagagcagtttctccagcggtttcctgttctgataacaattcctcaggtggttgtgaaatcatatggatgcttacaacataactcaatttgagtgccatatcttcgagtgtctcattcgatctttgatttttgcagcgttgttgtagactggaagtgtttatccatttgatgaagatattctcaaggcaagtaatatacccttttatagcatctagtgaaatgtttttcttcaataacaatcttactgagcaatggatacatgaactttgcagagaaaagcaaaaaagtttaaccgtatttgaatggaccatctatgtaccttgtcgggcagattctttgtctgctctatgtttgcatatgggctacttcttgatacttatatgtaatctgatgattccgtggtgaacacaggaatgatgggttctgggaaaacaactgtgggaaagttaaatgtccaaagtgctcggttatacgttctttgactggtatgtatatgctactgaagcaaagcctttatatgttttatatg

SEQ ID NO: 168953 - DNA, 1305 bp, Arabidopsis thaliana landsberg
atgcgtaatgattctggtggaaaagataccatcacatttacatttgtgccaggtctagagaacagcttagttgattcatcaaaccccttgattcatcatggcctacaggaaaatcaagaaacagaagctgaatcttctggggatctcgaagcctttaaaatatggactaatggtggtctattgggactgaaaccatcgaaacctccagtcttggcaatgccaagttctttaagtccagattgcaagaccgaggaaaggacagttggttttgcagaagctgaaaaagataaagcagatgatctagttgaaaatgcttcacatagacatgttctgaataattcaagcttagcaacgccaggaacccaaaatccaggtagttcaaatggcatagtcatgggtattgtagaccaaagagagtcccatgagacttcttctggagtttttggactcagccacaagtttcttactagtggtttccgcagaaaggattcatttgcacatgatagaaagactgtaccagcaacgattccagagaacgatgaagtgactacagagaggaggaggttttgtgaccaagatattaatgagaaaacctttatggaccccttcagagacgaagctcctattgattggatcacttcgtctccgcctcttcaacacatgaaaatatctctcaatcccgctgacactcttcaggcttcgagactgaagcttaaattttcagatggagacaacacttacaataccttttcctccttccagttgcttccagagactggaacttcccttcctgattcttattctgacgacgacactttttgtagatcatctccttacatgtcagataccgattatcttagcgataatcactccttgtcaaattctgagccgtgggaagaatccagtgacagccatggaagaaaagagcaagaactatatgattctttccacgaaagtaggcatgttgataacaatgctgaagcttcccctctagggatcaaatcagaaagttcttgcgtcgccgtaaacctctcatatctccaaaatcctgctgagcccttaccaccgccatttccacccatgcaatggatggtttcaaagacaccttcagagaaaatggaagacaaaacacagtccctacaactacaagaagctctcaggtttgcgtttgagaagcatatttcattgcctacagctaagaacgaactgcctagcatggtgacttctgctcctaaaccagaaattaaggtatgaagaagaatttgactcttttcttcctacttttctacagtgtgggtcagttcc

SEQ ID NO: 168954 - DNA, 487 bp, Arabidopsis thaliana landsberg
ctcgcctgatgacctcacagtctattctgatgctgattgggctggttgtcccgacactcgtcgctccacgtctggatacggtgtgttcttgggtgacaatctgatctcctggttgtcgaagcgtcagcctactgtctctcaatctagtgctgaggccgagtatcgcgctgtcgccaatggagttgcgaaggcgtgttggttgtgccaactccttcatgagctccattgccctcttcgtcgagccaccattgtgtactgtgataatgtcagtgttgtttacttgtctaccaaccatgttcagcaccagcgaaccaagcatgtggagattgatctacacttcatgtgtgactgtgtcgcccttggagaggtccttgttctgcatgtgcccacaacatatcagtacgccgacatattcaccaagggcctttcgactttggtcttcatcgagtttaggaacagtctgaatgttcccagtgctacaagttcc

SEQ ID NO: 168955 - DNA, 2822 bp, Arabidopsis thaliana landsberg
  unsure (1)..(2822): unsure at all n locations
ctataaagtaatgccctttggtttgaaaaatgacggagctacctaccaacgattggtgaacagaaagttcaccgaccagctcaggaacacgatggaagtttacatcgatgacatgttggtcaaattggcttacgaaaaggacgacatcccacgattaagagaatgctttaaaatcctaaacaaatttgaaatgaagctaaatcccgagaaatgctctttcgaggtcccatcaggagaattcctcggatacctggtaaccgaaagaggctttgaggccaatcgnnnnnnnnnnnnnnnnnnnnnnnnnnnnnnnnnnnnnnaaaaggcacgagaggtccaaaggctaaccggccgtatcgccaccctcaacagtttcatatcctggtccactgataaatgcgtcccgttctatcagctcctccgaaaggataagaagtttgactggaatgagaattgcggacaagccttcaagaaattgaaagcatacttgaccaaaccacctatactcgcaaaacccaaagaatgagaaccgttgtacctgtacacggcgtcttggtaagagaagatcacgaaggacaaaacccgatctattacgtgcgtaaaacgttgatagacgctaaaacctgttatctagcgatggaaaaactagcactagccatagtcatgtcagcgcgaaagctgagacaatatttccaatcacatcccataaggacgactcgcgaaaccattttgcaatatttccaatgacatcccaatatttctaatatttccaatgacatcccaaccaatcggaaccattttgcatagtccgactcaataaggacgactcgcgaaatgggccatagaactaagcgagtacgatatagaatatcgcaccagaaccagcttgaaagcacatgtcctagctgactttgtaatcgagctccctttagcagacctggatacaaccaactccaataagaagtggctcctccacgtgacggctcctgcaaccgataaggatccagagtaggaatacaactcacctcccccaccggggaagtcatcgaacaatcgttccgactcggattcaacgtatcaaacaacgagtttgagtacgaagccctcattgctggcattaagctaccttaaggaatgggtatccgcgatatacacgcccagagcgactcccaactcgtcaccagccagttccacagggaatacgaagctaaagacgagcgcatggaagcgtacctcgaactagtcaaaaccttgacccaacagttcgaatcgtttgaattaaccaggatccccagaagagaaaacacctctgcagacgccttggcatctctcgcttccacgtcagatcctttcgtcaaaagaattatcccggtcgaaggaatagcatacccgagcatcgacctaacggtcaaacatgctgggatggaaacctccgcaacttgcaacttcacgcgagtaacccgaagcaccaccgcggcagcgagagctctcgcagcagccgcagaggcaagtgcagcggaggaagagccatagctcgaaacccccgaacaacctgccccgtaccaacgtgccactggagtatctcaatcatcgattacatcgaacgagggatcacacctcccgacaagtggaaggccagaaaactcaaagcccagagtgcaaggtactgcatcatggaagggagacttatgaaacgcagcgtcgcaggtccctatatggtgtgtacctacgggcaaaaaacaaaagacctcatgaaaagcatgcacgaaggataatatggtagccactgtagtggacgtaccctcgccctcataatcaaaaagcaaggctacttctgaccaacaatggtagccgattgcataactcattcactcaggtgcgataggtgccaacggcatgcacctacactgcaccaacctcccgaggaaatgtcctcaatatcttctccttacccgttcatgaagtggtccatggacgtcgtaggtcccatggaagcctcaggtgggaagaagagattaaaaaacctgctggtcctcaccgactacaataccaaatggattgaggctaaagccttccaacaggtaaccgagaaacaagttgaggacttcctgtgggaaaatattgtatgccgacacggcataccgtatgagatcgtcactgataacgggactaacctcacctcgggaaaaattaaagcattctacgaaaagtggaagatccgtcttaccacatccaccccccgttacccacaaggtaacggacaggcagaagccgccaacgaagctatattgagcaacatcaagaaaatacttgatttcaaaaagtcaatgtggtccaacgtactccacgaagttctctgggcctaccgaactacaccttgcaaatcaacgcaagaaacatcgttctctctcgcctatggtttagaagcagtaatccgtgtcgaaaccatagtaccaagcgtaagaagaaccgccagtcctgctaacttggacctaaacacgcaaatgctacaggacaacatggacttcatcgatgaacgcagagatcaggcaatgatcagagttcaaaactatcaacaagctgccgcccgctactataactccaatatcaaaatttggagattttaagtgggagagctcgttctacgaaaagtgttcagcaacacgagagagctaaacgccgataaactgggaactaactgggaaggtccctatcgaatcatcgagatggtacgtgacggcgtctataagctcgaaaaagttatcaatggagtacctgagttacggccttggaatgccatgcatctcaaaaaataccacgaa

SEQ ID NO: 168956 - DNA, 770 bp, Arabidopsis thaliana landsberg
atgatggtgcaaatcattgagcaccgcgcccaaattttggtggatttcctggtggaggaaaaagcttcttcttccacaccataggttcccaaccgcccagtgccggacactgctgctgtgcaccctgtgcagcagcatacaactgtgcagacatcccggactccgtcaagggcagcttcgggggcgttgtctgcggccagggagttgctgcgccacccccaagctgcacggcctaaccaggggccatgaagcagtggtgtgacgatatcgaccgcctgctcggcatggcgcattctggtaagccaggcccaggcctcggtcatcccggcgtcaacatgaggcgtcgacgttagtgcgctcaccctcggtgaaggccgcaccgactgaggacctacgggcggagctcaaccgcaggcgtgcgggagaggacgctccagtctctctggagaggcctgatgacctatgggcagaactcaaccgcaggcgtgcgggcgaggatgcccgtgtctctctggagaggcgcgtgagcgccgacagaacgtcgagggtcgcaacctcgacctagacttctccacggttgcgccgcaaactccaagggtgcccaaattcaggcgagtgtcccgttggccggcgtaggctgcgccgcactggcggatcatctccgtgcgacgacttggccatccaagttccggccacacctgccagagaagtacgacggtacgtcaaatccgtcggaattcttgcaggtatacgtcaccgctattacggca

SEQ ID NO: 168957 - DNA, 2155 bp, Arabidopsis thaliana landsberg
gggtgggcaaaaaaaccggatccgatacccaatctgatacccgaactgaaaaaatcgggttggggcgggttagagttttaagaaattacctcaatgggtaaaattttagtaaacccgtgggtatcaggtcggtccggagattaccgttatccaaataggatacccgagaacccgaacataaatttaatatcaaaaatattaattacatttaatcttaatataatgtaattatctaaaattataattataaatccaaatatattaattaattttatatctaaatactcaaaacaactgaactatttaaaaatcatttgttatgtttgtagtaaaatatattcaaatctaattaaatttattaaaaatttgttaatatttaacgtttgttttttgggtacccgctatctacaaataaaatactcgtttccatttgtttggatatttttagggtttgaaactctttacccaaaccaacactaactcgggtgtaactgaaccagaccgaaaagaaaattctattttaccctattgggtagtaaatccattacccatttaacccgaacccgaacgggttacccatatgcccagcccgttggatatatgtttgatggaacctggaccaaaaaatccatgttcagaatctcaccatgttcaaaaatttataagtatcaacttattgaatatcatattatcctcttattattaaaagggaagtacaaattaaaattttgtctaatttgacctcaattttgatttcaattttggattttgttctttgctattcatagtcggtgagaataattcggacataaattttcattaaacattataggacctgcgtgatgaactccggtgggttaggagtaactactcttaatcacatatgcaagttcctaatcgggtttaggatccaaattttgcaatcttaaccattcaacaatttttttatacttacctcattcttggtatctaaatatatgagcatattcgatccctaataactacacattcaatcatatattgcctaatcgctcgaaaatcgtattaacttattctcataaatctaatcctaaccataaccaactctacaatattcaccacttatctaaatatagccaatcattcaattctattcaaaattcgaatatatattgttcatagtatctttaagtttatgctttttctccaagatttttttcaagattttcaaaatattggagccagaaaccctagcatccttcaacgctataaatatcaacttcattctcatttccaattcattactcaaataactcttaggtagcaactcaatcgtatgctttttcttcttttcttatcacaaatggctcaagcaattgcttacctcgatgacttcaaaccatacaaaatatcttggagagtttatgtccgtgtccttcatacctggaataccacaaagtttggtgatactttcgacatggttctctctgatgtcaaagtaaaatatggaacactaatataatttctttttgagtggtagagatagaagattcatgcttctgtgaagagagagcatctgaaccgttttgagaagctcatggttccaggagagtggaaggctattgaaaactttggattgacttatgcaaaattcaaagcaactaatcatcgttacaaaatgggcttcatggctaaaacaagagttgtgaggatggaaccattatcagattcatattatttgtccttgacttctttcattgatgttttaactggcggtctcaacgaaaactacttgattggtacattttcatcttctgttttaatctttttaatcttctgtgttattcaatatatatttatgttttgttgttctttttggttcaagatgttgttggtcaaattgtgaatgttggtgaaatggagactattaatgtccacaataaacctactaagaagattgattttgaattgagggatcataagtaaacttcattcagtacatctgtttttcattcaaaataaaagttcgttaatatgtttatctaatatctctggggttcatttgcaggacaagttttcactgcatgtgaagcttctaatggtgagatgatcatatgtttggtcagatatgctaagatcaaaacttacaaaggtattatgttttgatattactttc

SEQ ID NO: 168958 - DNA, 535 bp, Arabidopsis thaliana landsberg
gcgagtgtgatgaattactatgcttgcttatctatgatgactcttctcattgttactcctttcgccgagttatgtggaaggtccccaaatgtgggttgatggttggcaaaacgatgtctccaaatcggaccaaactttgtctagtaagtttatattgatgttgtacaatacaaaagagacaaaaaaaatcaaagaagttgatttaaaaccttgtaaggtatttgattctaaatgtttgaattcaggtgggtagtggcacatagtgttttctaccatttgtataatcaagtctcatacatgtctctcgactagatttcaccactgacatttagcgctggaaacacaatgagcggatctcattcctcgttgcctctatcatcatcttccaaaccctcttaaacatgtcaatgccctgggtgctgccatcgcgattcttggaactttcatttattctcaggtaaaaaatagagtgaagaaaaatcatattctgcgtgttctttgtctaggaatgcttgaacctttagtgataactcta

SEQ ID NO: 168959 - DNA, 1798 bp, Arabidopsis thaliana landsberg
  unsure (1)..(1798): unsure at all n locations
atgtcatcccacatcgttgggtatcctcgtattggaccgaagagagagcttaagtttgcattggagtccttctgggatgggaaaagcaatgttgatgatttgcaaaatgttgctgctaatctgagaaaatcgatttggaaacatatggctcatgctggaatcaaatatattcccagcaatactttttcatactatgatcagatgttggataccacagcgatgcttggtgctgttccctctagatatggttgggaaagtggtgagattgggtttgatgtttacttctccatggcacggggaaatgcttctgctcatgctatggaaatgaccaagtggtttgataccaactagtaagtaactgaatcttctttcttccctctttgttaagtttctttctcagttattattgctaataaatgctctaacagccatacanttgttcntgagttgggtcctgacgtcaatttctcctatgcatctcacaaggctgtggttgaatttaaggaggcgaaagcagtaagttgacgactggaacccttttcacttagtttctcggaataacttttagttgagctgatactggcatatagataattgatggtattgctattctcttcagctttcctctttttatcccaaggttcttattcacagctgtgtttttggctgttcatggcacagcttggcatagacacagttcctgtgctcattggtcccatgacctacttgctcctgtcaaaaccagcaaagggtgttgaaaaatcattctgccttctttctctgattgacaagattcttcctgtctacaagtaagaataatattacgccaactgtgacgcttttagaaattagctagaccaaaataaattcaaaagatacaatttcatttggatagtgctcgaaaccataactggtttatgtggcatttattttggcagagaagttttggctgatctcaagtctgctggtgcacgatggattcagttcgatgagcctatacttgtgatggatcttgacaccagccaattgcaggcattttccgatgcgtactctcacatggagtcatctttggcaggcttgaatgttcttattgccacatactttgcagatgttcctgctgaagcgtacaagacattgatgtctttgaaatgtgttactgggtttggatttgacctcgttcgtggattggagactcttgatttaatcaagatgaattttcctcgtgggaagctactatttgctggagttgttgatggaaggaacatttgggcgaatgatctttctgcgtcactcaagacactacagactcttgaagacattgttggaaaaggtgtcagtaaacaaagtttcagttgattgctttcacttctttttcctatctagcttcagattgatgtaaacctttctcttctctttgcagaaaaagttgtggtttctacttcttgctctctactccatactgctgtggacttagtgaatgaaatgaaacttgataaagaactaaaatcttggcttgcatttgctgcacaaaaggtcgttgaagtgaatgcacttgccaaatcattctctggagctaaggatgaggtacatcttttgcttattacattatgtagtacttctgaggttttttaatattggaaaggcttgccgtttctagttgtctttgactctttgagttataacttttcccacggttgaagtgatcggctttacacatctgtcccaatgactgcaactacatcgatgaaccaaaaaatttatatctcatatactgtacctttacctgatctcatggatc

SEQ ID NO: 168960 - DNA, 595 bp, Arabidopsis thaliana landsberg
gtgattcaaggcccagtcctcggcctggatgtcgacaggccccatggcacaagtggccgtggcgtacatgaccgccaatacggtttcggcttcgtcgataaggacggccgcaccaacggcatagcgaatgctgctgccgctcgacctgccaggcgtctcgcacggcaagccgctggacaagatcggccagcgctcgctgccgcagggcgagatctatttcgacaacgtgaaagtgccgcgccgcttcgcgatcggcgagcgcgacggctactacggcagcttcgcctcggtctggtcctacggcggcacgcacatggcgcaggttttcaccggcgtcgcacgcgcggccttcgagctggcgctgaagtattgccacgagcgcaaacaaggcggcgcactgctgatcgagcaccagatgacgcgcctgcgcctcggcgagatgctgcgccgggtcgagatgtgccgcgccacggcgcgccgctcgctggcttttgcacggctgtcaccgcaaacccatccatacgtcacggcgatcggcaaggtcgcggtcaccgaggaggcgttgcgcgtcgtcgaagaagcgtttcgtctgcag

SEQ ID NO: 168961 - DNA, 2005 bp, Arabidopsis thaliana landsberg
gatagttgtaagcagagatgtagtcttcgatgaatctaaaagttggaagtggaatgatctaagaagtgaatcaccagaagattcaggactctttgtacttgggtttgagcaatttggaaataacggactaagaagagaaagagaagaacatggttctgagacaagcgagaagaacactgaggatgaagacacttctcgagtcactgaagcaacagaaacagaggaaccaattcaagaagaaggtcaaccacaagagaacacacaacccacactaagacgatctcaaaggcaagtttctatgccgaagtacttagaggattacgttctacttgctgaagaagaaagtgaatatctcctctctgtaataaacgaggaaccttggaattatgctgaagcaaaagaaacacaagagtggagagaagcgtgtgaggacgaaatcgcttcaattgagaagaacaagacatgggatttagtggaacttcctcaaggagctaagccaatcgggctcaaatgggtgtttaagctaaagaagaacgcagacaggagcataaacaagtataaggcaagactcgtggctaaaggttacgtacaacgacatggcatagactttgacgaagtcttttcccttgtagcacgaatcaaaacagtccgcttcatcattgccctagctgcttcaaacggatgggaggtgcatcatctcgatgtcaaaacatcattcttacacggtgaattaaaagagacaatatttgtttcacagccagaaagattcacagagaaagggagtgaaggcaaagtatacaaattgaataaagcactctatggattaagacaggcgcctagagcatggaacaacaaattaaacaagatacttggggaattaaagttcgtcaagtgttctaaagaaccatcgctctatcgtaaacaagagaaagttgatcttcttttagtagcagtgtatgtggatgatttgcttgtttcaggttatagcttaaagctcattaatgatttcaagaagggaatggcgtccaagtttgagatgagtgatctcgggttactcacatactatcttggaatcgaagtaattcagtataatggaggaattatgttgaaacaagggagatatgcagagaagatcctagacgaaaccaagatgagtgattgcaacgcagttcacattccaatggactccggtttgaagctgtcaaaagcgggaacagagaaaggaagtcatgactcggagacagagaagaacattgagccaaaagagtatagaagaaacattggatgtcttcggtatctacttcacacacgacctgacctctcatactgtgttggtgtgttgagtagatacatgcaagaacctaaagaaggtcatggagtagctatgaagcagattttgagatacttgcgtggcactacttcctatggactatctttcaagcgaggagacaagtcggggctaataggtttcagtgatagcagtcgcaatgtagacgaggatgatgggaggagcacaaccggacatatattctaccttgatggctctctgataacttggtgtacacaaaagcaagaaactgtggctttatcgtcttgtgaggctgagtttatggcagccactgaaggagctaggcaggcaatttggttgcaggaattacttggagaggtaacaggacaagcatgcaagaaggtgagactactcattgacaacaaatcggcgatagcacttgccaagaatccagtatttcacggccggagcaaacacattcacaagaggtaccatttcattcatgagtgtgttgagaatgagcaaatagaagtggaacacgttcccggggaagaacagaaggcgaatcttctaacaaaggcacttggaagaatcaaattcaaagagatgagagagctagttggagttcaagagttgtctaagtgtgagttcaagcttaagggagtgaatgttgataagcttgaagttagcttaaggaataagctaaccaaatactaa

SEQ ID NO: 168962 - DNA, 605 bp, Arabidopsis thaliana landsberg
atttaattaacatggttgtttttttttgttttccttaaaaagccgatgcatgtgggattcacaagtgatgaaggaggaaacacgatagatttacgttggtacaaacacaaatccaatctacatcatgtaagcttcttcttttgtctctttcaactttaaatttcatcatgaaaacaaaaaaaaaattaacgaaggaaacaaaatatgtaggtatgggatagagagatcattctcacggctctaaaagaaaactacgacaagaacttggatcttctccaagaggatcttgagaagaacatcaccaatgtaatagacactaatttattcatattttactataattttaagaatctttataatggttatcatatattagggattatggcacgacgatctatcttcgtggacagaatgcaacgatcttatcgcttgtccacacaagtaagttttaaattacttggtttaagattggcttgacgctcgtttgaagctagctacaaattttgatactttttctggtccaaaaatcttacaaagatactgaaaatgaaataataggttttaaacttttaatttatttggagttggataggattaagtttcac

SEQ ID NO: 168963 - DNA, 1151 bp, Arabidopsis thaliana landsberg
attttgcggccaaagtaaagtggtttggtgggtgattcaatattttgttggtttccatttaagttcaaacctttgggtattaagtattccttacatgtagctgtactcttttatcttcaagggacatcaagaatacttaaactttagctccttgaggggaagtagctccttggactttaataaagagtagaaatatgaaggctgtggaaatctgtaaagtgaaaagtctgaaatatgcaactcttcctagttctggacatagctgctgcaaaatgatacttaaagtcattgatccgaactccgaagtgtacagcaaaactttcaagcttacattacctgatttagtgacctttccagattttcttgtgaaaagaagccggtatgaaggagcgataagaggaaatggacttgcagggacaagtgtaaggtttggtggagaaacaaaggcgaagaagatggtcgttggtgggaaggaggaattctagctgtgaaacccaaatcaactcattttcttgatagtccatgggagaggtacaaagttaaatacaagactagcccgaccgagacacatcttcatagtccttgggagctttttgatgctgatactaagtgggagcagcctcatattgataatgagaaatgaaacagtatgctcttagccttaacaaacttacagacttcagaaaaaagaatccaggtatgtgtgtttaggcttatgtttaaatttgcttaggtggtttagaagtagaaaataacataacactatcacaagaacatgacaatatgatataaacttgacagattcgtttgaggattcttatggactccaaaaactgaaccagatcatgggaaactcaagctacaccaataggtaatattctacaagactagaagaggttttgatatggagccgaatttgacatggttttgttctatggattatctacaggttcccagttcctttgtctcttgaagtaataagatcaaggattgagaacaactattactggagtatggaagcgttaaggcacgatgtatcagttatgctatccaatgcagagactttctttgatctaaacaaatgtgtaggtgtagcagtcaaaatttcagatctttctcaatggttcgaccgcacgttgtcttctttgtag

SEQ ID NO: 168964 - DNA, 2563 bp, Arabidopsis thaliana landsberg
atgttgtttacccttctcgttcgtcagctaataaaagatacttcgttttcccgaaaatcccttacttattcattgttacaacctcgatacaaacaattggcgcccatcgtagggcagttcgaagcttttcttttcaccgaacgagaacgagtaacgtaaatgtccccagcgatccacaaaactgaagaggacatgatagacacatcaagcaaaaacgggtccgacgccagccaacaacagccagcacttgacgcaatgcaactgcaaccagagaacccagcactcgctcaaactggcttgaatcccgcacgtgccaaaccacgccctgcaacagtagcagcggcagtgggagacaccgcgcttggcggcgacactgcacctgcgaacaagggtttccatctggatgacctcgtgcaaacaatcttggattgactcgacggtcaggacacacgaacgaccaaacaaatcaatgtccttgtcgcaacgcaaattgcttcccaaaatcatatcgagcgcctacgacaccgaagacttgactctcagcctcgcgatgatcacgaactattgccatctccccaaactccatgtgcggaacgttctcaaaatccgacgacatacatcggcatcagttatcgtagaatctgttggcaggcaacctcatgatagcctaccgaacaaccgcatcctaccgagcagccaaagtttgctgaaccgaccttccgataacgtcgaccaaacacgcaacctggaaatcgagcgcatgaacatggtcatcaaagccatgtaatccaaaatgcaccgtgccattagctctgctccggaactggaaaaagtattggaagaaacacaactatcacctttcacggtacgcatctcggaagttcgtgtcagacacataacgaaggtcaaactggttccctacaacgatctcaccgacacaaagatttttctaaagtctgttagcctcgcaatcaaccgtaatcatttctcccccgaccaatgcgacgcgtacagctgccaatatttgtagaaaatctgatcgaccgacgatgcgttaaactggttttcgcgacttgaggccaatacgattgacaactatcaccaacttacggccgtcttcttgcagcactactatgttcatgatcaaaggtgcctctaatgctgacttgtggactatgttccataaagacaaggagccgttgcgtgaacaattcaaaacagttgtttccagtattgcaataactaatgatgccgtaatcgctgccctgcggaacgctgtcttatacgaatcacgattcagggaagacttggtaaccatccagccagcaacactagaggatgccctacttcgctttaaccgatttatcgagatcgaagaaaaagcggtgatggcaagacgtcaacctaaagccttgcattcaaaggataaatcatacaacgaacactacgaacctcgtcagcattatgataaggagtatagtaagggagataagggcaagaaagcagcaacttacgcaattggttgttcggaaagacaaccttctaaaccgtggaacaagtattatcgagagactgatattaaacgtaactcggcctacagtgagttccataaaatctctagtcattcgactgatgaatgtcgacagcttcaactactacttctctcaaaattcaagaaaggcgatctcgacgttgagtgcgaacgatgccaggtaacaacgcaaaaagataaaatgaatctaccaatctacgttggcagaacaatgcattgtttcaattttgccgtcttcgataaaccgatcgtttataacgtcattctcgggatcccttggttacataaaatgaaagcagttgcgtctacctaccatcagtgtgtgaaattccctacaacgcatggaatttatactctaagaggcgacccgcttgttgctcgtatgtgtttcatagtcgagcgtcaactcagaaatgctaaagcttttatgataactgaacccactccttcacttgatgaacgcatagtaccaaggactgaatcggtaatccaagttaacattgacgcaattaaccctcttcgatgtgttggtattcgcgctgatttaccgcaacaattgaaggacgagctcgtacagtttttaagtcagaatgtcatgaccttcgcatagtcaatggaagatatgacgggtgtcgcaccagatattacttgccatgaacttaacgttgactccacgttcaaaccgatcaaacaaaaacgacgcaaacttggtccggaacgcgcaaatgccgtcaatgaagaggttcagaaactactcgaagcaggatcgattgttgaagtgcgatatcccgattggctaagcaatcctgtcgttgtaaagaaaaagaacggcaaatggcgagtgtgcatcgattttacagatcttaacaaagcttgtccaaaagatagtttcccactcccacatatagatcgtcttgtggaatcaactgctggaaacgaattgctaactttcatggatgccttttcgggatacaaccagatcatgatgagcccagaaggtcaagagaaact

SEQ ID NO: 168965 - DNA, 514 bp, Arabidopsis thaliana landsberg; identical to SEQ ID NO: 35544

SEQ ID NO: 168966 - DNA, 2701 bp, Arabidopsis thaliana landsberg
  unsure (1)..(2701): unsure at all n locations
ctggttacatccagatgccattcggactcaagaatgctggggcaacttatcaacgcttcgtcaacaaaatcttcgcattacagatcgggaagacaatggtagtttacatcgacgacatgttagtaaaatccatggcagaaaaagatcacatatcccacttacgcgaatgttttccacagcttaacctctacaacgtcaagctcaatccagcaaagcgccgcttcggagtaagatccagagagttcctcgcgtagctagtcacgcaccgcggcatcgaggcaaatccaaagcaaatcgatgcattgttgggaatggcgtcacctcagaacaagcgagaagtggagcgcctaaccggaagagttgcggcccttaaccgtttcatctcccgctgaatcgacaaatgcttggccttttacgatgtgcttccaggaaataagaagtttgaatggacgacccggtgcgaagatgcttttcaggaactcaagaagtatctagcaacaccacctatcctcgcaaaacccgtaatcggagaaccactgtacttgtatatcgccgtattagataccgcagttagcggagtgttaatctgagaagacagaggcgaaaagaaaccgatcttttacgtctcacagacattcaccggcgcggaatctcgctacccgcaannnnnnnnnnnnnnnnnnnnnnnnnnnnngtcggctcggaaactgcgaccctactgtcaatcccattccatcatagtaatgggatccatgccgttccgcgccatcttacacagtccaagccaatcaggacccctagctaaatgggcaatcgaactcagctagtatgacatcgagtatcggaacaaaacatgtgcaaaatccaggtcctagccgattttatcgtcgaactccccattaaggaggcccgggaaaatccactcgatacaacctggctattgcacgtagacggctcgtcatcaaagcaaagttcgggtgtaggcatcagcctcacttcgccaacgggagaggttctcgagcaatcatttagacttaacttcgaaggcaccaacaacgtggccgaataagaagcgctcgtagccggacttaatttagcttgggggctaaagatagagaaaatccgagctttttgcgactcacaactcttcgcgaatnnnnnnnnnnnnnnnnnnacagatcgggacgaaagaatggaggcctacttgactcatgtacaaaatctggcaaagaatttctaggaattcgagttaacaaggatccctcgtggagagaatacatcggttgacgccctagccgctctagcctcgacatctgacccgagcctgagaagagtcatcccagtagatttcaacgaaaaacaaagcattgaccttggcaaagaggaacacgtcctcccaatacaaatcggcgcggatcaagacgacactctggaagacagcccagacgactgcaactcagaatggatagaacccatcaaaagctatatatccgaaggaaaattgccctcggacaaatggaaagctcggaaactcaaagctcaggctgcacgtttcgttctagtagatgaaaaactctacaaatggcgattatccggacccttaatgacatgcgttgaaggagaagcagtttgcaagatcatgaaagaaattcacggtggctcgtgcggaaatcattccgggggaagagccttagccatcaaaataaaacgccacggattcttctggccgataatgatcaaagactgcgaaaagttttcaaaacgatgcgaaaaatgttaaaggcacgcgccaacaatccatcaaccagccgagctcttgtcatcaatcgcctcgccgtatccattcatgcggtggtcaatggatataattggacctatgcatccctcgaagcagaaaaagttagttctcgtcttgaccaattatttctccaagtggatagaggccgaatcttacgccagcataaaggacgctcaagtcgagaacttcgtgtggaaacatatcctatgtcgccacatgatatcttacgagatcgttacggataatggctcgcaatttatatcaacccgcttccaaggcttatgtgataaatggggaattcgacttagcaagtcaacaccgcgatatccccaaggaaacggccaagccgaggccgctaacaaaacaatcctcgatggcttgaaaaaatggctcgatgctaaaaagggctcgtggtccgacgaactcgagggtgttttatggtcacataggacaactcctcgccgagccacaagagaaacccctttcgtcttagtctacggaacggaatgcgtaattccagccgaaatgatagtaccgagcctacgtcggagtctatctcccgagaacaaccccgataatactcagaggctcctcgacgaactcgatctgatcgatgaacaaagatattcagccttggttcgcatacaaaactatcagaatgaaacggctcgtcattacaattcaaatgttcggcaacgaagattccatgaaggggatcgggtcctccaaaaagttttccagaatactgccgaaccgaacgctggaaagctcgggacgaactgggaaggaccatacttaatttctaaagtcatccgacccggagtgtatgagctcgctgacttaaacggtaaagccgttccaagaccatggaacgcaatgcacctaaggaaatactacaactaa

SEQ ID NO: 168967 - DNA, 569 bp, Arabidopsis thaliana landsberg
  unsure (1)..(569): unsure at all n locations
aggcgcatgcgtcgatcacgacaccacacccagaagacagagagccacggccgaattaccgacaccgtctcgatcagtgagcggccggccagtgccgaagaccaggccgtgccggggcattgggaaggcgacctgctgttcggtgaccggaacagtcagatcgctacgctggtggagcgacagacccgctatctaatgctggtgaaggtggcaggcaaggacactgagaccgtggtcaatgcactgatcaagaacgcacgccctctgccgaagcagctgtaccggtcgctgacctgcgatcggggcaaggagatggcggctcatcgccgctttaccttggctaccgacatccaggtctacttctgcgacccgcatcatccctggcagcgcggaaccaacgaaaacacaaacggcctactgcggcagtattntcccaggtgatcaatctggccgacgtctcgcaggccaagctggatgccgtggcacgccagctcaacgagcggncacgcaagacgctcggctacgaaacaccagcagagcgatatcgacatactgttgcgtcgatcggt

SEQ ID NO: 168968 - DNA, 465 bp, Arabidopsis thaliana landsberg
ccggctgcgccgcttgctgggcgacgagctgttcctgcgcacatcgcgcggcatggtgcccacgccctatgcgaatgcgctggccgaccccctggcaggcgcgctagacgccatccgcgataccctcaacgcgcgtgccgccttcgatccggccagcagccggcgcggctttgtcatcggcgtcagcgacgtgggcgaaacctacttcctgccccgcctgatgcgccatctggccgagctcgcgcccggcgtcaccatccgcacggcgcgcactacttcgctggatgtgaaagacaagatggagcgcggccgcatcgacctggccatgggcttcctgccggcgctcaagggcggattcttccagcgccggctgttccgccagccctatgtctgccagttaaggcgcggccatccgctggcgcgcggcgccgtgtcattgcgccagttccgggcggccgagcacgt

SEQ ID NO: 168969 - DNA, 699 bp, Arabidopsis thaliana landsberg
taacatgattgaccattaattttggtttgatcagctgtttccggaagaggattcattgcaaaggacataacattcagaaacacggctggtccgcaaaaccgtcaagctgtcgcattgagggttgattctgaccaatccgccttctatcgatgtagcgtggaaggttatcaagacactctttacgcccattccctccgtcagttctatagagattgtgaaatttatggtacgattgatttcatattcggaaacggcgccgcggttttacaaaactgtaaaatctacactcgggtcccgctaccgctccagaaggtaacgataaccgcgcaaggaagaaaaagtccaaatcaaaatacagggttcgtaatccagaacagttacgtgctggctacacaacctacttatcttggccggccatggaaactttactcaagaacggtttacatgaacacttacatgagccagttggtccaacccagaggatggcttgagtggtttggtaattttgctttggacactttgtggtatggagaatacaattatattgggccaggttggcgatcatcaggtcgggttaaatggcctggttatcatatcatggacaaacggactgcattatcgttcaccgttggatcgttcattgacggtaggagatggcttccggcaacaggtgtcacattcaccgctggtctagctaac

SEQ ID NO: 168970 - DNA, 1284 bp, Arabidopsis thaliana landsberg
tgaggcttttgaggtttttcgtagacttgttaagaataaagttgtgacctttaacgccattacattgtctactgtgttgttggcggtctcgcattcaggtgctctgcgtattggaaagtgtatacatgatcaggtgaatttgattcctgttctgcaaccttttcttgtcatgagtgacaagtttctttgattatatgtattgatgaatgtgtctaatttgcaaagataatgtgtctatgcaggtaataaggatgggtcttgaggatgatgtgatagtggggacgtcgataattgatatgtattgcaaatgcggaagagttgagacggcgagaaaagcatttgatcgaatgaaaaacaagaatgttaggtcgtggaccgccatgattgctggatatggaatgcacggccacgcggctaaagcgttagagttattccctgctatgatcgattcaggggttcgaccaaattacattacttttgtatcagtgttagctgcttgcagtcatgcgggtcttcatgtggaaggctggcgctggtttaacgcaatgaaggggagatttggtgtggaaccagggttagaacactacggttgtatggttgatcttctaggtaaagctgggtttcttcagaaagcttatgatttgattcagagaatgaagatgaagccgcactctatcatctggagctcacttcatgcagcttgtagaattcacaagaacgtggagctagctgaaatatccgtggcgcgtttgtttgaaattggcctcttcgaattgcggttactacatgctgctttcgcatatctacgctgatgcgggtcgttggaaagatgttgagagggtgagaatgatcatgaagaatcgcggattggtgaaaccgccaggttttagtctactcgagttgaatggtgaggttcatgtgttcttgatcggagacgaagagcatcctcagcgtgagaagatttacgagtttttagcagaactgaacaggaagctgttagaggcaggttacgtatcgaacacgtcatctgtatgtcatgatgttgatgaggaagagaaagagatgacactgagagttcacagcgagaaactagcgattgcgtttgggatcatgaacacggttcctggctcgacggttaatgtggtcaagaatctgagagtttgcagcgattgtcacaatgtgatcaagttgatttcaaagattgttgatagagagtttgtggttagagatgcgaagaggtttcaccatttcaaagatggtggatgttccctgtggagattgcgg

SEQ ID NO: 168971 - DNA, 900 bp, Arabidopsis thaliana landsberg; identical to SEQ ID NO: 9153

SEQ ID NO: 168972 - DNA, 603 bp, Arabidopsis thaliana landsberg
ctccttcacacgatgtttgggcgaggtaaaaagaagcaaaccagtcctaaccttcctcagagagcctccacatccacggctggtcgacgacctcgttctcttctatctcagtacgatttcacgccggcagcagaacggtctcctcagctatagacgcctgcatcagaggccgccggtcctcctttacagtcaacggcagctcatgttcggaactatctgccgcctctagagttgttccagcactctggcagtcgacacctgaagtgcaaaggtctgcctccgtagaagtgcagaacaatccagcgactcaagccgcgactactcagcaggttctccggctcctcaacaagaccctccgccttctcagcaagaccctccgccttctccagttcaagagtctcgggctcacagtcacccatcctctcaaggcaacaacttcgaagaatatccacctctgtcgccggatctccagaaggacacacttcaatccctaaacgatctgcttatgttgccggagagggataagtgtgtcactgtttactatttcattctgtgaccgtgttcatggtgcattgatttacttatacttattttgatgtgttc

SEQ ID NO: 168973 - DNA, 768 bp, Arabidopsis thaliana landsberg
ggtcgactctagaggatcccccagcgactcattgatgatattcgaatgaagaaatttgattcctctggttctgtagtagagaaattcttgaagcttcaagaaacagaacctgaattttacgcagatgatgttatcaaaggaatcgtagtgctaatgttcaatggtggaacggatacttcacctgtggcaatggaatgggcaatgtcgcttttactgaaccatccagataagcttgagaagctcagagaagaaatcaaatctaatgttaaacacaacgggattatacaagactcagatctctcgagcttaccttatcttcgatgtgtcatctatgagacgcttaggctataccctgcagctccactcttgcttcctcactgctcatccaagagattcaacttaggcaactacgagattccagaaaacataatgttattggtgaatgcttgggctgttcatagggacggtgagctttgggaagaagccgaggttttcaagccagagagatttgaagggtttgttggcgatagagatggttttaggtttctgccatttggggttgggaggcgggcgtgtcctgcagctggatttggaatgagggtagtgtcgcttgctgttggagcattggttcagtgttttgagtgggagaaggtagaagcaggagatatagacatgaggcctgtgtttggtgtggcaatggctaaggctgagccgcttgttgcattgccgaagccgtggcccgaaatggttcctatcttgtctcagctc

SEQ ID NO: 168974 - DNA, 1272 bp, Arabidopsis thaliana landsberg
  unsure (1)..(1272): unsure at all n locations
atgagttgttcttatctactttctggtgacgcttccgtcgtcgcttcacggcggtggagtgatgtttcttcccggcagcgtttatttctcccacggcaattactccggcagccatcgggttcttcgttttcccgatgcgtccgattagtcgctaatgtaaatgatcatttcagtaaacaatcactcgcgacgagaaattgcttggcttcagtgtttagtgcagacttgggtggaagtaacggtaataatgataacggaaatggcggcggtggcggaggagacggcggcggcgataactctgatgattcttctttcgatttgagatacctctgctttcttttattgggcttgtcttgcttcttccatttccgattatcagctgcgtccgccatagctaaagatcaaaattcggatagtaatggagatgctgtgaaagagacggtttgggaagtgagaggaagtaaaaggaagagactagttcccgattttgtcaaagatgagttcgtctctgaagaatctgcttttgaattatcatcttctctaactcctgagaatctcctagctcaatgtagaaaccttctcactcaattccttcttcctgaaggttttcccaatagtgtaacttctgattacctcgattactctctctggagaggtgttcaaggtattgctagtcaaatcagcggcgttcttgccactcaggtagacgactgagcttatcatctctcttaggcattttcacaaacacttggtgttcattatattgtgttggtagtctttgctttatgcagttgggttaggtaaaggagcaattcctacagctgcagctatcaattgggtgcttaaagatggaattgggtatcttagtaagataatgttgtcgaaatacggacgacatttcgatgttcatcccaaaggatggaggctatttgctgatcttcttgaaaacgctgcttttggtatggagatgcttacgccagtcttccctcagtttttcgttatgatcggtgctgctgctggtgctggtcgatctgctgctgcattgattcaggttctgttcttgtctctgaaagctctaagtgcagcatttgttatagtttagtattttctattgaacttatcatttacttgtctgcaggctgctactagaagttgcttcaatgctggctttgcttttcaaaggaactttgctgaggtctacaataatttttatatggccttagtcttgatcacttatcaacagctattnngttttctcaactattctgggtc

SEQ ID NO: 168975 - DNA, 660 bp, Arabidopsis thaliana landsberg
atgtccacaagacgacttaggcaagccatgaaagctctcaatggctcatcgagaaagcgtcacaccaaacacgatgtccaaacatggctctccgctgccatgactttccaacaagcttgcaaagactccatccttgactccggtggctcctcctccgcctctgccatcagccacatatcacagaaaatggatcacctatctcgactggtcagcaactccctgactcttgtcgacacaatcatgaagaatccaaaaccaaagacaaagtcaaccgctcttccccggtgggtcactgccggagaacggagacttctagtaggtagagcaagagcacacgtggtagtcgccaaagacggttccggagattaccgcaccgtgatggaggctgtcacggctgcccatggaaatggtaggttcataatttacgtgaaaagaggggtttacaaagagaaagtaataatccataaacatgagattactttgatcggagaaggcaaagacctgacggtgattgttggcgatgatagtgccaccggaggaacttctgtcccggacaccgctacaatgagtaagtacatacactcattcattcgtatacataaattgtttataacgaaactttgttgtttgataattagaatgcaatttttgtagcggttg

SEQ ID NO: 168976 - DNA, 1688 bp, Arabidopsis thaliana landsberg
tgttggagatgagaatgtctattcctggaacccacttttaaatcttacaatgttgtcttggagattttggtttctggtaattgtcataaagttgcagctaatgtgttctacgatatgcttagccgaaagattcctccaacgcttttcacatttggtgttgtgatgaaagctttttgtgctgttaatgagatagattcggctctgtctctgcttagggaacatgacgaaacatggatgtgtcccaaactctgttatttaccagactcttatacattcgttatcgaagtgtaatagagtgaacgaagcgcttcagcttttagaggagatgtttctgatgggatgtgttcctgatgctgagactttcaacgatgttatccttggtctctgtaagtttgatcggattaacgaagctgctaaaatggtgaaccggatgctgattagagggtttgctcctgatgatataacttatggttatttgatgaatggtctatgtaagataggccgggttgatgctgcaaaagatcttttttacagaattccgaagccggaaattgtgatcttcaatactcttattcacgggtttgtgactcacggaagacttgatgatgctaaagctgttttatcagatatggtcacgtcttatggcattgttcctgatgtctgcacatataactcactgatctatggatattggaaggagggtcttgtaggtttagctctggaagttcttcatgacatgaggaataagggatgtaagcctaacgtctactcttatactattttagttgatggtttctgtaaattaggaaagatagatgaagcctacaatgttcttaatgaaatgtctgccgatggactgaaacccaacactgttggttttaactgtttgatatcggctttctgcaaggaacacagaatccccgaggccgtagagattttcagagagatgccgagaaaaggctgtaaacccgatgtgtatacatattaattcgctgatatatggactatgtgaggtcgacgaaataaagcatgccttgtggttacttagagatatgatatcagaaggtgttgttgctaatactgttacttacaacacgctgatcaacgcgtttcttagaagaggtgaaatcaaagaagctcgtaaactagtaaacgagatggttttccagggatccccgcttgatgagataacctacaacagtctgataaaagggctgtgcagggccggggaggtagataaggcgagaagcttgtttgaaaagatgttaagagacgggcttgcaccaagcaacatctcctgcaacatacttataaacgggctctgcagaagcgggatggtggaagaagcggttgagtttcagaaagagatggttctgagaggatcgacaccggacattgtgacatttaacagtctgataaacggtctgtgtagggccggtaggatcgaagatggtttgacgatgtttaggaagcttcaggctgaaggaataccgcctgatacggtgacgtttaacactttgatgagttggttgtgcaaagtaggttttgtttatcatgcttgcttacttgtggatgaaggtattgaagatggttatgttccaaatcatagaacttggtcaattttgttacagagtattattccccaagaaacacttgatagacgaaggttttataatgcagctttttga

SEQ ID NO: 168977 - DNA, 321 bp, Arabidopsis thaliana landsberg
  unsure (1)..(321): unsure at all n locations
tatccctaccgctatgcgactcacgaagatctatacgaaagtcggcgacaaaggccaacgatgctgggcctccggacaaatagtgccgaaggactcgctccgcatcgagacctatgggacggtcgacgagctgaacgccttcctggccgtctggcgcgacacgctcaccgccgactcgcnccgcttcgacgacctcacggcgcggatcgcggtcgtgcagaacgagatcttcgacatcggcggcgagctggcgacgccgcccgacgagctcgatcggtcaagacagaaagtcgtcccagggctcgccgtcgcccgccaaaa

SEQ ID NO: 168978 - DNA, 446 bp, Arabidopsis thaliana landsberg
  unsure (1)..(446): unsure at all n locations
atgacacagccgcatgaaatacctgtaacggtgctgatgcctgcctataatgcgcaggactatatacatgctgcgataacatccgtactggcgcagacatatacccgttttgaactgttgatagtggatgatggatcttcagacgatacacaggctgttgccgggaatatatgcgatacacggatcaggtatatacggcagccgcatagaggggtagctgctgcattgaattatggactggcacatgccaggggaaaatttgttgccaggctggatgcggatgatatggcgcacccgcagcggctggagaaacaactgcatttcctggaatcccnnnnnnnnnnnnnnnnnnnnnnnncggatgcatcgtacaagacggaaaacggggaacatcttttcgattttagctgtattgcctatacgcatgatgagatcatgaagaaact

SEQ ID NO: 168979 - DNA, 494 bp, Arabidopsis thaliana landsberg
  unsure (1)..(494): unsure at all n locations
atgactagcctgtccgtcatcatccttgtatacaacgaagccgatgggataggcgacacgctcaaggcccttacagagcagacgtgttcgccagagtcaatcatcgttgttgacgatggctcaacggacggcacggccgagatcgcccaggagttcgagggcgtcaccgtcattgccccctcgtccaacctgggcagcaaggccaaggcgcagaacttcgcgctcgaccactgttcaaccgacctggttctgccggtcgatgccgacaccgtattggcgccggattacgtggagctgatcaaggctccgttctcaaatccccacacggtcattgccgccggatgcgtgctcacgcgctttcaagacacgctctgggagcgcgccaggcagatggagtacctttctggcttacactggttccggcccgtccagaaccactacggagcccngctcgtctgctctggttgctgctccgccttccagctcgacgtact

SEQ ID NO: 168980 - DNA, 1016 bp, Arabidopsis thaliana landsberg; identical to SEQ ID NO: 21318

SEQ ID NO: 168981 - DNA, 2195 bp, Arabidopsis thaliana landsberg
ccttttaaaactttaaatatatgtgttgttagaaatttgaaattacttattttcccattattcgtttcatcaatattaattatttcggtaatacgtcaaaaatgtctatgtctgagttctttaacttttcaaaactagacagcccccaaagacaagaacgtggtcaaaacaagttaaacaagaaataaaacagacacagagaaactcaaaagtggtttctttcttatcaatctaaatctccttttcttttctggtttccaacttcagaacatttcagttctgtgtttattatggatcgtcatgatatagaaaagagattcacggtggtgattgataacagacgactaaaccaatcaggatcatcatcacttttcaccgccttcgctatcagctttgtaactctgatcgtggttaccacgtttactctaatttctaatttctcgatgcaaccgcatagagatttctcaggagtgaagatagagatcaagagagtgattccacacttacctctgagttctgagagagaaggtgaaagaagtgatctgctcaaacaacagacacaagtaaacgagaagctccaagttatcgaagttttcagtggagataacttgtctgacaagtttcaaaagagggtaaatgagtttgtcggtgatggatgcgaagtcaacttcgtcatgacatggatatcaccagcagatttctttggcaatagagaggttttagctattgaaagtgtctttaagtctcatccgtatggttgcttgatgatcttatccgcaaccatggattctcctcaaggttatgcaactttgaagccgtttattgatcgtggttacaaagttcttgcagtcacaccagatttgccttttctgctcaaaggaaccgcgggagagttgtggctcgacgaaataaagagcggtaaaagagatcccggaaagatttctttagctcagaatctctcaaatctcgtgaggcttgcttacatgtacaaatatggaggtgtgtacttagacacagacatgattattctaaaaagcttcaaaggtcttagaaacgtgattggtgcacaaacacttgatccttcatcgacaaattggacaagactaaacaacgcggtactaatattcgacaagaaccatcctctgttactcaaattcatggaagagttcgctataactttcaacggaaacatatggggatacaacggaccataccttgtttcacgagtggctagagctgtagaaggatcaagtggctataacttcaccgtcatgcggccatctgtgttctattcggtaaactggctcgagattaagaagttgttcaaagtgcctaaaacagagaaagattcgaaatgggtcaaaaccaagcttctttatatgcagaggaatggttatggtttgcatctgtggaataagtttagcaggaaatacgaaattgaacaaggaagtgccatgtggaaactggtttcagagcattgcataatctgtgaaattagttctgtatcatcatagtctattgtttgaatttgttccattaatcacacacactgtagataactttgttgtaaataagaagcaaaaccttcaggtacacaataagacattaagccccactaattttggttgggtttaacagcaactgagaatacacgtggcaaaaccaaagacgtcacagaaaaatggaaagtcttacccgaaccatctgactagccgttgagtttatcaccgaaccttaagaaaataataactaaaaccatcttaattttcactaaaattaaacacgaagcaaagaaaccttcacaataagacatcaagcccactattttggtcgggtctatattgggcctatataggcttctaggatttacattagttcgaaagttggattgattaaaatggttatacaaaatctttgtattgtcctctcggagtcaaatatgacagattggctgattgattaaaatgaaaaccattttgtcctcacccagttgttttctaccagttaggaagacctattagtctgtcataaaactgaagactggcacgtgacaacacaaaacagcaccagctccctaatcacgtacgtgacttcaacgaaattttatagcatagattcactaaatcactgaattacagatattttctttcatacagaattaaagaaaaaagggttcaatcacactatcacacgtc

SEQ ID NO: 168982 - DNA, 752 bp, Arabidopsis thaliana landsberg
gcacacgtggagtggtaaagttcattcaccagttcatccaagcaatgggaagaagttcaactctgaatcaaacttgatttctgctgcgaagaggtcttcatctccttacagacactctcgctgtatgtcaccatttcgcagtacaggtgaacggtttttctttacaccatgcgggtttccctgagactcgtagggaaaccgagaacctgagagctaacaggttgagcaatcatactagaaacataagcaggacgtctcaggagttactctacccaaaaagcaatggttcaatcttggagaagacagtttatgtcgacaccgagaatgatcacatgaccaatgatcagcataactcaaatctcatgatctttccagaggaagcagatatgacaggaaggaaaccagatgccaatcctgaacttgaagcttttgaaaatataagtattagaagtagtgaaatggtgaagggaaatgagttagtagagatcagtagtggttttgatcggtctcctcttgcaccaccttctcccaaaaggccttctgaatcttggctttgtcataatctgccttcagtaacttctcagatcacttcacgtagatatcatccattcaacccccaaaagcaggatcttacagaaaactacagaaatggtaccaagtgggaaactattgttaagacttcctacatgcacagagatcatatccgatattccgaagtaagcatctctcattttcacatatacagtgcttta

SEQ ID NO: 168983 - DNA, 629 bp, Arabidopsis thaliana landsberg
cctccacgaacaatccaacaacaacaacgaatcggtcgatctccgacgcgactaaattcgctaagtcagtgttattcatacctcctggtgtagagattgaggaactaacagatgatatggttcttccgggttcaaatatcgtaatcggaccttttgcgggtcattcacaaatcaaagaagttgaatttgttaaaagtagtgctcgtgctagagattgtcctaaagatgatcgtcctgagattgcgattttgggtcgttctaatgttggcaagtcttcgcttatcaattgtttggttcgtaagaaagaagttgctcttacttctaagaaacctggtttgtgtttttattcctttcaatttggttataaaaatcgaaccttttaagttttggaaatctgaaagtttggatttttatttggtgaaacagggaagactcagcttataaatcacttcttggtgaataagagttggtacattgtggatttgcctggttatgggtatgtgttttgatctcttgcttttggataaaacaatcagttttctttggctaaatttggtatatttcagttcattttggtaaaatttaggataagagttcggtatttttggtttggtagttcgattggctta

SEQ ID NO: 168984 - DNA, 1993 bp, Arabidopsis thaliana landsberg
aagcttgacggttaaacttcacgggtggttaagatgcttcgggaaaagatcagcccgcagaatttgaaccccgatatctctcgatggtcggattgtgattgtggtttttgtacatcgtgggcctctacttctgacaaaaaccattccctctttgtcaaaactcaaatcccaaatggtaaaatttcacatctttgtttgagtatataacgctaacacaactttttaattggcgttttaaaacaatcggattcattacaacaggggtaacagcgaaagaggatgttcttttcatacatggtttcatatcttcatcagcgttttggacggagacggtgtttccaagcctgtcagcctcctcctcgactcatagactcttcgccgtggatcttctaggattcggaaagagtccaaagccagctgattcactctacacgttgagagaacacgtagagatgatcgagaaatctgtcttacacaaatacaatgtgaagtctttccacatcgtggctcactctttgggatgcattttggcgcttagcctagccgctagacatggcggcttaatcaagtcgcttaccctccttgctccggtgagttaattagtagttttagcatattttggacctgtctttattggtttataaactttatatgcatgcaagacatgattgctaaagtttataataactgcatatactcttaatcgtcattacattaagaatatcatgatggtcactcatttaagttacttccatttagaaaagtcttagaagtttgaactatgtgactaaattaatatttgacatgattgtgtttagattgcttcaagaaaaatgctgtgtttcttaaccaattcttttacaattttctaatttctgaaaataaaattgaatttttatgtgtgttttttctctaatgtagtaagaaataatttaacaaactagggaaaatttcaaatgtattggcttgacaaaacacattgtgtaagtaagatatatgagaggtacgctaatacaacacgtgtgcatgtgtacgtgtgggcagccgtactatccagtaccgaagggagagaaaaagccgaggcagtacgtgatgaagaaggtggcgccgaggaaggtttggccaccaatagctctcggagcgtcgatggcttgttggtacgaacacattagccgtaccatttgtctcctcatatgcaaacaccaccgtgtttggcaattcatcgccggtgtcttgacccgaaacaacaggtttttattcttatcaacttgttaaaaatttcatttatttattgatccgtttacacaaatttctaatcatactaacttttggcgaaggaaattctcatttgcttaaaatccgtaaagatattgaacttaaaattctttagaaaaaaaaaaacaaaaaacaaatgctcatacttaataataagtacacaaaacgcagtcgcgtgcaaaagacaaaatgttggtggttttgtatcattttttggagaagtttaaaatttttagtgatttaaaagttaggtttggtctaattttagattttttctgcttgagcttttttaactttttctaagtttagaatcatattcattaataggaaacaattgaggggtgatgtagctagttagttgctgtcatcagttaccaaacgcacctccaaatgactaactcttacttacaaatttaattcttagccgcatctggtcgctggctagttagtgtctacgaccattttatggttatgaaatcataataatttacatatatacaaatttagatatagtacaactctacgtggtgttagcttgacccacaagttacatcaaatgaccaaatatagagagacacgtatttaatttgacatgccatcattatatcttcgtttagtggagaagatctctaggacaaatggggacttaggcaaccaaacaaacctgactctagtgttatgctaaattttgaaattccaacctaagtacttatgacta

SEQ ID NO: 168985 - DNA, 2508 bp, Arabidopsis thaliana landsberg; identical to SEQ ID NO: 15423

SEQ ID NO: 168986 - DNA, 721 bp, Arabidopsis thaliana landsberg; identical to SEQ ID NO: 16540

SEQ ID NO: 168987 - DNA, 1370 bp, Arabidopsis thaliana landsberg
atggcactccctccctatgatccgaatttcacattggctttttcatacggtagacgcgataatgtctttgagaatgacccagagcacggtaagaacttgttactgtatagaatttactcataaaagtatctcacttcttggttttaaaacagattttgatctaatccctaggaatggtgaattgtggctgtagaattaggatgttgtgttgattcattgctttagttttagcctggatttagtgcaggacaaaatttacccattatgttgagttatcacagttctggtcatgtgcttaattacaccaatgtcttaagttttgttgttgttggctctgataacttgtttgccaagataggttttagattctctcagatattgatagcatgtgtgttgtctttgtacgttttttcatgatttcagagattctcttttatgttaacagtgagatttaagtcatttgaccaatcaatcagccaaattttgtggctgtagaattaggatgttgtgttgaatccactgcttttgtcacattgctttagttatagcctggattatgttagtatatcacagttgattctgatcctattcgtatcttgtaagatgggaatacattcagatttgatttattgttccattttgtgttttgtctatgcagatgaatctgcttctgctgctatcgtagcggttgagctgataagctctgcacggcttgcacttaagctggatagtgtccgcactgagtactcagctcagtatttggtggacaaagctggctcacgcaacctcaggcgcaggcgcaagctcactgtcaaggactgccttaactttgcgttaaagaaaggcggcataccgagagcagaagattggccacctttgggatctgagtcaaagaccccatcatcgtacgaacctgctctcgtttccatgaaaggagaagtgattgagcctaaggatatggacgaagtacctgagttgttggtgcatcaatcagccgtgggagcaaaactgcatgtgttcactccacacattgaacttcaacaagacgtaagtgctatagctgttagttaaaattcaatataaaatgatccagagagatatacatctgatctaaaatatatgttcatttgttttgcgtgctaggcaatttacttgcctcgtcaggtgagtatgcgcgctacgttggacttagagatgggatagtagttggaacagagaagatccaaggaaagtccatggcaatagtgaaggtatggtacaagaagaagtttgtagttgtcaaagtggctttgagcaggatgttttatttggcgggcgtagggccatctgtgctgcttgtggacttttgtgttccacgcctatccatcgat

SEQ ID NO: 168988 - DNA, 862 bp, Arabidopsis thaliana landsberg
aaagggcgagatatcaaatcgttttaaactctcttatctttgcatctcttttgtaacccttataagttattctctccatcaaccccaccaccatagcaaccttccattaatcacatctccggtactcggagagcccttaaccataccttccaaagtttcttcactccgtcgatctattccagcagccactttcgacgactattaccccgccctagtgctgacgagatctcttaccaccaaatctgcagatcctcaaccgaagtggtaccacaactcgccgatcttgagtctctggatcactccggtgccacaacctccggcgaagcttcattccattctgatcttcaattcaccgaggtcctgccgccacagtcaccaaagcttcagcgcagccacagagacactagggttcccgttattgggcctcccccaattcagcccattttggttgctctctcggcccaatctcataagtgacggcccaacttctttatccactaggcccaatttttgtctaaactttcccttgttttttctctgccaacgattgtgtcgatcactgaaaatatttgttagaggtcaattaatccataatcaatcatcgttgctctgttggtacaaatcttctttgagagcctggctactagaatcacctttggattgtacccatgtttctagatccctttatcgaaaccatttacaaaggttaagaaaggacggcattatgatcccgtcaccaaggtgcggtgattaccgcaactttctcaccttccaatctccatctcctttgttcactgagttatttattgggaaatctatcaatggtagtgataagctccttatgttcatgaaaaccttgaag

SEQ ID NO: 168989 - DNA, 942 bp, Arabidopsis thaliana landsberg
catcacccatagggtcgagcaggagagaacgagcaagtttcgagatcaatcacagcgaatcaagccaagacgaggatgcatgcaagaagaacaaactttcaactcccccgccgaaaacactcgatcccgaaggtcgagtaaggcctctacaagggagttctcaaggaacaaggaagatatcactcgatgaaagaagcccatggggagaaggttggaacttgtagatgaagactccgaggaagaaatggcttcacctgaggaagctgatcaaactgagaatggaggtggtgatgatttggaatcagagaagtgcgcaactcgaaacgagtactacaaactactgaagcgcaacgagtttttaggaactcgataccctcatcctgagaccatggagagactcggcatatatgatgatgtagagtacatgtttaagcagtgcagcctgaatattcatatgtttcggccaatggaggggtatgaggaagagacggtcaattttctttcatctgtagaattgttcatatatggagagtcagaggacgatggaatcaggccagacggaagtttgggatacttggagttctgtgtctatgacgtagagtatcggcttccaatcgatcatttagagcttatgtatgggttcccaagcgaaaaagacacgagtcatcgttttgacaagagagagcttcagtcattcttggccatgcttgggtctaaacatgggttttcatcctctaggaccaagagcaacgaataaggagtccggtggttaggtactttcataggtctttagctagtgcactatttgcaagagagaggaatgggacctttgacaatggagagctagaattgttggagacagcgctacagaagctacttggtttagcatcagatggtaccgttctagcaggagatcagacagatgcttcagaatcattctac

SEQ ID NO: 168990 - DNA, 2495 bp, Arabidopsis thaliana landsberg
ctgctatctcccttcctcaggccctcctttcctcatgaggaagaaaaaaaccgaaacaggatcttttgccgcctcacccggtcggaaacctcatttctctccggttgcatctacttgttcggattcctgtcaaaaagcctcctcttcgggatctcatcccacaacatgcttcttaaaccattgtcagttgatgcataaacaaaagtaatgaagatctcatattgtgagataggcaataagacctcccaagttaccatctgaaaggatttggaaatagaggaacaacatgctaaagggttcggaaagtggctgtccaggagactatctacgacatttagagacctcgctagttatcatgttgtttggttttatatatggtctttggtttattgacccactatatattttgtttctcgtaacctttattatgaaatattatggtattgtagtttgcatgattatgaattcaacccccaaaaaaatattatgattaagaaattatggttgattgtgtagaattatggtcaaagtcattagggtgtggatttttgtaagttggcgaaaatcgactgttgaagtgtaattaattaaacgtgctacttcttacggacgatgtagtttatgtctaatggagttgctaaataatttaagaagtagatgtctaatggagttgctaaataattcaagaagtagtacaagatgttgccgatggagtcgctgaatgagtcaagaagtaatgcaagatattgttgtttttgtgtgagtgttagtttctaaaaaatttgaaaagatatgtttggaacgtgtttaaaggattgattaaaaaataaaaaagacttatagagatttggaacactttatgaaattagagtttgataagaaaaaagaaaagtgtattaggaaatcgttttgtctatataaggaggatctaaagacgtcttggaaaggcaagagagttgaggcataaagaagaaatatttgaaagctttatgtgagattgtgtgcaacttaatattgcgggttatgtacttgtgtgatcaagtgtttttgttttgaagtcagtctaaattcagaaggagtttagctcagggttaggttatcctgattaaatctagactcaggggagtttagttaagggtagagattatccttaaggtttcacgtttatagaagggagcggtaaatcaagaggggtgtgcttgttttacgtgtttgcgaattggttgtaatttgctttcttgttctagtgaaatcgaaatctggacgtggtcccggggagtaggaaaaaccgaacctcgttaacaaatttcttgtctctttactttctgcactttattgttacctcatccgcacttacaagtggtatcagagcaggttcttgatagagatttagtcttgtttcgagtagatcagggtgaggttccggagatcgttcagaagatcattcaggaaataagacagagtttgaaatcaagattgatggagatattgaggttgccattcaagaagcggttttcatggaatgaacgaaatagatctcttcacgagtttaaggttgatggaaacaaagaagtattgtacaagtcatctaaaggcaagcgatgttttgagtgcaaaggttttagacatatgtgttatgaatgtgcgaatttgatgaaggaaaaggagaagaaattcatcatgagtgattctgaaattgattcagatgatggtgaagaattgaagaatttagttgcctttacgacctttgagtctagtattgcgtcagcatctgcatcagggcctgcatcagcgtctgcaacagggtctacatcagcgtctgcaacaggacctgcaactggaagtgataatgatcaaagtgatgatgatgatttaagtattagtgatgaagagtttgctgagaattacaaagctttatatgagcattgtgttaaggtagttgaggagaattcagtattaactaaggagaagctcaagttagaggctaaagttgttaaaacactgaaatttgctgcagagaaagaagaagaagcgtcacaagctaaagaacaacttgaagaaactcaaaagaatttgaggatgcttaataatggcacaaagaagttggatcatattttgaatattggcaagagtgataagtgtggcctagggtttaaaggaaatccttcaaaatcagatccgatgtttgtttatggtggtaaaatcatgtctgcatcagaaactgtgaaggaaactgtaactatggcagagacagcgtctgatacgagaactggtacagagactgcatcagctttaagaaaaattccagaattgaagaatggacctcagcgagtttttcgacctgtttgtcatcattgtggtactgttgggcatattaggccaaggtgtttcagattgttgagggaaataaatcgattgatgaatgcttatgatgtgagatttcatggtcctacatgttatcattgtggagttcaaggacatattaagaggaatcg

SEQ ID NO: 168991 - DNA, 1273 bp, Arabidopsis thaliana landsberg
atcactcttgttcttgctgatcgatctgtccgtcgacccgatggtatcctatgcgatgtccctttataagtcggttctagctacattcctacagattttctggttttatcttatgagaaagaacctaaggatcctctaatcttgggaagacctttcttagccactactggtgccattattggtttaaggaaggggagaataggcttgaatgtaggtgatcttagaatgcagtttgacatgaataagatggttaagaagcctaccatcgatgggtagactttttatgtggatactatctcgtctctggctgacgaatttctcatgaagatgacacttgttgatcctttgaaacatgctctaattccttcaatagacaaagttcccgacgggtatggtaagctgctcgatagaaatgagcacgtgatgcaattagttgctcaagaggagttaattggcacatctacaaacgcatcaacagttggcgagtggagcccagaaaaagctcctaaacttgatctaaaaccacttcctccagggctaaggtacgcatttctcgatgacaattctacttaccctgtcattgttaatgcttctttaaacaaggtagagctcactttattgttaagcaagctgcacaagtatcgtaaagctcttggctattctcttgatgatattccaggtatctctccggacttgtgtatgcataggattcacctcaaggatgagccaaagccctcagttgagcatcaaaagagactaaaccagaatctaaaggttgttctttagaaggaaatcatgaaactgttggaagctgagattatctttccaatttcatatagtgattgggttagtcaagtgcatgtggtttacaatggttaagaatgacaagaataagttgattcctacacagatgataagtaaggttttagggtttttaggcctacttatgtgctgaagtgttgtgtattcagttcaattccccttaaacactaacatgtcgatgcaactatagggggtgtcaatccagtccactgttattgctagcaatcaagatgtgtatagaagcgactaagtcaagccagattataatgatggttggtttctagtaacaatcctaggtcaggatggaaacaactaaaatgagaacttaagggccctactcgatcattaggtcgagtagaaccaacgtgacaaatttaagaactaaaaatgcaatcaataggtgaatgaaataacaggtaaatgaaagtgcaatcaggggtgaatgcgatta

SEQ ID NO: 168992 - DNA, 622 bp, Arabidopsis thaliana landsberg
  unsure (1)..(622): unsure at all n locations
cttcgggtttggattcggctgaggaatattcctgttaactattacacagaggagaccattaaagagattgcatcttgtgttggacatgttttaaaggttaagctagacttagagaagtctcaagcgcaagattatatcatagttcatgttatacttgatgttaggaaccctctgagaaatttcaaggaagttcagctaccaacgggtgaaatagtctctgtgacttttgattatgaaagaattaggaaaaggtgtttcctttgccaaagacttacgcatgagaaagttgggtgtggttcttctcagacaggaaaaacttctttcatggatgcagnnnnnnnnnnnnnnnnnnnnnnnnnagtggacaaaggaatgaatgagcctaagttcaaacaagcaggccttccctcttctctttcagaaacagattggtttgaaggaaaaagggttttgaccaaaaagtcaggtcaattactgtcagagagaatgatggctaccttatcagatgcacaaagactatgtggagtggaggagacacgcnnnnnnnnnnnnnnnnnnnnnnnnnnnnnnnnnnnnnnnnnnnnnnnnnnnnnnnnnnnnnnnnatttggatttggatgtgc

SEQ ID NO: 168993 - DNA, 182 bp, Arabidopsis thaliana landsberg
aaaaaaaacaaattttggcaacttcaataatcatggaaggtaatgctgggacaaaggatcctgtaagtggtggatttggtatgatgcaaaagatcatgtggaagattatgttacacaaagcctacctccatgaactcgaggagaagattaaggaagagaaggaaaaagccgagcttcatctt

SEQ ID NO: 168994 - DNA, 762 bp, Arabidopsis thaliana landsberg
  unsure (1)..(762): unsure at all n locations
gacagtccctacagtctaagataaaggaccttgacccatcatcatcttgcacttaaaattagacattttttttgtgctcttctctttactctgtttattgctctgcttttaacttaggaggtactatccatatagcttgtgtagtcttactgtgaccaaagttttctccttacctatttcaaggtaagagacaaaacctgaaacagtcccacaaatagcatatttttgcccacactgaatctgaaatcattatggaaagtcaagttctttcaaagatcttgcttttctaatcatattcatcccattgtacaaacttgtaacagagaagagaagactctattatttggtttgtcttgtacataacaaacttgttgacttgaccatatcatagttactaatttatctcctctctttttttttcaactatcaaatctaaaagttttgtatgaaaattgtangtggttatggaacacttgaagaattgcttgaagccataacttgngctcagcttggtatacatgacaagccggtaaaacaaataaacccttctatcacattttaatcaaaaagtttcaactttaataacaacatatcatgcatcatttttctgtaggtgggtttgctcaatgttgatggatactacaactctctgctctcattcattgacaaagcagtcgaagaaggatttattagcccgactgctcgtgagacatcgtctccgcacctactgctaaagagctggtgaaaaagctagaggtaaat

SEQ ID NO: 168995 - DNA, 486 bp, Arabidopsis thaliana landsberg
atggctaaaatcagtgacttgtctgatgaattactggtgaagatattatcgtttcttccaacaaaagaagcagtatcaactagtgttttgtcgaaacaatgggagtttctttggatgtagttgtccaaactcgagttctactttagtgatggttcagagtctgcatgcctgagggattttattgccaagaatctgccattacacaaagctccaatcatagaaagcctgcgtttttgctctttttttggatcacttcaacctaaggatttgaaatcgtgggttagaattgcagtttctcgctgtgtgcgtgagctaagcatcagtttacatgatacgaaagctgctgtatcattgcccagtagtttgtatacctgcaaatcgctcgtgactttgaaactttacggtaagaaggttcttttgaacttcctcgaacggtattcctcccttccttaaaaaaatcaacttgaacgtttagatactcagata

SEQ ID NO: 168996 - DNA, 473 bp, Arabidopsis thaliana landsberg; identical to SEQ ID NO: 11053

SEQ ID NO: 168997 - DNA, 259 bp, Arabidopsis thaliana landsberg
atgagttatatttctaggaattcgtatcctcgtattcaagacggaggtcgttgggaacgtgggtttctttcaaagtgtgaatgtggattagacgtcgtaatctatacctcggcgtcgaagactaaccctggaagaccattcttccgctgtccaacgaaacaagatgtaagtagatttgaaattatgtttggtcttttttgatttcatcttaaaattttcgattgataatgtaggaccatttgtttaaatgggtcgaaga

SEQ ID NO: 168998 - DNA, 791 bp, Arabidopsis thaliana landsberg
aaaattcctttttggttgttaaaataaatctcttctttccaccgttttgaaccattattaggaatatttttacctggtgtccatcgattatgtctttcggcctgatcatagaccgtctagacaaggttatgcttgtgatattttcgtttggaacacattttatttgacagtttttaaaatttggacgttaaataagaataattataatcgggaccaaaacatcatttcaatgcctaaatgtagtgctaacttctaatatagttctgtatgaagagcctaaaaagaactaattttataatttgtgtgtgatcaaaattgcttaattggtgaggaaacaattatagtacttaatatttattttgtaagatatgatgattgcattaaaaagtttgaataaaacacatacataggtttgcgctagaggaacacttggttcatgagagcaaagataaacgctacgctgttgtcgcattcttatacaatctcggagcatctgacccttttctcttttcggtattgcaatctcaacctccctactaattgttttactaattgaacaaaaatagtaactcaatatattttttattgattagttggaaaaacaattgaagaagataactgatacacatgcgtccgaggaacatgtcggaatcattgatcccaaaaaactcagttttgaataaaaacattattatagatattccggatcacttactgctcctccatgttctgaaaatgttatttggtccgtttcaaagaggtaactattaattattttcaatcccgtccat

SEQ ID NO: 168999 - DNA, 317 bp, Arabidopsis thaliana landsberg
aatctaaagattttgtattgtggtccacacttgataatgtgtacattcttcttttttccaaatgtgtaaaagaaaaaaaatccttatgctttgtatgttaaaagcattattttggcatttctattttttaccttggaagaggcaataatggtcgtcgcagctgctaaagaagtctacccagtcacagaattattatatattatgttgaacagctgcgctggaacagaggaccgttgaggttccatataaaatcggtgactccaaaggggtgtggaatgtattgtgagacatggtgtttctccgatagcccagtgtgt

SEQ ID NO: 169000 - DNA, 2926 bp, Arabidopsis thaliana landsberg
aaaatctgactcatttgacttgttcttgaagtttcttttctctaccaagtatatgaaacagcagttggagagtttcattgaaacaaccaaaccgagtgctcttgtagccgatatgttcttcccttgggcaacagaatccgcggagaagatcggtgttccaagacttgtgttccacggcacatcatcctttgccttgtgttgttcgtataacatgaggattcataagccacacaagaaagtcgcttcgagttctactccatttgtaatccctggtctccctggagacatagttattacagaagaccaagccaatgtcaccaacgaagaaactccattcggaaagttttggaaagaagtcagggaatcagagaccagtagctttggtgttttggtgaatagcttctacgagctggaatcatcttatgctgatttttaccgtagttttgtggcgaaaaaagcgtggcatataggtccactttcactatccaacagagggattgcagagaaagccggaagagggaaaaaggcaaacattgatgagcaagaatgcctcaaatggcttgactctaagacacctggctcagtagtttacttgtcctttggtagcggaaccggcttacccaacgaacagctgttagagattgctttcggccttgaaggctctggacaaaatttcatttgggtggttagcaaaaatgaaaaccaaggtaatttttttcctccttaaccattattaatcaatgtagtctttattagtatatttccaaaaatattaacatttgtgtatacattttcctattgccaaatatgctatgatgccatagcaatgagtagattggtttgtgtactttatatattactttgtagaacttctaacaattatgacttggtgttggtgtagttgggacaggtgaaaatgaagattggttgcctaaagggtttgaagagaggaataaaggaaaagggctgataatacgcggatgggccccgcaagtgctgatacttgaccacaaagcaatcggaggatttgtgacgcattgcggatggaactcgactttggagggcattgccgcagggctgcctatggtgacttggccgatgggggcagaacagttctacaacgagaagttattgacaaaagtgttgagaataggagtgaacgttggagctaccgagttggtgaaaaaaggaaagttgattagtagagcacaagtggagaaggcagtaagggaagtgattggtggtgagaaggcagaggaaaggcggctaagggctaaggagctgggcgagatggctaaagccgctgtggaagaaggagggtcttcttataatgatgtgaacaagtttatggaagagctgaatggtagaaagtagaaagatagagcatgtttaatgttgtgagatggattgttaacttttcttaatctttgatgttcgtggtgtgttcttatataattaataaagatctaataagccaatagtctatactgaaatacatttatttggtatatatatcatctatggcaaatttaagtatatgcgtttaaacagaaattgcatcaagtagaaaggctacctgttactttaacataatcttgtgctaggtagttgtggaattttcaggacaattaaaaggctatgggtttgtgcaatatgaaactgaagaatctgcttggaaagctatgagtaaattgatcggcatgttgttaaatgacaagcaagtgtatgttggacctttcctaagaggcaagaaagggattctattggtagcaaaacaatattcaccaacgtgtatgtgaagaatcttgctgaatcaactactgatgatgatttaaagaacacttttggtgagtttcgtaagataacaagggctttgggtttgttaactttaaaaatgctgatgctgcttctaaggctgtggagtctctcaagggaaacacgtttgatgataagcaatgggttgttgatagaggtcagaagaagtctgaaagggaaatggaactaaaggttccgtatgagcagagtttgaaggaaattgctgacaagtttcaaagttataacttgtatgttaagaatttagatgaggagaaactcaaagagctctttacaccttatggcactgttacgtccaaaattcccttctctgctaatctaaattgtactatattctgttggtggcatatataaattccctttcctaaaacataacaggtgatgcagaattctaatggcataagcaggggctcgggttttgtagctttttcaactcaaaagcagccaaagatgtaagccatttgtaatgttttactgagtttgtacatgattagtagtgataactcttcagcgttactatcagtggaatctgtaaagatgtcatagatgagtggtaaaatgattgaaaacaaatacatctattttttctattcactgtttccaattctgtttgtgtaatagtggataaattatgaaagaatgcccacatatatacccttaactgttgtacattctataatctaatatttagatgataccttttggaactttatatgttcctgtgaactttatagtggtgaaattttcatgtaacaatgggtacctgcaccacaatgtcaacaagctcagttttcccaaatgagatcagttgcaatgccaccatctgttggtcctcgtatgccaatctatccccttgaaagaactctttaacaaggttgttggatatttctctatgcattggtcaagtaaagctaacaaataatggtctatttgattgttacaaataaaaaataaatctaccaaagagaaattattttgtaggcttgttgcatagaaaattggaaaattttttgctagctacacgaaatatcaaaaaatacatggtcacacatgccaactatactattatatcctcagctaaaacgaaatagat

SEQ ID NO: 169001 - DNA, 526 bp, Arabidopsis thaliana landsberg
atgggtaaaggtggatcactaagcgaaggcgtgattaagaacataatcatctcctacacatacgtagcaatatggatcttcctaagcttcaccgtcatcgtctacaacaaatatatcctcgacaagaagatgtacgattggccattcccgatctcactcacaatgatccacatgtccttttgctcaaccctagcttttcttctcatcaaggtcttcaaatttgtcgaaccggtctcaatgtcacgtgacacttatctcagatccgtcgtcccgatcggagccttgtattcactctctctttggctctctaactcagcctacatttacctctcggtctccttcattcagatgctcaaagcgttaatgccagtcgccgtttattcaattggcgtgctcttcaagaaagagggtttcaaatctgagacgatgatgaacatgctttcgatctcatttggtgtagccattgctgcttatggcgaagctagattcgatgtttggggtgtgattctccagcttggtgctgttg

SEQ ID NO: 169002 - DNA, 372 bp, Arabidopsis thaliana landsberg
gcgattccaatccacagcgttacggttagagtaggatcaacacaatgagtagtgatggagatcataatcacattcgcattggtctacactgtttacgccacagccattgactccaacaatggcactctcggaaccatcgctccacttgctatcagactcatcattggtgctaacatttttgcagccggcccattctctggtggtccaatgaaccctgaacgttcttttggaccatctcttgccgttggaaatttttcaggacattaggtttattggattggtccacttattggtggtggacttgctggagttatctactccaacgcttttatcaccgaatccaagcccgaaaccgtcgaatcataacgcatt

SEQ ID NO: 169003 - DNA, 1024 bp, Arabidopsis thaliana landsberg
aaacccctttcaacaattcagagcacaggacccacagagaatgagccagacttcatcgacgctaagacgtcgtttgcggatttggaaaactctcgcatctccagtatgatgcaagtactatcatcaaatctacctgcctggtatacctttctatacacaaatcttgatttttaagaaaaaaatatgagataactaacatacttaccaaattgggatttaacccaaaatataaagggagataatatataagtttaactaaaaatgttatgtggagagacgcacttgggtcatatttaagagaaatcacttacaacctaaaatgtgacgtggtgaatcgttattagatgataattgtctcttttaatatatgtcataaaatgataataaattgaataatcaggcactaattcttggaggaagtgagacttcaccatcaacccttacatgggccatttctcttcttctaaacaataaggacatgttaaagaaagtacaagatgagatagacatccacgtcggcagagacaggaacgttgaggattcagacataaaaaatctggtatatcttcaagcgattatcaaagaaacattgagattgtatccagctgctcctctcttaggccatcgagaggcgatggaagattgcacggtcgcaggttacaacgttccgtgcggcacaagactcatagtgaacgtatggaaaatccaaagagatccgaaagtttatatggaaccaaacgagttcagaccagagaggtttatcacaggagaagcaaaagattttgatgttagaggacaaaactttgagctgatgccatttggttcgggaagaagatcatgcccaggcccttcattggccatgcaaatgcttcatttaggtcttgctcgtttccttcattcatttgaagtgaaaactgtattggataggcctgttgacatgagtgagagccctggcttaaccattactaaagctacgcctcttgaggttctgatcaatccacgtcttaagagagagctttttgtg

SEQ ID NO: 169004 - DNA, 786 bp, Arabidopsis thaliana landsberg
tttcgtcaaaacataccaaaactctctcacttttaaaagttcaagttaacggaagtaaggggatcgatctgttccaattgtactcaaacacactctctcatccaaaactcaccgctctttctatatatatatactgtttaaaaactgtgcatatcttcaacgatcgtgataatcttaagattatcaaacttgagaatttttttgctgagattgatgtgttcaacacagttacttaatttcactattctctcaaggtgttgatggtaaatgtcatgtggtacaatgcaagggcctgcttgaagactcataataataatcttaagctcttgcatgtggcttcctattatgttcatagcattgaagtatctacacctcttttggatattttctccactgactacatatttgatggggaatataactttgtcataaagtcttcaagacttttctttactaaaaactatggggctatagacccagagagagtaccaatcatgaactacaacatttcatataatgctcgggtacgtactagcaattgctttattcttattttttgttatataattacatacctatatatatatagaaaaccatatttatatattatttgatatgtttaagttgtttatatgaatcaaaaggagatggaaaatcttgggcataggttcttgatgagtacagatgctaactattttgggaggcttaaatatttggcggtggccgtggatataatgaatatatacgaacgaatttgagatgttcaggtaagttttagttgggtga

SEQ ID NO: 169005 - DNA, 292 bp, Arabidopsis thaliana landsberg
atggctcaagggtctattttccacggcgactctagtgtcgatgaggtatttatctccacatctgaatagtacaaatcgttacccatctaacgtggagtatatcgtgtttgtgttaatgtaggagctcgatcgtatggaaataaggatgcgaacgaggtacgacgaaaacaggaggcgcgataagggcgttccgatcgagtgtgattgcaatgctaaggttgtcgttgccacttctcgtgatcctgttacaaccggaaaactttttttcagttgtccgtatgaaatatcagat

SEQ ID NO: 169006 - DNA, 778 bp, Arabidopsis thaliana landsberg
ctacttacacatttctcatcttcctccccataattcacagtttttgcgttggtatggagagtaaaagtgacgcttctgtcgccaccactccaatcatatcttcttcctcttctcctccaccatcactttcaccgcgggtagtgcttagtccatgtgctgcttgcaaaatcttgaggcgacgttgtgcagagagatgcgttttggcaccgtacttccctccaacggatccggccaagttcactattgcacaccgcgtctttggagccagcaacatcattaagttcttgcaggtacctaaattatctatatatctattggtgtaataactataagctctttagttcttagaaagaattacattaagaaagacccgattttatattaatgatatagatgggaatgattttcttgttcttattaggaagatacatatattgaaatggttgttcggaaaatggtttcataggtcatgtgaaaattggaccttacgtagttatttgtcataagactaatgtcaataatttcttctcacaaaagccgcaccacataaccaaaaaaaaagtgaaagtattgcatatagtgtcattgtcaacgttttccttatcatgcacctttcacaaagtcttgtagaaaaatggtatttactcgaattggtcaattaaatacaaaaaaatccttacctttatgaacgaacacatgattgattatttatctatattttcaggaacttccagaatcacaaagaactgatgcggtcaacagtatggtgtatgaagcc

SEQ ID NO: 169007 - DNA, 876 bp, Arabidopsis thaliana landsberg
agtcttaaacattgtttgcttcttgattatattcttctaaatatgcagactgctgatgatgtttccaaggataacggctaaaataacaaagagttgttgcttgaaaatgtagactatgtagtgaatctatttctcatctatgttttgacactatccattttgcccgggttcttatacgagaacacgggacaacacggactaggctcgtggtatgcgcttgtcctaatagcaatgtacaattggtgggatttagttgggaggtacataccgatggtgaaatggctaaatgttgagaacagaaaaggactaaccgtcgcggttttaacccggtttctcctcgttccggctttctacttcactgcaaaatatggtgatcaaggatggatgattttgctcgtttccattttgggattaactaatggacatctcactgtttgcattcttgccaaagctcctagaggatacacggtaatctatctactccatgtttgatagtttctttgagattgcgtttctatttagggtaattgcactaaatgaccatgaacattgaccactagttaaactaggtttaggtaaatgactatatatatttttatttttaacaaacacagtgttataatttgaaaaaggtatattaatgttgtgaaatgtaaagaaatgtttttaattaacattagataccaaaacaattataaacattttaactctgcctacatatacagttattttgattttgtataaatatttggctttgtttttatgaagggcccggagaagaatgcgttgggaaatttgctggtgctatttatattatggggagcatttgtaggatgtgctttgggttggttatggcttattggtaagaaaaatgcc

SEQ ID NO: 169008 - DNA, 779 bp, Arabidopsis thaliana landsberg
tggcagaaactgatgagtagatcatcgccacatcatccagacagatcctatctgctgaaaacctatctctggatcatcatcctgcacctgcatcaggacaaatagaggaagggtttcctgtatgccaacaagtataaaggttcaccactggaacctatagttctgaaaaagaagagaggtagacccccacttactaaccggataataagagccctatccagctaacgagtgccaaatctagcaaaagaaacaaactcctgattcaaaattcaccaagaagacgatcagctccctcacgcattgaaactcagactttaacaaagaggaaaccacctaaacagagacttaccctagtcgatgaagaggcgggaccctccacctctagagcaccaaactagactctcattatccaagctattgtgaaaccagcagtggattttcacaatccacaccatcctcttccttaaaagtggtcagctggaactattgtggtcttgggaaccccttgacaattcgacgtctggtggagattaagaaatctttctcacctgatctaatgttcttcatggagacaaaaaacacagaagagtttgtactacaaaaactccatgctttacacttcaattccattaaactagtaccacctcaaggacgaggaggaggcctagctcttctttggaatcagaatgtggaactagaagtgattacttagagccctaacttcattgaaacgcgtttcaaggcagaaggaaaaattttctatgccacctttatctatg

SEQ ID NO: 169009 - DNA, 2806 bp, Arabidopsis thaliana landsberg
acagttgccataagcgggaaactatatacaacgttttcttcttctttttttaattaaatgttatatttaaatatagaaatgatttaactttaaaccattaaaccattaacactactttagtagattcggttttttcataacttacatttgtagattttgtagaattttccatgcatcaaacatagtattttataggattatgattgcaatatttaattttgtataaatgttttgcaaaacagtaaacatccctacactattcgatattattattaaggctttttctgaaaacatgtaattgggccatcatggttcgattctcagcccaattaaaaccggatcattgagactcacaataacgtcgtcgtttagctctgagctctgagctcttctctcaactccgactcatggaggatgaaccaaactactgtaaaagttttcaagtttcaatttttgttctcaatcgaaatcaaattgagtctctctcaaccacaaaaaatgattgttcaccgtataataccttcccgcgtaaaagaccctctcactcgatttaaacctctcaaaaacttgacaacttcttcatctcccgtattcgaaccctcttcttcttcttcttcttcttcttcttcttcttcggcttcgttttctgtttcagattctttcttggtggagaagatttgttttagtttgaagcaaggtaacaataatgtgagaaaccacctgattcggttaaaccctttagccgtcgttgaggttttataccgctgccgcaatgatttaactttaggtcaaagattcgtggatcaattaggtttccattttccgaatttcaagcatacgtctttgtctttaagcgctatgattcatattctcgtgaggagtggaagattatcagatgcacagagttgtcttcttaggatgattaggaggagtggtgtttctagactagagattgtgaattccttggattctacgtttagtaattgtggttccaatgattcggtttttgatttgttgattaggacttatgttcaggctaggaaacttagagaagcacatgaggcttttacattgctgagaagcaaaggttttacggtttctatcgatgcgtgtaacgctcttatcgggagcttggtgaggatcgggtgggttgaactggcttggggtgtttatcaggagatttctcggagtggtgttggtattaatgtctatactctcaatatcatggttaatgctttgtgcaaagatggtaaaatggaaaaagtcggaacctttttatcacaagtgcaagagaaaggggtttatccggatattgtaacatataatacattgattagtgcctactctagtaaaggtctcatggaagaggcatttgagttgatgaatgctatgccgggcaaagggtttagtcctggtgtttatacttataatactgtgataaatggactgtgtaagcatgggaaatatgagagagccaaggaagttttcgcggagatgttaagatccgggttgagtcctgactccactacctacagatcgttgctgatggaggcttgtaagaagggagatgtggttgaaacggaaaaggttttcagtgatatgagatctagagatgttgttcctgatttggtttgctttagctcgatgatgagtctttttactcggagtggaaatctcgataaggcattaatgtattttaacagtgtgaaggaggctggtctgattcctgacaatgtgatctataccattcttatccaagggtattgtagaaaaggtatgatctctgtagctatgaatttgagaaatgaaatgcttcagcagggttgtgctatggatgttgttacctacaacaccattttgcatggcttatgcaaacggaaaatgttgggtgaagcggataaattgttcaacgaaatgactgaaagggctttgtttccagattcttatactttaactatactgattgatggacattgtaagctcgggaatctgcaaaacgcaatggagctctttcaaaagatgaagaaaaagagaatcagactcgatgttgtgacatacaacactctgttagatgggtttggtaaagtaggcgatatcgatacagcaaaagagatatgggcagatatggtatcaaaagagatacttcccactccaatatcttacagcattttggttaacgcgttgtgcagtaaagcccatctggctgaggcatttcgagtttgggatgaaatgatcagtaaaaatataaagccaacggtaatgatttgtaactctatgataaagggatattgtcgttctggtaatgcctcagatggagaaagctttttagagaagatgatctcggaaggttttgtgccggattgcatcagttacaacacattaatatatggttttgttagagaagaaaacatgagcaaagcttttggtttggtaaagaagatggaggaggagcaaggaggattagtacctgatgtatttacatataattcgatcttacatgggttttgtagacaaaatcagatgaaagaagccgaggttgtgctaaggaagatgatcgagagaggtgtcaatcccgataggtcaacgtatacttgtatgatcaatggatttgtttctcaagataacttaaccgaggcatttcggattcacgatgagatgctgcaaagaggattctctcctgatgataaattctgaatcagtatattttggattcttgctcaaattctacttgtgatagcttcaagctgatatcctagattgagttgatattggtgttttttggtcaaaggaccaaagatgtgtgtca

SEQ ID NO: 169010 - DNA, 539 bp, Arabidopsis thaliana landsberg
  unsure (1)..(539): unsure at all n locations
atttctctctcttctctaagggtagagagactccaaaatacatcaacttaatttttgggtttcttctgcaataatgtctcggcttctctccaagctctctcctctcgtaagtgcaataatgtctccggacggcaacctcggacaagtcctgttgttcaacataccagatatgaagttagtcacagcggacaaaatatatcccgacgagctttatgacgcccagttggtgggagcttcccatggatggggacttttctccgatagaacaaatcggtcggcacttatcagcgactatttgaacccctatgcttccaagtcaaagccannnnnnnnnnnnnnnnnnnnnnntactccaatgtactctggccaaaccgaagtcgtgtgcaacgtggcaatgtcctctcctcctcctgatcaagacgacgaccatgaagattgggtagttggcatcaagttcttgggtagacagcttagcctctgcaggcctcgtcatgaccttcgttggacaaacatccaaaccccttttagtgtgggaagtc

SEQ ID NO: 169011 - DNA, 599 bp, Arabidopsis thaliana landsberg
ttgtgtccacatcgagagctcagtggaattcgacccttatttgctaacaacgatctcttatttgagggagtaagattaagaatatttgagctatatcaaatttggcgccgttaccgaagttttctttctttcaccattagactaggtgtcgacttaagtctagacttttcttttctttcattactaattcagtttttcttttcttctttttctttttcttgtgtttgaggagcttcaggaattcacttgcaacaccaagatgttgattgtcgtacctgatgttgtaggagtattaagggacagagctggtcagggatacaatgaggatggtcagaaaatcgatgagcaggaaaacctgatacctgattttgccgagggtgacaatcaacaccacctgggtgtcgctcacaccaaggcgaatgcagaactgcagctgttgcagatggacgtgttattcaacctgatgactacaacacgcctgatatgttctatgctggtcattccagctaattctagtcaccaagcccacccttaatccacttctacgagtaggatggaatgcatgctataacaaattttcaagagccaagtgatgacca

SEQ ID NO: 169012 - DNA, 613 bp, Arabidopsis thaliana landsberg
  unsure (1)..(613): unsure at all n locations
ctggagcgatagaccatggaagagaagacgggaaagatctagagaagaacataatcttcttcgacaatgtcctcacgtgaaaatgatacatctcaatcagaccatgttcctctcgacataaccattgatatactctcaagacttcctgcgaaatcagttgggagatctcgctccgtctctaagctctggtcgtccattaccaccacaccagagttcatcaagcatcggtccaagaagacatcaccaccttgtgttctactaatcttccgaaaacacgacaagctgatcgttttctcgtctccccaacaccagaatacttattctcatgtgcaagattatcacattgaaatnnnnnnnnnnnnnnnnnnnnnnnnnnnnnattccgtccacggtttgatctgcttagaaggttctaaacagctcgtgatttgtaaccctactttgaaacgattcttccctttacctgagcctcaaggcaccggtgacgaatacaacgtaggagggtttctgggatatgaaccgatagagggtaaatacaaagcattgtgcattgtcagaggatgaaaaactcaagttcttacattggaaattcaagaatcatggagagtaacca

SEQ ID NO: 169013 - DNA, 1686 bp, Arabidopsis thaliana landsberg
gcactggatcttgaaggagtagacattcgtttaccaatgcttgtttacgtgagccgcgagaaacggcctggttatgaccataacaagaaggcaggagctatgaacgctttggtcagagcctcggctataatgtctaatggaccgttcatcttgaacttggactgtgaccactatgtctataactcaagagcttttagagatgggatctgtttcatgatggaccatgacggcgaccgtgtttcctatgttcagtttccgcagaggtttgaaggaattgatccatctgatcgctatgctaacaagaatactgttttcttcgacattaatctgcgagctctcgatgggatccaaggtccaatgtatgttgggacggggtgtctcttccgtcgaaccgcactttacggtttcaacccgcctgatgtttttgtggttgaggaagaaccttctggttcctactgtttcccgctgatcaagaaacgcagtcctgcaaccgtagcttctgaaccagagtactacactgacgaggaggataggtttgatattggtttgattcggaagcaattcggtagctcgagtatgctagtgaattcggtaaaggtggcagagtttgaaggtagaccactagctacagttcactcaagccggctaggacgcccacctggctctttgactggaagccgcaaaccgcttgatttcgcgactgtgaatgaggcggttaacgtgatctcgtgctggtatgaagacaagactgaatgggggttcaacgttggatggatatatggttctgtaaccgaagacgtagtgactggttttcgaatgcatgaaaaaggatggagatcattctactgcgtgacagagccagacgcattccgtggaagcgcacctataaacctaactgatcgactccaccaggttctccgatgggctacgggatcagtagagatcttcttctctcgaaacaacgccattttcgccggtccaaaactcaaactcctccagagaatcgcttacctcaacgttggaatctacccattcaccagcattttcatcttaacctactgcttcctcccgccgttatctctcttctccggtcacttcgttgttgaaaccctcactggatcattcctcatttaccttttgattatcacattgtctctctgtggattagctgttcttgaagtcaaatggtcaggtatctcattagaagaatggtggagaaacgagcagttctggttaatcggtggcacgagcgcacatttagtcgctgtactacaaggtatactcaaagtcatagccggagtcgaaatctccttcaccttgacttcaaaatcttcaacaggaggagatgatgaagacgacgagttcgctgatctttatctgtttaaatggactgctctgatgattccaccgttaacaatcataatcttgaacatcgtagcgatacttttcgcggtttgtaggacggttttcagtgcgaatccacagtggagcaatcttcttggagggacgttctttgccagttgggttttgcttcatatgtatccgtttgcgaaaggtttgatggggagaggaggaaaaacaccgacagttgtgtatgtttggtcgggacttatcgctatttgcttgtctcttctctacattaccattaagaattcggaaattgatggaggatcgtttatgttggtt

SEQ ID NO: 169014 - DNA, 489 bp, Arabidopsis thaliana landsberg
aatgtgtgaatagctatgctaattgcatcactagtaataacaatgtactagccaaatttataatttctaatttatattctttgtcacgataactattcaggagcacacaccataggacaatctcaatgcttcttgttccgggacaggctttacgagaactcaagcgacatcgacgcaggatttgccagcacacgcaaacgtagatgcccaaccgtgggaggtgatggtaatctggcagcattggatctagtaacacctaattctttcgacaacaattactacaaaaacttaatgcaaaagaaaggactattagtaaccgatcaagttttgttcgggtccggtgcatcaactgacggcattgtgtcggaatatagcaagaaccggtcaaaattcgcggcagatttcgcaacagccatgatctcgatgggtaatatagaacctctccttggctctgatggcgacctcagccagataggcagccttgtcaag

SEQ ID NO: 169015 - DNA, 651 bp, Arabidopsis thaliana landsberg
gctcggatctgtttcaattcttctgagattctggaagatgattatctcaagtacgtgaaacagaggatgggtcatgatcgggtatatgttattggcccgctttgttcaatcgggtcgggtcttaaatcgaatcggggttctgtagacccgagtttgctgagttggttagacggatccccaaacgggtcagttctatacgtttgtttcggaagtcaaaaggcgttgactaaagaccagtgtgatgctttggctctaggcttagagaaaagcatgacccggtttgtttgggtggttaagaaagatccgatacccgacgggtttgaggatcgggtttccggaaggggattggtggtaagaggatgggtctcccagctggcggtgttgcgacacgtggcggttggtggatttttgagccattgtggatggaactcagtgcttgaagggataacgagtggggctgtgatcttgggctggcccatggaggcggaccagtttgtgaacgcgaggttgcttgtggagcatttgggtgttgcggttagggtttgcgaaggtggtgaaactgtgcctgactcggatgagttgggtcgggtcatagcggaaacgatgggtgagggaggacgcgaggtggctgctcgggctgaggagatacgg

SEQ ID NO: 169016 - DNA, 827 bp, Arabidopsis thaliana landsberg
gaggatgatgacacaaggtgttgatcctaccacgactacatacaaccatttcttcaagtatttctcaaagcataacaaaccggaagagggcatgaacttatatttcaagttgattgaagctggacacagtccagaccggttaacgaatcatttgatcttgaaaatgctgtgtgaggatgggaagctgagcttggcgatgcaagtgaacaaggagatgaaaaacagaggaatcgatcctgacttattaacagccacaatgcttatacatttgctctgcagactcgagatgttagaagaagcctttgaagagtttgacaacgcagtgagacgagggattattccacagtacatcacacttaacatgatcgataacgggttgagatcgaaaaggaaaagcgatatggcgaagagactatccagcctaatgtcgtctcttcctcactcgaagaagctgccacatacatacagagaagcagtagatgcaccgcctgataaagatagaaggaagtctattttgcatagagcagaagccatgtctgatgtgttgaaaggttgcaggaacccgagaaaactcgtgaagatgcgtggatcgcacaaaaaagctgttggtgaagacataaacctgatagatgatatcaatgaacgaaatgcagatgcaggggattttgagtgagagcactctcttgtaagttgtaaacttaaggttggaaataggctcgtaatgggccatttagtcctagacttcaagccacaattttgattctaagaacccaagcatcttgatttctagcgagatacaaacatcttgttatcaaggacatacaacc

SEQ ID NO: 169017 - DNA, 1529 bp, Arabidopsis thaliana landsberg
gttgcgttccatggcagcatgttttgcataccagtatcgggtatcagactttgctctcccctccaaagaatcaatatcaatctctgtgtcaagcatagaactacgtcgattccgcaaataaaacctcagagaacctgaccctggaactctctgagaattgtcaagtttataacgaggaacattcatcctgtattatgcaaacagaagcaaaatttcaatatccctacactcttaaaacgccttgcacagaatacagaaaatgaaaccaaccataactagacaaattataagcaaagtacctgtaaatagagccataagccagattatctggatcaggacgagtgtccaagtaataatccttcacaggtttcgaatagtattcatcagatttacgagaacgagattcatccgaagcattatcactcttccgtttcttctttttctctcgcttcctctttaccttgtcgtcatcagactccaaagacccttcttcttcaaccaaattataaaccctagcctgattagctaaaccgatatttccatcagctcctccttcttcatcttcgtcgtctccagcctcgacctcggatgaggaaggagccgtcgaagcggcagcgttgatgacagagagatccgtagtgaagctagcgttgcgaagccattgaggagcattcgaaatagctgagatggagttcgccgaagtagggaagacggggaacaagccgcctgtagttacctgtgctccgtcgccgtcttctggtgtattcgacattacatccaccggaaaaaacaaaaccgattatgtatttttttttgtgccgctatatatttctgccaaggatcgtgaatactgaataggcctaattattgggcctatataaataattaatgggctctattaacagtgaaagaatttactcattgtttaatgttcaacaacattcgaatttgaattcgaaactacataaccggtaaaatatttattgattaattattacgccatatttaattttactcgttaattcgttatgaaaaagtacagcaaaaagtataaaaaccacgtgcaatattgtaaagaataaactaaaatttgtgataaatttaggacagtgtaataaaaattggcaaaagtgtcattttgcttttttatttcccaccaaaactaatgattttccatggatccaaaggtaaacacattttggagaaggtaaacacatttgttttggagaattctttcaggcgtcgattcggctccttacccatggataatttggtatatatggaaagcaagaaatgaaaaaggttttgaaaatgtggataaagatccaatggaaatattgctcttagcggtaaaagaggctcaatcgtggcaggaagctcaagtcgagctccatagtgaaagtcatggttctttgtctatagataatcgaatttgggtcaggccatgtatcacaagatacaactttttctgaacatacggtgttttattgatggatcttggaaagcaagtgaccagttctcgggagcag

SEQ ID NO: 169018 - DNA, 299 bp, Arabidopsis thaliana landsberg
  unsure (1)..(299): unsure at all n locations
ttgtcccgttgccgtgggcctcgttttgggtggtgcgccgtctgggggctttgccggggcttcctggttgtgggcctgtggctgggggcgttcttggtgtcctgtcgcgctccgtggggtgtctctgttcgttttcgtttggttgggttccgttggttgcgttttcgttgtggtctttctggtcgccgnttgcttgtgtgtgtgcgtgtcgccggtgttgccccggggtcngctggtcggnttttnggtctgtatcttggggtgcgtttgggtttcgtcctttttcgtttgggtttggc

SEQ ID NO: 169019 - DNA, 616 bp, Arabidopsis thaliana landsberg
  unsure (1)..(616): unsure at all n locations
atcactccggagaaagcactgaagctgctcgagcgatcggcgccgaccagaagcaagcggatggcacagctgcgggagagcggttatccggcatacacgacgtctccggctggctcggctactccgacgaaaaggtcacgcggctggtcggtgaggcgatcgaggacggcttcactcacctgaaactcaaggtcggtgccgacatcgacgacgacgagcgccgcgtcaagctggttcgtggcctcgtcggtcctgacatcctcatctcgatcgatgccaaccagcgctggggcgttggcgaggctgtcaccaatgtccgacgcctgggccaacacgggatccactggatcgaagagcccaccagcccggacgacatcctcggcnnnnnnnnnnnnnnnnnnnnnnnnnnnnnnnnnnnnnnnnnnnccggcgaacacgtagcaaatgcagtggttttcaagcagttgatcaccagcggcgcgatcgacatctgccagatcgacgcgtgccgcgtcgccggtgtgaacgagaacatccccatcctcctgctggcggcaaagtaaagcgaaccggtctgtccgcatgccggtggcgtcgggctgtgcgaggtcgggca

SEQ ID NO: 169020 - DNA, 473 bp, Arabidopsis thaliana landsberg
aatgttttccatgtatgtttacacgatgggagatcgtgattacgcaatgaatgtattgaacctgattgatccggaaaaagtatactttggagatcgagtgataactagaaacgagagtccttatattaagacgcttgatcttgttttagctgatgagtgtggtgttgtgattgtggatgatactcctcatgtttggcctgatcacaagaggaatttgctagagatcaccaaatacaattattttagtgacaagacaagacacgatgtgaagtacacgaaatcttatgcagaggagaagagagacgagagtcgaaacgatggatctttggcgaatgttttgaaagttatcaagcaagtttatgaaggattcttcagtggaggagttgagaaagacttagatattgattcaaaggatgtgaggttgttgcttcatgatgcacgtagaccaaagttctactgctaatttcactata

SEQ ID NO: 169021 - DNA, 1446 bp, Arabidopsis thaliana landsberg
  unsure (1)..(1446): unsure at all n locations
tttccttaatatcatgtttgggcgagaaaaaagaagcgaaccagtcctaaccttgctcagagacctccacatccacggctggtcgannnnnnnnnnnnnnnnnnnnnnagtacaatttcacgccggcagcagaacggtcgcctctgctagagacgcctgcatcagaagccgccggtcctcctttacactcaacgacagctcatgttcggaactatccgccgcctctacagttgttccagcactctggcagtcgacaacctgaagtgcaaaggtctgcctccgtggaagtgcagaacaatccagcgactcaagccgcgactactcagcaggttcctccggctcctcaacaagaccctccgccttctcagcaagaccctccgccttctgcagttcaaaagtctcgggctcacagtcacccatcctcttaaggcaacaacttcgaagaatatccacctctgtcgccggatctccaggaggacacacttcaatccctaaaggagagggataagttcgtcaccgtcctctctcccattcctcgaccgaatacaatatggtatgatcttcttcttctcttgtttgtgatcccatgttgttttcaatgtcagtttagttgagtaatgagttttgtgagattgattagattgagaaaatgtctgaattgattctttgttatgtctcgtgttgtgttggtctgaaagtctgaaagttttgttcttaggatttaagttatgtgttttgttcttagggtttagttgggtaatgatctttgtgaccgtgttgtgttggtatgaaatttttggcccaataatattgttgtagtcgtaaaaatgtcacaaattagtcaccgggtttgggcctcgagtttttatggcccaatagtattgttacagtcgctaaaatgtcagcaataagtcgcatatttaaattcttataattgggtttgggctttgtgtttttgggcctgctgatattcagaaataataattatacatacaaatataattaaacatagaaaacatacttagtcaaaaatagtttttcaaaataatttaaaatgtttgcataattaaacataataacttaagtaaatatcataaacacaaaactaatatttttcttcgtcttcttgttcttcatcttcagaagacgataaattacatcggaatccatcttctgggcatctccgacatctagattgaggtttatggggttgcgattttctgtcaaattgtcgagtacaagatcttcaattgtagtcattaaaacaaaatcatcattttctgtttgcaacatttggtctttattttcatattctcctaatatgtttcccattagatttacttttaaaacattgagccactcccgctttgattttttcgtgtatggataaggaataaaacacacttgttccgcttgagatgttgtttgtcaatgaccatatatacc

SEQ ID NO: 169022 - DNA, 1305 bp, Arabidopsis thaliana landsberg
aagggcttgattggttctccctctaccatctcgcaaatgcagcttttgcggttggtagcgggtgttagcgatgggcaccaatcatagaagccgctagatatcgctttggaccgctcgaaatcgccagttttcaaaagctcattcccgcaagcgttttcggttgcgggcggtagcggttaggttaaattaaataatcttttttaattaattaaaataattatggctttcatccaaaccctaatcactatcattcaaataatctaatcttttatatatcttatttttattagaaaaccctaatcaatatattgtaaccatattctctcaattatggcatccgatgaaaatcaaaatcaataatcaaacataagtatcatctatccttttatttattcattagctagtgtaattcttcgactatttcatggcattgcttttatttattttattttgcattcttttgagtcttttgattgaatacatgttttgatttgttttctcaattagaaaatcatttggtcagacgagatgacccgtttcttgttagaactgataaccctagagaatcaagctggaaattatagaggcaaaagtttgattgagaaaggaaaagaaaatgttcttgtgaaatttaaaaaacgatttccaataaccttaaattggaacaaagttaagaacagacttgatactttaaagaagcaatacgaaatctatcgtaaaatcatgttttgggtcaactggtctcggaactaatcaaaggacaggaagtcttgatgcccctgatcattggtggaaagataaaattaaggtatgttatcacatatgtatatgttaatttcttattttatattcttattttgattggatttttgtttttggtttattgggcttatcctgaagctgctaaacttcggtcgcatccactgcggtttataccacttcttgatgtagtcttccgagatgaaactgttgtcgttgaagagtcatggcaaccaagacgtggtgtacatcgtcgtgctccagtactggacttaagcgacagtgaatgtccaaacaataatggagatgagagagaagatctgatgcaaaatcgtgaacgtgatcatatgagaccaccaaccccagattggatgtcacaaaccccgatggaaaattctccaacttcagctaactcggatcgccatttgcatcacaagagagatcttcacacacactcaagtgaaaaatgtaagcaggaacagaaagcgtaaacaaaattcagcagactcgacgctcgaccgtattgctgcggctatggaaaaaatt

SEQ ID NO: 169023 - DNA, 570 bp, Arabidopsis thaliana landsberg
aaataacagtcacttatgcatacaagaaagacaccaaaggagagcgccacggtactcctgaaggttaggctcttactcttgtagttgtcttaacttgtggattcagtttctttccatcattggaacaataacaaattacttttgtgaattacagagaggcttttggctgcaaattcccaaagaagcagaccccataagctattcgcaactggcccttctacgcataatgctcctaaagttaacggtctacaacctgtaccaatcccgggtccacgtccaccaccacaaccacaagtgtatcaaactcagccaccatcttggccatctcagccacaacaacaatacggcttagcggttcgaccacctatgcagttccgtccgcctcaaggtatgcagtcgcaaccaccacctcctcagtttctaaatcaccaacaaggtttcggtggtccgaggccgccgccaccacctcaagccatgggaatgcaccaacatggaggatggccaccgcaacacatgcagcagcaaggtgggttagtcatattaatattaaataacaaatctttgggagat

SEQ ID NO: 169024 - DNA, 537 bp, Arabidopsis thaliana landsberg
  unsure (1)..(537): unsure at all n locations
acgatccatgccgtgcggtgattggcagcgatggctttggttttgcgccgcaaacggatggtcagtaccagaaagtaccgcagataggtaatgtggtgatagaagacctcgtggaaataggcgccaataccactatcgacagggccactatcggctctaccatcatacataaaggtgnnnnnnnnnnnnnnnnnnnnnnnnnnnnnnnnaatgtggagatcgggtgcgataccgtgatagccgcgcaaaccggcatcagcggcagtaccaaactgggaaaaagggtgatgatcggcggacaggtgggtgtggtaggccatattcatatagccgatggcaccaagatcgctgcgcaaagcgggatatcgaaaaccatttccgaagccaacaaatcctttataggtacgccggcgcaggaagccagtcacgccctccgtaaccaggcggcagcccccaacctggtggagcttgaaaaaagggtaagaaaccaaaaaaaacagctcgctgaactcctgcccaggttatcagagtgttgtc

SEQ ID NO: 169025 - DNA, 456 bp, Arabidopsis thaliana landsberg
tagtcaacgccaatgatcgaagtccgccatttccgctccctcgtggcgattgccgagtccggcaagctggccacggcggcagagcgtgtgcatgtgagccagtcggcgctctcgcaccagatcaaggccatcgaggcccattacggcatgccgctgttcgaccgcacgcggcagggcctgcgcttcacgccggccggggagcggctgctggcgctggcgcgcgaggcgctggccgccatcagcgcggccgaacgcgacctgctgcggctcaagggcgatacccggggggagttacgcgtggtgctggagtgccacacgtgtttcgactggctgatgccggtgatggacgagttccgccgccgctggccccaggtggaaatcgacctcgtggcgagtttcaacgccgatccgctcgcgctgctggcgaacggcaaggcggacatggtgaggggcttc

SEQ ID NO: 169026 - DNA, 1013 bp, Arabidopsis thaliana landsberg
  unsure (1)..(1013): unsure at all n locations
aagttgtcatatatgtggaaaagaaactggaacctacntataccattgtgatatttgtaaagtcaatttggatttggaatgcgcggttgaaaatcccataccagtcgctctttcagatctcaaggtccatgagcatacactcacactcatgccaagattgatatccttcatttgtgatgcttgtgggacgaaaggcgaccgtgctccttacgtatgtgttcaatgtgatttcaggatgttccatcaaaagtgtgctcgtttaccacgtgtcattcatgttaatcaccatgatcaccgtgtttcgtacaagtatcctcttggtcctggagaatggagatgtggagtttgttgggaagagattgattggtcatatggggcttattcttgttctctttgtcctaattacgctattcattcactatgtgcaacaaggggcgatgtgtggaatggggaagagctagatggagtacctgaccaagttgaagatatcgagccattcaagaggaatgatgacaacacaattactcattttgctcatcattaccataacctaatgagcttcgagaaaggatgtggagaaagtagctggtgtagtggatgtctttgccccatcggtacttcttgctctctctacaagtgtccagattcagattgcagtttctttcttcatgaaacatgtgctaatcttcctatgaagaagcgacattttttgagcccacaaccactggcacttagctttgacctccttcaacgccgccatattggcgaagaaatttgcgaagcttgtcatcaaattttttgcaaaggattcatttactcgtgggagttgggagagaacttcgacttactatgcagttcgattactgtgccatttatccatgaaagtcatgatcatcatttactctacctcaaactagaacatggtaacgtcaagacttgccagggttgcggcatagatgaaaaaggagtcgccataggttgtaccaaatgcaattacttttggatttccgtgt

SEQ ID NO: 169027 - DNA, 338 bp, Arabidopsis thaliana landsberg
gataagatgcgtctagtgcgttagaaagtgagttcaaggctctcatattgcctatgcattagtattggatcatcaggtctgtatttgagagtgactgtcgactatggatatgaccctctcacagagaagacagcgaactttgagattggttgcgagaaagtcagttattgacacaaaggttcagagagttacaatttgaatggatcagaagagagtcaaacatacgtgcttcggtcctatcaaaacgaagtctgcaagacaatgtgctatcaatcttccatttatatgtaccgagctatatgagagaggtttggcaatgtgataactgtgtcgtagaa

SEQ ID NO: 169028 - DNA, 905 bp, Arabidopsis thaliana landsberg
cagaaatgcttgagcgcttccttagtatgtatgaggtttcagcagagattctcgtggatgtcgataacctcttccccgatgaaacaggctcgtctttaagaattgcatttcacaacctgtcaaaaaaactagctgatcatacaaccacaaccttcttaaagttcaaagacgcaatagcctcagatgaatccacacgcccctttcatggaggcgggattcatcacctgaccaggtatgtaatgaactacttgaagcttctcccggagtataccgactcactaaactcactgcttcagaacatacacgttgacgactccatccccgagaaaacaggagaagatgtcctcccttcgacattctctccaatggctagacacctcaggtcaatcgtcacaactctagaatccagccttgagcgaaaagctcagctgtacgcagacgaagcactgaaatccattttcctgatgaacaactttcgttacatggtccagaaggtaaagggatcagagctgaaacgcttgtttggagcggaatggatcagaaagcacattgcaagctaccaacgcaatgtcactaactacgagagatccacatggagctccatactcgctttgctcagagacaacaacgactctgtaagaaccctgagagaaagatgcagacttttcagccttgcatttgatgatgtttacaagaaccaaacccgttggtcagtccctgattcagagctccgcgatgatcttcacatctcgacctctgtcaaggttgttcagtcttacagaggatttcttggaagaaatgcagttcgcataggcgaaaaacacatccgatacacttgtgaagacattgagaatatgctccttgatctctttgaatgtttgccatctccaagatcactgcgcagc

SEQ ID NO: 169029 - DNA, 316 bp, Arabidopsis thaliana landsberg
atgtttaggatagttttgcatgcatattgcatatttgtgttgttttcaggtgatttggagatgttggtgagataattggaagaagtggacatgatcaaaccaatatactcaacctgatcaaaccaatatacttgaccttgaggtcgagcaccgtcatcctggacttcctgaagtactcggccacaaccaggcgtttcaccaacatccgtcactcgaccccctggtcgagtagctgccttcaccatatctcaataccactcaaccctctggtcgagtatgtgccctcaccatctcgatccaccactcgacatcatac

SEQ ID NO: 169030 - DNA, 2065 bp, Arabidopsis thaliana landsberg
taaccacgaaactagcttcactcgaccaagcaaaatcactcgatcaaccgaaaaaaaaaaaattcaaaaccgacggtttactctattacatcactcgaccagttcacttgattggtttgtgtttttagtttgctgttactaatgattaacgtttatttttgagttctgtccgttttcaggtttcatcatgagtaactacagtggagaatcctctatggaccctgattacaacgtggatgaagctgagtcctggtccgctagaccgagagagcaacatgtttaccagagcttcagggatgaattcgaacgctctgcagccggacgtaattagagaagagctgaaatcgccagaggaaagagggcgatgtcaagtagatatgagctgattgatgaggacatcgaaactgagtatgagccagagtcatggcgcaaggagacgaagctactgaacaaactcgacgaggttacagtggaggagtatatcaaattctttgagatgaatgacttctggggaacgcggtatccgtgttatgagactttagcccagctggggttactggaggacgtgcagcatctgttcgagaagtgtcatctggagacactcatgtcttacccttaccctgcctataaggaggagacaatcaagtttctttccacgctgcaagtggagatgtatgaggcactcacggactttgagcaggataccatggggttaggcttcttgacgttctcagtgaatgaacagcggtatcagctttcgatcaagaagttggaagaactgtttggtttccctagtggaaagggaactaaacccagatttgacagagaggagcttaaggatttgtgggccactataaggaacaatctaccgctaaactcggcgcggtctaagagcaaccaaatccggagtcctgtgatccgctactttgagcgatcggttgccaacgtcttttactccagggagtctacaggcaccgtgtctaacacggacatggagatgatagattatgcgcttacagggattctccgacggacgaaggggaagaatgtcttgagaggcgatctcaacaacgcaccaccagtaatgcctctgttgatccatctgtgtggatacaggaagtgggcgttgacgaacgggaagaagaaggtgagaggagcactatgcgtgggtggcgttgtgtcgccaattctggaagcttgtggagtcccgctcaaggaaccaggtttagcaccgaggatgatggacttggatcatttgcgcagatgtgagttcttggagtttgacatggctggcgactttcaccgctacaggttcgagcattcatcgattagaatcgccaacattcttctcccctgcattgacgctactaggattcttgagggcaggaacattgacttcaagcctgcgcttgaagatctttatttcgagggcagtccgccaaccgaggagtttagtcacaccgaaggagctacaacagaagatgttgatgagacggatgatatagatgaagcggagtttgacacgagcatgtatcatttcagtgagcatatacctcctgcgagggaaagcaagagtttgagtgaagctcacaggaacaacagcaagctgcagaagtggtgcaagaaacaggacaagttactcgccaagtgcttaagggctatcaagtttctgaaggacaagctcagctgctcctcttccactacagctattccgcagggacatctccctcaggacatgcctacgaggagatatgacgcgcccgagccaagtcggcgcaagcctgagcctagagagcaggagattccgcatgtccctgcgaggcattcatcattcgagccttgtgaatctgggagtaagaggaggaccacactcactcgatctagcagtaggagcagacgacttctgcagtctcgtagtttacgcgaccgcggtgctggccgcagcagaaggagagaggtcgagtttcctcagagcggtgctggccgccagagagctgatgaggtcgagtacccacctgctggagctgatacagaacaaggtggttcgtctatggcctgggagcaa

SEQ ID NO: 169031 - DNA, 2485 bp, Arabidopsis thaliana landsberg
ccaaatgacgtggggagaggcgcggtgggcccagaaccacctcttcctccatgaggacagccgcttggagctgcagaggactgggcaatgacctcgcagttcgacgtctaaaggagataaagaagaaattctctccagacatcattgttctcatggaaacgaagcaaaggaatgacatcgtcagagatatttgcagcgatgtaggttatgatagggttgtaatggttcctccaaatggtctaagtggtggaattgctttaatgtggaaaagtagtatttctgtttctgttctttatcaatccccataccttgtagatacttttgttaatattaatggatttgggttctatttatcttgtgtatatggtcacccaaatcctatccatagacacttggtttgggaaagattagaacgaacagcaacacaaagaacaggtccttggatggctataggggacttcaatgaaatacgaggcaaccatgagaaaaaaggaggcaacttgaggccagaaagctctttctttgatttcaggaaaatgatacaaatctgtgacttccatgatctcaagtttacaggagaccctttctcttgggtcggaaaacgaacacactcatgatgttgcctgctgcttggatcgatctttggtgaataacgaatggttaaatcaacaccccgccccccacatggaattctttgagttaatagaatcagatcatcgaccagtgatcacaacaattacgagcgactttgagcagaagcataaccaattctgttttgatggaagaatggttgagcgtgatgggttcagtgatgctgttcgcaggtgactccctgtttttctgtcaagccaacatgaaatcgtgtcttgctatcaaggatattctaacacagtatgaaagagctccgggacaaaaggtcaataccagtaaatcatctcttcattttggaaaaaaggtacaagatacgacgaagacggctatacgcagaactcttgacattcataatgacgggggatgtaacaagtatctgggattgcctgagcaatttggaagaaagaagattgagttgttccagtacatagttgaaaaggtcagacagaacccaaagggatggaggaataaatttctttctcatggaggtaaagaagtcttgctaaaagctataacccttgctatgccggtatattcgatgaactgttacaagcttcccaaacacatatgtgaggagattgaacgcatcatttcacagtattggtggtgtactcaaccggaaagaaacgcaatccattgggtggcttgggagcgaatgaaattttcaaaagaagaaggaggactcggatttcgggatattggcaaattcaatgatgcactactcgctaaacaggcttggagacttcttcataatcctgaatgcttaatggcaccgtatgttgcgggggaggtactttcctaattcaaatgttttagtcgcttcaattggctcacaaagctccttcggatggcaatccctactgaagggcagagatctattaaaaaaaggaatgcgctacatagtaggagatggaaattcgattcagccttgggtggatccatggctgccactacaccccccccccgacctccgcgccaacttgatcacactcaaccacagtttcaaacgcttcaggactttttcctcccacacaaaactggatggaatgaacgattagtacaggaacgaatagcaccagaggatattccgcacatcttggctttaaagattagccagtcacaatcaaaggattatttgggatggcattacacagatacagggctttacacagttaaatcgggttattggcttgcaacacacctcccgggtgtcgaaccacgagcactacccccagcaggggatccacacctgaaaaaaagtatctagaaaacgacaacggcaccgaagattaaacatttcctctggagaatgctctcaaaggcacttgctacaggagaagaactcgagcgaagacacatcaatccggataagtactgcaaacgttgcttcacagagacagaaactacagatcacctatttttcacctgtcctcacgcaatgcaaatctggagagcatcaaccattccgattcaagaccttacagactcacaagtaagcttagaaacaaagatgactataatattcgaatggcacaagcaaagctcgaacaaccagctacaggcacaacttcccttctggattttaaggcgaatctggaagagcagaaacaaactaatattcgggggcgaggcaaacacgtgggagaaagatctatcaagcgcacatcacgatgtcgaagaatggagtactcttggagatacacgtcgtcttagggaatttaactctcctattgcgaatggtagtcgacgcattcttcactggagacggcctgaagcaggatggataaaatgtaactatgatggaagctacatacaacatcttcaaagaacatca

SEQ ID NO: 169032 - DNA, 415 bp, Arabidopsis thaliana landsberg
  unsure (1)..(415): unsure at all n locations
atggctaaacccacatcacgaaatgaccgatttgcccttttcttcataaccctaattttcctgatcctaaccgtttccaaaccggtcgcctctcaaaactgtggctgcgcctctgannnnnnnnnnnnnnnnnnnnnnnnnnnnnnnnnnnnnnnnnnnnnnnnnnnnnnnnnnnnnnnnnnnngaccttgccggagcagtggaggcggtggagatcctgctgtttcactagaaggaacggtgacacctgacttctttaactctatactaaaccaaagaggtgattgtcctggcaaaggattctacactcacgacaccttcatggccgcagctaattcttaccctagcttcggtgcttccatctccaaacgcgaaatcgcggcgtttttcgctcacgtagcccaagaaacagggt

SEQ ID NO: 169033 - DNA, 589 bp, Arabidopsis thaliana landsberg
ctccttcacacgatgtttgggcgaggaaaaaagaggcgtaccactcctaaccttgatgagagagccaccggatccacggctggtggacgacctagttctcttctggctcagtatgacttcacgccggcagcacaacggcctactcagctatagccgcctacaacagaagaccccgttcctccattacagtcatcgacagctcatgtccagaactacccgccgcctcaacaattattctagcactccggcagtcgacaacctgaagtgcaaaggactgcttccgtagaagtctagaacaatcttcgacttaagcgacaacgactccggagcttgtccctctgactcctcagcaagaccctccgccttctccagttcaagagtctcgggctcacagtcacccatcctctcaaggcaacaacttcgaagaatatccacctctgtcgccggatctctaggaggacacacttcagtctctaaatgatctgcttatgttgacggagagggataagttcgttactatcctctcttccattcctcgaccgaatacgacatggaatgatcttcttcttctcttgtttgtgatcccatg

SEQ ID NO: 169034 - DNA, 195 bp, Arabidopsis thaliana landsberg
  unsure (1)..(195): unsure at all n locations
atggccaagggaagagacagtgcatcnnnnnnnnnnnnnnnnnnnnnnnnnnnnnnnnctgtgtcagtgttgttgcttcatgctgactacgttcaagctgcgactttcccggtcggtgnctctgagaaaaggtcctgaaacgctgtgggttggcctaaaggcaaacactttagagccggcgacgttaatggtata

SEQ ID NO: 169035 - DNA, 1232 bp, Arabidopsis thaliana landsberg
tttttatatctaaatccatatattgacaaattcaattttgaaaacgaattaaaaaaagagcaatttgcctagaatgtaggcaacgtagtgtgaggacgacttgtggcaaacatgtggatgatgataagccacaagacaaagaaagcaatccctcatccatcacaataatatccattaatgtgaagtggaccaaaagagagagaagcgagtgttacagtcctcaaaatagagacgaaaccatcctaatccttcaaactctctcacagcttcaagactccactggaagcgccactattgtccctacactcctctcctctataaggtctcttctcacgaggctctctctcaaaccattaaaagatgcgtttgctagtagcagaagcagcttcaccattgtcctctgctgcaactccaacatgtaactctcatacttgcagatggaagccttactcaaactctactgacttcacagctaatgcatcagtccttctcatccttgtcatctctgctctcatttgtgctctctctctttacgctgcaattcgttgctttctccgaccaaccctcgagactgaagacgaccacaagcctgaccctgaagcagctgcttcatccactccaacaactcctacacttgtctactcctccgaccttgaactcgcaggagctgaagcagagtgtgccatttgcttgtcggaatttgaacaaggagaaagcattcaagtgctggagaaatgtcagcatggtttccatgttaagtgtatccacaaatggctctctactcgctcctcctgtcccacttgcagaacttctatcttctcacaacactctgaaactccttcaagccacatcaatgcttagcttctttttttaatcttgtttttccaaaagctttagagttgtatcatgttttgcttgagattaccctgtatctgctctgtattattaggtaacgtagaccaaccaaagtatttacttactagtcttgtattgtatcgatctaattctacatcgccacacaatgaaacagtgtttttttttgttttgaaacaagagttcattgtactaggaaagtttctggaccaatcttcagtaagaatcaaataaaactcagagcaacttaaattataatgtgtatggaggagattagatggaagctgaataactaacatatactgcaccaaatcaaaagcagttttcgaattttaaaggctcaaacactcattgggcga

SEQ ID NO: 169036 - DNA, 344 bp, Arabidopsis thaliana landsberg
tgtttttaatatatgcagatcgaaaaatcctatcagatgggcgaaaacaccgtgcaggctctgcgcggggtttccctgcgcatcgaagagggggatttcgtcgccatcatggggccttcggggtcgggcaagtcgaccttgatgcatattctcggtctgttggatgtccccaccagcggttcctatcaggtcgacggtcgcgaggtcgcccatctcagcgaagacgatctggcggttttacgccgtgaagtcatcggttttatttttcagcagttcaatctgttgccgcgcatgtcggctttggaaaatgtttcgttgcccttgctttacttccaaaaggaaat

SEQ ID NO: 169037 - DNA, 592 bp, Arabidopsis thaliana landsberg
  unsure (1)..(592): unsure at all n locations
gattcccgtctgattttctataaaaaagggagaatactatccgtgctgttgttcaacgtgtagagatgaaaaacaattacnccggttattattttatcacgtagctccggggcattccttgagcnnnnnnnnnnnnnnnnnnnnnnnnnnnnnnnnnnnnnnnnnnnnnnnnnnnnnnnnattgtgcgtgaaccgggcgagagagcgaaagttgctgtagagtcttatgatgacaggattgatcctgtaggagcatgtgttggtatgaaaggttcgcgtatccacggtattgtgcgtgagttacgtaatgaaaacattgacgttatcaatttcacaagcaataactcgttgtttattacccgtgccttaagtcctgcaaaaattacttccgtaaaactggatgacgaatcaaaacgcgcagaagtatatttgaaaccagaccaggtatctttagcaatcggtaaaggtggtcataacattaaacttgccggaaaattaaccgggtatccaattgactgtttaccgcgatacagatatcgataaaaaagataaggatctggaagaaattgcagacgaaattgaaggatgggta

SEQ ID NO: 169038 - DNA, 1194 bp, Arabidopsis thaliana landsberg; identical to SEQ ID NO: 21348

SEQ ID NO: 169039 - DNA, 303 bp, Arabidopsis thaliana landsberg
cctggcagcaaataatttggttcaaatgaaggatttccaagtatgcctttatagcttcggtgacaactagacaacgacttcaccaaagagatggaattttgctatgggatcttcaagttccttacctttaatgcaaatttaacgatgaaacctcgcaacacattctttgagtgcacattctctagtgaagtatgatcttaattcatttctaaggccgatattgatccccaaaactgtttgtggatactgaatagagttcatggataaagactctgccaaacaaaaatgtgacagcgagaaaat

SEQ ID NO: 169040 - DNA, 598 bp, Arabidopsis thaliana landsberg
  unsure (1)..(598): unsure at all n locations
gacgtcaccgagatcatcgagaaccagttctggnaagaggagcacggcgccatcgccgaggaattcgagccggactggtcgccgatcccgggctatcgcggccagaattccaacatgcacctgaccgaggcgctgatggcggcttacgaggcgaccggcgaggacctctatctcgaaaaggccgagcgcatcgccgacctgatcatcaaccgccgcgcccgcgagaccggcttccgcgtcggcgagcatttcgacgagaactggaccctgctcaaggattatcgcggcaacgagatgttccgcccctcgggcaccaccccgggacatgcgctggaatgggcgcggctgatcctgcagctctatgccctgggcggccgcgagaagacctggatgccgggcgcagccgaagagctcttcgcccaatccatggcgctgggctgggatcgcgacaagggcggcttcttctatacgctcgattgggatgataagccggctaagcgttcaaagctctggtggcccatgcccgaggcggcaggcgccagcgccttacatcatccagcatgtcccgtcggatatgcatgagagcagctaccgtttg

SEQ ID NO: 169041 - DNA, 218 bp, Arabidopsis thaliana landsberg
ttgaggattggctcagggatttcgctgatgcggaggtgaatctcattcgtctcccgtctgagttgaaggaagagctcaaagcccctgctcctgagcttgctcctctaagccctggaggtcatagatcggtcgagactctcgcagatgaagtgggggtcaccgatcagtctggatcgtatctgcttgccgctgggactctcccgactaaaaagcttgag

SEQ ID NO: 169042 - DNA, 382 bp, Arabidopsis thaliana landsberg
catttcatcgatctatacccttgctgaaatcgattagcgacacattttcaatatgtacaacgcgaaggatgtgagcagcgatacaatggcgttcaacaagaacacgagggctcttctctatgcgctgaaggagaaagcaattagtaaaaaagaactaccttataggagagactacttgtattcagcgggggaggaaagcctcgggaaaaaaaaagtgtacgcaatggtacagtgtacgaaggacttatcagctaaaaattgtagtgtctgtttgagttatattttgtcgaagcttcccaaatgctgcaagggtaaacaaggaggaagagttttgagtccgagctgtaattttaggtatgagctttacccttttgtgaagact

SEQ ID NO: 169043 - DNA, 316 bp, Arabidopsis thaliana landsberg
agcggtgacgcaaggcttccaaggagacgcgccggcagcaactcatcgaggcgaccatcgattcgctcgccaagcgcggctattccgacaccacgctcgccgatgtcgcggacggggccggcctttcgcgcggcatcgtcaactttcattttgagagcaaggaaaacctgctgatcgccacgctgcaattcatggccgaggaatatgcggaccattggaatgcggcgctggagaaggcgggggccggcgcagcgggccgcctgtgggcgctcgtccatgccgatttcgaccgcaagatctgcacccggcgcaagct

SEQ ID NO: 169044 - DNA, 230 bp, Arabidopsis thaliana landsberg
aaacattgatagacaaaacacgtgaaattgagcaagagctgaaagagcttagaacagagaggatggtgtttgaaaggatggtttcagagaaactcgaaatcaagatagagaatgaggtgcttgagaaagttgaagaagctttgtctgaagcgaaagcaagcagtaagaaaatgatgattgtcatggttatcgggtgtatgatcttactcggaatcaccaaatttgtaggg

SEQ ID NO: 169045 - DNA, 454 bp, Arabidopsis thaliana landsberg
  unsure (1)..(454): unsure at all n locations
gatcttaattcatctttcatttgtccagagatcaaagctctgaaagcacatgtgtggaaagtgtaatgtccgcctaagttacggcattttttatggcaaatattatcaagttgcgtgcctgtaacagagaatttgcagaaaagaggtataaattgtgattcaggatgtgtcagatgtggttctatagaggaaacaataagccatactcttttccagtgtcatccggcgagacacatatgggctctttcaaagatccctattgtccgagggatttttcccacctatttatgcaaatttggatcactcattctcaagaatctctttagaatttgattcagtcgcatatccatggatactttggtatatttggtnagcaagagctattaatactatttgaaaatgtggagaaagatcagtatatatgtgttatgtctagtacaaaaaaaggcacatc

SEQ ID NO: 169046 - DNA, 217 bp, Arabidopsis thaliana landsberg
tcgatgagtgttaaaagatttcgctgatgctgaggttaatcttaatcgcttcatggccgagctgaaagatgatctcaaagctccagctcccgagtccgctcctctgagtccgggtggtcataggtcggtcgagtcattaaccgacgaggcgggaattacagagcaagctggatcgctcctccctgccaaggataaccgcccatctgaagatctcgat

SEQ ID NO: 169047 - DNA, 832 bp, Arabidopsis thaliana landsberg
tgatcatgttttgagagaagggaaagagatggcattaaagaacagagagaggaagctttacactataatttccagcagtgaatattcttcatggagggaaggactatggagcaacgttccttttaatcatcatgcatcattcgagactttgggcatggatcttgataagaaagaagagattaaaaaggatttgcttaagtttagtaaagggaaagattattatcggaaggttgcaaagccatggaagcgcggttatctcttgtttggacctcccgggacagggaaatcgacgatgatatccgcaatagcgaatttcttggagtatgatgtgtatgatcttgagttgaccacagtgaaagataacgcggagttgaagaagttaatgttggacacaaaagggaagtctattgttgtaattgaagatattgattgttcccttgagcttacggaacatagaaagaaaaagaaggaagaagatgaggataaagaggagaagaaggaagctgagaacttgaaaagagtaagtgggaataatgagagcaatgttactttgtcggggttattgaacgccattgatgggttatggtcagcttgtagtgatgagaagattattatttttacaacaaattttgtggataatcttgatccagcattgatacgtagaggaagaatggactaccacattgagatgtcttattgtaggtttgaagcatttaaggttttagctaagaactacttggagaacgagtcacatgacttgtatgaagagattgggagattgctagaggaagtcgacgtgtctccggctgatgttgctagaatttaatgccct

SEQ ID NO: 169048 - DNA, 606 bp, Arabidopsis thaliana landsberg
ttctctgtgctcctgtagtggaaggattgagcgaccgttatggaaaaggacccgtactgctcgcgtccctttttggtttcgaattagaattatattttgatggcattctcaccaacactcggatggcttttcctcggacgagtgatagccggtatgatgggcgcaagctttacaacggcaggtgcatatattgctaatatcagcacaccggagaagcgcgcacaaaacttcgggatcatgggcgcagcatttgcattgggattcattattggtccgctcattggcggacttgttggtcacatgggaagtagcgtaccttttatggtagctgccgcgttaacattgctgaactggctctatgcattatttattcttccggaatctttatcaccggaccacagaagaaaattcgagtggaagcgcgcgaatcctattggaacattaatgagtcttaaaaaatatccggtaatcacaggtcttgtagcgtcgttgttattggtgtatatcgctgcacatgccccccaaccccaactggccttattatacaaaagagaaaaaagagaagggatagcagcatgatcggaatttcgataacggtttcggagt

SEQ ID NO: 169049 - DNA, 2684 bp, Arabidopsis thaliana landsberg
atagatcaaggcatatttcgttaccgagtgatgcccttcggactcaagaacgccgaggcaacctttctactcttcgtcaacaaaatcttcgcattagggattgggaagacaatggaagtttacatcgacgagatgttggtgaaatccatgacagagaaagatcacatatcccatttacccgaatgtgtcaagcccaatcctgcaaagtgccgcttcggagtaagatccggcgagttcctcggatacctagtcacgcaccgtggcatcgaggcaaatccgaagcaaatcgaggcattgttgggaatggcgtcacctcagaacatgcgagaagtgcagcgcctaaccggaagagttgcggtccttaaccgtttcatctctcgctcaaccgacaaatgcttagccttttacgatgtgcttcggggaaacaaaaagttcgaatggacgacccgatgcgaataagcttttcagaaattcaagaagtacctggcaagtccacccatcctcgcaaaacccgtaatcggagaaccactatacttgtatgttgccgtatcggatactgcggtcagcggagtgttagtcccaaaagacagaggcgagcagaaaccgattttttacgtctcacagactttcaccagcacggaatctcgctatccgcaaatggaaaaacttggtttagcagtcgtaatgtcagctcggaagctgcgaccctacttccaatcccattccatcatagtaatgggatccatgccactccgcgccatcttacacagtccaagccaatcaggacgtctggctaagtgggcaatcgagctcagcgaatacgacatcgagtatcggaacaaaacatgtgcaaagtcccaggtcctagccgattttattgtcgaactgcccacctaggaggtccgggaaaatccgctcgacacaacttggattctacacgtagatggctcgtcctcgaagcaaggctcggatgtaggcatccgcctcacctcaccaacaggagaggtcctcgagcagtcatttagattaaactttgaggctaccaacaatgtggccaagtacaaatcgctcgttgccggacttaatctagctcggggactaaagataggaaaaatccgagctttttgcgactcccagctcgtcgcgaatcaattcaacggagaatacacagctcgggacgaaaagatggaagcctacctgattcatgttcaaaatctagcgaagaatttcgatgaattcgagttgacaaggattccacgaggagaaaatacatcggctaatgccctggctgctctagcctcgacatctgacctgagcctgaaaagagttatcccggtggaattcattgagaagccaagtattgagctcggcaaagaagaacacgtcctcccaatacaaatcagcgcggatcaaaacaacccagatgatctagataactgcagctcagaatggatataaccaatcaaaagctatatatctgaagggaaatggcctttgacaaatggaaggctcggaaactcaaagctcaggctgcacgttttgctctagtaaatgaaaaactttacaagtggcgattatccggaccattaatgacatgcgttgaaggagaagcggtttgtaagatcatgaaggaaattcacggcggctcgtgcggaaatcattccggggggagagctttagccattaaaataaaacgccacggattcttctggccaacaatgatcaaagactgcgaaaactttttaaaacgatgcgaaaaatgtcaaaggcacgcgccaacaatccatcaaccggccgagctcttgttgtcaatcgcctcgccgtatccattcatgcgatagtgcatggatacaattggacttatgcatccctcaaagcagaaaaaattagttctcgtcttgaccgactatttctctaaatggatagaggccgaatcttacgccaccataaaggacgctcaagtcaaaaactacgtgtggaaaaatatgctatgtcgccacaggataccttatgagatcgttacggataatggctcgcaatttatatcaacccgcttccaaggcttctgtgataaatggggaattcgactaagcaagtcaacaccacgatatcctcaaggaaacggccaagccgaggccgccaacaaatcaatcctcgacggattgaaaaaacggctcgatgctaaaaagggctcgtgctccgacgaactcgaaggtgttctctggtcgcatcggacaactcctcgccgagccacaaaagaaacccctttcgcaatagtctccagaaaagaatgcgtaattccagccgaaatgatagtaccgagcctacgccggagtctatcccccgagaacacccctgataatactcagaggctcctcgacgaactcgatctgatcgatgaacgaagggattcagccttggttcgcatacaaaattatcaaaatgaaacggctcttcattataactcaaacgttcgacagcgtagattccacgaaggagatcgggttctccgaaaagtttttcggaacacccccgaaccgaacgctggaaagctcaggacaaactgcgaaggaccatacttaatttctaaagtcatccgacccggagtatatgagctcgccgatttaagcggcaaagccgttccaagatcctggaacgcgatgcacctaaggaaatactacaac

SEQ ID NO: 169050 - DNA, 621 bp, Arabidopsis thaliana landsberg
  unsure (1)..(621): unsure at all n locations
aaaaaaaatgtctttggacctattgtcactgcatctgagaatgtaaagtctgttgggcacaagtgggtattcgtgcaaaaaaaaaataagaaagatgagatcacncgatataaagcccgacttgttgcacaaagtttctctcaaagaccaggagttgattatgaagaaacatattctcgggtcatggatgcaattacattcaggtacttaatgagcctttcggtatctaataatttagatatgtaccttatggatgtggtgacaacttatttatatggatctcttgataatgatatatatatgaaaatctcggaaggattaaaacttcctgaggcattagactcatcaaagtctaaagatatatatgtggtcaaattacagcgatcactttacggattgaaacaatccggatgcatgtggtataatcgtttaagcaattatctacttaagaaagggtatgtgaataatgaaatctgcccttgcgtcttcatttagaaatctccttcgggatttgtgatcattgttgtttatgttgatgacctaaatatcattggacctccaaaggagattgatgatgcaagaactaaaatgaaagaagagttcgaaatgaaagatctggaa

SEQ ID NO: 169051 - DNA, 947 bp, Arabidopsis thaliana landsberg
aagacgttatgcaagtcgtggagcgacatgaagaaacacttaaacgacaccgtttgcaagagcttcatcggccgtttcttcaagctcgaagcaagaaaaacaacgttcacaactgaactacgagctgcgaccgccacattcctcaccatggcttatatcattaccgtgaacgccaatatcttagccgactccggtgccacttgctccatcaacgactgttccaccgtggccagttcttcaccacccggtccagaatgcgtcctcgggtctaaccctggctacgaacaatgtatttctagggttaaaaaggacctcgttgtggctacttctttatcagccatggtgggttcattagcaatgggtttgttagctaatctcccttttggacttgctccgggtatgggagccaacgcttacatcgcatacaacgttgtcgggtttcgtggatccggttctatctcttatcataccgctatggccattgtgctccttgaaggatgtgcctttctcgctgtgtcggctttaggactccgcgggaaacttgctcgtctcatccctcaaacggtgagactggcctgcgcggtcggtataggaatgttcattgcctttgtaggtttacaaatgaaccagggcattggcctcgtgggaccggataagtcaactctagtgacattaaccgcctgcgcagagacggatcctgtcactggagcttgcttaggaggtaaaatcaagagtcctacgttttggttagccgttgtcgggtttcttataacgagtttcggtctaatgaagaacgttaaaggatagtttgatctacggaatcgcgtacgccacggctactttttggatcagaggccctctagcacaatctttcacacactccttctggggactaaactacaactacttcacaaaatttgttgactttcacaagatccatccacctt

SEQ ID NO: 169052 - DNA, 994 bp, Arabidopsis thaliana landsberg
ctgcccaacgagctttttgaatttgctcatctgattttacttgttcaggtgaacagtgtgagactacctcttcacatcgctgataagcgacgcttttgtggcactgcgttggttgaattctcctctgaacaagacactcaagatattttgaggcagagcttggtctatgcaggcgctgacttagtattaataccaaagtaagtaagtgggagtgggggatgctttgtgttttgatatatatatatataacggattggcatgacctgactattcctgtttgatatgcaggagtgattttgactgtcaaagagagaatatgatcaagcaactcggaaaatcagagtcccacaacgagtccgtttcttgtttttttgtcttatcaaaacgcttcttgattgaaatgcaactttgctcatttctactgctcatatttatattgctacagattccgcagaggacaaattgtcaaatttgcattgaaatggatagccagtgaagaaaaagtaacaaacaaaggtattttctcttttctcaggactgttaatctctgaaaaagtatgaactgctctttaagcaacttctctgggttgcagaaaaacccagcgctctgaaaaataaaattaaagagaaggaagataaggagacaggcattgctgatagagagaaggaaaatggagataactcatgtgctagcttgtgcaaggacaacactgatcaacttgtggttcccccatggaacaacagtaattctgtcagctctgaggttctcaaggatctttttcaaagatttggcagcgttaaagtaagttgcaacactttttgtcaaaccaccaatcccttaaaaagtgattgttgagttatcatcttttcctgtgcttactgcagcacatagaatactctggtggattggatataaggttacgtttggttcacagattcagaaacagcaatgaaagcccgtgcagctgtggagtttgttgaggttaggtgtaag

SEQ ID NO: 169053 - DNA, 1589 bp, Arabidopsis thaliana landsberg
aaatcagttagaccaagctgctctagtagatcttcttataccaaacatgggatactctgaaacgctttacgaagttgaaagcgtttagagaatgatcgaacagtttgtttcgtcaaccgaacaagcaggcatcgtcccttctccttgcatcatcgaagaaggacatttggtgaaggatggagctgatttgctaactccaacaacgttagtggcaactcttgttgacggttatcttgctgaggaggcacccgatgtgaacctgaagctggcgaagttcgaagccattgctgctgcaatccctgactatgcaaggccactagatgatggagtttatcacgcaattgacgtgtacctgaaggtaataaagatactgtttctaattttaaccagtccatgtattaagattttgatgctggattgcaaattttgcaggcgcatccgtggattactgattcagagagagagcacatatgcagacttatgaattgccagaagctctcattggaagctagcacgcacgcggctcagaacgagaggctgcctcttagggtgattgttcaggttctcttcttcgaacagcttaggctcaggacatctgtatcaggctggttctttgtctctgagaatctagacaaccccgataaccaacatggcgctaatggcggtttacttaaacccagaggtgagaatgtaagagaacgcgtttctgagctggaaaaggagtgtatgaacatgaaacaagagctgcataagctggtgaggacgaagagaagctggaagaatttcaccaggaagcttaacttcaagaagaaatcagaatgctgcaagccaaaggatcaagcaacaccagcaatttgaagcaaaatcctctgttttaaggcagagctattagtattatcttcccgtttagattagctttgtttttctggttcttgatgctactctgttttcaaaagttttcaaactttctcttagtatctcgctaagagttttgatgcttttaagataaaaacaagagctcttttcagagaacattaatttcatttcttatacaatttcggggtgtattgtgttgtgcagccccataggaaacaatctcagacacaaatcaacagaagggaaatacaatcaacaaagaatatcatcagcgaaacttaacaaataaggacgaagaatcagagtagtattcccatcttagattcttaacaagacggatagtctttaggcggtggtagaacggaaagctcaggtgtttccccgttctcgacgacgaaagccatcttcaaaccccacattgtatggacttccaagtgacagtgcataaaccaaacacctgcaacaacacatgcattgatcagttgatctacttatcacatatggtcatcatcataatcatatatgtgcattgagagattgatttatacctggattatcagccctgaatctgatggcagcccaaccaccggtaggtactccaacggtgtttctctcaggcgggtcaacgagattgaacttagcaggatctttcttgggatcaaagtttccaacaccggttccaacgacaaagaaattgtagccatgaagatgga

SEQ ID NO: 169054 - DNA, 518 bp, Arabidopsis thaliana landsberg
aaggtgttggtgggtattcttatctctacgagcctctttggtggattggcatgacgacaagtgagtcttctttgctttttaatcttctttcttagtgatttgattactatgttgttggtttgttttgttgctcattggtttctgctacttccagtgttacttggtgaaattgccaatttcgctgcttatgcatttgcgcctgctatacttgtcactcctctaggtgctgtcagtatcattatcaggtaagagattactcatgtctgactcttccatcaggttttctatatacgattgaatgtgtgatttttctttcttttctcttacactttgttatctgaatctcagtgctgtcttagctcatattatattacgggaaaaactacatatctttggaattcttggctgtgccttatgtgttgtgggttccacaacaattgtcttacatgcccctcaagaacgtgaaattgactctgtgattgaagtttggaatcttgcaactgaaccaggtgcgttgc

SEQ ID NO: 169055 - DNA, 470 bp, Arabidopsis thaliana landsberg
atgcccctccccaccaaaatcacgctcgcagaagtcggcccccgcgagggcttccagttcgagggcatcggccagccggacaagatctccaccgccgacaagatccgcctgatcgacatgctggccgccaccggcctcaccaccttgcagatcgtttctttcgtcagcccaaagcaggtgccgcagatggccgatgccgaggcgatctgtgccggcctcacccgccaccccggcgtcgcctataacggcatctacctcaacgacgccggcctccagcgcgccatcgccgccggcgtgctcgacatcaagggcaagattaccctggcgatgtcggagaccttcgcgctgcgcaaccagcgccgcacgctcgccgaggatttccagatgcagcgcaagatcgccgccctctatcaggcgcacggcatcgcggtcgactacggcgccaccatggccgccttcggctgcaatgc

SEQ ID NO: 169056 - DNA, 1132 bp, Arabidopsis thaliana landsberg
taaaagtaagttttctcatgttttgaaaacatacagttgatagtggtcttgaataagaatttgagatataaatgttgaatgtcccttagaaactctctggatacactatataattatgatttcgttttgcagtagcagatgatattacaacttcaggttcacttcagttcgagtttaaagcaattgaagctgccacatgtaattttcataatgttaacaagcttggtcatggtggttttggtgaagttcacaaggtataatgtttgtctctagtactttttttgtgttagagagaaaaaacagaacatgttctgataattatgtgaagatcatatgacttggcagggaacatttccgaatggaacagaagttgctgtgaagaggttgtctaaaacgtcaggacaaggtgaagaagagttcaagaacgaggtgtttcttgtagcaaagcttcaacatagaaatcttgttaagcttctcgggtatgctgtcaaaggagacgaaaagatattagtctacgagtttttgcctaacaaaagtctcgaccacttcctctttggtaagaaaagaaacagatgatagggttatattctctgaaaccttagttcttgatctcatagtctaattgcttaatacatgggatttttgcagacccggtaaagaagggtcaactagattggacaagaagatacaacattattaatggaattactcgagggattgtgtatcttcatcaagattcacggcttacaatcatacaccgtgacctcaaagcgggtaacattctcttagatgccgagatgaatccaaaaatagctgattttggtctggctaggaatttcagagttaatcaaaccgaagcaaatacaggaagagtagttggcacattgtaagtaattggcatttagatataatatgaaacttgatggccctttgagagtaggtgataaaactaaaattgatatgcggtgtattttgcagcggttacatgccacctgagtatgtggcaaatggacagttctcaacgaaatctgatgtgtatagctttggagtattaattctggagattattggtggcaagaagaatagtagcttccatcagatagatggttcagtaagcaacttggtcacacat

SEQ ID NO: 169057 - DNA, 896 bp, Arabidopsis thaliana landsberg
  unsure (1)..(896): unsure at all n locations
ttgtttaccattaacaactcgcctttcttcggtaaagaaggaaaatttgtgacctcgcgccatattcgtgagcgcctggaccgtgagctggaaaaaaaccttgccttgcgtgtaaccgataccggttcacccgattcattcaatgtgcacggtcgcggtattcttcacctgtcggttttgatcgagaccatgcgcagggaaggttatgagctgcagatcgggcagccacaggtaatcatcaaggaaattgacggtgtaaaatgtgagccgatcgaagaattgaccattgacattcccgaagaatattcaggaaaggccatcgagctggtgaaccagcgcaagggagaaatgctgagcatgaaccccaaaggcaaccgcatgatcnnnnnnnnnnnnnnnnnnnnnnnnnnnnncattggtctgcgtaacacgttattgacccaatcggccggggaagccattgttacccatcgtttcaaagaatatcagccactcaaaggcgagatccagggccgtctcaatggttcgttactggccaattcgcctggtaagcactgggatattcggttgacaaattacaggaccgcggtactttcttcattgacgtgaacgaggagatttatgagggacaggtgattggagagcacatcaaaccgggcgacctggtggtgaatgtgaccgaagggaaaaaactgaccaatatgcgtgcatcaggttccgatgacaaaacgcgcattgcacctccgcgcaaattcagccttgaagaagcgttggaatatgtgcagggcgatgagtatgtnnnnnnnnnnnnnnnnnnnnnnngcctgcgtaagatcctgctcaccgaaagcgatcgtaaacgtgcggccaacaaggctttacaattatagttggtg

SEQ ID NO: 169058 - DNA, 571 bp, Arabidopsis thaliana landsberg
caggcaattcttagctgctgttttgaacgtcgataagactggaaggtttatcaagtatgatagatcaagcaagaaagcgacagtcttattacaaggccttgcatttgcaaacggcgttgcactaagcaaagaccggtcttttgtattggtagtcgaaacaactacttgcaagattctaagactttggctctctggtccaaacgcaggaacacaccaagtgtttgctgagcttccgggtttccctgacaacatcagaagaaactcgaatggagaattctgggtcgctttacactcaaagaaaggtcttttcgcgaaactatcacttactcaaacttggttcagggatttggtgcttagacttccgatcagtccccaacgcctgcactcgctgttcactggaggaatacctcatgctacagccataaagctgagtgaatcaggtaaggttttggaggtacttgaggataaggaaggaaagacattgaggtttataagtgaagtggaagagaaagacggcaagctttggattggttctgttctcgtgccttttcttggtgtctatgatttgtag

SEQ ID NO: 169059 - DNA, 1515 bp, Arabidopsis thaliana landsberg; identical to SEQ ID NO: 64844

SEQ ID NO: 169060 - DNA, 479 bp, Arabidopsis thaliana landsberg
ttgacatatgaccgaaaacgcaagctgagatatccgataacaaccaagttgccttgttttgttccaaagttgattttcttcttggtgatcaacgggttcagtatgctgcacaggttaacagtgtagccacttcagagatgatggatcaacatggatacaagaactacaatcagaagtctacatctcagacatcggttcagcaaactacaagcttcattatgaattatgcttcttcaacccaagcccaccctccacccgagattactaagatggtcgaatcgatgttcaaacagattctcaaaggtcaagagaagctaacgacagattttgatcacaaactgggtgttgtatccaaagatttgaatgggaagattcaagtattgaacaatcaaatagagcaattgagtacaaatatagaagatgttagtgctattaagttacaacgtggaaaccagctaaatccagtgcttcaaaagtag

SEQ ID NO: 169061 - DNA, 2074 bp, Arabidopsis thaliana landsberg
agtcttcctctaaaagggctttgctcaagacttgtcaacagatggataaggagttaaaaatgcatccaaccatcaattgtttctgcagcggaacaacttctgtcactgtaatcaaacaggtgaaagtccgatcaccggttatttactctatcattggctctgttcaatgactgtttggtatatattcctttatagggtaaggatctggtggtgggaaatattggtgactcgagagccgttctagccacaagagaccaagacaatgctttggtggctgtacaattgaccatagacttaaaacctgatttgccaagtatatctagtctcttctttatgttgtcactattgatcatctttggaaacataatctgattttcttctctatgtacttgctttaggtgaatcagcaagaatccatagatgtaaaggtagagtgtttgccttacaagacgagcctgaggttgcgcgtgtgtggttaccgaacagcgattcacctggtttagcaatggctcgagcttttggggacttctgccttaaagattatggtctaatctctgtcccggatatcaactaccatagactcactgaaagagatcagtatattattctagctactgacggggtacacattactcttcttattcttctcactggttactatcgaaatctttggagctaaagtgtctctaatgctaggtatgggatgttttgtcgaacaaagaagctgttgatattgtggcttcagctcctagtcgagatactgcagctcgtgctgtagtcgacacggcggttcgagcatggaggcttaagtatcctacttccaagaatgatgattgtgctgtagtatgtctctttcttgaagacacttcagcaggaggaaccgtggaagtttcggaaaccgttaatcattctcatgaagagtctacagagagtgtcaccataacatcaagcaaagatgccgacaagaaggaagaggcttcaacagaaacaaatgagactgtaccggtttgggagataaaagaagaaaagacgcctgagagttgcaggattgagtccaagaagacaacactcgcagagtgtatatcggtgaaggatgatgaagagtggtcggcgttggaaggattgactagagtcaacagtctcttgagcattcctaggttcttctctggcgagctaagatcaagtagctggagaaaatggttgagtcaacaaaactcataaatgatcaaattaacaaagaatcactgattttcatttcatgattggttttctttccattgatgacataaaaatcggtgtttccaaatgtcacaaaatgttcgttgcttcatatagcgaagtcagacaagttttttcttggaagaactcatagatacatttttttgtctctgcgttctatttacttgctaccatatcttaaatctttacgaagacagcaagctgcgaaaactttgcatctacttcttaagggttcttgcaacagaaggggaatcagaggaatgagaagtacacgcacatcaggggatagacaagtgcaaaagagttcaaactccaaatgatcacacaaaatagcagatcataaaaaagaccatccctatggagttcctctttgtgatgatcattactgtgccaaatagataacaaaaccaatatgcaaatttaccaagtaaaacttaatcattccaagtaactcaacctaaaatccttcgtcgtccaaacttgacaaactcggaaagaccgaagaccacaaccactactgacaatagcagtgtcatgcaaacaccagtatcgatgctcctctgcaactcctgtaataaggaacaaaacagagcagataaagaccatgtaagtctttaatttttattattttctaggcatgcctaccgcttagtcattagcttagtatattacctctacgtcagaggcactaacatccacatggtggtctaagcgatcctgtataaaaggaaaataccagctgatttggtaagacaaggtaacccaaataaaaacagtaaactaaaaccaatatgagaagccgatgacatacgataagccgtgtctgcaagccaag

SEQ ID NO: 169062 - DNA, 613 bp, Arabidopsis thaliana landsberg
  unsure (1)..(613): unsure at all n locations
aagtgcagggtgctttaaaaggcagtgtgggtactcaggtaaaactaaaattttcaggccttttggaaaacgnnnnnnnnnnnnnnnnnnnnnnnnnnnnntaattcccgtttcgagcatcgaatgtgccttcatgctcagcaacaataccggttttatcaagatctcccagttcggagaagatacgtatgtggattttctcaatgctgcgcgtacgctcaaggaaaaaggcatgaaacgcatgatcctcgacctgcgcgataatggcggaggttacctgcaggctgccgagaacatctgcgaccagttcctcaaagacaggatgaagatcgtgtataccgatgggcataaccagggcaggcatgaatacattgctacctccaatggtgagctggaagaccttccattggtggtgctggtgaacgacaacagcgcatcggccagtgagatcgtatctggggccatacaggacaacgaccgcggacctattgtgggacgcaggaccttcggtaaaggtttggtgcacccgcccctcgaggagaaatatgcaaggtcggaactgcatttgnccgtggcccgttattataccccgagcggacgtggcnttcggcgt

SEQ ID NO: 169063 - DNA, 630 bp, Arabidopsis thaliana landsberg; identical to SEQ ID NO: 41482

SEQ ID NO: 169064 - DNA, 583 bp, Arabidopsis thaliana landsberg
ggtcatcaaaatctttttgctccctttatactatccaatttggttttgattactcttcttgcgtgactggcaggttcttgcaggattctggaatcaatgacactagtatgacccatttaacttggtaagtatccaaaattttgtcttttattcatcttggaacagaactaaacaggttttgatttgcaaaagtaaatgcttcgttgatgctttaagttttgttgtggaaactgtaggggtcttgtcaacgacacatacagaatggacctcatcctaatacatccgccgtttctcataacactcgcttgcatttacattgcttctgtacacaaagagaaagacataaggacttggtttgaagagctttctgtcgacatgaacattgtaagtctatgcattgttatcaaccttataattctctgagaaatgattggctctgttgaatgattcattggtatgttgtgaacatattggcaggtgaagaatattgcaatggagatattagatttctatgaaaaccatagactgttcacggaggagagagttcacgccgccttcagcaaacaagctacaaacccataaa

SEQ ID NO: 169065 - DNA, 545 bp, Arabidopsis thaliana landsberg
gtgtacggcttccctcccggcaccgaactgcgcgtggaggcgacgcgcggtttccacgacgacagcggcatggccgcgttcgcctgccgcatcgaatcggccatcggctgcgccgaggcctcgctcaacgttttcagcccacccgacgcggaggtctttttcgccgcctccgcgggagaacccacatgacggacaccatcctggtcaccggctccagccgcggcatcggtcgcgcgattgccttgcgactggcacgcgccggctacgatctggtgctgcattgccgctcgcgccgcgatgaggccacagccgtcaccgccgaaatcgaggcactgggccgccacgcacgcatcctgcaattcgacatctccgaccgcgccgcctgtcgcaccgcgctggaagccgacgtcgccgaacacggcgcgccgtacggtgtggtctgcaatgccggactcacccgcgacggcgccttcccggcgctatccgacgacgactgggacagcgtgctgcgcaccaacctcgacggtttctacaacgtgctgcat

SEQ ID NO: 169066 - DNA, 446 bp, Arabidopsis thaliana landsberg; identical to SEQ ID NO: 81276
  unsure (1)..(446): unsure at all n locations

SEQ ID NO: 169067 - DNA, 1139 bp, Arabidopsis thaliana landsberg
agttatgctaatcggcttctgggtgttccatttcataagactcttggtctatgaatacatgtgcaagggatcattagactctcatatatacggtcaatacagtttccaagttagttaaagatgttgttaacctaaaaaacacttaactagagttatctaactaactttcatgaaatgtccatttaggtcgccataccgacactttgggatggcctgcaagacaaaaaataccggttggagcggctcgaggtcttcgatatcttcatgaagagtgtagagtacgttgcattgttcaccgagacatgaggcctaacaatatactaattactcatgattatgaaccactggtatttatattttcttgaaccacaatttacacttttttatacattcgcttgattctggccttgttactctttcagggtggagactctggtttagcaagatggccgcctgatggagagctaggtgtagacacgcgtgtgataggaactttcgggtaacaaaatttataactaaatcatcattctcactctagagtaatttctcaactactttctgtgtttcttgttttagctatttagctccagagtatgctcaaagtggacaaatcacagagaaagccgatgtttactcgttcggggttgtattgatcgaactaatcacgggtcgtaaagcaatggatatctacagaccaaagggacaacaatgtttaactgaatgggtaaatccataagtttcttctttttaaggtttcttagctcattttcagtctcttcttgtaaatgaaatctaaaagtttctttcttgaagctcattttgttattttattctctttgtgagcaggcaagatctttattagaagagtatgcggttgaggaattagttgatccgaggctcgaaaagcgatattcagaaacacaagtcatttgcatgattcatacagcttcattgtgtatacgtagagatccacatttgcgtcctcgcatgtctcaggtaaagaaaagattcaccattcttgaaacatgttcatttctttaagtcaataaaactctctcaagtgagtatgctcttttgcttgttgttgaaagtgttgcgtttattggaaggatatgtgttcatgaatgaaatctcagcca

SEQ ID NO: 169068 - DNA, 1427 bp, Arabidopsis thaliana landsberg
  unsure (1)..(1427): unsure at all n locations
agcttcctgtgtgtttaggtaatttgaccaagctgcgggttcttgatctctcatcaaaccaattaagtggaaatctaccagctagtttcaatagcctcgagtccctcgaatatctatcattgtcagataataactttgaaggcttcttctcactcaatccactcgccaacctcacaaagctcaaggtgttcagactttcgtcaacatctgagatgttacaagtagagannnnnnnnnnnnnnnnnnnnnnnnnnnaactgacagttgctgcactacccttttgcagcttggggaaaatccctaattttctcgtctaccaaacaaatttgcgtctagttgatctatccagcaatagattatccggagacattcctacctggctgttggagaataatccagagcttaaagtcttacagttgaagaataattcattcactacctttcagattcctacaatagtgcacaagttgcaggtcttggatttttcagcaaatgatatcaccggagtgctccctgataatattggccatgtgcttccaaggctgctacttatgaatggatctgataatgggtttcaagggaatcttccatcgtccatgggtgagatgaatgacatttcattcctggacttgtcttacaataatttctctggggagctacctagaagcttattaacaggttgtttttcattagtaaatctgcagctctctcacaacagttttagtggccctattcttccaatacaaacgagactaacttcattgatcgtattgaggatgcataacaacctttttaccggagagatcggagtcggttttcgtaccttggttaatttgtcaatatttgatgcgtcgaacaatcgtctcacaggtcttatctcaagttcgataccccccgactcgtcttatttgatgatgttattgctatcaaacaatctcttagaaggtacgttgccaccttctctgctagccattcatcatcttaattttctggacctctctggaaacctattatctggagacctaccgtcgtcagttgttaattctatgtacgggataaagatattccttcataacaacagcttcacggggccacttcctgtcacgttgttggaaaatgcttacatacttgatttgcggaataataaactctctgggagtatcccacagtttgtcaacatcgggaaaatgataactttattgttgagggggaacaatttaacaggatctataccaaggaagctgtgtgatttgaccagcatcagacttttagatctttcagacaacaagctcaatggcgtcatacctccatgcctcaatcgtttatcaactgaattgggagaagggattgggttgagtagcttctctcaggggattaactttggagacagccttcagatggaattttacagatccacattttggtag

SEQ ID NO: 169069 - DNA, 908 bp, Arabidopsis thaliana landsberg
atgaagtttgacatcagacaagcttctgggaaatcaacaaaaggagttcagaattttgcgattcaggacatggatgttgataaagaagcaaagctagaacctcaccaaaagtcaactatacttctcaactcagcaagctaaagaggacttttgaccacaagaagagagcaacagaaaggcgatctcagactgaagatcctacagaagatgactggtatgagatgagaaaaaaaattaaatggcaaagcagagtcatagaaggattatcttcaagagtgatgaagctgaaagatcaattatggatgtttgaaaaaagagttaaaaagttttccaatggtattaaccgagagaagatggaaactgcactaactgtcaaggaggacgaaaatttcacaacataatggtttgcaccagaagatcagaaaggagttcacttagaggaaagaagcctagagagcaagttgttgagtgaggaggaaagtcctattatgacttattctctaggagtgcctaaacagcctaccaacccctctgctgaagaagaacacttgttacttgattctgttattgaagaacttctggaactcacgatagaatacaaagctcaagaggataccattggggagctaacttacaaaatggaaggactgaaccatgcaatcttggaacttcaagaaatgattaaaggctacctaagttttgaatttaaggattggacaaaggagtctggttcagaagaagaagactactctgctgatcagaaagaagcttattttgaagaaaaatcaaatgagtacccatcctaccatatctcaagagaggatgcagagtatgatccaagcattgaagattcaaccactgaagatgaggacttttctgttcctctctttaaccttttttctaactaa

SEQ ID NO: 169070 - DNA, 1660 bp, Arabidopsis thaliana landsberg
atgtggctacctaaagcagacgcgacaaagaaaggaacaagaaatggttcggtggcgattgcaatagacaaagacaaaagtagtcaaaatgctattaaatggacattggagaatcttgctactcgtggccagactcttgctcttattcatgtccttcccaaatctcaatcttctttaggtttgatattaccccacattctcaatgattttttgctctttagtttaacatatttattgcttcctttttgcgtaatgatttttgcgcaaagttttcagttaggtctttcgcttttgtgtgtttcatgcagacattgaagaaggaataacacataagcagcaaatggagaaacaaacgaaagatctctttgtatccttccactgttattgcagccgcaaagaggtaattataataccaaattaaaatgaacttaacttttggttaactagatatcaaaagttttgaagctttttttgtgtggcatatctgcatgcagattcattggctggacgttgtgcttgaagacgtagacaaagtcaaagcgattgttgaatatgttacggtctctgcgattgagaatttagttcttggtgctccatcacggaatagctttatgaggtaataaaactcattagggttttcattgataggttgagtgcggaagaagtattaaccaaaactagggtttcttttacaattatgatcattaatcaacaggagattcaaaacggatttaccaacgagtgtgtcaaaggcagctccagatttctgcaatgtttacgtcatttccaaaggcaaaatctcttccttacgaaacgcctcgcgtcttgctccctaccatccatcagttctcagcgaagtagacgatcatgaaactattgccattgagagaaaacataaaacaggtcagagttttcatcttgaggggaaattttgttgcttgcggttcaagcatctcaaacacattcttaactcttccacctcccttgttttcaacagctaacacaccggccttgcctaagggacgaagatcgattgattcagatgttaccaggttttcttcagttagcattgaaaatttcagaatctcttacgtctacaatttcctaaatcttggttttgatttttgtagattagggcttccgaaaccgccacatggacatatgaaattaatgggggatttttcagattcagagtccgagttctcattcatcagtgcttctcaacaagaatcatccgacctttccttcatcagctccggaaggccgagtgtagaccgatcttccttcacctacgatttaccagaatcagcaagaacctcaagaatgtcaacgagctcagagcagagcattgggtctcatagattaggaatcaagtttacagatttgagttatctcaatggttcttcttcggtttctgatgaaagtggaagaacttcttgttcattttcatctcagagcttggtataagttgaaattaaaccatgtttcttacttatcggtcttaaatccgatttcttttttccgttacactcaatgaaaatgtttgttttgttgcagaatgatgtagaagctcaaatgaagagactgcgtttggagctgaaacaaactatggatatgtatagctcagcttgcagagaagctttaaccgcaaggaacgagg

SEQ ID NO: 169071 - DNA, 1865 bp, Arabidopsis thaliana landsberg; identical to SEQ ID NO: 36324
  unsure (1)..(1865): unsure at all n locations

SEQ ID NO: 169072 - DNA, 632 bp, Arabidopsis thaliana landsberg
gcttttacaaattaatcttgttttggataataatcactttatatacaatatgcattcatatgtcagtctaaattttatctaatattttggatggggtcttttgcactttgcagcattggtagtttgggaaaagatagcgtggagtcaggtgtacaaaacgtgacagtgaaaacggtgacgtttacgggaactgataacggagtaaggatcaaatcatgggccaggcccagtagtgggttcgctaaaaacatccgtttccaacattgtgtaatgaacaatgtcgagaaccctatcatcattgaccaaaactactgtcctgatcacgattgtcctcgccaggtaaattatcttaagtatatatgcacatgaaatattctacattggagattaattaatttctttcacgattattttaggtttcggggatcaaaattagcgatgtgttgtttgttgatatacatggaacatcggcaactgaagttggagtgaaacttgattgtagttctaagaaaccatgtaccggaattagacttgaggatgtgaaattaacgtaccagaataaaccggctgcatcggcttgtactcacgccggagggatagaagctggattttttcagccaaattgtctatga

SEQ ID NO: 169073 - DNA, 1195 bp, Arabidopsis thaliana landsberg
atgcgggttatcccgatttcattactctcgcatgtgagaggattgattcgaagagcaccctcgtcgcgattgtacgtggttcctgcacttgcccgggcgaacccgataatctcatactcggagcaagtaaaagaaggtacttttgattataaagcattgggaatttaaagaaattggggttcttcgtgtgttgaatagtatgaaagatgatccttatcttgctttatcgtttctcaaacgaattgaaggaaatgtgactttgcctagtgtccaagcttatgcaactgttatcagaatcgtttgtggttggggtttggataagaaattggatacttttctatttgaactcgttagaagaggagatgagggacgcggtttcagtgtaatggatttgttaaaggccattggagaaatggaacagtcattggtgttgttgattcgagtctccactgcattggttaaagcctatgctaatcttgatatgtttgacgaagctattgatattttcttccgagcttactattctctaggacgtgctccggatataaaggcattgaattttttgatcagccgtatgattgcatctgggagaagtgatatggtggttggttttttctgggaaatagagcgtctcgggttggatgcagatgcacatacttatgttcttgtggttcaagcattgtggaggaatgatgataaggaagaattagagaagcttcttagtagactgttaatctcagagactaggaacccttgcgtattttatttgaattttattgaaggactgtgtttgaatcagatgacagatatagcttattttctactccaaccattgagggatgcaaatattctggtggataagagtgatcttggaattgcatatcgcaaagtggtgcgtggtttatgttatgagatgagaatagaagacgctgaaagtgttgttcttgacatggagaaacatgggattgatccggatgtctatgtttactcggcgataattgagggacatcgcaagaatatgaatatacctaaagctgtggatgtttttaacaaaatgttgaagaaaagaaaaagaataaactgtgtgattgtaagctcaatccttcaatgctattgtcagatgggaaatttctcggaagcttatgatctatttaaagagtttagagagacgaacatttctcttgatagagtttgc

SEQ ID NO: 169074 - DNA, 556 bp, Arabidopsis thaliana landsberg
  unsure (1)..(556): unsure at all n locations
gggcttgccaccgaccgcaactacctcgtctatccgtggatcggttacggcaagtgcgcctcgtgcgcggccggcatggataaccactgcaccgcgccggcctgcctgggtgtgcatcgcgccggcggatacgccgaccacatcgtggtgccgcatccccgctacctcatcgacatcggcgacctcgatcccgcgcagatcgcgccctacgcgtgctcgggcctgacgacgtattccgcattgaagaagatcggcgcagacgtctaccgcgaacatcccgtggtgattttcggcgcgggcggactgggcctgatgagcctgaccctcatcaaggcactgggcggcgcgggcgccatcgtcgtcgatatcgatccggccaagcggcaggcggcgctggacgcgggcgcgctggcggccatcgacggcgccgcgcccgacgccgcgcagcagatcatgaaggccgcgggcggcaagccggtgcaggccaagatagacctggtcggcgcgcccgccaccacctcgctcgcnnnnnnnnnnnnnnnnnnnnnnggcaagc

SEQ ID NO: 169075 - DNA, 887 bp, Arabidopsis thaliana landsberg
cgaatccctgatttcggtgttaaacgctcgttagatcgttaaacacactcttaaacgttttaatccagaatcagagatttgatttggttcatgccatgtttaagaacagtaaggagtcttttggaattacgccgaacatcttcacttgtaatctactagtcaaagctctctgcaagaaaaatgatattgaaagtgcatataaagtgctcgacgaaattccttcgatgggattagtgccaaatttggtgacttacactacgattctaggtgggtatgttgctagaggtgatatggaatcggctaagagggttttggaagagatgttggatcgtgggtggtatccggatgcgacgacttacactgttctcatggatggttactgtaagttagggagattctctgaggcagctacggtgatggatgatatggaaaagaatgagattgagcctaatgaagtaacttatggtgttatgataagagctttatgtaaggagaagaaatctggggaagcacgtaacatgttcgatgaaatgcttgagagaagttttatgccagattcttctctttgttgtaaagttattgatgcgttgtgtgaagaccataaggtagatgaagcatgtggtctgtggagaaaaatgttgaagaacaattgtatgcctgataatgcccttctgagcactctcatccattggctttgtaaagaagggagagttactgaagcgaggaaattgtttgatgagtttgagaaaggctcgatccctagtctcttgacgtataacacgttgattgctggaatgtgcgagaagggagagttgacagaggctggtagattatgggacgatatgtatgagaagaaatgtaagccgaatgctttcacttataacgtt

SEQ ID NO: 169076 - DNA, 2345 bp, Arabidopsis thaliana landsberg
tttctacttttgttgataagagtttaacgaagtctatcttttctgactgtgctagattgagcaaagagatggtagagactatgttcattgcaaactcgtcaaatccaagagatcttccgattcaaaatcaagttttagatccaagaaaggcacagaatgttgctactctgcttcaactacttaacttaagcactaaggatgtttgtcaagctcttcttgatggtaaaataatctttaatgtattgccatttgtttttttttgtttttgtaatgttattgatttgtgttctttgagttattgatttaggtgactgtgatgtacttggagctgaacttcttgagtgtttatcaagattagcacctagtaaagaagaagagaggaagttgaagagctttagtgatggttcagagattggtccagctgagaggtttcttaaggaattgcttcatgtgccttttgtgtttaaacgtgttgatgcattgctttttgtggctaatttccattcggagatcaaacgtctcagaaaatcattcagtgttgttcaggtaatgctgatgattgcggatttacatatttgtgtctaatgatgtaatcttatgttatgtctcattactcattaaacttatctgcttttgcaggttgcttgtgaagaactaagaaatagtagaatgttttcgatacttcttgaagctatactgaagacaggaaacatgatgagtgttagaacaaaccgctgtggggatgcggatgccttcaaactcgacacgctcctcaagctcgttgatgtcaagggattagatggaagaagcagtctcttgcattttgttgttcaggaaatgatgaaatcagaaggcagtgtgagagctttagaaggcatcagaaacctgaatacagaactgagcaatgtcaagaaatcggctgacattgagtatggtgtactaagaagcaatgtgtcaaggatttgccaaggactcaagaacattgaagcgcttttgctacttagcgaggagagtggttcatatggagatcaatggctgaagttcaaggagaggatggcccggttcttgaaaaccgctgcagaggagattgtgaagattaaaatacgagaaagttcaacgctctctgcattggaagaggtcacagagcagttccatggagatgcttccaaggaaggtcacacaatgagaatcttcatgattgtgagagacttcctgtctgttctagaccaagtgtgtaaggaaatgggagactgattcccattgtaagatttttaatgtaatgattaggaacgcatctctagtttcattgtattgtaaccagtatgactaacgccatttctggataattctgtatgagtttttggaagacaattcattaggttttgatgctatgattctaattttgatgctttaacatgttacccttacgacaagcacaaatcaatgagttgcacaagtaagccatatctttggtcatattagcgaatcgtttagatacagtagaaatgcatctacatttctagttaatttgtggtcagaggataaacctgataagccaggtcttttaaacatagaaacaccataaccattactgaagaattgtgactacacattgttgtttgcttgacttcaaagcttctgcatccatgcgctcgaggatatgacgagcttcttcctctgtggcaggaactacatttcgaagcttaaacccattgtttctggcctttgcctctggccttacagtgaacttgaagtagaatgtatttgaaacctacatcatatgtaacagagaaagagacctcaaaattaacataatgagcttcaaatctgataaggttcaagaaattttggcatgaagatagaatcagtgagcaagttcaattttaacaaccgtttaagaaagctccatcatcaagttagaattttacctcactggagcgaatctctggacttgtaacatgagcaacaacttcgatattgatgagcggacaatcctgtttatccagttgagtgtaaagaacacaggatttgaaacgtaagaaatccccgacgtccacctgtcatttaagtccattaagcgtaagtttacacagaagacgaacgtgaacaagaagataatggtaagaagtgatttggttacaaaccggtcttaggaaatcgacgtgatcaacttctaagaagtaaggcactagacccgcaaacgtataagcagtagagaaagccaactcaaatgctctatgcattaaaaaacctccaaagatcctaccatggatgttcctctgctgcggttggcatatcagcgaattctcaagacgagtgtctttaagaagaatgctgtttctgtc

SEQ ID NO: 169077 - DNA, 518 bp, Arabidopsis thaliana landsberg; identical to SEQ ID NO: 76500

SEQ ID NO: 169078 - DNA, 388 bp, Arabidopsis thaliana landsberg
ctatcaagaaatgagcttgatgatctcatccacacagcatatggtaagacctttcacaaataatctcatctttgatgttttgagaaaggaaggtaatgagttttttttttcttttgtaggagaggcactgagacagaaaccgcaagaagaagttgcaaaggcagtgcaagaactcagaaaggaagttaaagctaggggagaaaccattgagacactcaaagggagaataaatttgatggagaaacaacaaaatgggaaggaaagagagattgacttactgagacagagtctgcgtatcctcggcggtagcagcgggaagaacaaggcactatcatgtactaccagaaacctgacagtattcaaaacaaaattcatcgggtgtaaataa

SEQ ID NO: 169079 - DNA, 1036 bp, Arabidopsis thaliana landsberg; identical to SEQ ID NO: 5106

SEQ ID NO: 169080 - DNA, 804 bp, Arabidopsis thaliana landsberg; identical to SEQ ID NO: 11619

SEQ ID NO: 169081 - DNA, 2809 bp, Arabidopsis thaliana landsberg
tacgggggtggtccaactctggcacggagagtcattagctcaggtctctctcaaacagaattggctgtagaggtttaccctttacgtcttcagctacttctgatgccaaaaagtgaccatagtgccataagaattagcaaaaaggttatcctcttttctgttctttttttttctttgttcattacttgaaaatctgaactcgtttagtctgctacttcattgaactatcaaactttcttgtgcaggaaactatcagagagctccatcgaagagcctgtgaaatttttgacctcgactcagagcatgtaaagatctgatattcctatgttattaaacagcccgtttcaataatacttttggtattcttttctttccctttctctttcttacatgagcattttctatcatgtaggtacgcatttgggattactacggccaccaaaagtattctttgatgaatgacttagataagacactggacgatgctaacctacaaatggatcaggatgtgagttcacttcttcttcttcttctttttgctttcaaagttattagctatttgaatataaattttttatgcttcagtccgattgtttagttagcctaagcttaaggttttatagctctctgacttttatcttttctggtgttcttactgactcgttaactttcccactgattttgtgtctgtcgtttaaaaacagattttggtggaggtgcttgacatcaatggtacattatcaagtgctcacattcaatctgctcaagagaacggattggtggatggagactctacttctattctcattgagccttctaaatcgagcttggctgccgcaggagggttctcttcaagcaggaatgcattcagaactggtagtgtagaagtttcacaatcttttgataacacatacagtagcactggcgtcaccactaggggatccacagctggcttgacagggctgctaaatcttgggaatacttgtttcatgaatagtgcgattcagtgtctggttcatacacctgagtttgctagttactttcaagaagattatcatcaagaaataaattggcaaaaccctcttggaatggtggtaagttcctcttgaagttctttgctactcataaatctgatggatacataagtgtgtgtgtaggtttaagtgtataggtatgcttagacatcattggttcacttgtgtttccctgttgcacgtaaaatcttttgcagtattgtatgtttggggttgtgctttcgtcccaaacattcttgataggcttaattttgcatataaatggaataacgttggaataaataagacatcttatatcatcagaagttacattagaagttgattagggtagtgttccttggcaggtaatcagtgttattttctcgcgtagatcacaagcattgtttctttctgagatattgagtagttgatttcagatcatttcttgactgtattgaaatcattttgcacagggggaattagctctcgcatttggtgacttgctcaggaagttatgggctcctgggcggacaccaattgcacctcgtccattcaaagctaaacttgctcgctttgctcctcaatttagtgggtacaatcaacatgattcgcaggtttgtgagactagccagatattttctttaacctgaatttacattgtagctcaaggaattcgagtttttcattttgcaggagcttttagcgtttctgctggatggtcttcacgaggacctaaatcgtgttaaacacaaaccatatataaattctcgagacgcagatgggcgccctgatgaagaagttgctgatgagttctggaaaaatcatattgctcgtaatgactcaataatagttgatgtttgtcaggtcagctgtatatcttttagaaaatccaacgcttctctgtttatcaactcatggcattgaaactgatactagtattgtggattaggcttgcatttggttataacgtctaggaatctgctgtatggtcactcaactaatagacacgagtaaccgacattccagtcccttttgctttttagtggctctgtagaaagttaattatatcagaagagttaaattggcctagtaaaaatactgtatacatttgcaattttcacagaaacacggtatttgaagagggtacataacttgtctctgttcctattgaatttagtcttgatatttatgttaatctcggttgtgtgagtgcatccatcatgtatcagctttatatgtagctgatttttagcttgtgattcagacccagggtatattgttattttttgttttggttttaatttttagtactgtggggaatctcattctcctactctgtttgtcaactcacagggccaatataagtcaacattggtgtgtccaatctgcaacaaggtttctgtaacgtttgatcccttcatgtacctgtctttgccgttgccatcaagtcgcactcgatcaatgactgttacagtgttttatggcgatggaagtcaccttccgatgccatacactgtaacagttcctaaagacggttcttgtagagatctcagtaatgcattaggcactgcttgctgcttggacaatgacgaaagccttttacttgcagaggtaatacttttagcgagtcctttcttaaatattttttgtccttcacatctaactaaactgtgatgttatcctcctaggtgtatgaccacaaggtctttaagtattatgaaaatccccgggagttgctgaatgggataaaagacaatgaacatattgtggcatatcggttcatgcagatgcacaaa

SEQ ID NO: 169082 - DNA, 1716 bp, Arabidopsis thaliana landsberg; identical to SEQ ID NO: 3536
  unsure (1)..(1716): unsure at all n locations

SEQ ID NO: 169083 - DNA, 3223 bp, Arabidopsis thaliana landsberg
tgaagtctggtttgtctcttctaatgagcctttcagggtagaagaggccttgctagatccggactgggtgttggccatgcaagaggaactcaacaacttcaaaagaaatgaagtttggacactggtgcctcgtcccaagcaaaatgtcgtgggaaccaagtgggtgttccgcaacaaacaagacgagcatggggtggtgacaaggaacaaggcacgacttgtggcaaaaggttatgcccaagtcgcaggtttggactttgaggagacttttgctcatgtggctaggctagagtccattagaatattattagcctatgccgctcaccactctttcaggttgttccaaatggatgtgaagagcgctttcctcaacgggccaatcaaggaggaggtgtacgtggagcaaccccctggatttgaggatgaacggtatcccgaccatgtgtgtaagctctctaaggcgctctatggacttaagcaagccccaagagcatggtatgaatgccttagagatttcctacttgctaatgctttcaaggttgggaaagctgatccaactcttttcactaagacttgtgatggtgacctatttgtgtgccaaatttatgtcgatgacataatatttggttgtactaatcaagggtcttgtgaggagtttagcagggtgatgactcagaaatttgagatgtcaatgatgggcgagttgaactacttcctcgggttccaagtgaagcaactcaaggatggcaccttcatctcacaaatgaagtacacgcaagaccttctcaagcggtttgggatgaaggacgccaagcccgcaaagacaccaatgggaaccgacggacatgttgcctcaacaaaggaggtaagtccgttgatcaaaaggcataccggtctatgatagggtctttactttatttatgtgctagtagaccggatattatgctacgtgtatgcatgtgtgctagatttcaatctgatccaagggagtgtcaccttgtggccgttaagcgaattcttagatatttagttgctacgccttgcttcaggatctggtatccaaaggggtctacctttgacttgattggatattcagactccgattatgctggatgcaaggttgataggaagagtacatcagggacatgccagtttctaggaaggtccctagtgtcctagagctccaagaaacaaacatccgttgccctatccaccgctaaggccgagtacgttgccgcagacaatgttgcgcgcaactgctttggatgaggcaaaccctctgggattttggctacaatctaagcaaagtcccactcctatgtgacaatgagagtgcaatccgcttggcgaataatcctgttgaacacagccgcactaagcacctagacatccggcatcacttcctgagagaccaccaacaaaggagagatatcgacatttaccatattagcaccgagaaccagctagctgatatcttcaccaagcctttagatgagaaaaggttttgcaggttgcgtagtgagctaaatgtcttagattcgcgtaacttggattgatctacaacatacatgtgttctatgcctttgatcatattacattaagctttattgtaatatttgcttatattttgtgctcaagttgtacaaacactccctggacctcacaagtccctatgcaaataatgcacagttttagggggagatgtgttacaacttgaccctttgagactaaccatatgcttgagtttgcttgttttagtctcgaaggagaattaaaagggaaaaggtggacttggaccatgcaagacttccactgcactccgatgaaaagagtaactttttcaagttcatcttttaactcttattgcctatttgctcttaattgaagattttggtgaggcaatggggttatgaggccaagattgatcccgttttggtgcttgatgccaaagggggagaaaataaaggccaaagcaataaatggatcagctaccacttgagagattttgaaaatagtagaatagaatttttggtttgtcaaaattcttatgttgtctctcttgtcaatatttggcttcttgtggggagaagtattgattatgggaaatagggggagtttttgaaatctttgatcaatctcttttggaatgattctctttatgcttcaacatgtgtgtttaacttagagatttgagtttgatttgcaaaaacaaaccaagtggtggcaaaggatgatccatatatgccaaaattgaataaaaccaatttgagtttttatttaaagtgattttgcacttgttctacttactttgtgttgtgttggcataaatcaccaaaaagggggagattgaaagggaaatgtgcccttgggccatttctaagtattttggtgatttagtgtccaacacaagtgcctaagtgttaaatggtggacaaagtacaaatcaagtataaaggtatgtttctaagacttattatattgttttggagactaatgtattatgtctaagtgctggaaacaggaaaaatctggttggaattaaagatggctttgttcagccgaagtcagctctgtctgggtgcaccggacagtgtccggtggtgcactggacagtgtccggtgcgccaggctggcgtctgtcaactggctgctctcgggacttcgtcggcagcgtacggctaaaattcaccggactgtccggtgagccaactgtcggcccggccaacggtcggccgcgtaatccgcgcgcgatgcgtggcagagcaacggtcagatgggggcacggactgtccggtgtgctccggacagtgtccggtgcgccaacggctctgaatctccaacggtcggcttcgccaaagaaggaaagaaatccgcaccggacaatgtcctgtggtgcaccggactgtccggtgcgccaggcgacagaaggcaagaattgccttccaagttggtctccaacaacttctagctgccttggggctataaaagggacccctaggcgcatggaggagtcacccaagcattctttgatcatctctaagcaccaagactccattctcgcgcactcgattctttgtgatagtgacttgagctccgttctagtggtgaattttgtgctattgtgttgtgagctcaagtcttggcttgtgtgtgtgcgttttgctgcggatttgagtcttgtgtgttgttctccccctcccttactctagtgctttcactttga

SEQ ID NO: 169084 - DNA, 644 bp, Arabidopsis thaliana landsberg
atgtttaggatatatacaggccttctcatcttccattaacagagcttcttaagtttattctgtgggcaaatcttccgattgctgaaatgaatgttagtcttatgtgaagctctgttgggttttatcaggtaaatgtgtatgctttatgtgttatgtaacgtttcttgttgttggttcaaatggtgtcttctcttttatgcttgacagattgcaaagcttagcatgattcctgtatcatgcttgttggaagtagtatttataaagattcgttactcaagagatacaaaacttagcattggacttgttcttgttggtgttggtgtttgtactgttactgatgttagtgttaacaccaaaggttttgttgctgcttttgttgctgtgtggagtactgctttgcaacaatacgtaagttctttgagctacggtttacacaaagattaagattaagatttacacaaagtttctctcttttgttgcagtatgtacattatctacagcgaaagtactcgcttagctcattcaacctactgggtcatactgctccagctcaggctgcaacgttgttgatagtcggtccatttctcgactattggttgacagacaaacgggtagacatgtatgattacaactctgtctctgtg

SEQ ID NO: 169085 - DNA, 1089 bp, Arabidopsis thaliana landsberg; identical to SEQ ID NO: 32241

SEQ ID NO: 169086 - DNA, 521 bp, Arabidopsis thaliana landsberg
  unsure (1)..(521): unsure at all n locations
acacggtcttccacctgcccttttggggtccggtgatgaaccgcatcggtggcgtgcgtgcggatcccgcgaacgccgagcgcctcctgcaaaaggacgagctcgtcgccgtcttccccgaaggcgaaaagggcatgggcaagctgtggaaggaccgctatcgcttgcagcggttcggtcgcggcggcttcatcaagctcgcgcttcgcacgggcgcgccgatcattcctgttgccgtcgtcggcgcggaagaagcggcaccgatgctcggcaaggtcacgtggttcgcgaagaacatcggcatcccgtggattccggtgacgccgacgttcccgtggatcggtccggcaggccttctgccactgccgagcaagtgnnnnnnnnnnnnnnnnnnnnnnnnnnnnnnnnngggtgacgcgaacgatcgcctgctcgtgaacaagctcgcagatcaagtgcgcacgcaaatccaaacgatggtcgacgggttgttggcgaagcggcgctccccggttctggcc

SEQ ID NO: 169087 - DNA, 2351 bp, Arabidopsis thaliana landsberg
  unsure (1)..(2351): unsure at all n locations
tgtactctgtacatctgtatttggttctaatagttgcaactaacattaatcatgtgtttttaatattacgtcatacattatgcatggagaggagatgcctaattagtcacctaaataaaatttatatcgattagattcttctaatcagtcacctaaataatgttttaaaacaactcttatggatataaatataaataggtcccccgatcggcactcgacaggtatagatcaaattcattaagttggagcacaatcagattcaatcttaacctctttctgatacaatcattttggatttctattttaataatatatggttaacgtcatgagaaaatctatatgccaaaaaaaatataagttttcaacaaaagaattcgcaattcagaaatattcattcatagcccttctatcattctaacttatgttcatatacttaatataattagtattcccataaatagaaatactaacaaaaacatgttctctatttttattctaaactctggcaccggttaatttggaattgtcttatcaacctagtttaattcaaaactctagaagaaagaaaaaaaactaacaaagttgtatactattttatatactataagagtcttttttcttcttcttctatatatgtcatgattcacttaagaatgtatgacgtatatatatggtgtatgaacattcccgtcgaatgtgtaatatgattcctcctaactaatatgctacgagaattaaataaccaacagaacccactttccaattctattggaaggctaacgaatatacaaaacaatgtatgaagtcataatttctttttgataatcttatttaaaaattcttcattgtgcagtgtatctcctcttctacaaataacaacactctccctccttctcttacacatcacaaatacatacctcaattagcttatatggttatctagtgatcagttcgttgtagaatcatgtcgggaacgatggtttgtgttgcatgtgttgaggaaaataaagggtgtgaatgtgagcatgaaaaaccggttagagagttggtgttggaggcggcgtctgaaaatagttcatttcttcactctgttatcaacatggttggtatgctcattggtacgtacctaatattatgaattatgatgcaccaagtcaatttatacatttgtggagctattttgctgtgaaaacatcccttggtatgaataaacataactagagtgttgcacatgagcaagagtgtgttataccaagtttttttttttgttttcttgtaaatatgcatttttggaaatatttctatactatatatgtgctaatcctaacaataatttcatttacttatattttcaagataatcatttttcatacgtcgtaatgatttataagcttaagctatacatgattaacttaaaacataaacttctctgattttataaccaatcaataagcaaactctgacgtcatgtttgtcccgtaacacaggacttggccaactatctatgccatacgccgttgaaagcggcggttggatgtcaatcttcctcctcatatcattcggaatcctcactacctacacttcccacatcctcggaaaatgtatccgccgcaaccccaaatcaaaatcctactccgatatcggctactctgccttcggccgcccggccgcctcatcgtctgcctcttcatctacctcgaaatcttcattgcctttgtgtcttacaccatctccctccacgacaacatctccgctgcttttcccgccactttttctaaccacggccatttttccgcggccaagctgacggctgtggcggtggctatcgccttgccgagtttgtggataagagatttgtcttcgatctcgtttctttcttccggtggtattcttatgtcggctataatatttgggtcagtggtttacacggccatctttggaggcgttattgatgatggaaagattccggtgctccggttagagaatattccgacggtttcgggaatctatctctttagcttcggtggacacatcgtatttcctaatctctatacttccatgaaagatccctccaaattcacaaaggtacgttacaaatatgaaatatccttttttaaattattattgcgagtgttaatataaaattttatttatacatataatttttttttattatcatataaatttcatgcgttgccttgtatataataaaacattatgcatnnnnnnnnnnnnnnnnnnnnngtaggtatcaatagtaaggtttgctacggtaacggcgttatacggagcactagccatcacaggagcgaagatgttcggaccaagtgtnaattcccaaattaccctca

SEQ ID NO: 169088 - DNA, 675 bp, Arabidopsis thaliana landsberg
gttcgctggggcacgcgcattgtccgtgttgacggtgcggcgcgggctgagaccgtcactctccgctcagctacgggcgcagaagaggtcatcgccgccgatatcattgcactcaacgaaggcttctcgcccgccaatgaattgtcgcgtcttctcggcgtcgctcatcgcgtgaaggctgacggctggacgcggctcgaagcgatccggggcgaggatggcgggaccgatcggccggatgttttcgtggttggcgaggccggcggctttggcggcgcaccgattgccgaagtgcaaggccggcatgcgggcgcatcagctgcccgtcgtcttggtcatgtggtgcccgaaatgcgtgatgatctcgcccggcattggcactttcagagcgcgctttggaccctcttccgggccgaagatccgggcctcgcgcgcgccgacgatgacacactcgtctgccgttgcgagtgcgttgcgctcaaggatattcgcgctgcgcttgcccggcccggcgtccgcgatctcgccagcctcaagcgcgtgacccgtgccggtatgggccgttgccagggccgttattgccagccgcgactcgctgaactcgtgccggagcgagtcgaagccctcgattttcccgcgcctcaaatgccgttgaacccggtgccagccgtggca

SEQ ID NO: 169089 - DNA, 1000 bp, Arabidopsis thaliana landsberg
aagaatgttcaatgagaggagagaaggaccatcggatgaattaaaatatggagacttcatgcaatcaatgatatatgaggtggagaaagaaggcgatacggtcatcgaggaaagatctgtagagctgatactgagtttactgattgcgtcttatgaaactacttctactatgactgcattaactgtgaaatttatagctgaaaaccccaaagtgcttatggagctgaaggtaaacttacttagagagatatctctagtgaagaagtttgaatccttttgttctttgaaacgagaatgcttaagcttatttatgttaaacagagagagcatgagagcatcctccaaaacagagctgataaagaatctggagttacttggaaagaatatagatccatgatgaatttcacccatatggtagctttttgttttcttattataaacgtacttgttaaataaatgaaattccaaactcaacatttagttgattgttgcaattgcaggtgatcaatgagtctcttcgtttaggaagtttgtcacctgctatgtttagaaaggcggtgagtgatgtggagatcaaaggcaagtttgagtctctcttttgcgtcatgaaaataactataagtttgttaccaatgatccaatccaaaatcgtgttgtagttgcagggtatacaattccagcaggatggattgtattggttgttccatctgttattcattatgaccctcaaatctatgaacaaccatgtgagtttaatccatggagatgggaggggaaagaattgctttctggctctaaaacgttcatggcgtttggtggtggtgcaagactatgtgcaggagcagagtttgctaggcttcagatggctatatttcttcatcatctagtcacaacgtatgacttctctttgatcgataaatcttatatcattcgagcaccattacttcgattctccaagccgatacgcataacgatctccgagaatcctttaagttcatct

SEQ ID NO: 169090 - DNA, 1086 bp, Arabidopsis thaliana landsberg
aatttggcagggcattatcctcgtggtcataaagagcttaaaggttctttcttttacacacatggacctgctgatactatgtcatggttttctgagcatggagtgccactaaaggttgtgaatttgcatcatatttgtcattagagatgtttatcttactccgtatctttcgcctaattcatatctcttgacagactgaagatgatggaagagtattccctgttagtgataattcattatctgtagttgattgtctcttaaatgaagcaaacattagaggaggtatcatatataacacatctattgaaatacatattcttcttaagtcttgtgtctcccattcatatatcctctcaatttccttaaacagttaggcttgagagaggaaagtctgtgttagctgcttctattaaacccgatggaaagttccttgttaaagttgggaagcaaagtgctgacacgtctgaatctatagaagctacatatcttctgattgcaactggaagtagccaaaaggttatacagtaaccccatttaaagaatacgaattctttattttcaatgctgttgggttctcatgttttcctaagatggttttgcttaattatgttacagggtcactctttagccactaaatttggtcattccattgtagatccagtaccgagcttattcacttttaagatcaatgatccattgctgaccgagttagcaggggtaaattttcctctaaaaccagaattcgttagcacgaatttattttacgagcttcgtatgtgacattgtttatttctatttcccagattagtttctcgaaagtccaagccaaactgaaattagataatccatgcccggatttgtctaacctcgtgcaggtgtgcatctttttcccccttgctattcttacttttgtttaaaatcctttatcataaggaaaagttcatatatattactttgttttctgtcaagattggtcctatgcttgtaacacattggggacttagtggaccggaaactaatcgactctctgcatggggtgcacggtatctctttagttctaagtacaaaggtctgaaacattcattt

SEQ ID NO: 169091 - DNA, 1177 bp, Arabidopsis thaliana landsberg
gattcatcttatatttttgtagggaaagctttcaagtggaactgaagtagccgttaagagactgtcgaaaacatcgggtcaaggcacccaagagttcaagagtgaggctgttcttgtgacaaagcttcagcatagaaatctggttaggcttctcggattttgtttggaaggacaagaaaaaaatactcgtctacgagtatgtacctaacaatagcctcgactacttcctattcggtatgatatggtcgcttaaattaaatgcttataagtttaaaaccaaaaacaatacttgtaagttccgagcaatacttattgtttccaatggtactatatttatgcaatgtacgaccctgcaaagcaaggcgaactgaactcggtacaacattattgccgggattgctcgaggaattatgtatcttcatcatgatttgcggcttacaatcatacgccgttatctgaaagcaagtaacattctcttagatgccgacatgaaccccaaaatcgcatggcaacattctcttagattttggcatggcaactcatgccaacactaatagaattgttggaacatagtaaatttttttctcttaataaacaaaacacataccaactatatttggtggttacttgtaggctaaaaggtgtttccttaatttgcagtggttatatgtctccagaatatgcaatgcgtggtcatttctccatgaaatctgatttctatagctttggtgtaatgattctagagattataagtggtaaaacgaatcgcagcttctactacattgatggttctcctagcaatttggtcactcatgtgagtatatgatcgttcaagttatatgagtgtatatgattaagccaaaggatattaatttatttgatcacttttgttaggcttggaagctttggagaacagggtcaccttttgaacttgtggatccgacaatgggagagagttctcggagtaacgaggctattattagatgcatccatatcgcacttttatgcgttcaagaagatcctgtagatcgaccaatgttgcctgcagcaatcgtcgtgatcctgactagtaacattgacacttaccgtttgcctctcaaacatgaatgaccaatccacaagcaggtctattccttgttctaacaatgatgtatcgatcacagttctagatcctcgt

SEQ ID NO: 169092 - DNA, 386 bp, Arabidopsis thaliana landsberg
aatgcccggggggtgccggcggcgcaagttgccgctggtggtggtcggtttggccggcgggcgcaccgatgccacgtcgatccgcgtgcgtgacctgtcgcgcaccgaacacgacgccatgctcagcctgatgcgcaaaaaattgcgccaggagcatcattttccgcgcaatcccaaacgctttttcagcatcccggccgtgtatccgctggaaaacgtgcagtacccgcatgccgacggcagcgtgtgcggcacgcgcccggacgggggtgacacgctgaagctcgattgtggcggcggcttgggcgcggccactcacgtcacggtcacttttgcgttcccggtggtgggcaaggtgctggaaaatcgctggagcccgccaggga

SEQ ID NO: 169093 - DNA, 1196 bp, Arabidopsis thaliana landsberg
cccgaaatttcattgtccttgtagtgtatgcaagaatgaaaaacacatcatctagaagagttaatagtcatttgtttagtcaaggatttatgcctgattattatgtttggtataagcatggagaagaagtgaatatggatataggaacgagtacttacacggatatgacgtattttagttcgaatcatgaagaagtgagtaatgttgtagaaaatccatatgtggatatggtgaacgatgcatttaattttaacgtggggtttgatgataactatcatcatgatagttatcatcaggatagtagttatcaaaatgtcgaagaaccggttcgtaaccattcaaagaaattttacgacttgttagaaggtgcaaatactccattgtacgattgttgtcgtgaaggccagtcgcagttatccttagcatctcgactcatgtagaacaaggcggattataatatgagtgaaaagttggtggattccgtttgcgaaatgtttacagattttttaccagaaggaaaccaggctaccagttcacattaccaaaccgaaaagttgatgcgcaatttaggacttccatatcatacgattgatgtttgctcgaacaattgtatgcttttctggaaagaagacgaacaagaatatcattgtcgattttgtggcgcataaagatggaagcctaaagatgaccgtcgacgaaccaaagtaccatatagtcgtatgtggtatctacctattggagaccggttaaaaagaatgtatcagagccacaagacagctgcagcaatgcgatggcatgctgagcatcaatcaaaggagggagaaatgaatcatccttcagatgcggcagagtggagatattttaaaaagttacatccccggtttgcggaagaacctcgtaacgtttatctcgggttgtgtactgatgggttcaatccgtttggcatgtctcgtaatcattcgttgtggcctgtgatcctgactccatataatttaccccctagtatgtgcatgaatacaaagtacttatttcttacaattttgaatgttgagccaaatcatcctcgagctagtcttgatgtcttcctccaacctcttattgaggagctaaaagagttgtggtctactggaatcgatgcatatgatgtgtctttgaatcaaaattttaatccaaaattagtagtcaaatatgactag

SEQ ID NO: 169094 - DNA, 2188 bp, Arabidopsis thaliana landsberg
atggcttcttcttcttcttctcctagtagcgggagatacgacgttttcccaagcttcagtggggtagatgttcgcaaaacgttcctcagccatctaatcgaggcgctcgaccgcagatcaatcaatactttcatggatcacggcatcgtgagaagctgcataatcgccgatgagcttatatcggccattagagaagcgaggatctcaatagttatcttctctgagaactatgcttcttccacgtggtgcttgaatgaattggtggagatccacaagtgtcacaaggacaaagacttggatcaaatggtgattccggttttctacggagttgatacttcggaagttagaaaacagatcggtgaatttggcgatgtctttaaaaagacatgcgaggacaaaccagaggatcagaaacaaagatgggttaaagctctcacagatatatcaaatttagccggggaggatcttcggaacgggtatgtttttttgattccactatttctatgagtgtttataattatttcaaacctgtattttttttttttttttgcgttgacttcgaatcttcgattgtgcttttaggggtgcctctttattgacacaattttgactattgttattaggcctagtgaagcagccatggttgtaaagatagctaatgatgtttcgaataaactttttcctctgccaaagggttttggtgacttagtcggaattgaagatcatatagaggcaataaaatcaatactgtgcttggaatccgaggatgctagaataatggtcgggatttggggacagtcagggattggtaagagtaccatcggaagagctcttttcagtcaactctctagacagttccaccatcgcgctttcgtaacttataaaagcaccagcggtagtgacgtctctggcatgaagttgagttgggaaaaagaacttctctcggaaatcttaggtcaaaaggacataaagatagatcattttggtgtggtggagcaaaggttgaagcacaagaaagttcttattcttcttgatgatgtggataatctagagtttcttaagaccttggtgggaaaagctgaatggtttggatctggaagcagaataattgtgatcactcaagataggcaacttctcaaggctcatgagattgaccttgtatatgaggtgaagctgccatctcaagatcttggtcttcagatgatatcccaatatgcttttgggaaagactctccacctgatgattttaaggcactagcatttgaagttgccgagcttgtcggtagtcttcctttgggtctcagtgtcttgggttcatctctaaaaggaagggacaaagatgagtgggtgaagatgatgcctaggcttcgaaatgactcagatgataaaattgaggaaacactaagagtctgctacgataggttaaataaaaaaaatagagagttatttaagtgcattgcatgttttttcaatggttttaaagtcagttacgtcaaagaactacttgaagatgatgttgggcttaccatgttggctgagaagtccctcatacgtattacaccggatggatatatagagatgcacaatttgctagagaaattgggtagagaaattgatcgtgcaaagtattgaccgagaaatcctggaaaacgtcaatttctgacgaattttgaggatattcaagaagtattgaccgagaaaactgtaagtttttcgcagctccgtttgaatgcatgactttatattaatataatcgtaatttggggattgataaacttaagcaattgttgcctcatgagtaattaaaacgtagctttgatgtgtcagaaaaataaaaagggttgcgattgttaagattatattagttttcttcggatttttttttcaggggacagaaactcttcttggaatacgtttgccagagacggtattattttcgacaaggccgttattagtaatagatgaagaatcgttcaaaggcatgcgtaatctccaatatctagaatttggtcatcagtcaaatattgatctacctcagggcctcgtttatttgccccttaaactcaggtttctaaaatgggatgattgtccattgaagtctttgccatctacttttaagacggagtatctagttaaactcataatgaagaatagtaagcttgaaaaactgtggaagggaactctggta

SEQ ID NO: 169095 - DNA, 1554 bp, Arabidopsis thaliana landsberg
gttgcaagccgatgagtctccttataccgaaccattaacaaagttaacattcacatcagacgccgatttcatcaaaagtggaaaaagcggcaagattcaaaatattccggggatggagtatataaagccatacacggttttgagatattttccagatggagtacgaaactgctatactcttaccgtcatacaaggcacaaactatctgatcgtagccatgtttacttatggaaactacgataatcttaatacacacccaaagttcgacctttatcttggtccaaatatatggaccacggtggatttacaaagaaatgtaaacggaacaagggcggaaatcattcacataccaaggtcaacttctttgcagatttgtcttgttaagacgggaacaactacgccgctaatatcagctttagaactacgaccattgagaaataatacttatattcctcaatctggttccctcaagacattgttccgcgtccatttgactgattccaaagaaactgttcggtaagccaactcaaaaccaattggtaatgaatagattggtttccactggatacactgttcggtaatactttccatcctttctcttcaggtatccagaagatgtccatgatcgtctttggagtccatttttcatgccggaatggagactgttaagaacaagtctcacggtcaacacttctgatgataacggctatgacataccggaagacgtagtggttacggcagccacacctgcaaatgtgagttcaccattaaccatttcttggaatttggaaacacctgacgacttagtttatgcatacctccacgtcgctgagatccaatccttaagggaaaatgataccagggaattcaacattagcgcaggccaagatgttaactatggacctgttagtcctgacgagtttctagtgggtactctattcaatacatcaccagttaaatgtgaaggagggacatgccatttgcaactaataaaaactccaaaatcaactctccctcccctcctcaatgctattgaggcttttataacagtggagtttccgcagtctgaaactaatgcaaatgacggtatgtcagcaaaatctgagtatatatatacttttttgtatatacttaagtgttttcattctgttattgtgtgttagtccttgctatcaagagcatagaaacaagctatggattaagtagaattagttggcaaggagatccatgtgttcctcaacaattattgtgggatggtcttacctgcgagtacaccaatatgtctacaccaccaagaatccattccttgtacgtccatggctattcgtaacattaaaacagttttttgttaagctctgcatttcgtaacatcttacactttaaatgtgtgttatgatctttaattaccaccagagacttgtcctcaagtgaactaactggaattatagttcctgagatccaaaatcttacggagcttaaaaaattgtaagtatgaacacattgcccattttttatcaaggtcaaacacatactctgttttacctggatactctg

SEQ ID NO: 169096 - DNA, 449 bp, Arabidopsis thaliana landsberg
tacacatagtatcaatcaatatcattatcatcacagattataccactcattgtttccgaacaaactagggttttgtttttccgttcgatttcagatattttgttgtcgataatgtttgtagtaacaaaacatcttctgcaaagacggaagaggtcgtcctcgtcgtcgtcttgctacgatgatttcttcaagaggttacaaaaccacggagcgtggtttaaaaagcatcttactacgcaactcttttctgtcacgaagaagaagaagcttcacttagtccttgacttagaccacacgctactccactctgttctggtttcagacctatccaaacgcgagaagtatctactcgaagaaactgatccaaggcaagatctatggagacgcaacgtagacggtaacgaatttatcataaagctacgaccttttcttcatgagtttctctggaa

SEQ ID NO: 169097 - DNA, 1216 bp, Arabidopsis thaliana landsberg
atgggtgatctctcgaggatgtacaggctttatcgtctaatcccgcaagggttggaacctattgcagacttattcaagcagcatgttactgcagaaggaaatgcccttatcaaacaagccgccgacgcagctactaatcaagatgcaagtgctagtcaggtgcttgtcagaaaagagattgaactacacgataaatacatggtctatgtagatgagtgttttcagaaacacagcctcttccataaggtattaaaagagacgtttgaagtcttctgtaacaaaacagtggctggagcgtccagtgcagaaatacttgcaacctattgtgataatatcctcaagaccagaggtggaagtgagaagcttagtgatgaagctactgaaattacgcttgagaaagtagttaatttgcttgtttatataaatgacaaggatcttttcgccgagttttataggtacatatctcttgcttccaatatttgtttctctttcaactttgttccttacaccaatgctttgttaacttttctaaatattggttgtttttaggaagaaacaagctcgtcggctcttatttgatcgcagcggaaatgacgatcatgaaagaagtatacttacaaagttaaaagaactacttggtggacagttaacttctaagatggagggcatggtcagtcacatgagttttatttccttagtaatgaataaggtttttactaatgctttgttttgtacatttgttatataggtgacggatataacattggcaagagaactccgaaccaacttcgtggattatttatcagcaaacatggcaacaaagctggggattgattttactgtcactgttcttactactggtttttggccaagttacaaaacaacagaccttaatctacccactgaaatggtaagtaaaacttttcatatttaggtctttaaacagaatttaagaagaaatatttctcagcttccaatttttttttttttttttaggtcaactgtgttgaagcttttaaggtcttttatggaacaaaaaccaattccaggagactttcatggatttattctcttggaacttgtcacattcttggagaattcgagaaaaaaacaatgcagttagtcgtttccacgtaccaggctgataagttaaagctcttcaacaaagcagagagattaagctacactgagatgtcggagcagctaaacctcagcc

SEQ ID NO: 169098 - DNA, 5159 bp, Arabidopsis thaliana landsberg
attgttcaaggtccatcgccgtgctcagaactttcctgcacatgtataacaaagacatcgctgatgtgagtcaagttcttttataaatgctaaaggatcttaaagcgttgttactctatatcacatttggtgactaaggcatgtcctctccactcttgagagaaaacaaacatgactcacgttccaagattttgtttgttcaggcggaggataaggttgctcaggcgtgctatttagctggggaactggtggatgcaagaaagcattgtgaagcatccattaaggtaaaagcccttgataaatactgatactgcttcgatttagaccacaacttgtatcattgattgacaaaatatgaaaactgctttgagcaaaccggtatctggcagaccaaatcccttaaacaaccgttaaagcttttcgttcatgcgtgtaatttcattaccccaactggtatgggtgagatatgagataaattatgagtttggtggcagattctgaagaggctgtatgaggatgaacacgtggtgattggaaatgaaatggtgaagcttgcgtcgattcagcttgcatcaggtgattccagtggagcttgggacactacaaagagatcgtctcagatattctcaaagtattacgggtcacatgctgagactctcttctcttatctcccatgtcttaagcaagaaactgccaaagctgtgaatttgtcaacttcttaacccaagaatttctgttgtataatataatagctttgttaatacaaaaatattaggccggtttagtttgtgtccggtttagtttgtacactcttaagcctttctttttccctgtccgaacgacgtactttctttgacttagggttttaacaagtttttgggactaaggttttacttttgcaaaacgacgacgatttgggcaaatattttagtctccaaccaaaaaagttccaaaacgacagacgaacacacgaatttcaaccttctccgagccaaacggcgtagacacgacaagctcgacaagtagaatcgaattgtcaaaggttttacccagtctctctctcgatcttctttgtaacccacatgatcgtttcttatgacataacttgggtttagagttcgctttaaatttgagtaaatgcatgcttgtttcatcgttattacggatttcggttttgggtttagtgtaatctgtgggaagcaaaaatttgatgtcccttgttgtgatttcggcgagaattacatagcttttgagtgaaaactccattctaattatgaatttgaaagctatatctctttgagggattgtaaagtgtttccagttgttgaatcaattagttttgtttgattttaagacctgagtgtttttttttgtgtgtagaaacaaagtggttgttgttaatcagaatcccctttaagtttatctctcttctgtgtcaggttgtctgaagatccctgagtagacaaacagtttttgttttctagttgatataattggtacgattatggcaagtgtggtgggagatgattgcaatttagatgtaatgcctcctaggaagaagaagaataaaggatccaataaggtattagctctaatcaaaccattcttcaataagattttgaggttttttaacgctgatgagatttggaaattttgttttcatggtggacagatgcaggataagctgaattcaaataataacacggcatcgaagaaatctcggaaacggaaactgaattcaaatgtaaacacggtagcgtgcaaatctcagaaacggaagctgaagaaattggaggaagataaggagaaagaaatcctcttttcaaaaactgccgagttgttagagtatgttcaacgcttcattcaaatatatgattttctttgtttgtttgttttctttatatgaatgaatttggtattgaatttttacagcaagtacaaaatatctgaggatgtatcgtcgctattacaatcatcaaaagttataggaagagtaagaaattttctttctttgttcttacattacgatttcttacagatgttctgattcttctttggtggttaatcttttactcagtcagctactaagctggaaaaaagaaggagagcaatgcaactttctaaagctggtgttgagactgagcattctgatgaatcagtcgagcaaaatgacaatgatgatgattcttgtatggatgaacctacaacaccggaacatgttgaaattgaaactccaacttttgtaactgattctgagcagcaactggttcatgctgatctaatgatttctgctgaagaaagtagtagcaagcttgaggtagacgacactgtggatatgatcccactgacaacttgtcgtgatgatgatgaagactcaatggtttgtcaactctgaaaatttgatgtttttttttttttttgattgagctattattgctgccttatatatttgatttgattgtttctaatgggtttattatgaaacaggatgggctcattgagaatgaagatgtaactgtacaaggacctcgtgtgcccgcgtttgtagttcatgtttcaagaccagccgaagttgaagagacgaggaaggatcttccaatagtaatgatggagcaggagataatggaagctattaatcgtcaccctgcagttattatttcaggacaaactgggtgtggtaaaaccactcaagttcctcaggtcagtttgctgcatttgtaacggttttctgatagctgagttttggtctcagttagaaagtcctttctttatctaaccctgtttttgtttctgaatccttcagttcctttatgaagctggttttggttcaaagcaattcagttctcgaagtgggattatcgggattacccaaccacgccgtgtcgccgttcttgccactgccaagagagtggcatttgagcttggtgttcgtcttggtaaagaggttgggtttcaagttaggtacgacaaaaagattggcgaaaactcctctatcaagtttatgaccgatgggattttacttcgtgagatacaggtaattgacggtttttcgcctggtttgttttgtacattcttttccatttttatcatggttacttgattgtataagttcttctgctgcagaatgacttcttattgaggcgttactctgtgattattctcgatgaagcccatgaaagaagcttgaacacagacattttaattgggatgctcactcgagtcatcaaaatccgacaggaatactacgaggaacaacaaaagagtcttcaatctggaggcacagtaacctcagaatgccaaatcacgccacttaaacttatattgatgagtgcgactttgcgagtggaagattttgtatcggggaaaaggttattccctaatatacctcctcttatagaggttcccactcgacagtatccagtaactatacatttctccaagaagactgagattgttgattatataggtgaagcttataagaaagtgatgtcaattcacaaaaagttaccacaaggaggaatacttgtttttgtgactgggcagagagaagttgactatttatgtgagaagttacgtaagtcttcaaaggaacttgttgttcaagctgctaaaagagatgcttatgtgagtaagaaatgcgatgatggatctttggtttgtgaaggcatcaaggagattgtggaaggatttgatgatgacttcacctatcaaaattcccggtttcgtcttgcatggagaagatccttctgatattggtgatgtgtactatgatgatgattatgatgaggaagacatgtttgagtctgatcacgacagggactgtgcacctggtgatgacagatttgcaagatcatttgttgaggagggcaagcttaatgctctccgagcagcgtttaatgctttggcagacaaaaatggatccgtatctgctgagccggcaaagtccattgcagcagagaatcaagaggctgagcaggtaaaaaacaagttttctccaggaaaattacgtgttcttccactttatgctatgctatctccagctgcacagcttcgagtgtttgaggaagttgagaaagaagaaagacttgtggttgtggcgactaatgtagcggaaacttctctgactattcctggtataaagtatgtggttgatacaggtcgggttaaagtaaagaattatgattctaagactggtatggaaagttatgaggtagattggattagccaagcttcggctagtcaacgagctggaagagctggacgaactggacctggtcactgttatcgtctctattcatctgcagtttttagcaatatatttgaggaatcttcgcttcctgaaatcatgaaagttcctgttgatggagtcattcttctcatgaaatctatgaacattccaaaggtaaaatgtttgtagccaccattgtcaatggactagatctccttttctgtctcgctcgactttttgatgaatctttgcgtttttctattgctaacaggttgagaatttcccgtttccaactccgcctgagccatcagctattagagaagcagaacgatgcctaaaagctttagaggctctagacagcaacggagggttaacaccattaggaaaggctatgtctcactatcctatgagtccacgtcactcaagaatgcttctaacagtcatccaaatgctaaaagagacccggaattactcacgcgcgaatctcatccttggatatgcggttgcagcagtagccgcgttgagcttaccaaaccctttgataatggagtttgaaggagagaagaaaaacgagtccaaagatgctgacaaaaccgtcaaacaagaagataaacaacggaaaaaggatcggaaagagaagattaaagctgctcgggacagattttccaacccgagcagcgatgctttgactgtagcttacgcattgcattcctttgaggtctcggagaatggcatgggcttctgcgaggcgaatgggttgcatttgaagaccatggacgagatgtctaagctcaaagatcagcttttgcgacttgttttcaactgttgtaagccctccgaaaccgaagacagcttttcatggactcatgggactatacaagaaagtagagaagtcatggagaatcaccacatcgacttcctcaaaaaggcc

SEQ ID NO: 169099 - DNA, 1398 bp, Arabidopsis thaliana landsberg
taagacggtgtcgatcgatacccctcctgtgtcgatcgacattggatccggactgcaccctgtaaggtgcaaatacctatgtagcccgagcttgtctacactcctcctgtcccgtatccgaaaaggcgtcgttctaagcaggagcttcatgctgccaagtgcaaagccataatggagaagatcttccatactcttcctaaggatgcttctgagacatctgcttcctcactcaacaggtatgtcaagcgacttgttgacaatggaattagcttagatgaagctaagctgcttaccagggacatcagtgcaatcatgctgcctaaggccaagaaggacaaggcatagagagtagacatagccgagtacatccgcaccattactcctggtcagaccactgagtagcttgtagatccatgtagctttgttcttgattgctctatctccagaagcagttttagccgctttttgtgtgatatgggatccatcatcaacctcatgcctaagtctgtctgctgaaagactaggcatgactcgctacagtcctactcgcatcactctcctcgtcgcggatcgttccaaatgaatccctgaaggaatccttaaagatgttcatgttaaggttggtaactccataatccctgctgatttcgtggtcctggactatgagaaggaacccaaggatccccttatccttggaagagcatccttagttacagctggtgctaggtttgatgtgaagagagggagcatctctctcaaggtttgtaattcagagatggagtttggcatggatggttcagagcttactaagcctatcagttgcattgcctccagcacagacacacctccctagattgatcagaatcccaccacagagccacacacaacgctccaaacccgttcagctcgccaatgagagttgcagaggaacggtgtcgatcgacaccactacccctgtcgatcgacaccctcgggtttcacagacagaggattctgcacattctcttcagcccacaccaattgaggacctatgtgataagttctcatctttctcttctcctgttttatctttgattaattctttagattattcaaagactgcttcactagataacaagcctagagttcctcgaaagcttgtttctcttgttgttcttgcaggtgacgagaagagtgtcgatcaacacaccactgagtgtcgatcgacaccagaagctgctacaaccagatccgtttacacaccaccttggaaggcgaggcggcagatgcaatcctccaccactccacccacatcctgaactccgccaagtcaagctattgactcaaaacaagcgcttagtgggaggcaacccactggtttgatttttcttttccctttcttttattttcttttatttt

SEQ ID NO: 169100 - DNA, 1256 bp, Arabidopsis thaliana landsberg
gtaggtttatctaggggagattgggttacaagaagccatctcaaatcaaaattaggattctttttcaataaatttcttgaaaaacaaggcatccaaatccattgataacatttataaacactttgacaaagtaaatcttgcccaagagatatttcaaatgtttaacaacgagaaaacccattcttatgactatagcgcaaacaaaaacgcataaacagaatttttttaaacgtggaaatgtttcttgctaaacaagccgtgtgtgtttcatattcacaaggtacttcaaactctacccgaaaagttggattcatctgcggagtgggagccgctatcagacgatggtgtacacgtacggttcaagagtcgctacggacaatatctgagggcaaacaaaggtgtaccaccgtggagaaactctatcacacacgatattcctagtcgtacggtcacacaagattgggtcatgtggactgttgacgttcttcacattcgagttatcaaagatgatgcagagtctacccacagttcttccactttttcacggattgaggtactactactatatacactacacatacgtgccaataccattcttctgaaaatactagtactaaacattcatcgatacatgatcagtcagatgattcgtttattgtgagtttaccactcaagtccgaaggaaggctaatatattacgagaccggagatgatagtgggaacataaataaggaaataggagaaaaatcattgatattccatggaagcgagttgatagaactaaagaagaagcttgaggaagaaacagagatggaagatgttatgatttggtgtagaaatcctttgaacgaaaagctttgtcctcttcaattgcatcttcctcctaacaacgcaactatgcacatcatcgtctttccttcttcttgcggtactaaacttacctccttcttcattgttaccattatctataatcaaaatattgtttatgcattcctaatttttttcaattgaggatttcgatttccaattaaaactttaggtatattcgagacattgggagtccagagttgttgtttttccgatttcttttggtcggaactctaatgaaaaatccgacacatagttttcttgaaagtctcattattcgtcacgtcagcacaaacttttattcatcccaagtttaactattttaatacagcctctaattgtgtttttgattttttgattttttttttttcgcagagattgacaagtga

SEQ ID NO: 169101 - DNA, 1083 bp, Arabidopsis thaliana landsberg
atcttaactttgatgaaaatggcatcatcatcatcagctttgtctttccctctctccaacatcccaacctgtagtaagaagtctcaacaatttcaaaaaccggcttctttatccaaatccagtcacacacataaacctagtctcaaaacccaaattttacaccacaaattcactaagagaaatttactgagtttgacgactgccttgggatttacgtcagcgctaggaactgttcttgctcaccccgcaaaagctgaaccagaagctcccatcgaagccacttccaatagaatgtcgtattcgagattcctgcagcatctgaaagagaatgaagtgaagaaagttgacttgatcgagaacggaacggttgcgatcgtagagatctctaatccagtagtaggaaagatccagagggttagggttaaccttcccggtttaccagtcgatctggtgagggagatgaaggagaagaacgtcgatttcgctgctcatcccatgaatgtgaactggggagctttcttgctcaacttcttggggaatttagggtttcctttgatcttgcttgtctctctgcttttaacatcttcttcaagaagaaaccctgctggacctaacttgccttttggtcttggaaggtaaaaggatcaattttgaatatatatcaacccaagattgagttttacaagtatgttttcttgtaacagaagcaaagctaagtttcagatggagcctaacacagggataacgttcgaggatgtagcaggagtagacgaagccaagcaagactttgaagagatcgttgaatttttgaaaaccccagagaaattctcagctttgggggctaaaatcccaaaaggcgtcttgttgaccggaccgccaggaaccggaaagacactcttggccaaggctatagccggagaagccggtgttccttttttttcattgtctggttcggagttcatagagatgtttgttggtgtaggagcatctagggctagagacttgtttaacaaggcaaaggctaattcaccttgtatagtgttcattgatgagattgatgctgttgggagaatgagaggaacg

SEQ ID NO: 169102 - DNA, 731 bp, Arabidopsis thaliana landsberg
gtgttatgtcccatccaaggtcttcaccggcacgaaattggttaagctgtcattggtaacacaaagttgcttcccagttgtacctaattgtatatctctcccatcactaaaggttctcttccttgattcaatatggttcgaagttcctcaattcttaatatttctcactgcttgccctgcacttgaagacttaaccatatatcaaaagcctcattctgtaggaatgccctaccatatatctagcaaaaccattaagagactctctgctacatatacatgtggttattttgttgattatggccttaaattatttaacacaccgagtgttgtcgacctctactactctgattatgttcgacataagtatccacatatgaatttggattcacttgctaaagctacactggacattcatttcttagatgataatgccgctaacgtgacagagctcctcagtgggatacgcaacgtcaagacccttcacttgacttcttccactgttaaggtcagtttcagtgtatggtctctcatactctctatggttagaaacaagaaaacattctttatgtgtgtgtgtgtttcaggtgattttgttatgctgcaagggggaaataccaacgttcgagaacctcattaatttaaagtttttgggtaaaacacaacagtggaaatttcttctgccacttctgctagagatttgtccaaacctaacaactctggttctctcggta

SEQ ID NO: 169103 - DNA, 1174 bp, Arabidopsis thaliana landsberg
agtctctcacagttatagtttcgcagcaaaccacttgagctgtggtggcccgttcccgcaaccttgtgtacccgagtgcagtccttcaggtaaaatgacgatgatttgctatggcccacttccatatgcagagatgctaagtgttgaaagttgttatggatttggcgcgtataggtgattcaagcagtagaaaaactggaatcatcgctgaagttgttagcggaatagcggttattctactaggattcttcttctttttcttctgcaaggataaacataaaggatttaaacgagacgtgtttgtggatgttgcaggtctgtgacaataatcaatctttcttctttatggttacacaggaacgaactttaaaaaggtttggtttcaggtgaagtggacagaaggattgcttttggacagttgagaagatttgcatggagagagctccagttggctacagatgagttcagtgaaaagaatgttcttggacaaggaggctttgggaaagtttacaaaggattgctttcggatggcaccaaaatcgctgtaaaaagattgactgattttgaacgtccaggaggagatgaagctttccagagagaagttgagatgataagtgtagctgttcataggaatctgcttcgccttatcggcttttgtacaacacaaactgaacgacttttggtgtatcctttcatgcagaatctaagtgttgcatattgcttaagaggtaaaaaaaggaacataagctataaacttttgatttcaggagtttaagattttgtgatctatatactatgcagagattaaacccggggatccagttctggattggttcaggaggaaacagattgcgttaggtgcagcacgaggactcgaatatcttcatgaacattgcaacccgaagatcatacacagagatgtgaaagctgcaaatgtgttactagatgaagactttgaagcagtggttggtgattttggtttagccaagttggtagatgttagaaggactaatgtaaccactcaggtccgaggaacaatgggtcatattgcaccagaatgtatatccacagggaaatcgtcagagaaaaccgatgttttcgggtacggaattatgattctggagcttgtaactggacaaagagcaattgatttctcgcggttagaggaagaaga

SEQ ID NO: 169104 - DNA, 589 bp, Arabidopsis thaliana landsberg
  unsure (1)..(589): unsure at all n locations
atcgtcgacttcatggtcgaccgctatggtgacttcgtgcgctacaagccggcgctcagcgggcgtacctggctgctgtggttcggcccggggattttgctggctggtggtttcgtggtgctggcgctgatcgtgcgccggcgccgcagtgcggccgtgcagggcgccaatgagttgtccgccgaagaacgcgagcgnnnnnnnnnnnnnnnnnaaaaagaacagacccatgattgaattctggcttagcgcgggcctgctgctgctcgctgccctcagcttcctgctgatcccgatcctgcgtggccgtggccgccagcaggaagaagaccgtacagccctgaacgtggccctgtaccaggagcgcatcgccgaattggctgcccagcaggccgccggcgtgctcgacgaggcgcagatggccaagggccgtgacgaggccggccgtgagctgctggcggataccgagggtgctgaagccccgcgccaggggcatctgggccaggccctgccgttgctggcggcgatgctggtgccgctgctggcattggggctgtacctgcatttcggcgcggccggcaaggaagag

SEQ ID NO: 169105 - DNA, 557 bp, Arabidopsis thaliana landsberg; identical to SEQ ID NO: 76105

SEQ ID NO: 169106 - DNA, 1032 bp, Arabidopsis thaliana landsberg; identical to SEQ ID NO: 59614
  unsure (1)..(1032): unsure at all n locations

SEQ ID NO: 169107 - DNA, 674 bp, Arabidopsis thaliana landsberg
ccaatgaacaacttccgcatcgaacacaacagcatgggcgaactgcaggtgccggccgacgcgctgtatggcgcgcagacccagcgcgcgatcgacaatttcccgatttccggcttgcacctgccgcgcccgttcatccgcgcgctggggctgatcaaggctgccgcggccgaggtcaacctggccatgggccatctgaagaaagggcaggccgcggcgatccgcaaggcggcgctggcggtggcggatggccactacgacgcgcagttcccgatcgacatcttccagaccggttcgggcaccagcaccaacatgaatgcgaacgaggtgatcgcgcatctggcggtggcgggtggcgccaaggtgcatccgaacgatcacgtcaactacgggcagagctcgaacgacgtgatcccgaccgcgatccacgtcagcgccacgctcaccgccagtgatcagttgctgccggcgctgaagcatctgaagaaggccatcgacaggcgtgcgcgtgaactgaagaacacgccgaagaccggccgcacccatttgatggatgcgatgccgatcaccttcggccaggagttgtcgggctggtcggcgcagatcggttccgccatcgcgcgcatcgaggatgcgttgaagcgcatgcgccggctgccacagggcggtacgga

SEQ ID NO: 169108 - DNA, 723 bp, Arabidopsis thaliana landsberg; identical to SEQ ID NO: 39690

SEQ ID NO: 169109 - DNA, 576 bp, Arabidopsis thaliana landsberg
ttcagggatccaggaactgagaacgatccatacttaggtttcgtgtacacgtcattccaagagcgagccacatttgtgtctcacggcaacacggcgcggctagccaagtccgcaggagatcctgtcctcgctcgaatctgcggcaccattgcagctgacgagaagcgccatgaaaacgcttacgtacgcatcgttgagaagctcctcgagatcgaccctaacggtgcagtctcaaccgtggccgacatgatgcggaagaagatcacaatgccggctcatctaatgacagacggtcgagacccgatgctattcgaacatttctccgccgtggctcagcggctagaggtttacacggcggatgattacgctgacatcttggagtttttggttggacggtggagattggagaagctagaaggattgacgggtgagggccaacgtgcacaggagtttgtgtgtgggttagctcagaggattagacgccttcaagagcgtgcagacgagagagctaagaagcttaagaagacccatgaggtttgctttagttggatcttcgataagcagattagtgtgtaa

SEQ ID NO: 169110 - DNA, 1929 bp, Arabidopsis thaliana landsberg
aaaaattataagcaggagtcgggtcagataataaatgaacagaagtctgccattcctttttcctcaaaaaactttgatggaaactagagaaagagttgaaacgagagtttaagattacaaaagaaggtggccaaggcaagtatttaggcttacctgaattgtttggaaggaaaaagagggatcttttcactagcatagtggatagaattaaacagaggggtctaagctggtcttcaaagcttctgtcagcagcagggaagcttgtaatgttgaagtcagtccttgcggctatgcctacctatacaatgacttgttttaagctgccagcaaacctttgtaaacgtattcaatcagcccttaccagattttggtgggactcaaacccggagaagagaaagatgtcttggatttcctggaaaaaactttataaatcacttaaagatggtggtcttggtttacgagatatcactaagtttaacgatgctttgctagctaaggtaagttggagaatccttaccaagccggagtgtcttctcagccgggtccttctagggaaatactgtcatacgtctagcttcctcaactgcactgtttcttcgtcttcttcccatggctggcggagcatctgttgtgggagagatctgcttagaaccaatcttgaaaaagttgtgggaaatggagagcatatctcgctttggaatgatccctggctttctcttactactcctttgagtccaatggatccgatcaatatccaagaccaaaagacgctggtgtcttcactcttgtcccctatcactagagactgggatttgaatcagataagatcaatcattcttgaacatgaaactgatatccttaagctaaagatcagtaaaagaggaggattgggtaagtggatgtggttacctaatgcgtcgggggagtatagtacgagatctggttactatacttcttgtgcaggggacgaattggttaatgagcctgacccttccctagttggtttcaaatggaaaagaagagatttggaatcttaagagctcccccaagatgaaaattcttctttggaaagctactaagaatgtcttgccagtgggagagaaccttaaacttagacatatcaatccggtgggtatttctcctttctgtggagagaatgattctctgtcacatctgatcttcttgtgttcttctgcagcaaatgtgtggcaacttctacctttacacagtcagctatttagaaaccaaatcagtactttcagacaaggattggatgtagtcaagcggctcctctgtctacccctgactggcttaggcaagggtccgatcctcccttgggagaacgcttcgatctggacagcaaggaacaataaaatcttcacagataatgtagtgctccctccagaagtagctcttctatctatcttgcgagctaaagaatggcaatcggcgcagcaaaatcttgtaaaacgctcctattcccgagtgtcccttccacgggctgttttctcgccagatctgatcttctgcaacactgatgcggcttggattgattctaccgtggcgggactaagatggattttcagcaaccagacgaaacagttgggatttcaggcttctcgatatgtatcgtgtgtagcctcaccgttgatggctgaatctctcgtagttctagcagccttgcaccatgctcttgagcttggtttcgttaacctcttcttagcttctgattcgacggcagtcatcaaaacaattaaagcgaagttccaatctaaggaacttcacgggattctacatgatgtccttgatctcgcttctaagtttgtgtttgtgtctttcaatgttattcccagaaactctaatcttcacgcagatgcgttggcaaacgccggtttaagagcccatgtagctccactttagtttatgaat

SEQ ID NO: 169111 - DNA, 1423 bp, Arabidopsis thaliana landsberg
gatcattgacatataaatgtaatgtgaattaggttggcggtgacgattctagtcagaaaggacagaggaaaaagtccagttctaaaatggattcccaatctactacgccactaaaacgagctaaagagaatgagtaggtgtcaagcacaaaggtctatttatgtctgtagatttcctacactagcacttctttatgttgcattacacccacttactttcactattggatattgacagattggaaacatagaagaagtgcatgcacacaaccctgtaagacttgatagttatgtttatagtaaaattatatgttctacatgtgtccgctgaactatgcacatttgtatatgtttgcaggatgtcgttgcaatagagcaattggatgatgaagtagacattctgggacctattttttcattgggcctaacgcaagaaactatggatgacatcagcaggtggtttccaagagggaagaagaagacatcccccagaaaagttgttgttttgtggtccagcaaccggattagggacagtctaagcatgagcaacagaagagtgtaagtctttacactgactatattttcatgagaacttggttgtgttatctcctaaggcaaactttatatgttaccatgtaggtcttatgctttggtgatggcaatgtaaagaaaaatactgactttctaaccattttagaggcccacacactgttagatgaatcagtaagttctacatgaaatatgtcttctattgtagctaaaaatgtggtctcacttcttgttgtttaggcatagtcgtatacatgctgtgtgctaataaaaagttcatacagatgcggctggataaaaataagccacttcattttgatttcctacattcaagtttcttgccagagctaagacgccaataaaaaaaattatgtggagcttcagataaaagtgctttttacttcaccacgctgacaagagtcccattcatggtgtgcccgaaatgttttgacgaggttgatgtcatctactgctcgatgctggtcgagaggcagcattgggttgggcttgtcgtagatttgaagaattgggaagtgcttgtattagactgcaaaagagaagtgttgaaagacgagcaggtggagaagtacatagaagacataacaatcatgctcccgtaccttattagaaagcatggagtaaacatgagaatgctaacacagaggttggatccaatgacaatgagtagacccaacatacaatgcagttgttcttcattaggtatgtttgtgtttcatttttgagtttcactaattgtgtacaacgtgattggtttaataaaaattgtaacgagaaagagtgacttacatactgacaacatgaaattaataaaaaataattttagcaccctaatcattgttgaattacaggcattt

SEQ ID NO: 169112 - DNA, 511 bp, Arabidopsis thaliana landsberg
  unsure (1)..(511): unsure at all n locations
atgcctcccatgccactgcccgtttatcatgactttngattgtttctgtcgattatccgcgcacgcaaggtgctggtgatcggctatggttcgcaggggcggacacaggcgttcaatgcccgtgattccggcgtgacgcagatcaaggtggcgctgaaacccggctcgccgacgcgcgccaaagccgaggccgatggctttgaggtggtaagcgtaagccaaggcgttcagtgggcggaagtaatcgtggtcctgacttcggacgaggcgcaccagaagctgtttaatgatgagattaatccgcnnnnnnnnnnnnnnnnnnnnnnnnnntttgcgcatggcctgtcttgcaatttcggtctggtagcgccgccggccgatgtcgatgtgctgctggtttcacccaagggcatcggaccgcgcatccgcgatatctatgtggcgggcgagggggtgttttgcctgttcgccgtgcagcaggacgcgacgggcaatgcgaaagcgctggggc

SEQ ID NO: 169113 - DNA, 2088 bp, Arabidopsis thaliana landsberg
tagacatttcctttttctcacgtaattattttctgcagataaatgataatttaagcactgaatcaaaatcccaaaaaaaaagtaaggagcctaagagctttttatctggctccagacgatcttcactaccccgacatgatgacggaaaaaggatgaggatatcgtggttaagggagttaataatacagaggtaaaggctgttgtagaggtctcgacaagtgaggataagaattcatcaacgtcagatgtggcatctgacactcagaaaccgtctaagttatccgatgcaccgggaggaagtaaaaggcactggggccgtacccctgtaagtttctttttcctctgcctttattacctatctcttaagggatccagacatttagtaaacgtttggtgttttatgtgctcaggggaagaaaaacttgtcaatggaatctattgatttctcagtggaagtggacgaggacaagtaagtatcatcatctctacaaatgatttacatctttatgtttctttcaaaacttcaaatttgtttggactagaattaatgtgggctacatggttcttcttctgacaatgttaatattctgcagtgctgacattgagagacttgagtcaaccaaattagagcttgcaagcagaattacagaagaggtcacgataagtccttttgagtatttttgcttttgcgaactcggtgtgttatacaggtggtgattttgacgagtatgtgatctctaacaacctccatgtttggtacaacaggtaaaaagcaatgcagttctacaggctagtttggagcgacggaagaaggctttgtacgggcggcgccaagcactagagcaagatgtaagtgtaaaataaaaccttatcttagcaatgtgaagtttgttatttattgagtgtttaaattttagttatatgaatgtgctttacctttgactaggtgggaagactacaagaacagttgcagcaagagagagacaggaaattagctctggaaacaggactgaacatgtcaaaagggaatcaacctattccagaaacaatcgatgaaaatgttgctcctcttcatttttgtctagcaactagttgatttttgtcaggctaaaagtacatatatctaacttgggagacattttacagttgaagaaagatctgcaagaggtagctcaagcggaggctgatattgccaagttggaacataaggttgatgatcttgaaaataggcttggtcaccatgacggaaaagcctctggttctacgcatagtgccagcaaagaatctcggaaattgccagagcacaatgcgaagatgtacggattcatcaacagattcacatttaacctcacaacctatggtttaaataatatcaaagctaattactcgtcttctttcaaatttgtcactcaggaaggagaaacaaaaagatactgaagcagcctctactcacatttctgaaagatcaacgtccaaggtaaccactgtaaacatttgtctatcaattttgtgttttcttcctctgtatttatcctctacagacgggtaacatattgcaggatgggcaaggggctgcaagagaaaatgagacagagaagcaacaggattcacggagcaaaagctcgcaacaagaaacatcacgtggcagctcaaaactggtgggcttgtcaaagaggtctggcacaaagggagaggtaagtttcatagtgtaaccattaaatttcatccaaatatcgttcaaagctagaaactgagtgaaataaacagggaagcacaacaacaacttctgcactttccaaattgacaatgagactcaacttcctcaaggagagacgtagtcagatcgcgaacgagctccaaaacatggacaaaggaaaaaccctagggcaacccagtccaacctcgggacaaaaccgtgtatcagaagaaactgaaaaaggatcagggtcgaaccaggatccagacagcagcaaactacagagccctcacattcttgacagaggaagatccgagaacggaggagacagaggcagaggatcatctggaggaaaccatcccaacactacaccaaggaccttctccagatga

SEQ ID NO: 169114 - DNA, 815 bp, Arabidopsis thaliana landsberg; identical to SEQ ID NO: 56466

SEQ ID NO: 169115 - DNA, 348 bp, Arabidopsis thaliana landsberg
aggaaccacatccccctgcacgcggacgtccatccttgctgatgcgcaggctttgtttgcccgccaaggttttgccgcgacccggctcgatgaaatcgccagcgtggtcggactgacgcgcgccggcctgttctattactaccgcgacaagcaggtgctgttcgacgcgatgctggtcgatgccttcagcgaactggcgacgcggcttgaagccgttctggcgccggcgagcgtcggaattgccgagcgcatcgagcgcgcagtcggcacctggatcgacgtgatcgtcgcgcgtcccaatctcgcgcgtctgattctgcgactggtcgccgacggctcggtgctcgc

SEQ ID NO: 169116 - DNA, 604 bp, Arabidopsis thaliana landsberg
gagatgaggaagctcaagtatcacgagaagaagcttataaagaaagtaaatttcttagaatggaaaagagaaggtaaccatcgggaaaacgagattacgtatcgataccacatgggctctcgtgatgattacaaaaagttggtacctttttttttgctcttgaagctctgttctacttattcttcttcttttggttcgagtgttttgtgatgaacaatgcgtttttctgattcttgagaatgtttttcttttgcgcaggtattcaggattgtgtaggatggtgcagaaactgacgaatataatgaaacaaatggatcctgcagatccttttcgtattcagatgactgatatgcttttggagaagctgtgagttttttttatataccaatttgttcaagtatagagcttattacaagcaatggttctttgttttctctagatttaggtcgtagaacatgagacttgatcattgtctgcagtttttacatcgatcttgcctttttttatctctaataatttaactccgagaggtcgtcttagagacctctggttgtttttcttgttaaccacttttagagataattgaaattgggggttattatac

SEQ ID NO: 169117 - DNA, 2092 bp, Arabidopsis thaliana landsberg
atgccgcaagaggagatccttccaatttgggagttgccaaaagatactttgtttgtgccaattgtgagtgcttccatattcgtcaggcatattcgccgtggtttgccaattatcccacgtttgcaggtttcctgagcaccataataatcgatctgttcaaacaaatcaattccacaaacataagatggcggaggaagacgaactattttattcttcctaaaaagttttttgttcctccgatacggatgatgcaggggaagaaactgacggttacaatcaaaccaacatggttttctgcctttctttagctgaaacgcatttgtacgacccataaagtagggacaagataatcttttgtacgttctccatcccgataacatttcatatgcaaagaagtcactaatcgtccacattaatactgcccgcatattgaaattttgtttactctagtaatcaaacatatgaacaccttcatagcacaaattcttcaattcatgaatcagcggttacaagaagacaatggttggtttaatttgtctcttgaaacataaatccgcgcaatccttcataaaactgtctcgtcacatcaccgctcgcctgatcactatgactgtacatccatcttcgtaatgtatatatctcatgatgctctccaccccaacaattttttttttgtaagaaaaagtttttgttaagattttttgttttttgtagtaaatagattgctttttgtagtaagtttttgtttccctcgcaaaagaatacagccgatttgcgagagaaatttttttcgcaatgttgcgagtgattggcgaggtgtggtactcgtcttgcaaatgactcacaaattcgtcgcaatattgcgagaaatttttgcttcgcaaatcggctgtattcttttagtgctataactgacagagtttttgtactatttttgcaggatacaatgatggagaacataatcatatattttaaatggaaaggtcgaatatatagcttgatgatgaatacatcagaggataagataactctctccatgttagaaggtaggatatgcacgaagcttggattagatgaaagtaaggttaaattgcaaatgaagtacaatgcagtgttgttaagaccaacttaagagatttacattagtgatgatgaggatgtcggtgtctatatatcttcaggtagaaataactgtagatatgtttctaatgtggacgtcatcactccatcagaattgcccgagcaactgtcgagagtggagctcctcaataaaagttatgttggtaagaaatatgctaaacttgattcaaatgaggatgaaatgagagatgatgctgccatcgtgatgggcgaatgcgaggaacaaggaaaagaactaaatgaggcaatagtggaggttgatgatactcaagatcctgagattggataacgtgatgaatgtgatgataggagtgatgaatacgttgagtcaccgcctgttgtaaaatctagtcagttgataaaagaatgggaagacggtattggtttgaatttacgaaaagaatttccaagcaagacggtattgcaggaagtggtagacaaatgtgtatttgctaacagttttgggtatgttattaaaaagtctgataaggagcggtatgtcctaacatgttcaaaagtaaattgtgattgacgtatacgagctccaaatattcaagatacaagtatttactctattagaaggtacaacaagatgcatacttgtacccggattagtaagagtagtacaaggataaggaagaggaaaggtacccctgaattagtagcagcttttcttcatgatacttttcctggactgttggaaactccagctcctaaggttatcatggggcttgttcagacaaaattaggtgtgaagatatcatactcctccgcattgagagggaaaaggcaacccgtttgtgatttaaaaggtagcgcggaagatagctacaaggatatcaattgttatttgtacatgttgaagaaggtaaatgaaagtacaataacatatctgaagttggatgagggcgggaaattccaatacctattcatagctttgggagctagcatt

SEQ ID NO: 169118 - DNA, 1725 bp, Arabidopsis thaliana landsberg
  unsure (1)..(1725): unsure at all n locations
gacagcggnaagagatggnatgtatcttttaccttatgagtacattatctgcaggcaaggggttcctttactcaacgagactataggccttgccccttctgctgcaaagaagagtatgcttgttgtctctgagtttattggttgttctcctttctttaagcggcgcccttagagtgaatccgtggaacattgatgctgtgactgaagcaatggactatgcattgatagtttcagaagcagagaagcatatgcgtcacgagaagcatcacaaatatgttagcacacatgatgttgcttattgggcgcgtagctttatacaacatcttgaaagggcttgcggtgatcatgtgaggaagaggtgttgggggattggattccgcttaagctttagagttgtggctcttgatccgagttttaaaaagcttttttattgagcacattgtctcagcttataagagaaccaaaaaccgagccattttgttggattatgatggcacaatggtgcagccaggttccattagggcaacaccaacccgcgaaacaatcgatatcttgaacaacctgtctagtgatcccaagaaaatcgtgtacctcgtcagtgggaaagacataaggacactaagtgaatggttttcttcatgtgacgatctcggtttgggtgcagagcacgggtattttataaggtaacacttggtttcacattttccttaaattactaagagcacttgaaaagttgtttttaaaagttgatttcgatttttggatataaagcaaagttatattttcttatcttctttacttgaaaagatcaatcttttggatattgaagtaatgagtttacattttgaggctgttttcatatcttcttgaatcactaagagcacttgaaaagatcaaactttaggataataaagttatggttattgcacatgggactgctttcatatctttttcagtctcttattttttgaaaagatggatgttttggatataaagttttgatctttttgttcatattggggacaggccaaatgatggaacagactgggaaacgtccagtttggtatcaggttttgagtggaaacaaatagcagagccagtgatgagactttacactgagactacagatggatcaacaatagagactaaagagactgctctcgtttggaattaccaattcgcagatcctgattttggatcttgtcaagccaaagagcttatggaacacctcgaaagcgtgcttaccaatgatccagtctctgtcaagactggacaacaactcgttgaagttaaaccacaggtaagacgttaaaagagttggtttattgtctgttttctcttttcaagcatgaaagttccgatagctaaacttttttgttgttccgataaaaaaaacagggtgtgaacaaaggtcttgtggcagagaggcttctaacaacgatgcaagaaaaagggaaacttttggatttcattctctgcgtcggtgatgatcggtctgatgaggatatgtttgaggtgataatgagtgctaaagatggtccagctttgtnnnnnnnnnnnnnnnnnnnnnnnnnnnnnnnnnnnnaaaagccaagcaaagcaaaatactatttagacgatactgcggagataatcagaatgctggacggtctagccgctaccaacacaactatctctgatcaaactgattcaaccgccactgttccaactaaagatctgttttaa

SEQ ID NO: 169119 - DNA, 1377 bp, Arabidopsis thaliana landsberg
  unsure (1)..(1377): unsure at all n locations
ctttctttcctgagattattacattatgttttgattgaagctgactctttggttttaaatcaggttaatgaagcttctgttgagatttactggcttcctaactatcaggaacttaaagaagctcttgaatcatatgggttcagaattagtctgtcacactcacaagacgttgaactagcagaagcgggtagttgtcctgtttctccctgttctttaattggcggttattttttctttaggttttataatactactggagtccgctaacttttggctttgaagattctgagtgtcaaggtcctccacagaatattagagcttggttaacattggttacaacttgttgtcaatttaggtttgtggcgcaaaaacttctcttttacagattatcaataacattcttctgccttttcagtgctacttcatacattttgataactcctaccttctctgttgcttcatgattcaggtgtaaaaaacctatttttaccacttcacaagttgaacagatagccgaaatccttgtatcgttgctcttagatcgcagtcttctcggtctttcaattctcttacaagagtgcttaatatctgttattggatccttcaaagaggaagaatggatttcaagctgcaagaaaatagctaactctcttgcttccaggttcgacctcgtatgttattgtagcaaccttggactgttttgtcttatctgttaattgacttacgtagtttgtctttctggtttgatgcatctgcagagtacctcaagacataaattgtttgagggtagtggaatnnnnnnnnnnnnnnnnnnnncgaagcaagcatctgagaagttccattgcacatcaaatgcttgttgttttacttgatcataaggtaaccaaccatgaactaaattataagataataccaacaagttaagtttgtagcaaacatggcatttatacattctctgttattgattatctattattaacaggacagcgacgaaaatttgctgagctcgctgatgtctatcaatgtgaaggagagaagttgtaaccttttcaaaatgtacattttcgtggtattggctgagaactggctcttctctagtacattggtagaagcaaagcctgtactgagggacatgtgggctgtgtttctcagaaactgttcttgtcagatcaacagcaccgatcttcggtcttatgcatcaaaagtgagtaaaaagcatatcaaatctaaaccttttattctcttttttaacttcgattcatgtttttaattactgagttcatctgactaaacggttttggttcgtggtcgtgaacaggttcgaaccagagccgcctatcttcttcaagtttgcagcagcaattgaaggcgtacaac

SEQ ID NO: 169120 - DNA, 204 bp, Arabidopsis thaliana landsberg
ggtattttacgacaaaaactcagcgtccttttttcgacgtgaaatatcaaccgggagactggttcgtctttggtcgggaaaccaacggtttggatccggccttgctgcataaatatgccgcgcagaccgtcaccattccacattggggccccgtgcgcagtctgaatctggccactggcggccgccatggccatttacgaggtg

SEQ ID NO: 169121 - DNA, 510 bp, Arabidopsis thaliana landsberg
  unsure (1)..(510): unsure at all n locations
atggcaccgaagcagatgacgctggcgagccaggtggatgcgggattcgcgctgcatcgcaaggcgacgcgtcggcacgtgttcctggcccacatgcacaaggtggtgccgtggtcggccttgtgcgcgttgatcgagccgcactatccgaaggtacgcgaggacggtgcgggccgccgtccgattgggctggagcggatgttgcgcatnnnnnnnnnnnnnnnnnnnnnnnnnnnnnnnnnnnnnnnnnnnnnnnnnnnnnnnnnnnnnnnnnnnnnnnnnnnnnnnnnnnnnnnnnnnnnnnnnnnnnnnnnnnnnnnnnnnnnnnnnnnnnnnnnnnnnnagttccggcacttgctggagcgccatggtctggccaagcagatcctggccgaggtgaaccggtatctggccggacacgggatgaagctgtcgcccggcaccctcgtggatgcgtcgatcattaaagcaccgtaatcgaccaagaaacaggacaaggcgcgcgacccc

SEQ ID NO: 169122 - DNA, 3874 bp, Arabidopsis thaliana landsberg
ctacgcacatcccaaatacaacgacaataaaaaaacgatacgatacttgcgcaatcggagaatggaacaactgacgaaagacacgactctgaaatcggaggatcagaatttgaagccaccgcatagtagtgatatgaaacatgtggatcaagtggcggcaaaaggagccgaggatgcgagttctgtgattgctttatctgatgaatctactacgctacaggtcgaaatcgattcaaaaggcgatcgagcaccgaatcgaacatcgtccggatcgagaaaatcggtccattggaatcccgaattggtttctgaatctcccgcaccggatgagaaggccttatcctcatcttctgccgcgagatctaatccgtacgtcgctcgtactcctactgaaacttcggatgcctcgttgaaaggtactgtgtttaaaactgtgtcagtatctttttggtttatgctatgagatgtgtaagtaaccgttggaaaatctctttgaaattggatcagaaacgatggaatctgtgaaaggtgtgcttgggagatggggaaggagggttggagaagctgcaatgaaggcagagagccttgccgggaacacgtggcaacaccgtgagtttccgatcttgtattgttgcatcgttaaccctgagaaaatatactatgagctgagattgttgatagatttgggtgattgtcatgctacatggtatatcacttcttgatgagttagatattataggtttgagcaatggagtttcaaagcgaatattaacttttgttttttctgtttattctgtgatttgatgggattatttatggtaactaactattaaatcttgatattcatcataattagtgaaaactgctccgagctttgcggatgctgcaatgggaagaattgcacaaagtacaaaggttctggcagaaggaggatatgagaaaattttcaggcaaacctttgaaactgttccagaggagcaactgcaaaattcatttgcgtgctacttatcaacatcagctggtccagtcatgggagttctttacgtatccactgctaaacttgcttactgtagcgataaccctctctcgtacaaaaattctggtcaaactgaatggagctattataaggtaatcctttttattttgagacaatcgaaatttttgctataaataactattgtagaaagcgacctcatagataataggaataaagtgaagaacgttagattctgtgagtaatttcttgtgcagactatgataacactaggtagtaatacttatatcttcatcatcttaaacaggtagtaatcccattacatcagcttaaatcggttaacccttcgataagcacagtcaatcctgcagaaaagtacatccaggtaatctcggtcgacgaccatgagttttggttcatgggtttcttaaactacgaaggcgctgttacatctctacaagatacattgcaagccggtgccttacagtctgtgtgatataatactgatggattcttgatcagaatagcattattttggttgcaaactaaattatttgattcttattcttaattagttaccatgtcttaatacaccgatagcatttcttttctaaattttctcctaatcatattattgctaataaaaaatctaattggattttaggatttaatgctgttttgttagatgatagtgtatggttgtaaaacaagatttggttgttactcttacaatctccatcgcactaggtgattagcaaacataactcttctttcattcccttttaaatagaatttgcaagaagaaaaagtgcaaacatagatagagtggcttagggttaaagattcagtagtaaggatagagtgttaaatattgattattgtttgatgaatattgtgtgatgaatgtttatattggagggtttagggttaagggtttagggtttagggtttagggtttagggtttagggtttagggtttagggtttttagggtttagggtttagggtttagggtttagggtttagggtttagggtttagggtttaggagtacatatactataatactttaagaagcaagaagaatctgggttagcattttagattgaaatatgactagattttatttgtatgattgaacataaaactagaacctcaactagatctcgaaaagtaaagtagtggttccttggtaaacgattcaaaaccaaaactcataagaatttggcttcactatcaaagctttgagaatcaacaataagcttggttagcggatttgtagccaaatatgactagatgctttgtttatcattgagcataagaactagaaccgcaaccagattccagaagcctaatgtaggatttaggttttaaagtttgggacctatggtttagggttgagggtttaggattaatggtttagagtaaagagtttagggtttagggtttacggttttgggtttagaatttaggattcatgggttgggcgattagagtgttggatgtttaggttttgggatttagggtgtagagtttaggtttatgtgtttaggatcaaattttctatgatacttaaagaagcaagaagaagcttggttagtgttttggagtcaaatatgacaagatgtcatgtgtatgattgagtataagaactagaatcgcaagcggttcccaaaagctaacgtaattgttccttgttggcaaatctcaccgcgggtttcctccaacgcaactcatgacagggaagttattcccgaggtgacagtaccgattgctttggggtctaccaaggcccgagaggccgatctgcctgcttttgcgcctgcacccgaggcggttattccgctaccaacgagcgataaggttgagggcaagcgtattcgaaataatgactcagcgtccaagaagaagaagaacaagaagaagaaaccctcgagcgacgaggaggagaaggagctcctgatctttgaagattgggtggcctcagcaaacattctcgggggctgagtgggtcctttgctccctcctccagatactcttctggagtcgcggaagtacgccgagacggcatctcacttcttgtgggtacatgcattctttttcttctcgttcatttgttgtttaaggttctgatcccataaattttgcttttatctgttcttcaggtcatcgcctcaatgaactggatggtacatttgtatggctcggccatgcggattaacatggagccggtcaataagttggccaaagctgagtctcgggcgcagactgcccagcgtgagagagatgaggcggtctctaaagccaccgcggcgaatttggcaatggatgaggccgagagggaggcctttgtgaacaaggagaacgccattaaaatggccgagctcaatcttaaagcggattctgaggttatctgtctcaagcgtatgttagccgaggcgagaggactccgcgacagcgaggtggctcaggctgcccaaatagtgaggcgagaagtttcagaagcttttattcccaaatttaagattgccgaggagaagatatcgctcctcgacggagtcaatgacaaccagttcatgtacttgtcccaagcgagggctaatgtgcaactgatcaaggcactcaaggatggcagggctctcgcaaccgagaatgaccaggtcaaagaatgattgaaacatttcgccgatgctgaggctaatctcaacgttttcatcgttgagctaaaagaggatctcaaggctcttgctcccgagcccacccctctaagtcctggtgtacataggtcggttgagaatattgcctatgaggcgggagttgccgaccagttcgggtcgctcttgcctattgagagagtctgtccgtctgaagagcctgattag

SEQ ID NO: 169123 - DNA, 4890 bp, Arabidopsis thaliana landsberg
aatgtaaggttaattcaaattggtggattcaagtccagagtccaacagaagaaaccaaagcaattgcaccaaccccaccagtcactccccagtcaaatggctcatcggcattccccttttcacttcactggaacaactatgcaccagagattgattctccgacatcagaagatcaagttctcgaatgtgctcttctttatcgaaaccgtagccgtgacgaaaaactcgttcttcttagcaacgatgtaactctcaagatcaaagccatggcagaggtaatttacaagattctttattttgaaactaagcacaatgtgtagcgtgataaataacgcttttgtttggattctagggtgtgatttgcgagacaccacatgagttctatgaaagtctggttaatccgttctcggagaggtttatgtggacagagagcacggcaagaggacgaacttggagtcatctagacaatgacgtgttgagagaaaggtacaacgaccgagcttgtagaagaaagtcaacgtacaatagaggagagagtggtgcagctgcaaaaggcttgaaactcatattgctccataactctcactatggccacactcattgatgatgtatcatcatcatctatcaccatggccatgtttaatgatgatgcatcatctatcatgttccttctttccaagtaagccaaataaattctactcgcttacacatggttacagggaataatgtttttagaatgaatgacatttccataatgttgcttctatcatgacctttattatttttcgatagtggaattacatgtcttccaacggtagggaatctagggatcgtcactttacgaaattagaatatcggattaatcgctaagcttaggtatcgaccacataatttgccaacgtaattaccggtttagtaactctgttcgtggtgtggtaatgaattcgtatacgaattctatggaagagcgagcaaaagtttcttctcagatggccacaagatctgagttgaaccaatgtagttgataagaatttgtcccaagtttctgtccaatcaacatcatagagaatacatgcaaagcaatggtgtgttgttgttatgaaaaaaaatatcacaatcacgagtaccatagtaacgcatgatatgattgatcttgccaacgcgaatcatgatattgtaggcttgtgcagttgtgcatatctctcaacaaattctgttattacaggctgaggttaagaaaaaactaacccaaattctgttattctaatgggttttggagaattggggtaagtttggaaagaactaacccaagttcaatcaaccttacaaacaaaattgtatatgtgtgggaagtatagatttgggccaaaagcccaaacagtttaacatgtagttagtaaaagatgatctggttatccctgagatttgttgatcaacgttggtcaacgccgaaattaatgaaccggttaacctgagattttatgtttatgatgttgactacatgatgttatatacttcggatttgtggtcacgcaatcaatatatattaggtagttaaatgtgttttagtttactttcttaagattttttttccaaaaaaaataaaaagagtatgacaaatctttttctttcttttagaaatatcttgttttatggaaagcccaacaaagcccaacagcttttgtcttcggaccagttaatcgcaagttcgcaacgatcagacgttgaacccttccactaatcgccgccgttgaaactccgttcacctctgtattgataacaaaatcgaagctttctttagtcgcacttccgattcccaattggggaatctcttgtccgattgggttctatggctatatggcgtataatcaatcgttcgtatctcaaatacgcatcaaaccaattaaccagaaactactacactcaagtttgtcttgcttcttctactcatgtcgtaaacagacaacagagttgtcttcttttgacatcccaaattcagatatatgtacaagaccttctaatatcttccaaatctcagattccttgctacttcagctcaggtattactctctttgttttgataaaaagtttggtttttttctttcagctctgttttcttcttcttttggtagctatgcaatttcgtaactttcagtactttggttgcaaatgtggggttgtgcccttttagattgcattagatgataagtatggaagatctggaaccctgcaagatttttgtgttatgttgttgaattcaacgactttagatgtgtccatgttatagttacggtgtatatgcattttagatcatgtttgaattgtttagttgtgtgatgtttttgggctaatggatgttagtgagtgagcattgtttggttcagagctgttatagtgtcgtatgtgtactatgatcctgctgtcaaagttggtcataaatttgtatatccatgttcttgttcaagacaaggaagaaggaagcggaagttgactctgatggtccacgtctcaatgagaagattactggcgactatgttagattggtttccgaggaaggtaatatattattccaagtctttttctcttttggtgtgtggaaagtcttagattgtacaaaataaagaaagagtataagaagagagatcctattgttggtgttttcggttaagtatctttaggtggagtcagttaaaaattcctttgtttttgtagattttacttaagaggtgtggagtccaaagtacagcttaagaattcattaggaaaagtaaaagagtttagaagatttttataatcaggaatgtgtgatatcgttttgtcgttatgcaggacactgtgttgtatcgttgagagaagctctcagacgggctaaggagcttcagtgtgacttagttgaggtaactttaaacatgagtcattcaagaagttgtgtctaatgattgcaactggagatctttggtaaaattgtcttgatttgtatgtataattttcatggtaccaaatttgtatccttgtaatccatgcgtctccttttcttaaagaaatgtggtactcccattgtgtaatgctgaactatagctcttctgtttttttttgtctttagacaactgtgcacctaatgatagttctcatgaggtctatctcgttatatatttctaaatctgtataggtccaaagagatgctaagccacctgtgtgtaaaattctgaaatactcattggagctgtacaaaaaagctaaagtaggaaaagagcgtgctaaggccaaggtcggtgatatggcctatccattctttgaattctcatgtttgtttgtacgaaaattttagttgtatttgtgtcctgagtttatgtttttaccttgttgtaagcgggctgaagctattcgacctgatatcaaggaaattcgatttactccaaaaattgtatgcttctctagaaacgctttaccctatctatttcttcttcttcttcttatctctgtggtaatgaaaatactacaatgacaatttttctttcacttacttttttttcttcaggaggccaaggacctaaagtttaaatctgatcaagcattgaagctgatggaaagtggatatcgtgtaaaggtagtaattttcttagtcactggacctcttcatactgctttctcatagactttcgtgggaaactcctgaaaaaagtgattattttgcgattatagctgttctgaatgctttggtgtaaaacaaagccccagacatatcgccgcaatgctctcttttttaatacttgatttgaggtgaattccatggtgagcaactttttaattatctcgctctttcttttctttgtgtaacagtgccttgcagtgcctgacaaggacaagcataaggaacttgaaccagaaaagctgcttgagttactatttcgcttcacttgttttgtaagtcttatgacttcttctattcgcaattgtttcctagttttatcgtccttgctttggttcataattatatttgtacagattggggatgcacttgtggaatcttggcctgaggcggatagaaaaggcgcagttgttatagttagacacgccaagtttggtccacccaagaaaggaggggtgaaattaatgaaggatattgacataaaatctgcaagagtgaaagaagaatcaccaaagcctgatagctcgaaggccggagtggctactgttgatgatcaggaagatatagagaagtctgaacctaggttcagtgttgagcaggctcaaccagttaaattccagaacgcatacgcaaaaagagaacctagcagtgagttttcaggaggtagagatgcaagccggtttgaacctccgtcttcaaaccagcatgtaaacccacaacatcctcggttctcaaaccaagctccaaaccaacaacctaccgggcggtttgatcctcagtctccaaaccagcctccaagtgcaccaaggcctcagttcccaaaccaacaacctacagggcggtttgatcctcagtttccaagccagcctccaaggcctcagttcccaaaccaagctccaaaccaacaatctacagggcggtttaatcctcagtttccaaaccagcgtccaagtccaccacagtctcggttcccagaccaagctccaaatcagcaaccctctggaccatctccaaaccgccacccagaccggcaaggtcctccacctcgatttcaaaaccaagctccgaatcaacaacctaccggccggtttgaacctcaaccaccaaacccgccccgagctccaccacgaccacaaacccggttgccaaacgaaactccaaacgaacaacctacggcccctggaaggtctagtggcccggcttcaggttatggaattttcagcaccccaaaaacgaagtaa

SEQ ID NO: 169124 - DNA, 1114 bp, Arabidopsis thaliana landsberg; identical to SEQ ID NO: 60508

SEQ ID NO: 169125 - DNA, 349 bp, Arabidopsis thaliana landsberg
tttttacttaacataagaaagactcattttacagattttcccaaacttcagagcccttatctttaatattttgttttcaggaattcactcatcttatatggatttgaaagaaggcacactagtagtaatgggagatgttgatcctgtggagttggttagaaacctcagaaagaaatggggaaaagctaaattaacattatatgtaccttatgatgctttgaaagaagcaaaaattgctgaggctaagcagaagagggaagagattgaacgtgaagctctttacagatacaaccgtgaaattcgtgatattttcaatgataaggaggagcaaggttgtgtcatttgctag

SEQ ID NO: 169126 - DNA, 1756 bp, Arabidopsis thaliana landsberg
cccaggctttgttggatgtgatgcactccgatgagttgcttgctcaagatgttatattattgaaagacttggacttggttctggaacaagaggagacgctgtggtttcagaagtcaagagaaaagtatattgagttgggagacagaaatacaacacttccacaattatccgcagaaaaaggaatcgaatagaatcgctgaaagatggcgataacagatggatgacggataaggtggagttggaaacaatggcgttgaagtactatacgaggctgtactctttggaggatgttagcgcagtatggaacatgttgccaataggcgggtttgcaacactaacggacggggaaaaggctgcgttgctcaaaccttttacttctgaggaagtcgtcattgcagtaaaaggtatgggacgttttaaggcatcaggcccgtatgattttcagcctgttttttatcagcaatgttaggagactgtgggaccgtcgatgatacgctttgtactggatttctttgaaactggggtgctatcagcggctactaatgatgctttgcttgtgttgatagccaaagtggctaagccagagcggattacacagtttagaccaatgagtctatgtaatgtcttgtttaagattattactaagatgatggttaaccggctaaagaaggttattttgaagctgattgggccggctcaagcgaattttatcctggggcgagtaagcattgataatattgtgttagtgcaagaagcggttcactctatgcggaggaagaaaggaaggaaagggtggatgttgttaaaattggatcttgaaaaggcctatgaccgaattcgatgggattttctgcaggaaactttggtggctactggactgtcggaggtctggactcacagaataatggctggggtaacagacccatcgatgagtgtgttatggaatggagaaaaaactgattcttttgttcctgctaggggtttgagacaaggggatcctttgtcaccatatttgttcgttctttgccttgagaggctttgtcacttgatagaggcatcagtgggaacatgggactggaaaccgatggcactctcgtgtggtgggtagaaactatcacacatttgttttgcatacgacttgattctatgtgcagaagcgtctgtaacccaaattcttatcatacggcgagtgttggaacggttttgtgaggcttcagggcaaaacgtcagcctggagaagtcaaagatctttttctccaataatgtgagtagggatatggaaaggttcataagtggagagagtgggattggctatactaaagagttggggaagtatttgggaatgcctatcttacagaagagaatgaacaaagagacttctggagaagtcttggaacgcgtttcgtctcgcttggcgggatggaagagtcggtctttgagtctggcatggagaataacgcttacaaaagcggttttgtcaaccataccggtccatgtaatgagtgcaataatacttccttttgctactttatatagcttggattgtttgtcacataattttctttgggggagtactttggagaagaagaagaagcacctcttagcctggaataagatatgtcagcccaaagatgaagtaggcgttggttgctaaagtagggtggcgtcttctccatgataaggagatactttgggcaagagtccttagcaagaagtacaaggtgggagaaatgcaaaattcaaactgactgaaacc

SEQ ID NO: 169127 - DNA, 1343 bp, Arabidopsis thaliana landsberg; identical to SEQ ID NO: 17995

SEQ ID NO: 169128 - DNA, 2220 bp, Arabidopsis thaliana landsberg; identical to SEQ ID NO: 7998
  unsure (1)..(2220): unsure at all n locations

SEQ ID NO: 169129 - DNA, 754 bp, Arabidopsis thaliana landsberg
atggcgatcttgatctatttgtcctgggttttgttgcttaccctcttctccattatttttctaaagaagaaaaaccataattcgaatctccgacttcctccgggccctcgaggtcttccgataatcggaaacttgcaccgtgtcacaggacttcctcacaggtggtttcatcagctatcatccaaatacggacccgtgatgcttattcgtctagggtttacgccagttgttgtgatctcctcaagcgaagcagctgaagaagttctcaaaaccaaagatcttgagacatgtagccgaacaaagttgatggcgacaggtaaactctcgtataactttaaagacatcacttttgcaccatacaatgattcttggagagaatatcgtaaagtcgcggtgatggagcttttgaaccctaaaaagcttcaaactttaaagttcataagagaggaagaaatggatttcgtggtgaagaagatatccaattcggcattggaacaatctcccgtggccgtggatctaagcaagatctctttctccctcgccgccaacatcttatgtaggacagcgttaggacagaacttacgcacgaacaagtttttcgacgaggagagaatcataaagcttgttgaagaaggctcggtagcctcaggtcgtcttggtttcaatgatttctttcctggcaaattagcaaagtttgcagattggttgttccaaagaaaaaaagggatactagagagaatgtttaaggagcttg

SEQ ID NO: 169130 - DNA, 553 bp, Arabidopsis thaliana landsberg; identical to SEQ ID NO: 13679

SEQ ID NO: 169131 - DNA, 580 bp, Arabidopsis thaliana landsberg
atgttggagaagatcaccactaggccattggcagtcgactataagactatgcaaagagttgatgtgcctgtgaacattctggacatcagacgattcagtgacgagatgcaatggcggccaacaattggtatagcccaaggtatcgctcgcatgtgggacgctttcagtgccaagtgattcgtcatcagcgatatctccactcaagatcagtgtcgtcgttgcggtattcaatgctgacagtacgctagagcaatgtcttcgaagcgtcagctgccagacctatcaacatatccaattgatcgtaatcgatggtggctcaacggatggctcgcttgagatcatcagagagttcgaagacaggatcgattactgggtgaccgagcctgataagggtatttatgacgcctggaacaaagctctggtaaaagtagaaggtgagtgggtatgtttcctgtgagcggatgattttttctgggacaaagggtgcttcaaaacttcgctggatacttagaaacactagatccacatttaggtgtgcatatgggacgatcatgactgtcaacgatgcaagcgagcccct

SEQ ID NO: 169132 - DNA, 1475 bp, Arabidopsis thaliana landsberg
accatgaccgaaaaaaagtttccttttcacgatcatcctttagcatatgagaaattggacagattttcttgcattttgtgcaaaaagaaaggtggttttggctatttctgcgataagtgctatttttgggggcataaggaatgcatcaagcgctcacttctgcatccatctccatgcaaacattctctcaaaatctacacactcgaggcattgggctatgcaggtgaccattgtcatttttgtagagattatcttcttgatgatttttttcattgtttgatatgcaacatcaacatggatctcaaatgtcttaaagatccaccaccatcaagtatttatcacccaaaaaaccatatgcatatgcttactcttttgccgagagtggtcacatttacttgtaatgcatgtggtgtagaaggtaagcgtaatccttatgtatgtcttgaatgtaatttgatgttccacaaggattgtatatatctaccacgagttataagcatcaactgccatgatcatcgcatttctcgcatttttcatcttggtttcggagattggaaatgtggaatctgccgacaaaagattagttgctcccatggagcttttacatgcttgcattgtcctagtcttgcatttcatttaaaatgtgcgatgaaagatgacgtgtgggatggaaaagaattcgaagctgaacccaaagaagagcttgaagatgaactcgaagatgattccgaaggggaaattgaagatgatagtactgaagaagaaatcgaagaaccataaaactaatgaaaaataaatattggcgtgtatgttatgagaaattcattttaaagcttgatgcggattctgttagtgacaaactgacaatgtggtgcaacgattgtgtccaacaatgatccattctttttgtatacataatgtttgactcttgaccaaacgaagaaccctgaagtctaaaattttgtctatgactcgtcattagtaattctagagttaatggaacatgaccacattagcctaacacatgattaaaggggccaaactcatttttaaagattctgaaataacttattgcaattgctaaccacaattcatttattgaaaaaattgtatataaatgtcttcctgatttctaccataccaaaaatatatatttcttcctgattttctatgtaggagtttcaagatttaaattttaaaatatggcatatcaaatttaacactagtaatatggagtcatatctcaaaattgttttttataccaatttcacaaaaccttttttatctatatatgtaaaaatgttttaatcatttgttaaagaaataataatgatcaacctctatgatctaattcaattttgttgccttaaataaaataatacacatatgccacgtttgccttatttacataaaataccctttaaaaagatgttacaagcaattctggtcgcgattctataccaaaatttcttgag

SEQ ID NO: 169133 - DNA, 1816 bp, Arabidopsis thaliana landsberg
ttagtaaagaatgcagaatatgcgtttaccggtacaaagtttaaagagctttatggtcagattgaatccacgaaccaaaattgcggtaagtatctacatgatatagggatggctaattggacaaggcattatttcaggggacaacgtttcaatctgataactagcaatatagcggagacgttaaacaaggcattaaacaaaggtcgatcgtcacatattgtggagttgataagatttatcacgtctatgttaactagatggtttaatgcgcgtcggaagaagtctctcgaacataaaggtcccgttcctccggaagttgacaagcaaataacaaaaaccatgttaacaactaatgggagcaaggttgggaggattaccaattggagctacgagataaatggcatgttaggtggaagaaatgttgttgatcttcagaagaagcaatgtatttgcaagaggtatgataaactcaagatcccttgcagtcatgctttggtggctgcgaatagttttaaaatttcctacaaggctttagttgatgactatttcaagccccacgcatgggtttcgagttaccgggaagcagtattccctgaagctattggaagagatgaagaaataccagaagagcttgaacaccgatcgatgttgccaccatatacaaggagaccatcagggaggccaaaggtagccagaattccatcaacaggagaatacaaggtaagaaagtttttttgcataatgtggtttgtacatggtaaatgtagaaacctaagactagaaggatgagcagaaccggtgctcgaggtgcaaaggcacgggtcataacaggacaagttgtacaaatccaatttgaaccagttgttacggtggacgactctgagattgctatttaggatattaattgtttttcttttgtaatgtaatgcgtaggtgtaaaacatataaatatttattgagtattggatgctaattaggtttttcatttatactgcttatgttacaccagggactcgcaggaatgtcgcagaataggtacaagtagatgaaaatctaatatttatgtttactatccaaatatagtttaccataagatcatatccaatcgtttgacttatttagatctatttgtaaaattaattcgattttcatgcttcaatattgaaagataccctattagttacataaataaatatatgttgaaaaaatagttatagtgagcaaattattttcagatcagcttagatttaaaaaatggaagtagaacctatcagccatgtaaacaaacatcttttcccattatattcctttttaaaacttatgcaattgccaaatttctgctaaaaaacatcgtaatgtaaaagtgcatgtaaggttagaactttgttggttttgaataaacaaatgtggccatttagtgaattggatattatagaatagagaatatcgactaatacatgtgatttcattttatatagcttagtttttaataatagaaaaaccttaaaaaaacttggtaatgaaatggatgtctctgaatatttacatgtagataggaaatgaatatttatatttttatccatatacccccgaccaatcagatataaccgattgttagtatttttggaattagtatagacggaacatttcgctatgcatgctccaaaatcgaaagagtccctatcagtcatgataaacgagaaagatgttcactagttgataagttaaatacaacttcataataagattacattaataaactagataaacgaggaaaacaaaagagataattatattctgcaagtgggtaactgat

SEQ ID NO: 169134 - DNA, 944 bp, Arabidopsis thaliana landsberg
tgcaggtggaggaggacctgctgaaattgtcagtccaagttttacacctcatgtgctcacagtaaatgccggtgaggtatgttttcgataattctatctacttgtgatttatttactgaattatttgtgagtataaagtcagtttagcgaccttaataggaacatactatgattaaccaagctcattattcttgactaagtccacaagatctctaatatttttggcccactgaatctaacaggatgtgacaatgaagataatgacattctctcaacaaggctcgcgtgctatttgtattctttcagcgaacggtcccattccaatgttacacttcgtcaatctatgacatctggtggtactctcacttatgaggtttgctctctctcttcactctctcttagattctttctaatcttttttcttttttactaaatttagtctacaatttgtggtcagggtcattttgagattctttctttgacgggttcgtttataccaagcgagagtggaggaacccgaagcagagctggtgggatgagtgtctctcttgcaggacaagatggtcgtgtctttggtggtggacttgctggtctctttattgccgctggtcctgttcaggtaataacttagaccatgaggtgttgtgttgatctctttaatggactcgtgtttttgtatcgttttaagcattgtggttttgaatacgatatgtatattgttcaggtaatggtagggagttttatagcgggtcaggaggaatcgcagcagcagcagcagcagataaagaagcaaagaagggaaagactcgggatcccgacaacaacacaagcttctaatatctcattcggtggctcagcggaagaccctaaggctagatacgggctcaacaagcaaattgttataaagccaccaccggtgtctgcaccacctgtgtccgtttcgc

SEQ ID NO: 169135 - DNA, 2516 bp, Arabidopsis thaliana landsberg; identical to SEQ ID NO: 17116

SEQ ID NO: 169136 - DNA, 2000 bp, Arabidopsis thaliana landsberg; identical to SEQ ID NO: 38027

SEQ ID NO: 169137 - DNA, 817 bp, Arabidopsis thaliana landsberg
  unsure (1)..(817): unsure at all n locations
atttagaagatgtttggtattatgatgatcctttgatcatggaaaagattatctcaggttgtcctgttcttgaagattttgtattgattaggcctattgatttttgtaatctagatgttctgcagtttcttcgtgtgaggtctctgagtcttagaagctttcgtcttacgtttgagtatagtgtttcttgtacgtatttttcggttgagattgatgctcctagacttgagtatttgaattttaatgatgaccaatctgatacgattgtagtcaagaacatgacttctttgtcgatgattgatattgatagtgaatttaatgttaagtttggcggcagtcgtttggaaccgggggatttacgcaagagagatatcatccgtgattttttaaccgctatatcttgtgtaagacatatgatcatctctcggcgtactttagaggtgaaatatgtatttgtgatgcatatatgtagcaagaaatgtactttgattccatgtaatgtatccttttctatctttattgcaggtcctagatcgatattcgaagttgggacctattccgaaattcaataacttgtatcgttaccnnnnnnnnnnnnnnnnnnccatgttgcagttgttgcttgtctttcttgagagctgcccgaatctggaaaacctcatcttggtatgattatgaatgaatctatgatttggttagttaagaacatctctgaatatattgtaaatactgcgtgtgctcttgcaggactttactgtttcaacggagcctgagcaagatggacttacctatgtccctcagagaatgcgagcgagtt

SEQ ID NO: 169138 - DNA, 1601 bp, Arabidopsis thaliana landsberg; identical to SEQ ID NO: 36185

SEQ ID NO: 169139 - DNA, 807 bp, Arabidopsis thaliana landsberg
caagccgatcaagtgtgctatattccatatcttagagttaaacttatccatgttccgtggatcacagctacacaaattaatccaagaggaagagtagatggagtgaaggaccacgatccgatgcaacaaaactatgtagactatgttagtgtgggttaacactctcttgaaaacactatattgatggatgttgaaaatctcacaaatcttgatgatgtgagtgtaggtggtgatgacaatgcagaggaatttgaagattctgacagttcaagtcggttaagcgactcatcagattctgatgatcatgagtagaactatgtttttttaatttacttgcgttatttttttgtggtggtcttatgtttggattagctctatgtttctcgtgaacaatgtttttatgcttgtgagttgtttgaagacatagtttttttgtcgttctgagatattagttccatctacgatttgctttcattgttttggttgggtctctatttttttataagcttacttgtcgggttttgcgatgccgcacaacagagccgtcgagattaggtttgaattgaactaagctgtaattgactcaatagccattggttcgttttctgtttccattgtagaagttcttggtggtgatggtgcctcgacatctatttcagggtatgattgtttaaatcgagtacgaaggccttcgtttattaatcagacaccgttaagctttgatttgttaaagtgagtttgggatcttttagctgagctaattgctgatttttactctctactttaagggattgttattgtgactaa

SEQ ID NO: 169140 - DNA, 449 bp, Arabidopsis thaliana landsberg
ctgacggccgagcacccgcatccggtgcgcggcggtcgtcagccgcggatcctcttcggcacgcaggcatcgacccggccaccgaccttcgtgctcttcaccaccggcttcctggacccgcagtaccggcggttcatccatcggcgactgcgccaggtgttcggcttcgagggctcgccgatcgtcgtcaacatgcgggtccgggagcggcgcgcccggtagcccgcggtggccggaatgcacggacgatgcccgtggttggattgcgtatggccacgatcgcactcaccaaggagacgcacgacgagaccgtcaacaaggacggcatcgtgctcatcgacttctgggccgcctggtgcggtccctgccgtcagttcgccccgatcttcgagaagtcgagcgagcagcatcccgggatcacctacacgaaggggacaccgaggaccact

SEQ ID NO: 169141 - DNA, 1289 bp, Arabidopsis thaliana landsberg
  unsure (1)..(1289): unsure at all n locations
taaacacacgaaatgggaaataatttctccgttgaatctccatctttggcgccgttcctgtgtgggaaacgcaagtatttatacaacctggagagaaatctagaggctttgcataaagtaatgcaagacctcaacgcaatgagaaacgatctgttgaagagggtgtcgaaagaagaggagataggtctacaagggctacaagaagtcaaagagtggatttcaatggtggaagagattgaacctaaannnnnnnnnnnnnnnnnnnnnnnngtctctgaaattcagagactatcaaggtacggctattgttctctgatccctgcgtcgacctatcgttacagtgaaaaggtacttacgactatggaaggagttgaaactctgagatctaagggagttttgaaagctgtcgttcacagagctcttccgcctcttgtgataaagatgcctccaattcaacttactgtttctcaagcaaagttgcttgatacggcatgggctcgtctaatggacataaatgttgggactttgggtatttatggtaggggtggagtaggcaaaaccacccttcttactaaactcagaaacaagttacttgtagatgcatttggtcttgtgatctttgttgttgtggggtttgaagaggtcgagagcatacaggatgaaattggtaaaagattaggcctccaatggagaagaaaaaccaaagagcgcaaggcagctgaaatattggcagtcttaaaggagaagagatttgtgttgttactggatggcatacagagggaattggatcttgaggaaattggagttccttttcccagccgagataatggatgcaaaatcgtattcaccactcaatctctggaagcatgtgacgaaagcaagtgggttgatgctaaggtagaagttacatgtttgagcccagaagaagcgtgggatttgtttcaagagacagtcggagagagcactctgagaagtcatcaagacatacctaagctcgcaagagtagttgctagtacatgtcgtggtttgccccttgctctcaatctcattggtgaggccatgtcacgcaagaggactgtaagcgaatggcgttacacaattaatgttttggcttcttccacagccgaatttccagatatggaagatggggctcttccaatcttaaagtctatctatgataatatgagtgatgagaagaacatcaggttatgcttccaatattgtgaaaagtttccagaaaattgtgatataagaaaagaagatctggtaaactactggatatgcgaggg

SEQ ID NO: 169142 - DNA, 1711 bp, Arabidopsis thaliana landsberg
tcgaaaaatccggatttcgtgcctttggttgcaaatctttggttcagctttaatttagtgggctctgcaatgttccggctctccaagaaagctgaagttcctgaaaaatcacatcagggagtttagtaaggataattattctaatctggaaaagcgagtgaaggaggcccatttggttgtcttgcaactccaacaacagatcctaacaagcaccactccagccaaagcccttctagagagggctgcaaatgagaagtatcagacgctccttcgagccgaagaatcttttttgtgtcagcgctccagcatcacctggctccgagaaggggacttgaacacttcatactttcaccgtatcactgctgccagacaagccataaaccatatacactacatgcttgacagttcgggtgaaagaattgactctcaagaaaagattcaggatcattgtgtccactattatcagtctcttcttggagggactgaacctttatctttgtttgatccagctgatctctcaagccttttggcttttcggtgctcagctgctaaccatgcagctcttgaatcagctttctcccctgaagacatccgccacgcagtcttttccctgccaagaaacaagactgcaggtcctgatggctactctgctgaattcttcaagagctgttggcacattattggacctgaagtggttgacgctgttacaaagtttttcaattcgggtcagatgctgaagcaatggaatgcaacaactcttattctcatccctaaaatcccaaatgcttcttcaacttctgatttcaaaccaatctctctttgcaatacaatgtacaaggtgattttgaggttattagctggcaggcttcagtcccttctgcctttttttgtctcaaatgctcaatcagctttccttccgggtagactgcttgctgaaaacgtccttctggctactgaattggtcaatgggtatggtaggaagaacatcgggccaagaggtatgcttaaggttgaccttagaaaagcttttgattcagtgaagtggaatttcatcttagctattcttaaagccataaacttcccagacaaattcatttcttggatctcccagtgcatcaccactcctcagttttccgtctctgttaatggggtcacttcagggtacttccaaagctcttgtggcctcagacaaggcgacccaatttcgccttacctatttgtgttggcaatggaggtttttagtcgtctaatgagctctagcttcgcggctggcttcattaagcatcacccaaaaacaaaggatctagacatatctcatttgatgttcgcggacgacgtcatggtcttctttgatggatccttttcgtctttgtgtggtattgcggaggctcttgatacttttgcaagctggtctggtttgaacatgaactgtgagaaaactcaaatcttcacggctggcctagaccctggcgaatccatagctgtctctaactctggatttaccactggttctctgcctattagatacttggggttgcctctgatgtgcaggaagctgagagtttcagaattctctcccctcattgaaaagctgagaaaccgtttcaaaggctgggcaacctcatcgctatcttatgctggaaggctgctattgattaaatcagttattttatggcctgataaacttttggacctccactttcatcctcct

SEQ ID NO: 169143 - DNA, 900 bp, Arabidopsis thaliana landsberg; identical to SEQ ID NO: 56253

SEQ ID NO: 169144 - DNA, 501 bp, Arabidopsis thaliana landsberg; identical to SEQ ID NO: 79062
  unsure (1)..(501): unsure at all n locations

SEQ ID NO: 169145 - DNA, 839 bp, Arabidopsis thaliana landsberg
ccagctgcccgacatcatatctgatgtgatcatggaaagtacaaaagacttggaatttgatcaagagcttctagccgaggaagagcttgaagcagaggggcagcttgaacctgaggagcattttgaaccagaaaacgagtttctagttgagaaagagtataggaaagatgttatcttaacctcgttggttttgatacatgatcatcaaatgggcatgtgtctcatttatactcttttttccttgtcaagttttgtcccaatggtttttcttgacaaggtttttaatgaggcaaatgattcacattcaaatcacctatttgatgatccaaaccatggtataacattcacaagttggcccaatggaatatatatgaagtccagcctattttatgaccatcacaagcccaagaagagcccaaaccaagtgggtaatttgctggtcaagagaagtgacgaaaatagcatttcaagagtcattttggagccaagaagtggaagggttatttttaaactttcaaactagtctttatttctttttattttccaaggtagtcttgtgagtgtgttctaagacttccttcttctttataaactccttgtaatctcttatgagaactcatctatctttttatcaaaaactctctcttaaaaatagatcatggatccattttcgtatgtcaaattttgatctttctcgacttatcaaaaggcttttccgcatccttttgtggcgtcattcaatccatcatctcgtctttgagtcgtgtgtcgtctctattttgagaatatccactccagatctttcaagtgccgaaattgggattgattcatcaccatga

SEQ ID NO: 169146 - DNA, 1465 bp, Arabidopsis thaliana landsberg
atggctaagatatcatgttcttctttcttcgtactcatgcttgtgttttcaggtaatttcatgtttttcactttcaaatataaaaaaatagtttttaatttttacattacataaaatatttaagcgtgtacacatatatatatagtttcatatcataacagatggtatttttctttttcagttttttcattggttgagaaggctaaagaagatgaacgttgtaccataatcattcatccaggatctccatgtgacccttctgattgtgttcagtactgctatgcggagtacaatggagttggaaaatgtattgcatccaaacctggtagaagtgctaattgtatgtgtacttataattgttaaagagacaaattcttaataatttctataatctatatgaataaaaaatttggagggttttccgcctttttgtgattggataattattgaaaaaattaagaagatttcacttacattgttgtcaatattttttaaaaaaacataaaatcagattaaacataacttatagaggtaagttttaaataattgtgttgctgtagttaaaaacttaattttctgaatcagtatgaataaaactttgagagttcctcatcatttcttaaatttcttaattcttataatgatgatgatgaatagttaaaaaaaaacaaatgtccgaatatttgatattaacattattcataatttttctggatgattttaacattttacaatgataacctattgtatacaatggacggatctatagatcacaatgaccgacaacttaacatacagtaataatccgcaacacaaagatcatgttagaagggtcaacttgcagcaagaacctccaaaaaaactaacctttaatgtgtgggaacaagttgtatagtctggcaattgaagacgttaccaaatgtacgagcactaaaaattaatgtgtggaaaaaattgtccacttcgaatcgtatatacaattgcatcgaaatcacgaagagttagtaagacaacattgtaaccgctataaattcagggccaatctctttcttctatcttgcacataatctttgtgttgtggatgacgttttctcgtagcagctcgatctccttcttcatcctcactttattcgctgtcataattaatcctacgatctcttcacacgtctcatccttcatcaagctccagagctccgacgaatctcgctcttccgtcgcttcctactgcgagggctggagattgaccgccgagaccaacaatgccggaacctgtagggtggttccgtctcaatgcgaaaactacgttaaaaactatatcaaaagcggccagttcgacaaaaattacgatgtactcgctagttacgccatacggaaaaacgatcaatcttgccggaaacggtaaggacgtgttatacgatgaaacttttctcgaatcttgagtactacaaggctcatggttacggat

SEQ ID NO: 169147 - DNA, 473 bp, Arabidopsis thaliana landsberg
attgacggccgggcgctacctggcctatggcctgttcgccgccgtgctgatcgcgccgcgcctgcgcaagctgctgccgcacctgggccgcgccgaatggcgggcgctggtgtggctgagcctcttgggcaatgtggtgtattacgtgttcctggccagtgccgtgcaattgggcggcatggcgatgacctcgctggtgatcggcttcctgccggtggcggtgaccatcatcggcagccgtggccacggtgcactgcccttgcgcaagctggcgccttccctggcgctgggcctggcgggcatcgcctgcgtggcgtggcagtcgctggggagtggcgcggtgggtaccagcactggtggcttcggggatggcgtgatcgggttcttctgcgtgctggccgccctggtctcgtggaccgcctacgcggtcgacaacagcagctggttgggacgcctgcaggcgatctcggcgc

SEQ ID NO: 169148 - DNA, 988 bp, Arabidopsis thaliana landsberg
tcgagggattctgaagtcttaatacacccgagtgctgtcgtccacccaaatgctgtgattggcaaggtttgattcatttactgacattgctttgaggtctctgagttgttttaagaacctttatatttggtgaatttggactttactcagaaattgaacccttctctgctcatttgaagactagaaacagcttaacacttgcaattttcaaattagtagaacaagatggtgaatttgatctaacctggtcaaagtgtgatgctttgtttgagatttgagcttactagactgtggttaaccagaaacattggctaacagggagtttcagttggtccatactgtactattggctcttcagtgaagctaggcaatggctgcaaactctatccttctagccatgtctttggaaacacagagttgggggaatcttgtgttctcatgacgtaaaaacccttccatctcttagattatactctgtaatttattgattgattgattgatctttgctatgtgtctgtcttgaatttttgtcagccagtggtgctgttgttggcgatgagcttcctggctatacattcataggatgcaataacattatcggtcaccacgccgtggttggtgttaaatgtcaagacttgaagtacaaggtgtgtgagagacgttatcttatcacctgttatcgtcctaatctcaccctggttatagactaggaaccgatatatgtcaagaactaatgctgtgttttcttcttttagcatggagatgaatgctttctttgcattggtaacaacaatgaaatcagggagttctgctcgattcacaggtcatcaaagcccagtgataaaacggtatgtagctgaccattgtctaatatcattgaagtttcaataggttgtatcatgttttgagttatgattattactggaacaggttattggtgacaacaatctaatcatgggttcttgtcatatcgcccatgattgtaaga

SEQ ID NO: 169149 - DNA, 1537 bp, Arabidopsis thaliana landsberg
  unsure (1)..(1537): unsure at all n locations
atgccaccaaatatctatagactctccttcttctcatccctactctgtttcttcttcatcccctgtttctctctcgaccaacaaggtcaagctctcttgtcatggaagtctcaactgaacatctccggcgacgctttttcctcctggcacgtcgccgacacatctccctgcaattgggtcggcgtaaaatgtaaccgtagaggtgaagtttcggagatacagctcaaaggtatggacttgcaaggttctctgccggtgactagtctccggagcctcaagtctcttacttccctcactttatcttcactgaatctcaccggagtaatccccaaggagatcggagacttcacggagcttgagttactcgatttgtcggataattctctctccggtgatatccctgtggaaatcttcaggctcaagaaactcaagactctgtctctgaacactaacaatctagaaggtcatattccgatggagattgggaatctttcgggtctcgtagagcttatgcttttcgacaacaagctatccggagagatcccaaggagtatcggagagctcaagaatctacaagtcttacgtgctggtgggaacaagaatctaagaggtgagcttccttgggagataggtaactgcgagaatcttgtaatgcttggtctcgctgagactagtctctccgggaaacttccggcgtcgattggaaacctgaaacgtgttcagacaatagcaatttacacgtcactcttgtctggtccaattccggatgagattggatactgcacagagctccaaaacctctacttgtatcagaattcaatctcaggatcgatccctaccaccattggaggtttaaagaagctgcagagtctacttttatggcagaacaatctcgttgggaaaatcccaaccgagcttgggaactgtcccgagctctggcttatcgatttttccgagaatctcctcaccgggaccatcccaaggagcttcggaaaacttgagaatctacaagagcttcagctgagtgtaaaccagatctcaggaacaatccctgaagagctaacgaattgcacgaagctgacgcatttagagatcgacaataatctcatcacaggagagattccgtcattgatgagtaacctaagaagcttaaccatgttcttcgcatggcagaacaagttaactggaaacatccctcaaagtctctcccagtgtcgtgagcttcaagccatcgatctctcttacaacagtctctctggctccatcccaaaagagatattcgggttacgaaacctcacgaagcttcttcttctctccaatgatttgtcgggtttcatacctccggatattgnnnnnnnnnnnnnnnnnnnnnngttaagactcaacggtaacagactcgccggaagtatcccgtcggaaatcgggaatctgaaaaatctcaactttgttgatataagtgagaaccgtctcgtcgggtcaatccctccggcgatctctggttgtgaaagcctcgagtttctcgatcttcacacgaata

SEQ ID NO: 169150 - DNA, 3948 bp, Arabidopsis thaliana landsberg
  unsure (1)..(3948): unsure at all n locations
gagatagagtctgtgaggagctgctcccctgtgcttcccctggaggcgccccctgcaccatcactgggcgtcccagcctctggagtagctgctggaggagacccagacgacggaggtggcgacgacagctcgagccacgacaccgacttctctgctgaccatgagtcggaaggatgggttgctcgacccatcactcgcgacgctgctcgcgggtgtcacttccacgatgcgctcgacaccctgctacgtcgggcacttaaccggcgtacttggtccatcgagtatcgctgtgtggtctaccagcatagtcgcggggtctacccggaccgctgggaggcgacctgcttggtgcgccgtccggagaacagtctccagggtgcgtcggcctgctcagagcactattctatctctgagcgggactcagctnnnnnnnnnnnnnnnnnnnnnnnnnnnnnnnnnnnnnngcactactgctcggttctcggtggggtagctgatggtctcaactgaagtattacccccgccgtctatctggcagcacaggaggcgtgattgtctcacctgtcggtgagggcaatcctaggttgagcatcacagtcaacctagctgccgtgctaaacacggagctggaccatgcattagacgagctgagtagggctnnnnnnnnnnnnnnnnnnnnnnnngctgagcgcgcggaacgtcgtcacttggatggtggttcccccgctcccgttgggattcagcacccgtaccgctcacctcagcgtggacaccagtcttatggcaatcccgcctgcaagaccaagataaatctagaaccatagatcgttagagttggatcttgtaattaatacgaaatatatacatagaagcttcagtcttagtgttagtctcggtcttagttagttttagttagacagggtagtttgctatatcctgtgcatctatgtttgtcatgatgaactatgtttggtttggatctttgtaatgattgtcaccagagtgtgggtatcccctgcattttggtttacatactatgtcaataaagttagttatatagttgggaaacccattattctccactttcctctttatctgagaagctgtgtggtctgtgttggagatcagtgaagatgctcacctgctcagtgctgttggagaattctatactcttctcttatgctgcaagatttgccagatcagttctgatgtgtggttgcattctgcagatgtcagagaacaggcgcagaggaggaaggcgtgctcagcaggagcgagccgctcaaaaggacgaggtgccccagcagcagcatctgccgcccccgcccccgatgtcgatcgagcagatgtttctgatgcagactcaggcagttcaagccatcggttagactttggccgccattcagcagcagcagcagcagcagcaacagcagcaggccccacctcagcctcagatgcctcagatgcccagagacaagcgtgctgaattcatgagaggtcatccaccaacgttcgctcattcttctgaccccatggatgctgaagactggctgcgcactgtggagcgggagttgcataccgctcagtgcgatgatagggagaaagtcctgtatggtccccgtctgttgagaggagcagcccaatcatggtgggagtcttacctcgccacccatgcccaccccgacaccatcacttgggaagagttcagaggaagctttcgtcagtaccatgttcctgcaggtctgatgacagtgaagtcctgttcttgggtcacataatcaacaaagaaggattggctgtggatccgaagaaagtggcagacattttgaactggaaagcgccaacagatgctagagggatcaagagcttcattggaatgactggatactatcggcgattcattgaagggttttcgaagattgcgaaaccaatgacagcgttactaggcaacaaagtnnnnnnnnnnnnnnnnnnnnnnnnccaagaggcctttgaagcgctgaaagaaaagttgactacagcgcctgtcctagtcttgcctgatgtgcacaagcccttctcggtgtattgcgatgcttgttacacaggtttgggatgtgtgttgatgcaagagggaagagttgtggcttactcgtcccgacagttgaaggttcatgagaagaattacccaatccatgatctagagttggcagcagtggttcacgcactgaagacatggaggcactacttgtatggacagaaatgcgatgtttacacagaccacaagagtctgaagtacatattcactcagtcagagttgaacatgaggcaacgaagatggttagagttgattaaagactatgagttggagattcattaccatccaggcaaagcaaacgtagtggcagatgctttgagcagaaagagtcaagtcaatctgatggtcgctcgtctgatgccttatgagttggccaaagagtttgacaggttgagtctcagatttctgaacaattcgcgaggagtcacagttgagttggaacctaccttggagcgcgaaatcaaagaagcgcagaagaatgatgaaaagatcagtgagattcggcgactgattctagatggcagaggcaaagattttcgagaagatgcagaaggcgtgatatggttcaaataccgcttgtgtgttcccaatgtccagtctattcgggagttgattcttaaggaagctcatgaaacagcctattcgattcaccctggcagtgagaagatgtatcaggatctgaagaagaaattctggtggtacggaatgaagagggaaatcgcagagcatgtggctatgtgcgatagttgtcgaagaattaaggcagagcaccagagacctgctggattgttgcaaccgttgcagatccctcagtggaaatgggatgaaatcggtatggatttcatagtcggattgcctcgcactcgagccggatacgattccatttgggtagtagtggaccgtctgaccaagtcagcccacttcatacctgtcaagaccaactatagcagtgtcgtattggcagaattgtatatgtctcggatcgtttgtcttcatggtgtgccaaagaagatagtgtcagacagaggaacgcagttcacctctcaattctggcagcagttgcatgaagccttgggcacccatctgaatttcagttcagcttatcacccgcagacagatggtcagaccgaaaggaccaatcaaattcttgaagatatgttgagagcctgtgcgttgcaagatcagtccggatgggacaagcgattgccttatgcagagttctcctataacaacagttaccaggccagtttgaagatgtcaccatttcaggcgctctatggaaggagttgcagaactccgttgcactaggaccaacccggcgaaagacaggtgttcggtccagatatcttgcttgaagatgaagagaacatcaggatggttcgacagaatctaaagacaacgtggtctcgacagcgaagttatgctgacacaaggagaagaaacctgagttttgaagtgggagattatatttacttgaaggtgtcaccgatcaggggaatcaaaaggttcggagtcaagggcaagctagcaccttgatacatcggaccgtaccagattcaagcaagacgtggagaagtggcataccagcttagcctaccagaaagtctatcagtcgtgcattatgtgttccatgtttctcagctgaagaaatgcttgcgagtgctagaggagcaatttccaaccaaggatcttgagtttcaagaagatctgacttacattgagaagcccactcagattctggaaacagcagacagagtcactcgaagaatcaccatcaggttgtgcaaagtcaagtgggccatcactcagaagccgaggcaacctgggaaagagatgacgatctgagacgccaggtaccctgacctctccgc

SEQ ID NO: 169151 - DNA, 9978 bp, Arabidopsis thaliana landsberg
  unsure (1)..(9978): unsure at all n locations
gatcatattctcagccgagagtagttcgctctagttgtagttctgattgtgagaaancgattactagctatcctanncnaancnnnntttttaaaaaagatatgcccacgaaagtaaaagaaatgatcgaaaaccaagtcaaatttaccctcatctatttgcgtgtgtatgtacgaaggcattttttttagcaaaaatgtatcaaagcattggcatcgcgtaattataaactttataacccttagagatagagctgtcaattgggcaggccgcccatggacttgcccagtccaaatgcatatggacgggctatattccggaccataaaacaaatgatctaattgggcatatgaccagttttgtccgcggataatatgggcttgaccatatggacaatgggctgcccatgggcatgaattgagtcaatagacatgtcttcattttaatcatatttttataattttaattataattacaactaaataattttcaaattctatattttacatttataagtttctatctttatgaaaattttaaattttaataaattgtttcttattaaattatttatagttttgaaggaaagatagtattccacaattttttagaatacacaaattttcaattttacggttttgacgggaaaaatacaattctccgattttacgaatttgaccgaaaaacgtaatttcgtaaattttcctcttaaatcgcgattttaattggcgagaacacaattttacggttttgatgagaaaacgcaattctccgattttatggttttgacgggaaaacacaatttttctgccaaaatcgtgattttattttattggcgaaaaaaacataattttacagttttggtgagaaaacacaattctccgttttggcgggaaaaaacaattttatgattttacagttttggcagaaaaaaacaattccataatttttccgccaaaatcgtgattttattgtattggtaagaaaaacacaattttaccgttttgtcggaaaaatgcaagtcttcgatttttacaatttttgcggaaaatttctttaaaatcatgatttttaatttatcaataataaaatgggctatacatgggcttgcccatatggacatgatttttattggtcatggacatttttcggaccattgtccattatggaccgtccaacttggcccataaaaaaaactgtccatacggacacgcccaatggtccctggacggaccatttgacagctatagacatagtccaaaagtaaagtaacaaaactagggtcttgagaagggcttataaaagaggagattttagagcataccaaaaacaattcagctttatctaattctttttttttttcttttttggaaaccatttctttgaccaaaataaaattgtaaaattttcagtattctatttctttgtcccaaccgaacatgcttcgtcacgactcgggatagaggagaagttgtcacatgacacatgttacctacatagaggccacgtattcaattctcttgcatcgctcagtattcttatctatatgaaatgtaaaaaggatgagctagtgagataaaaaaaaggaagagaaaacaaaaaatggcagacacaggcaaaggaagtgcaagcgctagctgcaacgatcgttgtggctgcccttctccatgtcccggtggcgaatcttgcaggttagttttttatatatatgatccataaaattgatattatgtgatcttaaaaacgttgttccattccatgaaggtgcaagatgatgagcgaagcatctggtggggatcaagagcacaacacgtgtccatgtggggagcactgtggctgtaacccttgcaactgccccaagactcaaactcaaacctctgctaagggttgcacttgtggtgagggctgcacctgtgccacttgcgctgcttagacatccttaactatggttataccatactttgtataataggtactagctagtcagatctgaaaaataaatctgtttattaggtccaggtacaagaaaacatatgtttcgtatgctctgctctcgtcttatgactcatcaagaatctgaaaatcctgaaggtcttggactaatacaatccactaactgagtctcctaaaactgatagccagtgaacacaaggagataaatctttgaatactgaatgagtaacaacatcgagatggtctgtacaatctggcatgttttagggaacacctccaacgctttaccagcttaacaccaaaagggaacaatgaatgtgttcatcaaagaaatttcatcgtcttttcactttaccggactttaaaagaaacgttcaacaattgcataaaatgaaaacagaagaaagtcattcatggtttcaaaaattgtatataatgcaatggggactacaaattgcttgctgtgtaacagagaactcacctcctattctaagttgggtagtatggttttccatctgcaaaggctccaactatagactggtaggacaagccattatgtctttctgtaactaatagactggtacagagttctaaattactattacagtaaggcctgagactttcttgatggattggcctttctgaaactctatgcatagcgtctgaatagattatatttggtttaagggactttgtttttctagtaatattttggctcttgaaggctaataaagcggtgtcatctatatatgtgatcacttatttgactgtggcatgtagaaatgttgatgttgtacttgatggattaaaatatttgatggcaaaagatacaagaacacacatccacacacgtgtaatcagtgttaaggaatacaggagcggagaagagagatggactttgggaaatggttggcgtttgagggaatgagcatatgattccttgtttttaacttggaggcgactagtctttcccaaattgtaagtcttttgaatggatgacgatagtgagatttagcggcagggatagtgtatcaagatggaaagaaacaccaccgtttaggggaatttgatggccttgcaccaccgtcactacgttcgtttcgccatttctaccaaccgtgaacttgttcatctcaccggaggatagtaggaggttggagtagtgaaggagaagaggagaagcagtgacgtggacggcaaagaaagttgatgggttacggtaatatatcctgaccgtcgaattaagagacaacatgtccgtaggcactccgctaagatcgttccctgcctgcaagttcaagtccctcaccagcatcccctgcacagtgcaacaacaacaacacattttcagtctgacacctaatcacattccaaacacatttgtctcaaatatatatttttgtcttcttcactagaaaacaaattatattattatattcatagttggcttttttccaaagttgtttcttttaaggaaaaaaaaaacagaacactcgtccactacacgagttaactcagctcagagcagagtcaccaccaagtgaaagtagttattacctttacagtaactttgggagggtaggatttgctagcaccccagagtataagagagaagactgtgaacaagaagattacggagaggagcaaccaaacgtagagtcgcacattccgaaacgggtcgtcgtcatctccgccgtcagttttgtcgtctccgtcgttgatgtatcggcgacgttcacggatggacttgtaagagaggagagcacggtcagagaagcgagaggtggatgactcacgggagtgatggattggtgagcaatggtagtaatgtggatgtgtaggtgaacccattaggctgcaaccagacccaaatgacatcttctccacgtcatggtttgatggactctgtacatagtaaagaggtctaatcgctgaacgcggcggagacaaagccgctgcgtcgatgcttgttgcctccgagtctgtcttcgcatgcatgtctcttgactctttctcctttgttttaagacgagtaatggaagaggaagcagaagcagcaataaaacagagatggtagctcctagtggcgtgtttggttcttttctttgcccaccaccacgtatctaaacacaaacgcttctttggatttgggagagtgtgtaataaaagcgaaaacccataaatctttttaagcaagttggtcccattgttggtggttcttactcacgcgattacacgcgtggctaaaacacagagtttagagatggaggaaggtgagtttgacgttcgggagttagcgcgtggggatatgagacagtcaactgtggtgacagagttacccagaatgtctttgaagatttgaaaaactctttcttcaataaatagaaggaattagattttttgcatttattgttttctttactttgctctgtttggtacttggtaggtaactacaagcccattcacattacctcttccttatgtaatcgatagtgacccaatgtaacattttccgatttttactatagtatatgcaaaagtttcagaacttaaaatttttccaattttaacaaatcacatttccatgaggctctgcaggccattgaaggtgtgagagtatcattttacaactctcttccctattgattgatcataatgatgtggccttgtccaacttgtaagaaactttcaatgctcagataatgatcttatctttgagctcattcacaaacacttggcaagagcttttagagctgcacaggatacaataatacaagactcagctgctcttgccatacaggaactactaaagattgctggttgtgagccatcattagctgggaatgttgttgtgttgaccccccaggagcatgtacaagtcaatgtatctggttctagaagatgtggaggtaacaatgaagtgaaggataggggacaaaaactatgggatcggttctcaaactatgttaaagaactaatagctccctgcttgacttcaaggtttcagcttccaaatgtgtctgaccctggatcagctggaccaatttatcggccttctatgtcattcagaaggtggctatcctactggataaggaaattgacagcatttgcactggatcccgtgtaagcatatttgctgcttgccgaggcatagtgcgtcacgatatgcagacagctacttatctcttaccatatttagttctggatgttgtttgccatgggactgaggcagcacggcttagcatttctgaagagatcctttctgttcttgatgctgctgcatcagaaaatagtggagtgacaataaacagttttggtgttggtcagagtgaagtttgtgttcaagctgttttcacgcttcttgataaccttgggcaatgggttgacgatgtgaagcagggagtagcactctcatcgtctctgcagtcatcaggtggtaggcaagtagcacccaaatcgaaagaccaggtttcaaactcaacaacagaacaggatcatcttcttgtacaatgtaaatatgtgttggaacttttgctagctattcccaaggtgacccttgctagggcatctttcaggtgtcaagcttatgccaggtcattgatgtaccttgaatcccatgtacgtggaaagtcaggctccttaaatcccgcagctgagaagaccggcatctttgaaaatgctgatgtttcttctctgatgggaatatacagctgccttgacgagcctgacggtctttcgggctttgcaagtttaagcaaatcattaaatttgcaagaccaattgttgataaacaagaaatctggtaactgggcagacgtttttactgcatgtgaacaagcccttcagatggaaccaacatcagttcaacgacattcagatgttcttaattgtttacttaacatgtgccaccatcagacaatggtcactcatgttgacggactaatttccagagtacctgagtacaagaaaacgtggtgcacacaaggtgtacaagctgcatggagactcggaaagtgggacttgatggatgagtatcttgatggagctgatgcagaaggtttactattcagtagctcagacagcaatgcctcattcgatagagatgtagcaaagattctccaagcaatgatgaagaaggatcaatactctgtagctgagggaatagctatttccaaacaagctctcattgctcctctagctgcagcaggcatggactcctacacacgagcttatccttttgttgtcaaacttcacttgctaagagagctagaggacttccagccggttcttaaaggggattcatatttggagaaatcatttagtacaagtgatcaggtgttttcgaaagcagtagataactgggagaatcggctcagatttactcaatcatcactgtggacaagggaacctctcttagctttccgaagactcgtctttggtgcctctggtcttggtgctcaagttgggaactgttggcttcaatatgcaaagctttgccgtttggctggacactatgagacagctcacagggcaattttggaagctcaggcttctggtgcacctaatgttcacatggaaaaggcgaaacttctttggatcactaagcgttcagacagtgcaattatagagctacaacaatctctcctgaatatgcctgagggtgttgttgactccactgtaatttcttcgatcaatagcttactgatggctcccccaaatccagagcccacagttcgtaacacacaatctttcaaagaaaaaaaagatgtcgcaaagactcttcttttgtattccaaatggatccatcacagtgggcagaaacaaaagaaagatgttttaaatctgtatacccaagtcaaggaattgctgccctgggagaagggatatttccatttggctaagtattatgatgaactatatgttgatgcaagaaagtgtcaacaagagagctctgtattgagctctgcaggcagtaaaaaaggatctgtctcgtcgaacttaagcactgagaaagcagggtgggattacctgtttaagggaatgtacttctatgctaaggcacttcacagtggacacaagaatctctttcaagcacttccgaggttgttaacactgtggtttgactttggtactatctataaaacaagtggctcagcgggaaataaggaattgaaaagtactcatatgaaggtggtgattatggactgtttctcatagctgtttttctatttaatacttctcgtatttcatatataattttttcttttcttttggcagataatgagtttaatgaggggctgcttaaaggatctgccaacctatcaatggttaactgtgttgcctcagttggtttctcgaatctgtcaccagaatgcggatacagtactaatggttaaaaatatcatcacttctgttctacatcaatttcctcagcaagggctctggattatggcagctgtttcaaaatctactgttcctgctagaagggaagcagctgcagaaatcatacaaggtgcacgaaaaggttttaaccaaagtgacagaggccacaatttgttcattcagtttgctagtttaactgatcatttcattaaactatgcttccatggaggacaaccaagatccaaggttatcaatatagcaactgaattcagtgccttgaaaagaatgatgccgctggatatcatcatgccaattcaacaatctcttaccattagtctaccagcattccatatgaataacaatgaacgacactctgccagtgtcttttctggttcagatctaccaactatttctggtatagccgatgaagccgagatactttcttcccttcagcgcccaaagaaggtatgcttttccatttttcatggattgaaagctgtcaacctaatttcatatgattttctgctctgctctctgcttatatctccttttatatgtctcccaatatgcattataccatggcataagatcagtttatcttcaagaaccagtcctgcaatatgcatgtccaatagattatattttttatattcagatcattctgctgggaaatgatggtattgagtatccattcctctgcaagcccaaggatgatctcaggaaagatgctcggatgatggaatttactgcgatgataaaccgcttactatccaagtatcccgaaagcagacgaaggaagctatatatccgcaccttcgcagtagctcctctgactgaggactgtggtctggtcgagtgggttccacatacacgtggactccgccatattctacaagatatatacatttcctgtgggaagtttgatcggcagaaaacaaatcctcaaattaaaagaatatatgatcaatgtgctgttaaaaaggagtatgagatgctgaagaccaaaatcctccctatgttccctccggttttccataaatggttcttgacaacgttttctgaaccagctgcttggtttaggtcacgtgtagcttatgctcacaccacagcagtttggtccatggttgggcacattgttgggcttggtgaccgtcatggagaaaatattctctttgattctacttcaggtgattgtgttcatgtagacttcagttgcttatttgacaaaggcttacaactggagaagcctgagttggtgccattcagattgacccaggcaagaaactgcaaaatcgtttgtttgtgttctgttggtattttgttttcgtttgtcataatagtgaattgttattttccaaaccacagaacatgattgatggtttgggcatcactggatatgagggcatcttcatgagggtatgtgaaatcactctcacagtgttgaggacacatagggagacgttgatgagcatcctggagacattcatccatgatcctcttgtggagtggacaaagtcacacaaatcaagcggggtagaagttcagaacccacatgctcaggtttgcataatcatctaatgattctctttcatgtcagttcatttacccttttttttttttctaattgcttgagagaaccacatgatttggcaattacagcgggccataagcagcattgaagcccggctgcagggcgtggttgttggtgttccgctaccggtagaaggtcaggctcgccggttgattgccgatgcagtctcacttgagaatcttgggaagatgtacatctggtggatgccctggttctgatgaaaatccctgaacaccagctgttgttaagttcacactacaccagttttcataatgccatttatgttaatacagtaagttgacatgcagataacactatcctatgaaaacatgggtggctacaaatctttttgacatgcagatattacttgtatcataggctccttgtgcacaaacttcctgtagaatttgaagctaaaacagtacataagccaggtctcgcactgtttcctgattctttgtggagaacggtcagtaacaatagtgttaactggagcggtcttggctgcaaaagttttgaatgcttgaaaggtcttaactgagccgggattttgttggttgctttgatctagctctggtcatgataaagataggtttgttaaggttaaagtgaagactgatttcctgatagatgatgttttgggtttaggcaatgggaaaatccgaatcggattcgatattagcagcggatcaggcacgtttgctgctagaatggctgaaaagaatctgaatattatcagtaatacattgaatatagatgctcctttcagcgaattcatagctacaagagggatttttccgttgttcagagggagtttggattagagattcccgttctatgacaatgttttcgatctcattcatgcttctaacggattggatttagcggttagtagtaaacccgagaagctggagttcttgatgtttgatcttgatcggatcttgaaacccggtggattgttctggttagacaatttctattgcggtaacgatgagaagaagagagttcttacgcgtttgatagagaggtttgggtataagaagttgaaatgg

SEQ ID NO: 169152 - DNA, 429 bp, Arabidopsis thaliana landsberg
ttggcaaccagtatcccacaccgaacgaccttaatttgagcacgagtatcccgacgggcaaaggttggaggaaaatctcatgggcgccgaattagccgacctgctcggataggaaattgaaaaactcccgcccctgtacaagctgctgatcaccctttaccatcatcaggagctgagctattcggagattgcgcagatcgtggcattgcctgagggtactgttaaaagttacctgttcagggctcggaaaatgttgagagagcgaatacaaatgatttacaacaagggcttatgaaaacagcagatcatttaacagacattgaaattcaggaatatgcgctagatgcaagaagctccggcactgccgctgcaacacacatcgcccaatgcccgtattgctcggagcgggtcgcattctatcaaaaaatg

SEQ ID NO: 169153 - DNA, 1515 bp, Arabidopsis thaliana landsberg
atgactaatgaggggagattcaaagccaaaggttttgtgagaacttcatcaaccacaagaccaatacaagctctgagttttcacatgattggcatactccttcagtgtgttcttttcatcagtgtcctttctattgcagtttcagaggctctctgcaactcgcaagatcgagaatccctactgtggttctctggaaacgtttcttcttctgtttctcctctgaattggaacccatccattgattgttgctcatgggaaggaataacctgcgatgattccccggatagccacatcactgcaatctcattgccctttagagcactatatggtaaactccctttgtctgttctgcgtctccaccatctctctcaactcaatctttctcataaccgtctctccggtcatctcccatctggctttctctcagcccttgatcagctcaaagttcttgatcttagttacaacagcctcgatggtgagttgccagttgaacaaacatttagaaatggaagcaacagatgtttcccaattcggatagttgatctgtcaagcaattttctccaaggcgaaatcctccctagttctatttttatgcaaggaactttcgatttaatcagtttcaatgtcagcaagaacagcttcacaggctcaatcccttcgtttatgtgcaagagttcaccgcagctcagcaaactggatttctcctacaatgattttaccggtaatattccgcaaggactagggagatgtttgaagctaagtgttctacaagcaggcttcaacaatatctctggtgaaatcccaagtgacatatacaatctttcggagctcgagcaactctttctacccgtcaatcatctttctggaaagatcaatgatgacatcacccacctcacaaaactaaaatcgctcgagctgtactccaatcaccttggaggagaaataccaatggacataggtcagctctctcgcctgcaaagcctccaactccatatcaataacatcactggtacagtcccgccttctcttgcaaattgtactaatctcgtcaagttgaatctgaggcttaatcggctggaaggaaccttatcagagcttgacttttcccgctttcagagccttagcattctagatctcggaaacaatagcttcagcggtgattttccttggagggttcactcctgcaaatctctatcagcgatgagatttgcaagcaataagttaacaggacagatatctcctcacgtactggaacttgaatctctatcgatcttgtctctttcagacaataaactgatgaacattacaggcgctcttggaattctgcagggctgcaggaatctgtccactctcctcataggaaagaatttttacaacgaaacatttccaagcgacaaagacttgatttcctcagatggattccctaatctccaaatctttgctagcggtggatctggactgaaaggtaaaataccagcttggctaatcaaactgaagagcttagcagtcatggat

SEQ ID NO: 169154 - DNA, 307 bp, Arabidopsis thaliana landsberg
ctatagacatgtaagacatgctcgctaccatcgagccatgggagctctaattgtatacgatattacgagtcacacaacgttcaagaatgttgagcagtggacttcgtggattctttgataccgaaaagctcatgatcatgctcgttggtaacaaatctgatcttgaccatcgtcgagaagtatcaatggaggaagcaaagtctttcgcagagaaagaaaaacttttattcattgaaacatcaactcttgatgccaccaacgtcgaagaatgtttcacaaatgttttgactcagatctacaatgatgt

SEQ ID NO: 169155 - DNA, 2205 bp, Arabidopsis thaliana landsberg
agctatatttcttaaaaatcgatttgactagtggctaccattaagtacagattcgcccttatgatgagtggaaaactgcctttgagacacgtgaaggcatttttgagtggttagtcatgccgtttggtctctctaacgcaccaagtacgtgtatgccggtcatgaaccaagcgctacgtccattcatagggaagattgtggtcttctgttttgatgacatattgatgttcagctcatcccgtgaagagcatgaaactcatatgcgtgaggttttgacagttttacataatgagaaattatttgcggcccgacataactgcaagtttggagttttacaagtccttttcttgggatacatcatttctgataagggtttagctgtggagagtcaaagatagaggcaattcgttcttggactgtaccacgtatggtgacggaagtacgtagcttccatggattagcttctttttaccaccgctttgtgcaccacttcaacagcatcctcgcaccacttcaacagcattcgcattgatcaagcagaagctcacaacagctcctattttggtcctaccctacttctccctaacatttgagctgcactgtgacgcttccaagctgggatcggagcagtccttagacaacaaggtcgacctgtagcttattatagaaaaaaaattccggtgctcgtggacgctatattacttatgatgggagttctatgcaatcgtgcaagcaatcaagcaatgacgccattacttggttcatcgtgacttcgttctcttcactgaccacgatgctttgcgccaccttgatagtcaagcaaaggtctcatcgcaacatgcatcgtggatagcgtttcttcagcaattcactttctctatcaagcatcaatcggggaagactaaccgtgtggctgatgcgttgagtcgtcgccatactctcttgtcctcgtttcacacttcggtccctgggttctctacatttgcagatctttaccgcgacgatgtgttcttctctcgtatcctccatgacatggaaaacaacatgacagatgactttacacttcaagatagattcttttttaaaggcttgcggatttgtgttcccaccggcagttggcgtcttcagatcataagtgaactccataatgagggttatattggccgtgatcgaactctgcagctagtatctatgtcttatttttggccatcattgcgaagagatgttgagcgttttgtggaacgatgccgtgtttgccaactagggaaagggaaagcctctaacgccggtctctacctaccattaccaattccaacacaaccatggactgatattagtgtggattttgttttgggactgcagtgtactcaacgaggtaatgactcaattttcgtggtggttgaacgtttctcgaaaattgctcatttcattccgtgtaagaaaacaacggatgctgttattgtggcgtctctcttcttccgggaaatctaccgccttcttggactaccaatgtcaattgtatcagacagagacactcgattcttaagtcatttttagaggtccttgtggaagcttcttcgtacgagtttggatatgagtttggcatatcaccctcaaacagaggtcactaaccgagcattaggcgatcttcttcgctgtttggtcggtgataatattaagagttgggacgtcaagctttgtcaagctgagtttgcgcataatcatgcatttaaccgaagtgtgggatatgcgccatttcgggttgtctgtggttttgtacctcgttgtcctttggatctaacaacactgcttgatcatacacgtacacatggtcaagtgttggaccttgttgaggatcttcaacaagttcatagagaagcaaagtccaatttagaagcttccatggagaagtacaaacaggcggcagattctaagcgccgggagttaatctttaacccgggcgatttagtgtggattgtcttgaccaaagaccgttttcctatccatgagtacaacaagcttaagtcgcgaaagattagacctcttgaggtggtggaacgtattaatgccaatgcatatcccatcaagctacctccctatttacaaacttcggatgttttcaatgtgaagtttttgtctccgtttcatggcgacaatgaggatcctggttcgtggtcgaaccctctccccgccggagggacctga

SEQ ID NO: 169156 - DNA, 2119 bp, Arabidopsis thaliana landsberg
  unsure (1)..(2119): unsure at all n locations
atgggcgatatagtaccagtaacgaacaacaccaaagaaggtagcagctcttcctctattcaatgtccgatgcttacggcaacaaactatacgttttggacaatacgtatgacgatggctcttaaagttcacaaggtatgggaaacgattgaagaaggattagatgatatcgataaaaacaatatggcaagcgctctccttctccaatctatccctgaagcattaaccttgcgagttggaaaacttaaaaccgcaaagaagatatgggatgcgataaaggctagaaatctaggagctgatagggtcaaagatgcaagacttcagacattgatgggcgagtttgaaaggataaagatgaaagaaactgagaagatagatgacttcgctggaagactctcagaattgtccaccaaatcagcagatcttgggaatgatattgaagaacctaagttggtgaaaaagtttctcaatagcctaccacggaaacgttatatacatatcattgctgcactagaacaagttcttgatcttaatacaacaagtttcgaggatatagtcggcagactaaaggcatatgaagagagaatctgcgatgaagaagataaccaagatgatcagggaaagcttttgtatgcgaactctgaagaaaagtcagctcagaacaattggaatcccaataaaggaaaaagtcaaggtggtcgaggatacggacgaggaagaggcagaggtcggtttgggaatgcacaaggcaacagagacatgacaaacgtgatttgctataggtgtgataagctaggacactatgcttccgactgtcccgatagattgcttaaacttcaagaaacacaagatgttaagaatgatgacacacaaaaggctgacgcattaatgatgcannnnnnnnnnnnnnnnnnnnagaagaatgtaatgccaaataaacttgaggcgagcttggatgttgataatgtgtggtacttggataatggcgcgagcaaccatatgacgggaaacttggcttactttggtgaggttgacgaaagagttacgggaaaggttcgttttggtgacgattctcgtattgatatcaaaggaaaaggctcgattacgtttatagctaagaatggagagagaaaaatcttggctgatgtctattacattcccagttttagaagcaacatcgtgagtcttggtcaggctaccgagtccggatgtgatgttagaatgcgagatgaccatctaactctatatgatagagatggaaagctgctaataaaagcgacaagatccagaaatcgactttacaaggtgatcatggaagtcgatgatacaaagtgtttgcaacttgagagcttgagtgaaacgacaaagtggcatgcaagattgggtcatattggaactgacaacttgaaaagaatgatgcaaaaggaattggtcattggcattcctaatatcaaagtcgagaaagaaatgtgtggctcatgcttgcttggtaagcaagctagaaaaccatttccacaagcaactccatatcgtgcaactagcatactcgagctcttacatggagatctttgtggaccaattacgccttctacagcagcacaaaataggtatatctttgtcctaattgatgattattcacgttatatgtggtcacttcttctcaaggaaaagagcgaagcgttcaataagtttaaaagctttaaggcatgtgtggagcaagaaactggtgctaccattaaaacgtttcgaacggatagagggggagagtttgtttctcaagagtttcaagcgttttgtgacgcctccgggattaaaaggcacttaactgcaccgtattctccacaacaaaacggagtggtcgagaggcgcaatagaacgttaatggaaatgactagaagcatcttgaaacacatgagtgtcccaaattatctatggggagaagcagtgagacattcgacttatcttataaacagagtagcgacgagaactttggtagatcaaaccccatacgaagtcttaaagagtaagaagccaaatgtggagcatttacgggtctttggttgcattggttacgctaaagcagaggctgtacatttgagaaagttagacgataactcac

SEQ ID NO: 169157 - DNA, 4206 bp, Arabidopsis thaliana landsberg
gtgagttcattcacagggaagaagaagtaggacttcctccagtgttcatctttttccgggaagtcgtcaaacactcgaaaacctttccgaggtgataggaaaaaggtgttgttgttagaccgacttttcttcactacgtaaagctgaagcaggtcggatagcgcaagtcggaaaccgtcttcctccgccagggtaagaaggcataacactgtccgtattacattcgggcatagctgagggagagcgatcccaaactcgtacatgagatcgatcaggatgtcggggagtggaaagaagagcccgcattctgagaagaaaatttcgaaggcacaggtgtgccccggaggcggagattcaggggaagtctttgggtccggagaggtcaactttatttggtgggggatctggtgggctcctcttaataatgtgagtctgctcggagttgacagtgaagtcgtgtattttccgaactgaccgtcaatcgaaaacacttcccgagagatttgtctcggaggcatgacaaacagcgcgacgtcacccaagagaataaaagaagatctgagggggtttttctgtcgaagaacactttgaagatttgctgaagatcttcctcggcaacgaaggacactttgaagattttgaatgttcttggccggaatccggtgacccgagacaattaacgacggcgaattcaggtcgcggcgggatctcaccggagatgggtgaacggaggtggcgaaaactgaaaatccccgttttttctgaattgaaaacctgagaaataggtgaggatttccgtcctaaaaaccgccggctaaaccctaaaagcgttcactaatcctaacagaattcaaaggttctctaaatcctatcgaaaattgaaagagagaacgaagatcagaggagggattggagacgattacctgaagcgaaaatggagtccagatacttataatcgttgtgcagaaggcgaagaggtcgtcagtttatataatgaaacggatgagcgggaaaactaaaaccctaggatctcgaagcgtcacactctattcgaggaaagtctcggtaatcgcacgattcagtttccttttttacgtcgaggatattcgttctcaaggtgacgatccgtgattcttgggatattacgattcggattttcttaagtccccgaactggatcacttcgaggacttggggggcaaattgtggatgtcggattcggtccacttcggactaatccgcattcaatgggcttcaaggtgaattaggcccaattcccagcccagcgtgagcctggccgtttaaagaataatccgtcattaatacagaaacgtaacgtacgacgttaataacgtacgacattaatacgacgttacgacttaaaccacgcattaaagtcccgagttgaagattcgtaacgtacgacgttaataacgcgagatccgcggcgtgaagtcggcaagtattttaatacgtttgattcgatgtattgagtataaatatgagtcgatgacatttgtaaagggtcggtgaagaatacactaatactatgcacaaaattaaaagacgctttcttcttggttcgattcgatagttgttcgtttaacaagaccaaagatccccgtaaaaccaaccacaagattctaattgcggattccgacatccacaatttggcgctagaaggaggggtttagtcttttacttcagagcaacgatcaatccaccatgagcaacaccgacgatcagagttccggcggccaagcttccactctcgacgacatcaagcagctgcttcagcaactttctgagaaaaccgacagacagcagctcgccgtaacgacgctttccgatcagctcgccgagatcaggtcagcacacaatgcgtatgccgagcgggttgattctctttctgcaggaacggcacggactacaggagctcgaacacgactcaattttcagggcgccgcgagcccaagcgtccagaattcgcaggaagcttctggtcagcaatctccttcgccaccggttgacgtcggagcaacgtcaacacaaaatccagtcatccaatctccgtcggcaggtcttcctgcagtctcagatgagacaatagctcggactccggctccattaggtcccgccatcagactcccgaattctaatcctcgaccagagccgagcacggtcaattcggagctgcaaaaccttcaagatcaaatctaggcaatgaacacaaaggttcatcaggctaccacgtcggcccccgaagtggaaaaagttattgaagcaacaaggagaacacctttcacttcgagaatctcaaagctccgtatttgcgatttccgagacttcaaactccccggttataacggtaagggagacccaaaagagtatctaacttctttccaggtcatcgcaggtcgagtcccgctcgagccacacgaagaagatgcggggctctgcaagctattctcagaaagtttgtcaggtcccgcacttacctggttcacccagttagaagagggctcgatcgataactttaagcaactctccaccgctttcatcaagcagtacgggtactttatcaaaagtgacgtcactgaggctcagctttggaacctctctcaaggagctgacgatccacttcggacttatatcactgccttcaaagagatcatggtccaagtgcccaacctgtctgattcagcagctcagtccgccctcaaaaacggtttgtggcatgaatcgcgtttccgtgagtctctaactgtcaaccgccccgaatcgattcaggacgcccttcatcgagcaacgaactggatcaatgccgaagaagaacgtgcttttttggctaaaaagttcaaggctataacaaaagcctccccacctgtaacctcgaagaaaccctccgagctccgaaagccagtagcaggaactttttccgttgagaaggagccgctcaaaacttccccaaaagcgtcaccatcgaaaccgcctttctctccaaaaggcaagaatggagctctcccgagcaacaaatgggtccgagatcccaacgcttactgtgaaattcacaaaatgaacggtcacgcaacaaaagactgtaaggctttgggaaggttgttggctgcaaaatttgcttcgggagaaattcccgatatcgacgtcacaacaatcgacttggctcatacagcgtacgaagtgttggattccgagaaatcctcacctcccaacaaaaagcaaaagagcgagccaactcccgtcactccaaagggtccgaagaagatggtcaaagtaattatgggaggatctaaactttttcgggattctgtcagcgcaattaagcagcatgaaaggaaggtggtcactccggtggcgaaaagacctaaggtcggtcaagccgattcgctcgaaatttcgttttcagaggaagaaacctccgagttagataaaccgcatgacgacgccctcgtgatatcgctcgacgtgggaaactgcgaagtacaaagaatcctcattgatactgggagttcagttgacttaatttttctggataccctcgttcgaatgggaatttctaagaagaatatcaaaggagctccgagccctctcgtttccttcacgagcgagacttcaatgtcacttggaacgattacactcccgatcagcgctcaagggattgtgaaaatgatcgaattccccgtttttcatcgacctgccgcttacaatataatacttggaacaccttggctttacgagatgaaagcagtcccttcgacttaccatcaatgtgtcaagtttccaactcccaccggagtaaagcaaatcttgggaagtcagcgtacatctagaatgtgttatatgactggacacaagctcaaagtcaaatagcaaccacagctcgaggccgctccgaatccaattaaaaaagtaggagacgacctcgtagagcgggtgataataagcgaggagcatccagatcagcttgtcggtatcggagctaatctaggcgaaagtttccgaagcaaacttgttcttttcctcaagcgaaacaagggaactttcgcctggagcgttggcgaaatgaccgggatcagcacggaagtcatttcgcatgagttaaacgtcgacccaactttcaaaccggtcaagcaaaaatatcggaaacttggtccggaccgcgcggaagcagtaaatgccgaagtcgtca

SEQ ID NO: 169158 - DNA, 488 bp, Arabidopsis thaliana landsberg; identical to SEQ ID NO: 80179

SEQ ID NO: 169159 - DNA, 639 bp, Arabidopsis thaliana landsberg; identical to SEQ ID NO: 69693

SEQ ID NO: 169160 - DNA, 791 bp, Arabidopsis thaliana landsberg
cgctgacttttgtcaaagattcggaacaaagctctctccccatcaaagaggtacccaacaccttcttcgcatgcagcagctcgaggaccttcagaaccatcacccttggggtcgagtaggagagatcaagcaagttttgcgatcgatcatagtgaatcaagccaagaggaggaagtgatgcaagaagaagagaccttcaggtctccagctgaaaatactcgatcccgaaagtcgagtaagctttctacaagagaattctcgaggaataaggaagatatcactcaagggaagaagcccgtggggaggaggttggagctggtagttgaagactccgaggaagatatggcttcaccaaaggaagatgatcaaacggagaaaggaggcgatgatgatttggaatcaaagaagtgttcaactcgaaatgaatactacaagctgctaaagcgcaatgagttattaggaactcggtaccctcatcccaagaccatggagagactcggcatctatgatgatgtaaactacatgtttaagcaatgcaacctgaatattcacatgtttcgaccaatggagggatatgaagaagagaccatccagtttctttcagctgtcgaattgttcatatatgaagagtaagaggacgacggagtcaggccagacggaagtttgggatacttggagttctgtgtgtatgacctagaacatcggcttccaatcgagcatctagaaatgatgaatggatttccaagcgaaaaggacacgaatcatcgttttagaagatagggctccagtca

SEQ ID NO: 169161 - DNA, 1609 bp, Arabidopsis thaliana landsberg
atgaaatccctcgatattacttttcactcttttcagaaaaatgacaggtaatcgactatgtttttctttgttcttctactaattacagttatctgaacgtttaagccattgttgttccaaaatttctttaccagttaggtaaatttatattttatccattgttgttctaaaatctcagttgcagatcgataattttctcttcacaaatcgtccctttgatttcaggcacagttgaggctgatataaatgttctcgacactcgtcttcctcctaggctatttgcaactgaccgttaccctgatgctcgtctcaatatctaatccagacccgacattctgactataataagtgaagtattgaaaggtaccaatgagatggaaaccatcttagactcttgttttgggtctctgtttagtttaagggttagcgaatgtccaatatcttgcaaactagttcatgctttgttatgtagatagtttgttaccaaacataaatacgaaatgtggacagtttttggtggacagcctcttagattctctttagttgagtttggttctgtaactagtttgccgtgtggtgaatttccggaggagtatgtacctgactacttccctagacgtgtcaatgggacaaatgattactgggatgttttgattggggaagataagaatgcatcactagctgatgtttcctctaagttccaaactttaaaagggattgaagaccctttaaaactccccctggctatgcttgtgattattgatggagtccttattgctaataaccagactcatcgtccaactttcaagtatgttaagatgttagaggacattgactcattcctggctttcccatgggggagagaatcttttttgaagactattcagatcatgaggcctgttagaaaaaacccgtcaatggttgattctaagagaaaaaggtctcgtcctggaatcaagctagaagatcccatccaacaattcacaaatcagatgcaacagcatagtatagctatttatggctttcccttagccctgcagcttcttgcttataggaacatttctggtctactggacaaaattcctggttctgcagatgagagaacctttttggaatgacattcaattgggataccgaaaaacaatctttctatcaacgatgtttatctccttgaacgtgttcctgatgtaagtaattgtaatcattgttgttgtaccttttctttcatgtgctttcatgacatttttagtaggtctaattttctgagtttgtttcttcaaatgactgttatccctatgttgtctgtaaacaccaatgaggatggttggggtgagtgggatgatgaagtgagagacaagaaggttctttatttgattgaacagataagcaaatgccataatttcaccaaaaaggagtggcctggtggttatgctgatctaccgctcatttatgtcaatgaaaaggagcttgtagtacaacacaagaaatatatagttatcaggaaaaagaaactttcgccaacttcttcttctaaaggaactccatcaaaaacaaaagttagtacatccacgcgaggctggaagcgtaagttagaattggttgatgatga

SEQ ID NO: 169162 - DNA, 2792 bp, Arabidopsis thaliana landsberg
gtttggtattggtttaaaatatacggttataatgttcgttttagaaaaaacagtttgtgcgtgacgagcgagggtcggatttcaatagattaaacggccgagatgaaacattgtaacttcccttgctttccgagttaaaaaaaaactgaaacacgagatcaattcaaacacataagattctgggtttcaatcatcgatctttggtcaactgtcgtgtccaaggaggtacgattgttgaaaactgatatcatgaaattaaaacgaaaatccgtgcattctatttgttatgggtatcagaatataaccaaatctttttttcgtttatatgtacagggatcgatggacgactatatcatggttatatgtggagagtggttttgttcttcgactggagagtggaaattggagatatgtaaccaacttttctcaagggttgtaccaattcatgagggaataacattggttgcgttgaacgaagcaattctacaggagtttggcgtcaagggtttaaatcctctgttaagttactctgtaccgaataagaacatgtttgcaacaaaggataagactcccccggttttggttacaagcgaggttggacttcaatactatctaaagacccttagagaaaacatgggtctaaacttgtttgtgaagtttgaagaaatggaggaagatttacagagttttgatacacgaggagatagtagcactaaacgaccgcgtcaaagcagtttggaggaagagtgtggttcaaaaacgcctaaaagtggtgtcacatctgttcgcgatatatcgtctgtgggttcaaaaactcctacaattgtgttgactcctcgtgatgacgaattcatggaggaattggaacaagcagaagcaaacataggaagtaacagtgggcataaatcgtcacggaatgatactgataacgaaggttttaacaatgatgttgaaaagttgtttttcgttgataacgatacagaggaagttgaagcagtcacggaaaaacctgaagatagtatgccctttagcggaaatgataaggagttttggtcaaatttcctaacagatgattatggtggctccaatgctaatgagttgatggcaacagaaggtttaaatgtaaggtacgggtctaacaataaggttgtgggctccaatccggatgaagtggttttctgtactggcagcggagtctttgatcacgctatatatgtgaatggggctggcgaaagtataaagacagagcatacaaaaaagaccccacaagttatgaaaggaaagatggtcggtggagttggaagctctcaggaaacgagtaatgaggtcaaaaagttggaggcagtggatgacgaggagtttgacatcccacctttgtttgaggacatcgagtatgaagttgataacttacctgatttggacattgatgatgatggtaaaggtatataccagggaaaagtgtatgcgagcaaagaagattaacaaataggattggctatatttgcgataaagaatcagtttcatttcaagcaaacaagaacgaaatggaattattttgttcttagttgctcagatgagaaatgtgattggagaatattggcaactttaatgaatggcacatgttactatgaaattaagaaagcgcagcttcaacacacatgttcggttgagactagaaggcagtacgtgaagaaagcaacatcaaaggtgattgcatctgtatttaaggcaaaatacagtgaagcttctgctggtcctgttccgatggatcttcagcaacttgtactagaagatttgagggtttctgcatcatacaaaaagtgttggagagctagggaatcagctttaacagatgttggcgggagcgatgaagagtcgtaaagcaatttggctgaatatttgcatcttttgaagttaacaaatccagggacgataacacatatagaaaccgaacctgatattgaagatgaaaggaaagagaggtttttatatatgtttttagcttttgggcttcaatacaaggttttaagcatcttagaagggttttggttgtggatggaacacatttgaaaggaaaatacaagggggttttactcacagcaagtggtcaagatgcaaacttccaagtgtatccactagcatttgctgtggtggatagcgagaacgatgatgcatggacttggttctttacaaagttggagaggataatagctgacagcaacacactcactatattatcagataggcacaaatcgataaaggtaggggtgaagaaggtatttccgcaagcacatcatggtgcatgtattattcacctatgtaggaatatacaagccaagttcaagaacagaggattgacgcagatagtgaaaaccgctggatatgagtttacgagtggaaagtttaaaacgctttataatcagattgcaatattgctgaaacgttaaacaaggcgttgtgcaaggggagatcgtcacatattgtggaattgcttagatttattaggtctatgttaacacgttggttcaacgcgcgtcggaagaagtcacaagcacattcaggtccagtacctccggaagttgacaagcaaatttcaaaaaacttgacaacatcaagtggaagcaaggttgggagggtaaccagctggagctacgaggtagttgggaagctaggtgctagcaatgttgttgatctagaaaagaagcagtgcacttgcaagagatatcatacactgaagataccatgtggtcatgcaatggaggctgccaataacattaacttctcgtacaagg

SEQ ID NO: 169163 - DNA, 1375 bp, Arabidopsis thaliana landsberg
aatgtaaccatgagtgccttgagtgcaatgaaagaaaattgatgtagtcagaacaaatctatgaaaattttgatattttttaaaaatggaatgaaatagctggagactaacacacaattttccatcatctatccaaatatatgtttaaatggtaaaagatagaatagataatgaaaagaattatgagagattcactaccaatttcaaaattatgagagattcattaccaatttcaaaatctctctaaaaacaaagttttcttctcttttttcttttcttttctagatcttcatatctaattcaaaagagaagctcacttttgacgagcgtgaaagacagaaggtacttggataacacaacaagttcagaaaaaaagtaggtgaaaattggctaccaccttgcctctctcatacataagtattgtttacttccttggttcttaaaatattagaacccattttttgtgtttctaataattgtttcgttgttatctaagactaaactcatagttttgtatactttaaggtcagatcgaagcagacaatactgatattttggaggaacctattctaaaatgggttcgtatctttttcatccatttcattttcgttgaaaaaaacagcgtttacgttttgatacactaatttctgttaagtattgaatcatatttcaccttcgaaacatgttttgtatatgactcagatttcacatctttggaaacaacaactttcgaagaagtcgtgatagctttgggaagcaatgttggaaacagaatgaataatttcaaagaagctttacgattgatgaaagactatgggatcagtgtaaccagacacagttgtttgtacgaaacagaacctgttcatgtgaccgaccaaccaagatttctcaacgctgcaataagaggtgtcacaaagctcaaacctcatgaactcttgaacgttctcaagaaaattgagaaagagatgggtcgtgaagaaaatggtttaaggtatggaccaagaccacttgacttggacatattgttctatggaaagcacaagataatttctgataaacttatcattccccatgagagaatctgggaaagaccatttgttttagcacctttggtagatttgcttggaacggaagatattgataatgataaaatagttgcatattggcattcactctcaatgcattcaggtggaattttccaagcgtgggagcggttaggtggtgagtcattgcttggaaaagacggtattatacaaagggttataccaataggagatcatttatgggatttttctaagaaaacaaatgtgatgggtaaacttaatcttactcctgatagctttagtgatggaggtaagtttcaaacggtagatac

SEQ ID NO: 169164 - DNA, 335 bp, Arabidopsis thaliana landsberg
atggctcttatcagcacacggcgaacattatcgacactcctaaacaaaaccctctcttcctctacttcatattcttcttcatttcctacgctctcttctcgttctcgattcgccatgcctctaattgaaaaggtttcctcttcccgaaccagcctgggcccgtgttacatctcgacccgacccaagacatccgggtccggatactcgccgctgaatgatccttcgccgaattggagcaaccgtccgccgaaggagacgattcttcttgatgggtgcgattatgagcactggctcatcgtcatggagttcactgatcctaaacctactgaagaaga

SEQ ID NO: 169165 - DNA, 552 bp, Arabidopsis thaliana landsberg
gttgtctatgagcagcgtctgagacaggtcccctcggtgagcgagctcgaagaagggaagaccctcatccaggagctgacgtcgagtgtgaaggctggtcaggagcgcgaggtttcgttccaggtatacctcggttttgacttgtttgtatataatttatcgatgatacgatgattctgacctgattgtgatttcaggcggagatcgagaggttgaagatggagctgtccacttcgaaagacctcgagaaaggttatgctgagaagattaggctcatggagatggagatcgggggattgcagaggagggaagagctctccaaaagggtgatggacctcactttgactgcgcaaggagcgaagaaggtggttcacaatgcttaggttgagctggccgctgcgtattcgaagttgctggctgggatcaaggaaaagtgggtcgccaaaaaggagtacacgatgctggagggtcaagcggcccaggcggagtcgaacttggttttgaacgaaaagatcacaaaggctgctatcgatttgaccgtgagagacctcg

SEQ ID NO: 169166 - DNA, 364 bp, Arabidopsis thaliana landsberg
gctaaagattcatcagccggtaaaatcatcataattgattggaatatggctgattctgtggttggtgagggtcggttgtgttcaacagaccgactagaacttgtgaacaatatgcctcttggtccttctgctggagttgttaagtttgagaaactgtttaacaaagccgcatatttgtggagaccaagtccaggaaagtttgttatgggagatgtactaaatgagaacattgcatggccacttcatagtatacaatatgtgaattcatctcctccacggtatgaaacagcatcagaagataaaagaccatcaccaccactggtaaatttctgcactttaacgtacagcctataaaatcacttaa

SEQ ID NO: 169167 - DNA, 1128 bp, Arabidopsis thaliana landsberg
caacatctctatctcctctcttcttatctgatgatctctcgggcgaattgttttcccaagcttcttctcgcagaggttatatcggaagatgagtcatctaggctatttgcgcatcattggaaaatcagaacttctaggctctagatctggaccatcaccaatggcacaaacagtttgtactcaccgaatttcgttgatggcaagagtatctcttggaccgtcagttgcgcctattccggtgagttcgtcgacggcgcacgacgtctctcaaagctgtctagttgctccccttgctttcctcaggtctgtgtcgttcatcaacttgccaaattcaattctaaagatgtcctgctcaattatgactggtagtggacgccatgttagggtagtagtgatatctttaggctggatttgtcactatcaatcacgaaacctgttgaatcttgaagttttcttgctatccgatgaaaaattatctttgaagcttcttggattaatgctacactcgacccatagcttgcgtgattctggtcaccattttgcccagttgggagttcatagttcgagtaacaactttttcaagttcaagcttaatcattccgcctcatacttattgggcgatgcatatcaacactctcgaaccattttggagaaaccgcctcggtatgttcaatctaaccttatctcaagtcctcttaaatcggatattcattgccttggattgaatggacgtggactacactctagcctcgctttactatccttcttttggccttgtgattacttttggcgactcctacaaaccatagagaaaccatccttgcaaaaccatccttgcaaacccttagtctcctttatggagcaccttaacaaaagctctttggcgttattcgcgcgagctctttatgaccacttgttggtcggggatttttcgaagctcgtcttcataattggatccttcaagacatcaaaagatctttcaaacattgcaagcctttcaaagttgtgcatctctttggaaaactctttgagtctctatctttacttatgtattttgtcactttcaagttgtatgaaaaaaataataaaaaaaaaataaaaaaatatcaatcaaaagatcatatgact

SEQ ID NO: 169168 - DNA, 1529 bp, Arabidopsis thaliana landsberg; identical to SEQ ID NO: 5203

SEQ ID NO: 169169 - DNA, 470 bp, Arabidopsis thaliana landsberg
atgagttcgaactgcaacgaatcctccatggacaccaatttcaatgtggatgaggctgaatcttggtctactaggcctaagagggagatggaagagtataggcggttcagtcaacaagccgccaaagtcctagctcgtgatagaagaagagctgaaattgcaagaggtaagagagccatgccggaagagagaagcctcgtggatgaagaccttggtggggatgaagactatgtacctgaaataactccaagagccaccaaatccttgataaagaagactaaactgtctccggatggatactatgagcttatggcggttcacgatttccatggaactcgatacccttactctgaaaccatgaatgagcttggcataacagaagatgacaaatacctctttgaaaagagtggtcttttgggtgtcatgaccaaccctcacgcagcctacaaaacaaaggagctttagtttct

SEQ ID NO: 169170 - DNA, 740 bp, Arabidopsis thaliana landsberg
gaccggttttctcatcggttaatatcggttttgattctgttttcctttttgctctgtttgactccagaggactagagtggctccatgagcattgtcgtccaccagttatccacagagatttgaaatcttcgaatattcttcttgattcttccttcaacgccaaggttcataccgcgtctttttttccctcaaaatgttgttgattaaatcttagttcttgtttcaatgtaaaatgagaatttcacaatcattatcattgcctatatttgattttgagtaccgaataatcgcattgtttggttactgtttgattacaacaatgcaaatttcagatttcggccttgctgtatcgctggatgaacatggcaagaacaacattaaactctttgggacacttggttatgttgccccggaatacctccttgacggaacttatgttcactcatgactcgttctcatatcgtaggtcgtgtagcacatagtagtcatatatcatgtgatattattctgatatattgaggacatgtctcactctatcatgaattcattatacgataacatttccgcttaaataatcgctttctatagacaataactgtttattttgggtatgtatgtagtgaaaactaacggataagattaatgtttatgcattaggggaagttcagcttgaactcttgttgggtatacgaccagttcaaaaattaactccagctcaatgccaatgtcttgtaacgtgg

SEQ ID NO: 169171 - DNA, 1312 bp, Arabidopsis thaliana landsberg
tctgtaaattttgagaagcggtgcttttccggcgaccctgcttaagccaccggcgactagaatctagaaatagcgttctctcacgttattcgtttcaaaggttagagattctcgaattctggattttagtcgagtgaattccgatgattccagatttgtttccgatttgtgtttctctgctacttgattcgatttgctgttactatgtctcttgttacttaatttgtcttatctttacgttaatcttcttgattttatgagcgatcgattgattttgtcatttcattgctttttcaataccttttaattcctgatttgtttaatttgggttcgacagatcactagtgtctaacgatcgcgaaactgggggatcaagaggattatgatttgtgaccttccgaaacatgaacaagactctttaaaggaagcgacggtggatgatgccgtggtggtggtgggtggccgccgtgaggtgggttacggaggctgtgacggaggtttgtgggtttttcaatcgaatttattatgatttaattccaccgtttcttgtgttcgtgtaactctacgaacccaataagtttgattttgaaatttcgcgatctgatccgatcaatttttgatctaatttgttgtgtctgtggttgataacgaagcttttagaaatcattttggttgtggaaaatgtaaagggagagtgaattgattcattaagagagatcatgtacaacatatatatgagttagtctagggtattctcaataagtaatgactaatatatccttaatatatacaactctctatagaaaatcatattgttttttttgtcattgccactcgtaattttaaaggtttgttgtattgtgttctgttcataagattcgggctaggtctaaatcagataagtgaaagcatctttagtgttgacttactcatctattttgatctctgaaatcttatgctttcttttctcaaaactttggtgtaggaagcaattggcgactctatctcctttggaaggagtttgatgttgtgccacttttcttctgcaacaacaaattggagagccacatttcttatgggttgttcgcaatcactcaaccaaatgcatacacatacatacatgcagtcattcatactcacatacatgcatacacacatacatgcatacacacatacatgcatacatacatacatgcatacatacattaatgcatacatacatacataaatgcatacatacatacataatgcatacataatctacattgcacacatacatacatacatctacgcttatgtgtaaatgtatcct

SEQ ID NO: 169172 - DNA, 922 bp, Arabidopsis thaliana landsberg
atggcaaagacgagttgtgaaataatcctctgcttcttcttcttcattttaagcttcagggtcatttctgtttctgcacaacaaacttgtgacaacactgctggtagtttcaaacccaatagtacttatgataagaaccgccgactcatcctctctactctagcttctaacgtcacggctcaggagggctacttcatcggttcgattgggattgctcctgaccaagtctttgccaccgggatgtgcgctccaggttctgagcgtgatgtttgctctctctgtatcaggaccacatcagagagtttactacaaagctgtctggaccaggcagatgctttcttctggtcaggtgaagaaaccctttgccttgttcgctacgctaaccgccccttctctggattactcgtcatggatccactaggagcgatattcaatacaggagaactcaatacgaatcagactgtgtttgatatcgagtggaataatttaacttctagtatgatcgccggaataacttcttcttcatcaggggggaacaattcgtctaagtactactcagacgatatagctcttgtgccggattttaagaacatatcagcgttgatgcaatgcacaccagacgtttcgtcagaggattgtaacacttgcttacgacaaaacgttgtcgactatgataattgttgccgtgggcaccaaggcggcgttatgtcaaggccaaactgctttttccgatgggaagtgtatcccttctctggtgctattgatcagattaatttaccaaagtcaccgccgccttcaattacacccccgtctcctatagccaacataaccaagaatggaaagtccttgttggaacattttcagaaaattgtcttgttttgtttctgtttgttttttttgttttttttggtttttgtgtatt

SEQ ID NO: 169173 - DNA, 100 bp, Arabidopsis thaliana landsberg
atggttctgaaggtcctcgagctgctgcatgcgaagaaggtgttgggtacctctttgatggggagagagctttgttccgaatctttgacaaaagtcagcg

SEQ ID NO: 169174 - DNA, 275 bp, Arabidopsis thaliana landsberg; identical to SEQ ID NO: 16157

SEQ ID NO: 169175 - DNA, 386 bp, Arabidopsis thaliana landsberg
ggagaagatgtggaatctgcttggagattcgaaacaaagttgttcttcctacgtgcaatcactccatgtgtataaactgctacagaaactggtatataaagcttttccttcttttcactcactctcaccattcatcagcctttttcttacaagttatagaatctcttgtttggaataggcgtgcacggtcacagtcgtgcccgttctgtcgaggcagcttgaaaagagtgaattctggtgatctatggatatacacttgtagcgccgagattgcagatttaccagcgatttacaaggagaatctgaagaggttgttgatatacattgacaagttgcctctcgttacttctgatccaaatcttgtcccttatgctcctcttcctcgg

SEQ ID NO: 169176 - DNA, 204 bp, Arabidopsis thaliana landsberg
atggcctattggctgctgcgatccgaacccgagacctatggctgggacgatctcgtccgcgattcggcaaccgaatgggacggcgttcgcaactataccgcgcgcaatttcctcaaggagatgaagcccggcgacaaggctttgttctaccattcgggcaagcagaaggccgcagtcggcgtgatggaggtgacccgcgcctgg

SEQ ID NO: 169177 - DNA, 1314 bp, Arabidopsis thaliana landsberg; identical to SEQ ID NO: 1067

SEQ ID NO: 169178 - DNA, 836 bp, Arabidopsis thaliana landsberg
acattcacttcataaaccaaacagagtattcctttcttgaatccggataagaggggagaatttcaatttttctcataggcacttgctctgctttagtctggactttttttaatgcctatcatgtgttcgatgaaattcttagctgaaaactcttgacccttgcaataatagtatattaaccttttgtttcttccttgcacaccaacaactttttgctctggaagtacgaagtttgacgatttttgttaccttatgattcagggttgttcttgcaccattgacgaggcagagatcgtatggtgttatatattattcagaaagaatgactccaggagggtttctcattactgaagctactaatgtttcagatacagctcaagggttatgctcgttttgacttaaagtatacgtttttattaatgggttttgattaaagctagctttttgctcatctcccacatatctgacttgtttcaggaagctatgaatacactcctggaatatggactaaacagcaagtgaaagcttggaagccaatcgtagatgctgttcatgacaaaggccatatcttcttctgtcaaatctggcatgttggagtttctaatcgaggttttgcctaaacttaccatctttaacctggttaaatccttaatcaaacatggtcaaccagatggggaagctcctatttcttgtaccgacaaggcaatgatgcacaccaaagatctgtttacgcctccaagacgactaaattccgaggaattttcccgcattggcaatgaaatgctttggaagaatgtaaagcataacacatttaattgaaagaagcttttcaagac

SEQ ID NO: 169179 - DNA, 392 bp, Arabidopsis thaliana landsberg
  unsure (1)..(392): unsure at all n locations
agtagcatattatactgtgatcatggcatggtcatttcaagtatgcgatctacagcctgaaacttgaatggggaacagatactttgaatttcttttttaagcatgtattgagattaaccgattctccttctcatcctgggggcataaattggttaaccgtggcatcactgtttatcttatgggcggtttcatttttagtattgcggaaaggcataaaaagcctttcgaannnnnnnnnnnnnnnnnnnnncttaccttttattctcattgtaatattgtctttgcacagcatgagtttccccggcggtatagatggagtaaaatattttcttacccccgataaatctaaaannnnnnnnnnnnnnnnnnnnacttcacccgcatcacaagtg

SEQ ID NO: 169180 - DNA, 733 bp, Arabidopsis thaliana landsberg
cttttattttttcagatcgattgtgataaccggaggtaacgggattttcaccggtcatcaagaccgtaaaattcgggtctggagaggttctaaaagaagaaccggaggtttattcacgaatcggaagcttgccgacgttgaaagagtttttgacgaaatcagtgaatccaaagaactacgtcgaggttcgtcgtcggaaaaatgttctcaagattcgtcattacgacgccgtttcgtgtcttagcttgaacgaagagctcggtttactctactccggttcgtgggacaagactctcaaagtttggagattatctgattcaaaatgtcttgaatcgattcaagctcacgacgacgcgatcaacacggtggctgctggtttcgacgatttgctattcaccggatccagccgacggaactttgaaagtgtggaaacgtgagcttcaaggcaaagggacgaagcattttcttgttaatgtgttgatgaagcaagagaacgctgtaacggcgttagcggttaatataacggcggctgttgttaactgtggttcttctgacggtaccgttaatttctgggaaggacagaagtatctctctcacggtggaactctccgcggccatcgtttggcggtgctctgccttgccgccgccggaagtctggtttaaagcggcggagcgaataagaacatttgcgtgtggaggagaaacggtgatggtagccactcgtgtctctcgg

SEQ ID NO: 169181 - DNA, 469 bp, Arabidopsis thaliana landsberg; identical to SEQ ID NO: 67803

SEQ ID NO: 169182 - DNA, 312 bp, Arabidopsis thaliana landsberg
tgagtaatgagacaatttgatttgaaattgttgtagaggttaaggtagtggttgtgtttgatgctctcatgtctggtcttcctactcacaaggaagactttgcagggtacagtcatttggcccttttctgtctgtttttcgatatccttatttactttgacaactcaaaaagttttatcctttttggccagtgttgatgtgattttctcaggagaaacttgtgctgacgcttggattgaaaaggaggcaaggaaaaatgatctctttacccccaaagcctgttcaaatagacggctttacgagaataattgt

SEQ ID NO: 169183 - DNA, 358 bp, Arabidopsis thaliana landsberg
tcattactttttttgtggatagccatctccaatagatgagagagagggaaatactttttatgcatgaattttatggtttatttggaaagataggaataaaaaggttttcaaaggtttacaatcagaacctttagatattctaaatgtcgctttgagtgaacaattattgtgggatgcggcccaactggaaccgattgaatcgaatgttaccagggtgtctatggatcaactgactcattctattagatgtagggttgatggatcatggaaatcttcggatctaaccatgggattaggatggtggtgttttcaaggaattgatcaaacagtactcttatgtgcaaagtgcctctggagg

SEQ ID NO: 169184 - DNA, 2871 bp, Arabidopsis thaliana landsberg
tgaaagtggagatcagggtgatgatgatgaaagtaaagaagaatctgagtttaggtagaagttgatggatgttgaactctactctactcgacgtgtcccaactatactaaagtgtctacaatcatggctctctaccacataaaagttaaaagtggtatatccaagaactaatttgatcagttcatgaaattggttcacgacatgttacatgcggataatgttcttccaaaatctgttcatgagatgaagaagctcttgaagctttttggttttagttatgatttgatttacacatgattgcatcctttatcgaaagatgtttgaggagtttgttagctgcccaagatatagtgcttcgagatggaagtaagataagcatactagagaggaaaagaaggggttcccgcaaaggttcagaggtatttttcgatctaaggatagatttaggaggatatttagattaaaaaggattgcttaggagttgtgttggcatttcaacaatgctagtgtagacggtccaatgcgacacccagttgattcattgacttggtctcaaataaaagataagttttcaaagtattctactaaaccaaggaaccttcgactcgacttttctacagataggatgaactcgttctctatgcagaaaaaagtattgtacatgatcgatgttgttagtcaactacaacatgttgccgactatgtgtatgaaggctgggaacatcatgatgactatgctcttccctagaccaactgcaccacacaacaacatagatgtgtatcttgcacctattatagatgatctaaatggtttgtggaaagaatgtatagaggtttatgattcttatatgaaggagaattgcacacttagaactatattgttgtgggctattagtgattatcttgccttagggacactggttagatgtatggttaaagggaaataggagtgtaacatatctggtaaggacacaccaacatgcatgttttattttgctttagtcaaattttgacaacacgactactggaagtgcacagttaatcgactgtagtataatgggctttctaagcccattccaactcccatttagtatgatattgtcctctttgagcttatatgctcaagttcgcaaggatttgttattggtttttttttcccaaaaggcctcatactagttggagttggacttggcttatatgttagaaactctttttctaaacttccgatgtgggatctttggtttgtacccaacaatctcccctttaaaccaaagaccacgaacttgggcctccttcttgaggcacattcttatcgtgtcatgtttgagagatttttccacaccgatcatagtccaagcccaaggtccactttttcaatctaggctctgataccatttaatgggctttctaagcccattccaactcccatttagtatgatattgtcctctttgggcttatatcctcaagcccgcaaggatttgttattgggtttcttcccaaaaggcctcatactagttgtagagattgcatccagagccagccatatggccaagcaagcaaagcacatgcttgcggcaatctaagatcatgccaagatcgattgtacccaacaatctccccttcaaaccaaagaccacgaacttgggcctccttcttgaggcacattcttatcgtgtcatgtttgagagattttcccacaccgatcatagcccaagccctaagtccactttttcaacctaggctctgataccatttaatgggctttctaagcccattccaactcttccatttagtatgatattgtcctctttaggcttatatcctcaagcccgcaaggatttgttattgggtttctttccaaaatacctcatactagttgtagttggacttggcttatataatagaaactctttttctaaactttcgatgtgggacctttgctttgtacccaacatagtatttatggatcgaattccattggaagagaagtaattcaaacaagtctgttagaagagagtaaaactaggacaaatcaataaaagaggggggaggggttgttattgtgtcacagttgtaagtaagtgaagcaagtaaatagtaagtgatcaataagagacaaaagttagacattcaagggatcgtaggggttcaatgatcttcatgactaaatgataacatgattagatttgtttatttccatgttttcgagcatacaaaacacataaaattcagctactgaggaaaaatatataaacgcttatatacatacgtccacgtccacatactttcacgtttaggttttcgttattagggaagttggacttttaataggtttactgatatttgggtctcacgtaaagcagaccggctctttggaggtgcatgaggcgcatttgttctagatccaaattttttttggtaaatttaaggatctgattagtatggaaaagacctacaattttttttttttttagtatgaaaatgtcaattttaatgtgtttttaaaaaattagcataaaaaagggtccaaatttttgttttatagtttagaaaaagattaatttttaaaatttgtacagggactataaatttattgagttggtagagacaaaaagcttaaagtttacacaaaggagaaaattatcataaacacaaacattatcaacttttctttgtttgatattaaatttttaatttataattttttattattctaaaataatataaataagtaagtggtagtttgacaataatctctatcatctactcaaatgtgacaatggatactacaataatttactcaagtacataagtaatgacgaagtctgagtaaaatgtaatttgaaatcaaattttggctttctagaagc

SEQ ID NO: 169185 - DNA, 484 bp, Arabidopsis thaliana landsberg
atgtcgtcagcttattgttcctccgccgtggctgtatccgccgcagccaccgcttcctccgccgctacctttaatccattactctcctcccactccaattcccaactcttctatcgctttacaccaaaatccttcaaactcgttgccaattgccctaatccactaatcctccactcaaatatccgccgccaccgcttcttctgcgccgccgaaaccgaagctagttccgccgatgatgaaatccaggcatcagtagaagaagaagaagaggtagaagaagaaggagatgaaggtgaagaagaagtagaggaagaaaaacagacgacgcaagcgagtggtgaagaagggaggctttacgttgggaatttaccttacacaatcacttcttctgagctctctcagatttttggagaagctggaactgtcgtcgatgttcaggttcgtctctaatcttcatacgattctatcaatcgatttggagaca

SEQ ID NO: 169186 - DNA, 579 bp, Arabidopsis thaliana landsberg
aatggaagaggcagctaatgaacctcaagaacctcaggaacaacaagaacaagctccaccggtagtaagtaacgttccaacagaaaataacgtgtttcgccccgtggctcgcgttggtgcattcagtatctataacccaaccagccagaaaaatggttacagagactacaatatagttccatgtgagggaccgttgattcaagcagctaaacccgattcattggctggtaaatttctacaatctctttgtgatgaacctcaaatcccgtcaaaatgtggtcacggctgctctactcttccagctgaaactaagttctcacgtaactcggtgttgggacctgagtttgtggattatgaagagccttctgcggttttcaaccaagaactaatatctatagcaaccgatttgaacaacattgcatggataaagagtggccttgacaatgctgttgtcagagaagcagaacagagtttgaagatggataattacaattataatgatcctcgaatcaagtttactggaatgatgcctagacaagatttcttctgtgcaagaagctgaaactcaaaagtagggct

SEQ ID NO: 169187 - DNA, 423 bp, Arabidopsis thaliana landsberg
gtccttttttgatgaatatttttttctcgaaatccatattttgtgatagtgcttcttcgtgaaggtaactccgctaatcaagccattgaactactcatacagaacaaagttcctgaagttcacattatattcctcaaccttatatcggttagtgtaaaaagctaaagatcgctctttcgctcatttgtgaatgtagaagctaaagatctctatgtatctacttctatgtctctttgcttctctctttccctcatcgtgaccttgctttctgacaatcgttggaggggaatccattgtgtctgcaaacgttttccagcattgaagatagtgatatctgaaatagaccaatgtctgaaccaagagttcagagtttacattgaattaattagttatgtttggtctttcatggctaatgctttttag

SEQ ID NO: 169188 - DNA, 845 bp, Arabidopsis thaliana landsberg
ctctagctcacaattaaaccttattgtcaccattatttccagcgaccattatggaagttgagagagatcaacacatttctccaccatctcttatggccaagacgatccctatcatcgatctaagcaatcttgacgaagagctagtggcacatgcggtggtgaaagggagtgaagagtggggcatttttcacgtggttaatcacggaatcccgatggatttgatacagcggttgaaggacgttggtacacagttcttcgagctcccggagacggagaagaaagccgtagcaaaacaagatggctccaaagacttcgaaggtttacacgacgaatctcaagtatgtaaaaggtgaggtttggaccgagaatctttttcacagaatctggccaccgacgtgtatcaattttgattactggcccaagaatcctcctcaatacaggtactactaatctttggctacaaatggttgtcttctgtctagttaattaggggaaaaataccaaagaatgaatcgtttatttatctaactatttacgttgaatatgaaaggaacaaacgtaccgaaaataagcaaatttagtggaaataaaatgagtcggataaatttcggtttgagtggtttgtcaatgattgattataggaatagttgaatgatttagtaatagtaatatttgagctaaataaaattgttaggataagaagttaagaactctaacaccttaattatattaagaggctgctttagcagatttgtgttttttgttttggttcagttataatataaacacgttaaatatgtatagcagaaacttttaatactatgaaaattgtgaaaaaatgatga

SEQ ID NO: 169189 - DNA, 558 bp, Arabidopsis thaliana landsberg; identical to SEQ ID NO: 34737

SEQ ID NO: 169190 - DNA, 398 bp, Arabidopsis thaliana landsberg
taattaaacttaacattttctttgtgtacgttgcaaacggatgtggaaacgaaccattatcactttggttgcatgagctcgttcaagaacaaagatctaagatcacaacttctctgatgtacttcactcatggctatactttccatacgtatccatatggaagtcgaagggcaactgcgaattatggaatccatgttgaaggtgaaactgagttttatggaattctacaacaaattctagaagtcgaatatccgggacttttgaatttgaaatgcgtccttttcaaatgtgattggtatgatcctgtgatcggtcaaggggtacgggtaaataacttaggggtggtcgatgtcaatgcaaacaagacttattcaaaatttgaaccatttatcggagct

SEQ ID NO: 169191 - DNA, 242 bp, Arabidopsis thaliana landsberg
attatcaaactttgatacaactagttaataactctacttcacattgctcgttagcgaatctactcacagatattcagttttgggcagcaaaattcagtaacattcaatttaaattcatcaagagggagggcaataagataacacatgatttggcgaaatttggttgtaattcatcttgtttttattctgattctggaactcttcctagttggcttcaaaaacatcactgtaacaactctatt

SEQ ID NO: 169192 - DNA, 408 bp, Arabidopsis thaliana landsberg
tgggtcatctcagctctaaagttatatgcagatgtgaagaactagtggcagaagagttcatggggtaggaaactcattgtgcagaagagaagagctgctctcaatgattttgacaggttcaagatcatgttggccataatcaaggttggtttacttctttgtatccacccatgcttttttagtcaactctactttgtgcaaatgcagatgagtattcactgcttcatttgccctccgtttcagttgtggtttaagctgtcttcttgggtttatgatcctggtttgctttggattgtattaagacgcatcttagtgttattgaataacctctaatatatgaatattgttttgcagagggctggtattgtgaggcaggagcttgctaagctaaaaagggagatcgctgct

SEQ ID NO: 169193 - DNA, 872 bp, Arabidopsis thaliana landsberg
acatgggagctgcaagtaaaattcttggtattgaaatcacaagagatagagtgaatggagttttgtgtttatctcaagcaggatacttgaaaaaggtgctaaagagattcaatatgagtaattgcaagtcagctctaactcctattggtacacattttaaacttgcatctgtgcaggacgattcagagtgcatagatacagttaaaactccatactcaagtgctgttggaagtgtaatgttcgcgatgatcagcactagaccagacttagcctatgcaataggactagttagtcgtttcatgagtaaaccaggatcagttcattgggaagtagtcaagtggctgctaaggtacataaaaggatcacaggatctgagtttggtgtatactaaagggaaagatctcagtgtcattggttactgtgattcagatcatggtggagacttggataggaaaaggtctactagtggatacgttttcacagtaggaggtaatacaatcagttggaagtcttgtctacaatccgtagtggctttgtcatcaactgaagcagagtttatagctttgactgaagcagtaaaagaagctatatgggttaaagggttgcttgaagatctcggttttcagcaggataaagcacaggtctggagtgattctcagtcagcgatctgtttatcgaggaatagtgtgttccatgagcgaaccaaacacatggcacgcaagaggtcatttctgagtgagattattgaagaaggaaacattgaagttgtgaagattcacacttctattaatcctgctgatatgttgaccaagtgcattcccgtgaaaagttttgattcagctttagatactctgaagctgatcgaatggaag

SEQ ID NO: 169194 - DNA, 628 bp, Arabidopsis thaliana landsberg
aaagaaagagatagaaagatgaggagtgacgtggcacgtctcaggtgtggggagacgattccattgcttggaatgggaacttattgtcctcaaaaagatcgagagagcaccatatcagccgtccatcaagctattaaggttcataattttcatgtacttactttgattataacaaacaacttaatcaaaccattcccatagtcttataagatctttcattggaatggaagcagatagggtacagacattttgacacagcaaagatatatggatcagaagaagctcttggaactgcattgggacaagctatctcctatgggactgtccaaagagatgatctttttgtcacttcaaagttatggtctagtgatcaccatgaccctatctctgccctcatacaaactctcaagtaagacacacaaacactcacttacgatacaaagatcaagggatatcaatctcatgatcacattgtttatgacttataggacaatgggtctagactatcttgacaactacttggtgcattggccaataaagctaaagccgggagttagtgagcctataccaaaggaagatgagtttgagaaagatttgggaattgaagaaacttggcaaggcatggaga

SEQ ID NO: 169195 - DNA, 630 bp, Arabidopsis thaliana landsberg
accccgataaaagtttctgagatctctttcttctgtcaaacatctcttcttactgtttagcaaatcaatggttattacatatctctgtacctcttctttgttctttgttgcttagccaactataatgttaatttttttttatcacacgcaggctgcatgctgtaacgccatcaagttctcctggctcatagagttttacttttttccaattagtttggtagattggttgatgccacttatgtttttgcttcaaaattctcctaaacttaaaactcatacgattgacaatgtaaattttccatcctccttaaaaataagtgcatctagttttgatgaacttaaaattaaaatatattgtactgataccaggacttcgagtgtcgctcactttcctggaaccagccgagttctattaccggatgcttgttgtctcatctagagacctttaggtggagaggctatggaggaagagaagatgcgaaaaaactactgatgacatacattctcgctaactcaaagtgtttaaagacagtggagatctccctcttagcaacctgcaatcttgaagagacacaaaaggagttagaatctatgcctaggatttcacaatcatctcaacttctaatctcc

SEQ ID NO: 169196 - DNA, 741 bp, Arabidopsis thaliana landsberg
agtgtttcatagtttctaaagttggttgtgtctcacggtgaagcaagaagcgggcaatgccattaataattgatcctggactctatatgttaaacaaatcaaacgttttattggttagacctaatcgaagtttaccttctgctttcaagttatttaccggtaagtactgttcttctaatcctggtttaaaaacatattttactctgttcttgttagcttgaaacttttttgttttgtgtaggatcagcttggatggctctatcgcacgcattcgtggagtatatcatatacggttgggacaatttaccaagaactttactcatgtactacaccaatttcgtttcttctcctgaaggttacttccatacagtcatatgtaacgtgcctgagttctccaaaaccgcggtgaaccatgatcttcactacatcgcatgggacaagccaccgaggcagcatcctcgtatgttgtctcaaagagacatgggaaagatgatttcgagcggatctgcatttggtcggaagttcagaagaaatgatactgttttggataagattgataaggaactgcttatacggataaacgaagacggttttactccaggcggttggtgcggtgggaaaccagagtgctcggttgtcgaagatgtggctaggatcaggcctagctcaggggctgtgaggctcaaggagcttgtagataggttagttacagaggctaaattaggtaagaatcaatgtgta

SEQ ID NO: 169197 - DNA, 1429 bp, Arabidopsis thaliana landsberg
aaagcatcgtatatctctagccctcgtgattacttccttaccctttccttttggatctaaatcgaccggtttttttttgactaacggcttgtaattgttttgataaccaaacttctcttccttttgataacttggctttcctgagctgtagttggtcttggtgtgacttgatcgggcgttctttctcttgatttgctgttcgaacatgaccgctttgtgaagcatctcctcaagctccacatagtgttgagtttctagacggtcttggatttctcggttaagacctcccatgaatcgggacatgaccgcttctccatcttcttgaagatcagctcttaacataagggtttccatttcctgaaagtattcttcaacggttttgcttccttgaaccaaatttctcaaccgctgatgtagttcacgatgatagtaactcggcacaaatctctttcgcatgacggttttcagctggttccatgttttgatcggatagtctcgggtacgtcttcggctagtaacaagttgatcccaccaacttaaggcatagtcatagaactcagtagccgcaattttaaccttgttggactgaagaaattcttgacaaagaaagactaactcaattttctgctcccattccaagtaagtatccggattgttggttccatggaatgcgggaattttgagttttaggcctcccaagggatctttaggtggtggtctctctcgtcgatgcctacgttggctactgtgagaggaggcgtgactatagtaatttcttgcctcttcatcttcccttggttcttcttgtcttagacgtggatttgtgtccgggttgacttgatataagtttagagcaccaagcttttcatcgattaatgttgccatagctgatgtgactgttttcaaaatcctcctttccaaactagaggcagatgacgcttcatcttcttcacttgtcaccattgtacctgaaaaattaaaaatttaacaagtaaaacaggcaaataaaaacggacaaaacgactccaaaaattccgaacttaatttctaaaaatactagactcgtaaatggttcgaattcaattggtttcacaatttttgaaccagccaaatattttgtaaaattcacgcaagattgaacggagatctgaaaaaaagaaaacaaaattttagggttggaacttcaaaacctgataacaaggtggctctgataccacatgatacactcctggacgtggatgtatgctccaaggactcactttgttggttttgaattggaaatgatgtacttgatgatgaataatggattgatttgaaacaaagcggcggaaagacgataaaccgggatgatgacaagatcgagtggatgcagcggaatgaaaggggaacgaattgtacttccaagagtgatgaaagactcttagactac

SEQ ID NO: 169198 - DNA, 963 bp, Arabidopsis thaliana landsberg
aagaagatacaggatggaagcttgtccatggtgatgttttcagacttcctaccaattctgatctgctctgcgtctatgttggaacaggggtccagtgtctaggcatggtatttgtcacaatgatcttcgccatgctcggatttctctccccttccaatcggggtggtctgatgactgcaatgctcttgctctgggtcttcatgggactctttgctggttacgcctcttcacgtctctacaaaatgttcaaaggaacagagtggaagagaatcgctttcagaacagccttcttgtttcctgcagttgtgtcagcaatcttctttgtcctaaacgctctcatctggggacaggaagtcatctggggctgtcccctttggaacaatgttcgccttgatcttcctctggtttggcatctcagttcctctcgtctttgttgggggttacattgggttcaagaagccagcggctgatgacccagtgaaaaccaacaaaatcccgaggcaaatcccagagcaagcttggtacatgaacccggttttctcaatcctcattggaggaatcttaccgtttggtgcagtcttcatcgagctcttcttcatcctcacatccatctggctcaaccagttctactacatctttgggttcctcttcctcgtctttgtaatcctcattgtgacttgcgccgagataaccgtagtactctgctacttccagctttgcagtgaggactacctttggtggtggagatcatacctcacatcaggctcatcagctctctacctcttcctctatgccacgttctacttcttcacaaagcttcagatcaccaaactggtctctgcgatgctttactttgggtacatgctcatcgcctcctacgcattttttgtgctcacaggaacaataggggtctatgcttgtctctggttcacaaggctcatctattcctctgttaagatcgat

SEQ ID NO: 169199 - DNA, 640 bp, Arabidopsis thaliana landsberg
ggaaatgatgaagaaaaaaccctagatatgtggaaagttgatgattattgtatggagtggcttgactgtaagatggtcttcagttgtttacatatctttcggaggcgtactcaaatcattggagaatcaagttgagaccatagcaacggcattaaaaaacagaggagttccatttctttgggtgatacggccgaaggagaaaggcgaaaacgtccaggttttgcaggagatggttaaagaaggtaaaggggttgtaactgaatggggtcaacaagaaaagatattgagccacatggcgatttcttgcttcatcacgcattgtggatggaactcgacgatcgagacggtggtgactggtgttcccgtggtggcgtatccgacttggatagatcagccgcttgatgcgagactgcttgtggatgtgtttggaatcggagtaaggatgaggaatgacagtgtcgatggagagcttaaggtcgaagaagtagaaagatgcattgaggccgtgacggagggacccgctgccgtggatataagaaggagagcggcggagctaaagcgcgtggcgagattggcgttggcacctggtggatcttcgacacggaatttagacttgttcattagtgatatcacaatcgcc

SEQ ID NO: 169200 - DNA, 391 bp, Arabidopsis thaliana landsberg
ttcgatcgataatgtagggcagctcaattacggtgatagtttctgtatgtccaacgcgaagaatgtgggagatgatccattttctttcatactgaagtgggatactctcttcgacaatatatcacgtatagctatcactgaaaagaataaaaacttaaaagataccaacaaaccggcactatacggggcgggggagaagaggctcgggacaaagaaaaagatgtacgaaatggttcagtgtacagatgacttatctgttaaggcttgtgaggagtgtctggttgctaatgtcttgaagtttcaaaattgctggaaaagtggtaaacgcggtgcgagggttttgggtaggagctgtaactttagatatgagctttacccttttgttaatgcc

SEQ ID NO: 169201 - DNA, 2437 bp, Arabidopsis thaliana landsberg
gatttggagctgttgacgagctatctggaagaagcggacctgatcatgataaatcactcgacccagaggtcgagtaggagcttcaagatctcaagagatcactcgaccgccaggtcgagtagaggacatcaccacttcacctcaccactcgaccccgaggccgagtgccctcgtctccatcaccagaccgccactcgatcacttcactcgaccatgaggtcgagtgtcttcacctccatcatcagacaaccactcgacctactcactctacctagaggtcgagtatctccatcacaccactcgactgcatactcgatgacaagcttcagagccttcttcattctgcactcaaccagacactcgagcacaaggaagaaaagaagactccagctattcactcgacctctcactcgaccacctgggtcgagtacagttcttaacccgtccaaatacttcgtcgttttgagtattagggtttcgggatatttggctataagtagcatgtacttctcattttcgaaaaaagaagtttttacctagttttatttccgcagaccttgtgttctagactttttgtaatccggatttctctttatctattcagtattcagttttggttcttgattttcgtttactgttgttcattttgttatcacactactgttacactgttgttatcatgtcttcaacctgttcaacgtttatgctttctattatgatgtatgagtagtgaataggttcctgaggatgggttagagtagtgtagaattctcagtatgctaggtgattgagtattgattgatagatcccttctggattagttgttcttaatgcctattgctttctgatcaactggaatttgagcccagacatttccgcgcccaaaaggtattcgatgaaatgtctgaaccactaattccatagatttgtgaccctgtaccaaggtattggttgcagggagcgttttggctttaacttgttgattcgtaatgcttgttaggttagctctcgtcaatggtgattgagtctgggactaggttagcttgagagtctctgttgcggtggcacttagatttagttaatgaacttgttgtctagggttaatttattgagcatgtcaatcacctgtaaactgaggaaacgaaactactcaattatcccatccttaggaattctttatctaattgattttattgtttactctactactgtttactacatcctgtcatctgttgtttagtttctgcaaatctttactgttagtcgacctgatactcgaccacccagttgtctggcaacagactgtgcagtcgagtatccctgtttcatttcctgtctgttactcgacctgtcactcgacctcacccagagctctacaaagagctgtgttggtcgagtgttttactgtttctgtttgattttctgttttctgcatgttcacttaggactgctggaacacaccaaaacctgttatgcttggcttgacttagtgacttctgatcacatcttgattgttagcatcacacccatttggattgacaacctaaaatactacaatgacatgattggtgttttaggataattgactaaaaacctattatcaaagtgctaacgacgatctcttatttgagggagtaagcttaaggcaatttgagctatattaatatgcaacaactgagaaggaacttctagctgttgtattcgcatttgagaagttcagaagctatttggttggatccaaggtcactgtctataaagaccatgcaactttgaggcatatgtatgccaagaaggatactaaaccaagactgttgagatgcatacttctgttgcacgagtttgacatggatatagtagacaagaaggacattgaaaatggtgcagttgaccatctggcaaggatgagaattgaagaacctattcaaatggacgactcaatgccaaaagagcaactcatggttgtagaattcttcggtgggagctacagtgggaaagagttccaccaactgagtgctattgagggaagatctccatggtatgctgatcacgtcaattatttggcatgcgaagtagagtctcccaagttgaccagttatgaaaggaagaagtttttcagggacatacaccattactactgggatgagccttacctttacactctctgtaaagataagatttacaggagatgcgtctgagaagatgaagtagaaggtatcctgctacattgccacggctctgcatatggtgtccacttcgcgacattcaagacagtgtcaaagattctgcaagtagatttttggtaaccatcaatgtttaaagacgctcaggcagagaaagggcaacattagcagaagaaatgaaatgcctcagaacccaatcttggaaatggagatctttgatgtatggggaattgatttaagggtccattagcatcttc

SEQ ID NO: 169202 - DNA, 953 bp, Arabidopsis thaliana landsberg
  unsure (1)..(953): unsure at all n locations
atgggaagaagaaaagtagagatcaaacgaattgagagcaaaagctctcgacaagttactttctgtaaacgacgaaatggtctcatggagaaagctcgtcaactctcaattctttgtgaatcctccgtcgctcttatcatcatctttgccaccggaagactctacagcttctcctcaggtgataggtaacaccattacctattttatagtttctcttttgttaattaaatctttctcgaggaatatataaactacagaactagggtttttcttttactcttttgaatctttgaagctgattttcgtgttttgttcatccaagtaatgatgtataggtttacccaaatttaagattaaacaatgtggtgtccaaagtccagacatgttcttggtgtttgttttgtgttttatcatattctattgttttcatttgttgcaaggatttaattttcctatatcttttttttttcttgtgaaaatattatttcatgcacttggagagatttttctacacgtggtaatccgtactttaggtttgtcttgggatttcaagccatcttaattgtttgtgtgcttattctgctgtagaggtatagaagatcaatgtacattgtttacttttgagattaatttaggcccattatccatttttttactcaactcaaatgaaaccccggtagatttgttgagaaacttatcaagggtctattgactggaacagatgccacgcactctttttgntgcattccttggttaatttcaagtgtaaagaagatgatttatttactacttctctttttatttatttgttgcttaaggaaaagggttctagctagctgattttgatggtcaaatttagtgttttggataactataaagaagactcaaattaanactattcacacatgctgcattattcctttgatcggatatcggattaatttctctttttg

SEQ ID NO: 169203 - DNA, 263 bp, Arabidopsis thaliana landsberg
  unsure (1)..(263): unsure at all n locations
gctagaaaattcacatgttttgatgaactttttatttttcaggcaatgagattgtgtgttacgaaaatccaagtcccactgcaggaattcatcgtgtcgtgtttatattgtttcgacagcttggcaggcaaacagtgtatgcaccaggnnnnnnnnnnnnnnnnnnnnnnnnnnnnnnnnnngagatctacaatctcggccttcccgtggccgcagttttctacaattgtcagagggagagtggctgcggaggaagaagactt

SEQ ID NO: 169204 - DNA, 1310 bp, Arabidopsis thaliana landsberg
atggaaagcacaaaggacatggaatttgatcaagagcttgtagccgcggaagagcttgaagcagaggagcagcttgaacctgaggagcattttgaaacagaaaatgaacttataacggagaaagagtatgggaaagatgttatcttcatgatgaggacataaattcaaaccttactgaagttactcgggttccgacaatgtatcaaccgcctagaacaaggtccggttcaaagacgatgcgggaagaattcaacaaagctgtggagagtttgataacctatagagaaatggaaaacaccatcaatcaattcgataatctcactctttgtagtaacaagcttaaagaacaagaaacggagtcaacggagcaacaagttacggttacaactcaagaattaagtgttggcccaagcttttgtgatccaacaagtgaaaggcctctccttaagacaaaccaagcccatgttctctttgtcatcactccaagggacgccatttaaggaatgtccgtagtggacgcttccaaggtcgtgagcttcctctccaagctaaggtatgcgtttaaatcttctaattagctgtcaactttcctttcttttgcaggttgggttgaaattagtctaagtttattttgtcatttatttctcaattatttgttgcctttttcttctttttttcaagacccttgaaggtcaaggctgtcgatatattaataaggtccattgcagccattgtagttcacgtttttttgcttattatcaataaagagagaattttctttaaagtgtttacgagttcaccggtcttgtgcggcttccccttgatcgtgagctctttgacttatcacaatctcatcatcgattgtgtggcgtcctcaatccattccacccattagctgaaccaaagagaaccgtgtggtcctttgtaccggctccgccatctacgtagaaaatatcgtgtggtcatctacttggatcttatatcacttcacctcattggtttgaatacatgatcatcaaatgggcatgtgtctcatttgtactctttttcccttgtcaagttttgtcacaatgggtttttttgacaaggttcttaatgaggcaaatgattcacattcaaatcacccatttgatgatccaaaccatggtataacattcagaagttggcctaatggaatatatatgaagtccagccaattttatgaccatcacaagcccaagaagagcccaaaccaagtgggtgatttgctggtcaagaggagtgacgaaaatagcatttcaagagtcattttggagccaattagtggaaga

SEQ ID NO: 169205 - DNA, 1493 bp, Arabidopsis thaliana landsberg
atgagcagtagcggaaaccctagcagcagcagcggtggaggaggaggaccgtgcggcgcgtgcaagttcttgagaaggaagtgtgtcgctggctgcatcttcgctccttactttgactccgagcaaggagcggcgcacttcgcggcggttcacaaggtgttcggagcgagcaacgtctccaaactcctccaccatgttcccgagcataaacgaccagacgccgtcgtttcaatctgctttgaggctcaagctcgtctcagagaccctatctacggctgcgtctctcacatcgtctctcttcagcaacaggttaattattcttttcataacgtttaattatatgattagtactatttatgatgggaaattgcaacagttttaagttgatctactgtctctatatcgtcacgttgatcattttattttaatcattttctatgtaattatgtttttaacttcttttttttttgaagaaaattgcgttttcaaacttttttttttaaaatgagatttttcattttgacttaatgttcaattaaactacaaagttaagtcctttttcccattctatggatctcctctgattgtcatttctaggatcatatcccatcatgcaatgatgcaaattaccctttcttatgcatcgattttttttttaattcattccgatttgttcttttaaggatgaatattttttgtttttgccatgatcgaaaaccaactctacattaaaataagaggtttaaaaatctaaaattttacaactgggttcatggcctttgccttttgggcaaagttatgtctttatattaaatgtcgtgtctatgagtctatatttatgtgatatagaacaagcttatcttttgatttacacttttagtaatagtagtttgttaagaaaacatgcataaagcataattctatgtgtgtgtatttcacttcacatatagcatatatatgaaaacttctctctatttcctagtttaaatctctacagtcgtagttaattggctaggattaaggaagttaagcgatcatttagcacatatgtattgtgaagttttgttgaatgtttacaaggtttgtttccaagtgattgagatgacaaatcttcctctgttcgcaacaaccacgttgttttacacttattcccaagcatcatttttttttttggtttatcttttaattgcaatatacatatatagtacacacatacacgagatatatacaaacgtatgcaattgcattctataaattgatgttagtgaaggatatttccaatattacaagcaagcatttatttatatgttatgtacaatgtcttttgtgttataattagattgttttattcagcatatatttttctaaatcggtggtcttgattgatcaattactcctgtcgtgtttctttggcattattgaatcaacaacatttgctcgaattcggaaactcttccattattaaagattgctgaaaatatcattttatctag

SEQ ID NO: 169206 - DNA, 504 bp, Arabidopsis thaliana landsberg
  unsure (1)..(504): unsure at all n locations
aactctttattgtctgatgaaacatatagggcaagccaagagtatgtggaaggagcaacaaattttgttattgttgcatcaaggagattgggaaatccatctgaacttttttgtccctacattgattaccgtaatgtttgccatcaagaagtagacacagtattggaccatcttgtgatcaagggtatgattaagaaatacatgagagattcttgctggagtatgcatggtgaaagaaagtgatattactgataatggtccaacattagaatttgaggcttataatttgctaaggacggcttattgtaatggtgatgatacacagccatcaaacaactttggaggagaaaatttgnatggtgaaaatacagaagactctgagtttaagcagaaactgagagatgctgaaactccattgtctccgacgtgctctaattaaccaaggnttctgcataatgggcatataccacataaagtgaagagtggaatctcagaagctagttg

SEQ ID NO: 169207 - DNA, 834 bp, Arabidopsis thaliana landsberg; identical to SEQ ID NO: 27281
  unsure (1)..(834): unsure at all n locations

SEQ ID NO: 169208 - DNA, 499 bp, Arabidopsis thaliana landsberg
aaaaaatgcatgccaaatttaacaaaaaaaagttttctctctccactaaaaattgcttttgaagaatttactggttttcaaaagttttaagttgtgaataacctaataaaatgtatataacataacttaaaatttattcctctcttaaaagtgtgaaaattttaaaaacagtgaaaggaatgaataatttattggcttgaatattattgtctatgtatatacataacaattttaattttatttctgcattattacgttgactcctgaattttggcaaatattttttttcttaacattttgtgctcgtatattatatgcttgaatattgattgtcaggtgggatttaatagcaggaagagtcgtaggaagaaaggcaaatgagattgagagatactggattatgagaaactctgactatttttctcacaaacgacgacgtcttaataattctccctttttttctacttctcctcttaatctccaagaaaatctaaaattg

SEQ ID NO: 169209 - DNA, 1136 bp, Arabidopsis thaliana landsberg
atctctcacttccaaatctgcagttcctcaacccaaatggtaccgtcactcgtcgatcttgagtctctggaccacttttgtgccacaacctccggtgaagtttcattccactctggtcttcaactcaccgaagtcctgccgccacagtcaccaactcttcattgcagccacaaagacactagggttcctgttattgggcctcccccatttcagcccatttctctcttggcccattgtcataagtgacgacccacctcctttatctattaggcctaggttttggctaaactttcccctattctttctctgtcaacgtttgtgtcgattgatgaaaataattgttagatgtcaattaatccataatcaatcatcgttgctctgctggtacaaaccttctttgagaacctggttattagagtcacctagggattctactcttgtttctagatcctttgatcgaagccatttacaaaggttgagaaagtgcggcattatgatcccgtcaccaaggtgcggtgattaccgcagctttctcaccttccaatctccgtctcctttgttcactgagttctctcttgtgaaatctatcaatttcagtgataaactccttatgttcatgaaaaccttgaagcttaggtctggtaattttctacttgtgttaaaccaaagactaactttgtgtgacattcttaatctccatagtcaaggacattatgcgagagagaatccacctgttttgttgcagtttcacacatatctcttgcgaatcctgattattctttcagcgatttttttgagtttgactacagacccttactccttctcaacgtcattatgtcttgtgacaatgaccaatcttccacttcccggatcgatcgtggttgtgtctccgatttagcttcttctcgcatgtggcattgtgttctacaactcttgtctccgagctagcatggttttatcatcggactattgtacttctatctttattgtttttatctttgttgtactaaactctgagaatgatattctcctaagccttgtactaagtttgagtgattaaatgaaaacaaagtttattgacaaaaaaaaaaaagacaattccaactcaaaattttcataaattattctagtttttc

SEQ ID NO: 169210 - DNA, 695 bp, Arabidopsis thaliana landsberg
aacgcgttgaatctcggtaagcatgcaagtgactcgttggagaagttggttggcctacggatggtgacaagaacgcaaacgttccaaacgcggaacggttttattccggttagcttccgcggttggcgaacaacgttggaactcctatgcgtaaaggttacattgaagtttatcttttcggatttatcgatgaagatgcgaaaagtgtagcgccagggaacttcgaacgtcattgggggatatttaaatttgatggccaaccgaaattcccggtagattttcgtggacaaggtcagaaaaagttcttaacgggagctcaaaacgttcagtactttctgaaccagtggtgtatgtttaatcctaatggtcgtggtaatatgagtaggctcggagataatataaactacgcgtgttcgcattcggactgtaccgctttaggttatggatcatcttgtggcaatcttgatgcgaatggaaacgcatcttacgcgtttaatatgtatttccaagtgcaaaatcaggaagctcaggcgtgcgattttgaagggcttgcaacgattactactcaaaatatatctcaaggacaatgtaattttccaattcagattggagagccatcttctggtcattatgattatagctatggttcgatggttaggttgtgtttggtgatgagtggcttggtctttcttctc

SEQ ID NO: 169211 - DNA, 406 bp, Arabidopsis thaliana landsberg
aatcgccggcctcaacatgatggaggcgatccggctggaactgcccggcggcgcgaagaccagccgggccgcacgccacggcggcgaggaatggctgttggccggtgccgggcgactgcgggtggagatcgggctggagaccttcgacctcgacgccggcgacgctgtgcacttcgacgcccagaccccgcaccggctgcacaacccaggcgacgccacggcgatcgtctacatcgtcacgtccggctcgccgaccagagtcgtcagcgcgcaccgctgacagaacccaataagcctggctcaacacaccgcataacctgacagcgtggaaaactcaccgatccggcacatattgttcgacgctgacggagtcttgcagcactcgccgggcgccggggaggccgcg

SEQ ID NO: 169212 - DNA, 583 bp, Arabidopsis thaliana landsberg
cctgatcaccgtctacaaagacctgtcggcccgctgcgattatccgctgcacctgggattgaccgaggccggcatgggaagcaaaggggtcgtcgcttccacggcgggcctggccgtgctgctgcagcagggtatcggcgacaccatccgtatttcgcttacccccgaaccgggcggcgatcgggcgcgcgaagtcatcgtcgcccaggaaatcctgcaaagcctggatctgcgcgcgttcactcccatggtcgtggcgtgtccgggctgcgggcgcaccagcagcacggtgttccaggaactcgcggccagcatccaggggtatctgcgcgatcagatgcccgtgtggaagtcccgctaccccggggtcgagaccatgaacgtggccgtcatgggctgcgtggtcaacggaccgggcgaaagccgccatgccgatatcggcatcagcctgccgggcacgggggaagtgccttcggctccggtctacgtcgatggccagcgcatcgttacgctcaagggcgattcgatagcggaagaattccaggccatagtccagaactacgtcgaaaaccgctatggcgca

SEQ ID NO: 169213 - DNA, 1121 bp, Arabidopsis thaliana landsberg
cgacgggtttttttacacgtagatggtcaggcacgatctacggatttaacttcatcgggttttgtcttaaagccaaagtttcaagaatccaccagaagagaaactgtaacctattagtgtgggattacgtggtttcgctattcgatctagtgataagaagaatccaaatgatgattggatggatcaagaatgttaatagatcaataagaagcgtgctccggcaatggtctaagaagaatccgatgattcgttgcacagtttacccgttatacctcgtgttctttgccggtattcctgaagttttcagagttctttggaaatacattgatcgaatctttagtgttacatcttatctagacgggattaggttcatttcgagagagcctttgacgaagaatcaatgggagtttatattcaatgaggtcaaggataagtcggggtttgcggaaacgcctgaagttgcaaagaaagtgtcttgggcgagaggagaatgggctttacgagattcgaaattgatggaagttgatacgttgatgcgttacatagagaaagttgattatgatcaaagtcttctcctttggcatattgctactgagctctgttttcaaaaagaagaaggtgggaagatggagaagctgagcagagaaggttatgatgaccgagaattcagcaagattatatcggactacatgatgtatttgttgataatgcgaccgaagctaatgtcggaagtggcgggaatcgggactatacggtttagagatactaaagctgaagctgagaggtttttcaaaggacggcaaatcaaggacttgagagatatgaaaagagcgagtgagacggttttattggttagtaacgatattgagccgatacttgtgaagggagatcgaagcaagtcggttcttttcgatgcgagtatgttggcgaaagagcttcagaatttgaaagagagtagtaatgaagatgggaaatggagagtgttgagcaaagtgtgggttgagttgttatgttacgcagcaagtcattgtaaagcgacggagcatgtggcgcaacttagcagaggtggtgagctacttaactttgtttggttgttgatggctcacttcggattaggagat

SEQ ID NO: 169214 - DNA, 424 bp, Arabidopsis thaliana landsberg
  unsure (1)..(424): unsure at all n locations
ttttagccggggcaaaattaaagggtgaccagtcactgactttgcgcctcatgggcgatggcccggttggggcatccgtggttacggacaagtaagatttgactgttaaggggaatggccaaaataaccacgtgtccttgccggccagataagtcggtcgcatcgacgttaagagggctgtcggcaagggctggtggcaggtatccaagtacgtgggcttaaagcagcctnnnnnnnnnnnnnnnnnnnnnntgtccggggaaatagctgaagacttgacgtactacctggccaagtcagtacagatcccgtcagctgttggcctgtcggtttttgtcaagccgaaaaacaccatcgggaccgcgggtggctttttgctccaggcgctgccaggggccagcgaagaactccgcaggcatgcaag

SEQ ID NO: 169215 - DNA, 273 bp, Arabidopsis thaliana landsberg
atgttagcaccgggggtgagtgttctgatcccggcggaggagataagtatctccgctggtgatgttatctccttgtcggtgcacaatctaatagcttctgtttctagctaccgtccatggtggtcagaatttctagcattcggttccatcgaccgtccaagctctttctccccctctgtttcgcgcgtaaacttaaccttcaccactttgcggttaactacatacttttaaccgctgcttccatcacactcttcttgatcggtgatccgatgg

SEQ ID NO: 169216 - DNA, 2214 bp, Arabidopsis thaliana landsberg
  unsure (1)..(2214): unsure at all n locations
gatgagcatccaatcttttacatcagcaagtctttctatgatgcagaaaccagatatcctatgatggagaagttagctctaaccattgtaacagccgctcagaaattaaggccgtacttccactctcatccaatcgtcgtcttgacatcattaacgcttcgcaccatccttcacagtccaacgcagttcggacgggtggaaaaatgggctgtcgagctgagcaaattcgatctagaattctgagcccgaacaagcttaaagtctcaagttctagcagacttccttatcgagatatcttaggctacttctgaacaggataatacggatcaaccgtggatccttcacgtcgatggggcttcgtcgaaacatggctccggagttagtatttgtttaaattctcccactagagaagtgctggaacaatcctttctgctcgctttcaacgcatctaacaacgaagcagagtatgaatcacttttggccggacttcgtctcgcaatcggagtaggagtgcgaaatttgcaagctcattgcgattcgcagctcgttgcaaatcaatattctggagattatgacgcaaaagataaccgtatggaggcatacttagacttagtacgcgatttgtcaagtaagttcgataagttcgagttgtctagggttccttgagctgaaaaatcggctgccgatccactggccgccctggcaacgacttccgaagtaaaggttgcgcggataatccctgtcaaaacaataagccagccaagcatacatcacagtacagtaagtttcgtcacaactcaggcaatgcgcagacggctcgaagctcggttggacgatcccgaacctgaacatctcaacgtaaataaggacgatctcgaggaaattcagcctagtgctatcgaaacaaatcaagaaaatgttaatagtcctaatgagcccaatctagatcagcacctcatgactggggggcagactagagagacccaattcgggattatatcctcacggggtgctttctgaagataagtgggcagctcagaagttgaaagccactagtgcccgcttctgcatagcgaatgacattctttacaacngggtcatctcggcaccggatgttgtctgtgtctacggagaacaatccctgaattataatgaaagaaatccnncgacggcacatgtggaaatcactccagaggtcgctctttggccttcaaagtcaagaagtacatgtattattggccaataatggtagcagactgtgaggcatacgcgcgtaagtatgagcagtgtcaaaagcatgcacctttcatcttgcagcccgcagaacttcttacttcggtgtcagcaccttaccctttcatgaagtggtcaatggacatcatcggacctctccatgtttctattcggagagtacgtttcctactcgtattaacaaactatttctcgaaaggggtcgaggctcccgcttactccaatgtgactcaagtccaagttcgtaagttcatttggaaggaaataatctgtagacatggtttgccctacgagattgaaaccgataacaggcctcagttcattagacagcaattcgaagctttctgtgcagagtggcaaattcgcctaagccagtctacacctcgctatccgcaaggaaatggtcaggctgaagccatgaacaaaacaatcatctcgaaccttaagaaaaagttgaacgagtataaaggtgcctggtttggagagctacaaaatgttctttgggcaattcgtacaactccgaggagagctaccggcgagactcctttttccttactcaacggaatggaggcagtcatccctgctgaaataaaaatcccaagtgcgaggcgaatcagaaatcctcagaacgaggctgcaaacaacgagatgacggttgatgtcattgacaccattgatgagagccgtaatcaagccttaatttgcatgtagaactatcacaatgccgcagctcgatattataattcaaacgtttggaaccgatctttcgaagttaggaccctagtcctacgtcggatccaacagataacggaagaaaaaggagctggcaaactatgaatcatttgggaaggcccttacagaatcacacacgtcgtccgcaatggagtctatcaccttatcaacatggagggcaaaacagtccgcagggtgtggaattctattcaccttaaatgttttacattt

SEQ ID NO: 169217 - DNA, 538 bp, Arabidopsis thaliana landsberg
agtccaaacccaacttatccctaatcttcggcgtaagcaaacctgaaaaacctcaagaatctgaacaattttcacaaacattttgtggcttttgtcttgaaaattagagctttttcaacaggtaattgcaccattcctctcgttcctcataccgagatatcagttaagtgctgcgaaaaagaaaataatgccggtttctcgtgacccggaagctctattggctaaatactctgacccgctagtctacactggatttattcgagcaagaaccggtaacgagatccttagacttggtgctcatttactgcagaatctgaacagaatcaaggttccgtttcttgtgatgcacggcacagctgatacagttactgatcctaaaggtactcagaagctatacaatgaggcttcctcatccgataagtcgatcaagctgtacgacgggttgttacacgatctgctctttgaaccagaacgggaaactatagctggagtcatattggattggctaaaccggcgggtttaaattcctcaaaccaaa

SEQ ID NO: 169218 - DNA, 594 bp, Arabidopsis thaliana landsberg
  unsure (1)..(594): unsure at all n locations
gggcaaagcggagctggcccttttgcggcggggcctgggtcgtggccgcaccggcggtggtccgcccagacgggctgcccagggcaccgctgttcacggaccggatccgtgcggtgcgccccctgcgggacgccgccaccgtgcagcggggccctgcgcgcggcccaagcccaccacggtggtgatctcggacggcggcttcatcggctgcgagctggcctgccccgcacgcgagcgcggtatggacgtcgccctggggggcgcagcgccccgctgctgcgccgggttctggacgagaaggtcgggtcggtcgtcggcggcatccagcgcaggtccggcgtcggcgtccggctcggcacccggatctccgcctggcagggacctcggcgacctgctgcggctgcgcctgtacgacggcgagctggctggactgcgacttcgtcgtcctgggcctgggcagcgagccgcgcaccgaatggctgcgcggcaacggactccccgtctccggcggggtgctgtgcgccccggcctaaaaaacgaagaacgagtgggcccgtacgatnccgcacgtcgtccccgcgggcggggtcccgg

SEQ ID NO: 169219 - DNA, 1342 bp, Arabidopsis thaliana landsberg
tgctctatctaggagaccgcagatgaattctttcactcagttaacactcacagctccccacacgattgatctagaagcgttgaaggaggaagttaaccaggacaaggcgttgagtgatattattcaggcatgtgtgcagggaacacagcaggatatggattacacagtggctgcaggcctggtttacagaaaagggtgcttggtgatccctaatggatctcccttcattccaaaactgcttgaaaagtttcacacatgtcctataggaggtcatgaaggcgctctaaaaacctttaaaagattaacaagcgaggtttattggaaagggctgcgaaaagatgtggtaaaatacatatccgggtgcagtatttgccaagagaacaaatattccacactatctccagcagggttactctctcctctgccaatcccacaagaaatttggagtgatgtgagcttggattttgtggaagggcttccacactctagagggttcaactgcatactcgtggtggtggacagacttagtaaatacaggcatttcattgctctaaaacacccttttacagctaagtctgtggctgatgcttttattcgtgagatagtgaagctacacgggtttccaaagacaatggtttcggaccgggataaggtctttctgagtggattttgggcagagcttttcaaatcacaaggtacggagttgcgcaaaagcaccgcgtaccacccccagacagatggccaaacagaagtcgtgaataggtgtttggagtcgtttttaaggtgctttgcaggtcgccgaccgtcttcatggctccaatggcttccatgggccgaatactggtacaacacctcttatcacactgccactaagatgactccatttaaagctgtttatggcagagaacccccagccttgttaaggtatggagatacaccttctgctaatgcaaacgttgatgaattgctcaaggacagagatgggatactaatagagctcagggagaacttggaagtggctcagaatcagatgaaaaagagtgcagacaagcacaggcgagatgttgaattcgcagtggatgaatgggtctatttgaagctgagaccatatcgacagagctccgtggcctacagaaagaacgagaagttatctcagcgttacttcggaccttatcagatcgtgagtcgcattggacgggtagcttacaaacttaacctgccggctcatagttctattcacccggtttttcacgtttctcagctgaaaagagcagttccaccctccttcaaacctcaagagcttccacagatattgagtccgaacttgaaatgggctacagaa

SEQ ID NO: 169220 - DNA, 1868 bp, Arabidopsis thaliana landsberg
gtatctaaaagttgcaagtaattgtttaaagacacttaacctttttttcctatagaccttgttgggatcgagttacctatcacggaacttgctaccgagggagctaacggagcaacagataatcccttttctctattaccagcatacctgcagggcctaggagagtcgaaccctggatcccttattgaaattaaaacggtggtcaatggaaagggtgtctctatgtttaaatacctattcgtagcatttgcagcatccttggaaggatttgcaagcatcaggcgagtcattgtaatcgacaggacccaactaaaagggaaatacggaggctgcctgctcatcggaagctgtgaagatgcaaattttcaagttttcccgctagcttttccggtagtcgatagtgaaaacgatgatgcttgggagtggtttttttgggagctaagcagagccgtaccggacacaacaaatctttcgtttgtctcagaccgtcattcctcgatatacaaaggcctatgaagggtaagctttaaactcgttaggttagagtactttactaatataagtaaatttgaattacctgacatgcagtaaggattaacgacatgttatgtggtaataaaggatgtgccaaactaaagtttcgtttagtgaaaggtgtatctgaaggaaattgtttcaacattcacgaaaaaaatactggggttgcacgtttccagagccgctacagcataaaggcttacagattttaattcgcactccaaatgaggctataatgcttgatccgacttgtgcacgctacctggacttagttggcttttgtcaatggaaaagggcatactttgaaggggatcgctacaacgttatgataaccaatgtagcggagtcattgaacacggtgttaaaggaagcgtgtgaactcccgatcatttcccttctagagttcattcgtacaatcctaatgacctggtttgcggagaggcgcaaagcaacgagaaatgaaacttcagcaatgccaccgaatatgagagaagttatgcataagaacttcgaaaagtctgggagttttttctgttaaacgcattgaccggtttgactatgacgttcaaggagagggatcgggtgtatttcatgttaatgttctggaatgcacgtgctcttgtagagaatttaatttgctacattatccttgcccgcacgctttaactgcagtagtttctgaaggtgtacctatcctagggttaatggcgctagagtactctgtggagagttggcgaatgtcgtacgtagggacaataaaacctatgcctgatgtaggagatgtgtttcttttgcttgaaccaattgcttctctacagctaaacccaccgtcaacttgcaggccaccgggtaggccaagtagcaacatgcccgtatgaaggtagatacccctacttcaatttttatatgaatattcgatgcaagttatgggttcttaatattcttttattgtttggtcagcggtgatgggtgtctcgcattgtaaaaatgggttataggttgtggtggttaatcaaggagaagtccatcaaggatggagttaaagccgaatggaagcctacttgatcttttgtatatagtagcatacaaacctatctggaagggtgacgcctaaagatatggatttaatgcactcaagtagataatgttccaagttgcggtgggttttgtcgttttcaaacgttttgtgtagataaagtttcaattccccctttgtatccacaaccctcgatatttagtaacaacgcgtgtgtttaattaattttgcatgtgttgcctaatgaaaacacacggttatgcgcacatgctaatttcccacctggttcctcagc

SEQ ID NO: 169221 - DNA, 441 bp, Arabidopsis thaliana landsberg
  unsure (1)..(441): unsure at all n locations
gaggcgattggaattatcggtgttggcctcatggggcatggcatcgcccgcaacattcatgcgcacggacacccgctcgtgtttcttgatcaccccggtaaccaaccgacagatgacctcatcaaaaagggggcgacgaagctgcatagcgcggcagaaatcgcgcgtgcagtcgatacggtagtgctgtgcgttaccggcacaccgcaggtcgaagccgtgttgtacggcgagacgggtgtgctgtcgggtttgaagaagggcggttcggtggtggactgctcgaccgcgatgcccgcgtcgaccnnnnnnnnnnnnnnnnnnnnnnnnnnnnnnnnnnnnnnnnnnnnnnnnnnnnnnatgacgcgtacgcctcgcgaagccgagcttggcaagctcaatctcatcattggcggcgagcgcgcggatttcgaacgcctg

SEQ ID NO: 169222 - DNA, 581 bp, Arabidopsis thaliana landsberg
  unsure (1)..(581): unsure at all n locations
aatatccttttctcccctaaaggaatttttgagcggaatgatgtgcctgtgagggaactggagggattaccgcagcaaaaaggttttctctctgctccattcaatacggatatcatcattaacgagaacggcctgaaatttcatgttgacctggagaacgggcagaaaacaggatatttcctcgaccagcaggataaccgcagggccatcaggaacatagtgaaggatgcggaagtgctcggggcatttacctatacaggcacttttgaaatacatgctgcgcattacggtgcaaaatcagtgctgggcctggatatttctgaaaatgccgttgnnnnnnnnnnnnnnnnnnnnnnnnnnnncggtcttgaccatatctgccgtttcgaggcggtgaatgcttttgatgnnnnnnnnnnnnnnnnnnnnnnnnnnnnnnnnnnnnnnnnnnnnnnnnnnnnnnnncctgcttttacgaagagcagggaaaatatccagaaagcgatcacaggttataaaaagatcaacctgcgcgggatgaagctggtgaggaatggcgggttcctcgtaacctcgagctg

SEQ ID NO: 169223 - DNA, 789 bp, Arabidopsis thaliana landsberg
tacttattcaatcctcctttctcgtctattccgatagagaagctagtgaagagtgagaagcttaaacatggggttcgattcgccggaagtcttgttaaagccggagttgccatcgccgttaagggtcgccaccataataaggtacgtacaatgccattatacataaaacaaattaaatgttcccaaaaatttctaatattttgaaaaacttgaaatcaagcaaaataaaacttctaaaacatagtaggaaaaaaaaactgaatctatatatgtttagtacaaaacatcagttacaattagaaaactagtgaaaggtagaatataaatttcgaaaggagtgtatgactaagtttctatgggaaattgcaatggctctactctgaagttattggttcgaaccttacaagaaattgaatttaaatttatttacagggtcaagaagacgattcgttcatgaagttagcatcatggataccatatttgtatttgaatccgttagatacaatatgcttagaatacattggttacttcaagcacagaatttaaatgtttgagatcggagccggtaaaatggaaagaattgctacgaggaactcacttaccagtctgttgtcaggaggaggaggaggaggttcatcttcagattcttcttcagagcctcttcatcttttaccatcggcatatatgacgataaacgctagcaaatcgccgaattttaagagagctcatgggattcatcaatggtgggatcccatgtttaatggtgaatatgttttgcatcagtttaat

SEQ ID NO: 169224 - DNA, 2431 bp, Arabidopsis thaliana landsberg
acttaatcgtcacaattatctcttaagcagaggctctcggatttcttcatgcccttcaagtgacttggtcccgaggactacattatgtacttatgtgtggttggagagcgataatgcagagctagtaaattcgatcaatacgcagagtgatcataataagatcatcactcttctttatgatattcggtattggatggcgaagcttccgttctcttccttagcacatgttaattgggaaagaaatgcagctgcggacatcttatctaaaaaggctcagttaattaattctctgtaccaccattatggttagaaagatatttgtatctccctttacaagtttataagaagcataatggaaatatgggtaggaaagtccgtcgggtcattaaatctagactagatagagctatggcgaatgaggaatgacatactattttttcccacaccattgtggagtatctaaaattatggggttcagatcacagaccctttttagcatcaatccaagatagcccgcaacgtttctttaaaccttttatttttgataaaagatggcttgataagcctgggtttaaagaatctgttcatggagggtgggatgttccttctaatgaaggagttctgttttttcataaagttaaaaattgtagaaaatcaatttctatttggaaaaaatctaattcttcaaattcggagaagaaaatcttggaactccagaatcagattgatcttgctgaagaagacgagtgtatctccgctgaagacttactagctttgaaatggagactttgcgacgcgtttagagaagaggagattttctggcatttaaaaagtcgggaaatttggtttaaagagggtgacaaaaatacaaatttttttcatgcgataactaagcaaaaacgagcgaaaaacaagattattggcttattgaatcaagacggtctgtggattgataacgaggtgggaattgaaaatctagaagtggattatttcaaggatttagtcaccacctcaaatccacaagatttccattccgccattcgggatgtgccagtgataatttcagaagaaataaacaaaaatctcacaaaagatatttccccggcagaagtcaaacgcgcccttttttctctcaacccagataaagctccaggtccagatggaatgacaagttttttctatcaaaagttttgggatttgacgggccctgatttagttaaaatagttcaaaactttctttcttcaggtgcttttgacaagcagttgaatgagacaaacatttgcttgatccctaaggtagaacgacctaggaaaatggtggagtttcgccctattagtctgtgtaatgtgagctacaaagttatctcaaaagttcttagcttccggctaaagaagctacttccggctaaagaagctacttgcggacttgatatccgagacgcaatctgcctttgtggcaggtcgcctaattacagataatattctaattgcacaagaaaactttcatgctctccggaataacccggcttgcagaaaaaagtttatggctattaagacggatatgagcaaagcttatgaccgggttgaatggtcttttcttcaagcgcttatgttgaaaatgggtttttcccaaaaatgggttgacttaataaccttttgtatctcttcggtcacttataaagtccttgtaaatggttccccgagaggctttattaaaccatcaagaggtatccgtcaaggagacccaatctcccctttcctcttcatcttgtgcacagaggctttggtagcaagcctcaaagatgcggagtggcacggccggattcaaggcctacaaatctctcgtgcgagcccttcaacctctcacctattgttcgcggatgacagtcttttcttctgtagagcggatcctgtccaagggcaggaaattattaaaattcttcggacatacggggaggcctcgggtcagcagttaaactctgctaagtcttccattttgtttggacatgatgtggaaaatactattcgtaacaacattaaagtagctattgggatccataaggatggcggtatgggttcatatctgggcttaccagagaagatccatggttcaaaagttcaagtcttctcttttgtaagagatcgtcttcaaaaacgcttgaatacttggacggctaaattcttgtcaaaaggcgacaaagaagtacttattaagtctgtagctcaggcccttccgacatacgtcatgtcgtgcttccttctcccaaaagcaattcgctccaagctaagtagtgccattgccaatgtttggtggaaaaccaatgaaaacagtaacggtattcattggatagcttgggataccctttgtaaaccccattcggagggggggataggctttagaacacttgaagagtttaacttagctctgtta

SEQ ID NO: 169225 - DNA, 1082 bp, Arabidopsis thaliana landsberg
gtaatggaggtatgttgttaaaacaacagttagttagaaaagtatgcaatgtagagatgtcaagaatattcagggcacatgagttggagaaagctactgataacttcaacaagaatagggttcttgggcaaggaggtcaaggtacagtgtataagggaatgctcgttgatggtagaatcgtcgcagtaaaaaggtcgaaagctgtggatgaagatagggtagaagagttcatcaatgaagttgttgttcttgcgcagatcaatcatagaaatattgttaaacttttggggtgttgtcttgaaacggaagttccagtcttagtttatgagtttgttccaaatggagacttatgcaagcgtcttcatgatgaatctgatgattacacaatgacatgggaggtgcgtcttcacattgctatagagattgcaggagcactttcttatttgcattctgctgcatctttccccatatatcatagagatatcaagactactaatatactcttagatgagagaaaccgagctaaggtgtcggatttcggaacttcaagatcagtaactatagatcaaactcacttgacaactcaagttgcaggcacttttggatatgtggatccagagtactttcaatcaagcaagtttacggaaaaaagtgatgtgtacagttttggagttgtcctcgtggagctcattaccggaaaaaacccgtcctcccgtgtcgagtctgaagaaaacaggggatttgcagctcattttgttgcagccgtgaaagagaacagatttcttgacatagttgatgaacggatcaaagatgaatgcaacctggaccaagtgatggcagtggcaaaactcgctaaaagatgtttaaaccgaaaagggaagaagaggccaaacatgagagaagtttcagttgagctggagaggattcgttcatcatcttataagtcagagattcataatgatgatgatgatgatgatgatgatgaggatgatcaagccatggaactcaacattgaagagacttgggatgttggtatgactgctccagcctctatgtttaataacggatcccctgcgtctgat

SEQ ID NO: 169226 - DNA, 2399 bp, Arabidopsis thaliana landsberg
  unsure (1)..(2399): unsure at all n locations
tctccgtcaacgatggccttaaacgtgatcaagatcgcccgagtgagccctgcaactaactcagtcgaaccactcgttcttccactcactttctttgatttactttggctaaaactttatcccacagagagagtcaccttctacaaactcaccgagtcatctcgtgactccttcttctcctcgatccaacccaagctcgaacaatccctctccctcttcctttcacactttctcccactatccggttacctcaaatggaacccccaagatcctaaaccacacatagtcatctgccccaaagacactgtttctctcacagtggtcgagtctgacgctgacttctcttatatctctagcaaagagctttgtctggagactgagttacgtcctcttgtccccgagttacaagtttcctctgactcagcatcgattctgtctatacaaatcacttttttcccaaaccaaggcttctccattggaaccatagttcaccatgtcgtcatggacggcaaaaccccgtccaagttttacaaagcttgggctcatatatgtaaacacgggaacataccacaagattttgatctacctatggttttagatcgtacgatcatcaatgttccggccagactcgaaccaaaactctttcaactcttgccgtatctctcaaaggagaaagtcaatgcaagaaatttaatgctgcctcccgctaaagagaacatcaacgtggtttgggtcacgctcgagttgagtgaagcgaacatcaagaaacttaaagaacaagccaagaacgagtcaacttggtccgatcttcttctatcaacgtttgtagtcacgtacaaaaaatcatctggccagtcccttttttgcaaagaggaagccaaaaaatccttgtaaaaaacagaaataatttttttttttttttaattcgaaatatatggatattactagtatatccccatccgaacctattaattaccagaaaaaccatggttcgtttccgaaccaaaccatccgaaccacctttactctttatttgaaaatcaaattaaaaaaactctaatatttacagggatttcccaattcgaatttcattcttttcctcattacaaccgttttcgatttttcttcttcttctccttagtaaccgctgaaattaaccgcaacattctctatttctttaaattcaatcgatcgttcttcttcctttcaccagtatttccgttctatttccgattcgaaatcagtcatgccgcctaagacgcgtggaggaggtcaagggaaaagaaaggagatagaagcgccggcgcaggcgaagacagaaaaagttaaggcgccggcagagaaagtgaaggagaaggtgccggcgaagacgactgcgacggcacaaacgactgcgacggcgatggcaaccaatgcggctccaacgacgacggctccaacgacggagagcccgatgcttgatgattctacgttttatgatgctctgaatcatattcctgctgaagaaattcaagagaatatgcaaactgatgaggtggaagatgaaaatgaaaaagaagaaggaagtgaagaagaagaatcagggagtagtagccaaaccttgggctccgattccgattcagaggagacggagacaaacaaagaagtcgcgtgtgctaatcccgtggaagaggcggagagacaagatgacgcctagccgttatcgaggaggaggaggagaggagctccgcgagcgacgaggacgtcaatgtggaaaagtctgtggaggatgagggagacgaggacgagagagacgaggacgtgatagtccaagtggaaaaacccgtggaggagaggaccatannnnnnnnnnnnnnnnnngtggtaagtattccatttcgtaataccgatctaattgggtaataatgcaattgtgaaatgtggacagtactagtaacattgggaaatgctatgttgatatttaggacgagagagacgaggacgtgatagtccaagtggaaaaacccgtggaggagaggaccatagccgaggacatcgcaaatgtggtaagtattccatttcgtaataccaatctaattgggtaataatgcaattgtgaaatgtggacagtactagtaacattggaaaatgctatgttgatatttaggtaatattggcggatgtgggtaataccttagagtaatactacaattgtgatttatcgatagttagtactagtaactttgagaaatactacatagtaaaataggagtatctgtgtaatactggtaattacggggaatacttctgagaaatacagagtaatactgtggcagtactatttacaattgactaatatatgaatagtaggatttgtgtaatactggtaatttcggggaatactttttggaaatacagtg

SEQ ID NO: 169227 - DNA, 616 bp, Arabidopsis thaliana landsberg
gctcagtgattgctgctatattcagagcgtgtttcagattccaggcttttcgagatgagaataagaacaaagcagctggctccattgtttggaacattttcggtttttcttttaaggatttctcagtttctatcgttggatattgtatgtttttttttgactttcaaattcaagaaacagataggaattacattttatgagtttgaatctgatttaagttcaacggttgaagtttactcattcaaatctgattcttggaagacggctgttgataagacctctaatggtttatattgataaccatagtcgagtgtgtgtttccaaggacctccttattggatagcttacaataagtcaaatcataaacccgtttcagtacagagttttgatttctcaaaagagagatttgagcccttggttcttcctcctttttatctttcgagtgagttatcttatttgatgaataatctttctttagggattttcagaagagatcaactctctttgttacttgaatgcggcttaacaagtaacatacacttatgggtgaagaagaagaagaagaagctgcattggagctggctggtggcagttgctataacagatcggcttccga

SEQ ID NO: 169228 - DNA, 614 bp, Arabidopsis thaliana landsberg; identical to SEQ ID NO: 79833

SEQ ID NO: 169229 - DNA, 1079 bp, Arabidopsis thaliana landsberg
atcagttggatcaggaaattgcaagaatgttttacacaggaggactaccatttaatcttgcaggaaatccgcattatcaaaggtcctttcagtttgctactgacaacaaaattgatgattatgtgcttcctggttataataagctgcgaacaaatttgttacacaaagagagagatcatgttgagcagttactagaaccagttaagttatcatggaaagaaaaaggggtgagtattgtgtcagatggttggagtgatcctacgagaaaacctttgatcaatttcattgctacttctgaaaatggtcctttgtttctcaaggccgtgaattgttttggtgaagtgaaagataaattcttcatttctgatttgatgaaagatgttttgaatgaagtgggtcatcaaaacgttgcgcaaatcatcactgttaatgcaacaaattgtaaggcggccggagagattattgagtgcacgtatcctcatatctattggactccatgtgttttgcatacccataatcttgttttaaagaatatttgtgcagcaaagaatgtggaaggggatgcaattggataacagaagttcatgaagatgcgctcgcaataaaatatttcatcatgaaccaaaacatgagactgtcaattttcagtaagttctctcctctcaagttgctttcggtcctcgatactcgttttgcttccattattgtgatgcttaagagattaaagcttatcaaaagaggccttcaagctatgatcataagtgaggagtggtcgacttataaagagggtagtggggggaaagcaatgttggttaaagaggagattgtgaatgatgaatggtgggagaaagtgttttatataattgatttcacaagacccatatatgacatgtttagattctgtgacactgacaggggatgtcttcacttgatctatgagatgtgggatttcatgatcgagaaagtgatgttcgagatcttcaagaaatacagacgtacaatgactgtacatagtgacttctatgatgtgagctatgacaaccttagcggctcggtggacgaagattaatactccttta

SEQ ID NO: 169230 - DNA, 385 bp, Arabidopsis thaliana landsberg
cggataatggtaagtatctgacaatcagaagcacaaaaatatactatgaggagtacggaaagggtgttccgctgctgttgctgcaccagggtttgggatccattgaaagcctgggcgatattattccggcattgtcaaagcatttccgggttatagcgtacgacgcgcccgggcacggacgttcggagcaagccgatagtctaagcggtgcattgctggccgattatggctccgcgttcatcgaccagctcaagctggacagcgtttacgtcatgggttggagcatgggcggcaatacagcgctcttgcttgctgcggacaggcccgacaaagtgaaaaaagtaataagcggcgcctccaattcgaagtcacagggttgacgcag

SEQ ID NO: 169231 - DNA, 1305 bp, Arabidopsis thaliana landsberg
  unsure (1)..(1305): unsure at all n locations
cgttcgtcacttctaagcgccatgagccgaagaagtttagcaagatccccttacgctatcctcgcatttccaaacacacttctttactttctgtcctcactaggcaaaccaccggttttgacggtgaagattattgtatgtggattgataaaatgaggcaccatataacctcactccacgctagtatttgcgacattgttgaatttgttacgcaggaaccatccgtgggggatgaaggctatgactcggacgaggtagcccaaatccggcacttcaactcccaagccactactatactcctcgcctctctaagtcgagagaagtataataaggtgcaagggttgaaaagtgccaaagaaatttgggacgtactcaagaccgcgcacaaaggagacgaggtgactaagatcaccaagagggaaacgatcgagggggagttcggtcgattcatgcttcaccaaggggaggagcacaagccatgtacaaccggctcaagaccttggtgaaccaagtgcgcaacctcgggagcgtaaagtggatgaccatgaaatggttaaggttattctaagatctcttattttccttaaccctactcaagtccaattaatccgtggtaatcctagatatactaaaatgacccccgaggaagttatcgggaattttgtaagttttgagtgcatgatcgaaggctcgaggaagatcaacgagcttgatgatgccaccacatccgaagctcaacccgttgcatttaaggcaacagaggagaagaaggaggagtctacaccaagtcgacaaccaatagacgcctccaagctcgacaatgaggaaatgacgctcgtcatcaangagttccgccaaatcctcaagcaaaggaaggggaaggattacaaatcccgctccaagaaggtttgctacaaatgtggtaagcccggtcattttattgctaaatgtcctatatctagtgacagtgaccgaggtgacgacaagaaggggagacgaaaagaaaagaagaggtattacaagaagaagggcgcgatgcccatatttgtcgcgagtgggactccgacgagagctcaagcgactcctccgacgacgaggacgccgccaacatcgccgtcaccaagggactcctcttccccaacgtcggccacaagtgcctcatggcaaaggacgacaaaaagaaggttaaatctaaatcctccactaaatatgaatcctctagtgatgacaatgctagtgatgaggaagataatttgcgttccctttttgccaaccttaacatagctcaaaaggaagggatcctct

SEQ ID NO: 169232 - DNA, 306 bp, Arabidopsis thaliana landsberg
tacgtttttggcgggaaaattatggatttacgtttttggcgttaaaatttcggatttactttttttggcgggggaattgcgggtttacgtttttggcgggaaaattatggatttacgtttttggcgggaaaatcttgggtttacgtttttggcgggaaaatcacgggtttacttttttggcggtaaaatcacagctttacgtttttggcgggaaaatcacgggtttatgttttttggtggaaaaattacgagtttacttttttttcaatttcatcccttatatatttaagaaatttggaaaaatat

SEQ ID NO: 169233 - DNA, 360 bp, Arabidopsis thaliana landsberg
  unsure (1)..(360): unsure at all n locations
gcgcagcattgggcnnnnnnnnnnnnnnnnnnnnnnnnnnncctgatgcggatcgagtgggacctgcgcatggacgtcaacgtctcgcccaaggggcaatacctggtctgctccaatcaccagacctggaacgacattttcgtgctgatgcattcgtttggaacacgtgcgccgttcttcaagttcttcatcaagcaggaactcatctgggtgccggttctggggctggcctggtggggcctcgattaccccttcatgaagcgctacagcaagaaagccatcgcgaaaaatccgtcgctcaagaacaagaacctcgaaaccacgcgcaaagcctgcgaggcgttcaagaagcagccggcg

SEQ ID NO: 169234 - DNA, 847 bp, Arabidopsis thaliana landsberg
gtatttgatgggcataatggaaaagcggcagcggtttatacaagggagaatctgttgaaccatgttattagtgctcttcctagtgggcttagccgtgacgagtggcttcacgctttacctcgtgcattagtttctggatttgtgaagactgataaggagtttcagagcagaggtatgtgaattacaaatcatttactagctcttttgatggatctttacttgtggctgaagaatgaatgaatgatatatggtttattcctctcttgatgccaggggaaacttctggaacaacagcaacgtttgtgatagtagatggatggactgtgaccgttgcatgtgttggcgactcgcgctgcatcttggatactaagggtggttcagtttctaaccttactgttgatcacaggcttgaagataatacagaagagtatgtaactaaaatgaaatttttgtctttgggatcttaaagcacaatgtaaagcttaacccttttatcatgattcaggagggaacgcgttactgcgagtggtggagaagttggcaggctaagcattgttggaggcgttgaggtgtgttgtgttctgttttgttaaactgatgtgtttccaatttagaagctcactattgaaattctgcagattggtccactacggtgttggcctggaggtctctgcctttcaaggtctattggggatatggatgttggggagttcattgttccagttccctttgtaaagcaagtgaaggtacatatctatattcagcgttttgttatagatatgttttatccttaacaagcaaactcttacacttggtatataaatatacaaaaagctatccaaccttg

SEQ ID NO: 169235 - DNA, 489 bp, Arabidopsis thaliana landsberg
atggcggcttttacaaccaaacagtctctgttgatgttgtctcttctgctcttgatcagcctctccgcaggaagtttcttcgacaatttcgatatcacttggggaaatggtcgtgccaatatagtagagagtggacagcttttgacttgcactctcgacaaaatctccggttcaggttttcaatcaaagaaggagtatttgttcggaaagatcgatatgaacatgaaactagtcgccggaaactcagcaggaaccgtcactgcttactacgtacgtaaaatttatctatctccactacttcatttttttgtggcattgattgtttgaatctgatattaagaatgttttcacagctttcatctaaaggtgagacatgggatgaaatcgacttcgagttcttgggtaatgttacgggacagccttatgtacttcatacaaatgtgttcaccgaaggcaaaggtaaccgtgaaatgcagttctgggggaggg

SEQ ID NO: 169236 - DNA, 1340 bp, Arabidopsis thaliana landsberg
gatttggtgaggtttacaaggtactattactattactattactattaatacttttaatgggtttacgatgtgtaattcttatgaaaatcttatgtcaatacttttggtaatgagataatgctgataaaaacgaatagggtacattttcgaatggaactgaagttgcagtgaagagactgtccaaatcatcaggacaaggtcacacagagttcaaaaacgaggttgttgtagttgcaaagcttcagcacaaaaatctagttaggcttctcgggttttcccttgaaggagaagaaaggttactggtctacgagtatgtgcccaacaaaagccttgattacttcctcttcggtcagtttcatttattggtttttgtttcaatgattgttttgccatatcggaacttggaggctacaagtctttagattcaagtctaaatcatggatatgctcacacagatccagaaaaacaaggtcaactggactggactcgacgacacaagatcattgaagggattgcacgggggattgtatatcttcatcaagattcacggcttacaatcatacaccgtgacctcaaagcaagtaacattcttttggatgcggatatgaatcccaaaattgctgattttggaatggcaaggatctttgaaatggaccaaacccaggggaacacaagcaaaatagttggtaccttgtaagtttcttacttctcataagttaagtttgttaaacatgattttgccaatataacaaagttttgtcgtggataccagcggttacatgtctcccgaatatgcaataaatggccagttctcagtgaaatctgatgtctatagctttggagtgttagttcttgagatcataagcggtaagaagaacagcagctttatcaagacagattacgcacagaacttggtgacacatgtaagtttaaaggaaaggaagttatatatatgtacctctcctcatcctacaataagcaatagttgcaataactgtttgactgattgattctaggcttggaggctttggagaaacggaacagcgttagacctcgtggatccattcattgcagatagttgccggaagagtaaagtggttcgatgcatccatatcggtcttttatgtgttcaagaagatcctgtaaaacgtccagccatgtcaaccatttccgtgatgctcactagtaatacaatggctttaccagcgcctcagcaaccagggttttttgttaggagtagacctggaacaaaccggcttgattcagatcaatcaacgaccaacaagtctgttacagtatctattgacgattcatcgatgtctgatttagatccgcgctaa

SEQ ID NO: 169237 - DNA, 297 bp, Arabidopsis thaliana landsberg
  unsure (1)..(297): unsure at all n locations
gtgatttggagctgttggcgagctaattggaagaagccgacctgatcacagcagaacactcgacccactggtcgagtagatggctccactccttcaacannnnnnnnnnnnnnnnnnnnnnnnnnnnnnnnnnnnnnnntccacatcaccactcgaccccatggtcgagtaccaccaagataaccactcaatctcatcactcgaccacgtggtcgagtatcatcacctccgcgcccaaatggtgttcgatgaaatgtctgaaccactaattctagagattcgtgactctgtaccaag

SEQ ID NO: 169238 - DNA, 663 bp, Arabidopsis thaliana landsberg
tacctcaacttttagtaacactaccaaagaaagattcatttatttcgtcatcggtaacacaacgactgtaatggagggaagtaactggttttgtcaactaaaagcagagaggaatagaacctttgattatgtatgataaaaatgtgaaatctttcttttcaggagttgtataaattaggagcaaggaaattcggattcttgagcttgggtccatttggttgtacaccaagcgcatcgataatagaccggacaaagataggatcttgtttcgagccagtcacagagctgatcaatctccataaccaagaattcccaagagtcttgaggcgtctagagcgccggttatccggattcaaatactttcttcatgactttcacacttccctatctcaaagaatcaacaatccttctcgttacggttttaaggaagggaagatggcatgttgcgggagtgggccgttgagaggaatcaattcatgtggattccgaaatggaccatcgcaaggttacgagttatgcgaaaacgctgatgattacgtcttctttgatccttctcatttgacggaaaaggctcatcaacagatcgcagagctgatttggagcggaccacctaatgtcactgcaccttacaatcttaaaacattgttcagactctaggctttt

SEQ ID NO: 169239 - DNA, 369 bp, Arabidopsis thaliana landsberg; identical to SEQ ID NO: 61325
  unsure (1)..(369): unsure at all n locations

SEQ ID NO: 169240 - DNA, 585 bp, Arabidopsis thaliana landsberg; identical to SEQ ID NO: 69227
  unsure (1)..(585): unsure at all n locations

SEQ ID NO: 169241 - DNA, 827 bp, Arabidopsis thaliana landsberg
agggccacggccacatacgctaaagagacgaaagagatgttcgaaatgatggtttaagtcatcttcgaaagtcttgaaattgatggcggtgatgaggcggtggaggagttggaagagggaagtcaagtagtggtggtgaactgttatccaccgtgtccggagccagagctgacgccctcaaactacggcttcttgactcttctccttcaagacgacgtcgaaggccttcagattctataccgtgacgagtgggtcaccgttgatcccattcctggcttttttgttgtcaatgtcggcgatcatctcgaggtatatatcaattatcatgtttctatctatttttgcttaccaaacttgcttcatagatttggttatatcttaaattcgaaggatatgaatgaaaatattctaaacatactgtaaaatccttaattagaaaaagctttttaatacttgcgctacaaaatagttaaattgggttgattaagattaaaattttaaagtgattagaacatcaaaataattttctagaatctgtctcatctttttttctcaattttgtttattattacatgtagatatttagcaatgggaggtataaaagcgtgctacatagggtaatggtgaactctacaaaacctaggatatcggtggcgtcgctacacagcttccctttgacttctgtcgtaaagccatcgccgaaactcgtcgataaacataatccatcacagtatatggacactgattttaccacttttcttcagtatataacttctcgtgaacccaaatggaagaattttcttgaatcacgcaagattcaccatgta

SEQ ID NO: 169242 - DNA, 517 bp, Arabidopsis thaliana landsberg
atggaaacagaacttataaattcagcgcacattgaatttcacaagagtcagaagaaatcgatggagaaactccttacgatcaaacaagttgctttgtccgcaagaaaagaaatcaaacgaagaagaaaagagtttgagaagatccatatacctaacgaaatcgtcgaagaaatcttggtgaggctgccggtgaaatcgctcacgagatttcaaactgtgtcaaaacactggagaactctgatcacgtcgaagtatttcggaaaaagacacatggctcttgagaaaagcaaaggatgcaaactcctttttgtttgtgatgattttgtagatcgtgcagaggacactctgtttttaaaaacagttgccttggagaagacgtcagtttctgagggagatgaacaagatttcgaattcgaaggatataaggggtttctcgatatttccgagagcagagaaggccttgtctgcttctacgacactacaagagcagtggaagtaatggatccgtccacaacaa

SEQ ID NO: 169243 - DNA, 1074 bp, Arabidopsis thaliana landsberg
gagaagcgtgagacggaagcaatgaagctgcttgatgatgagcagaagcagaaaactgcaatgggggtgggggatcagtatatgcactttgttcacgaagctgaacatgacaacaagaaaaaggccaggtaatgatactgattcaagtatttaaatcgagaactgttttgatctgaatgataagttataaaactgaatgaattacttgttttgcaggaagataaaggatcccctgaagcctaaacaaccaatatctgcttacctgatctatgcaaacgagaggagagctgctttaaaaggagaaaacaaaagtgttattgaggtaagtaaaagaattcagagttttcttttgtcacttacatttgaaattcttgaagctaagttgtgtgggtgaatgatgagtataggtcgctaagataactggagaagagtggaagaacttgtcggaagaacagaaggctccttatgataaggtctagctcatccatactcatcatagacattgctgtgtcaacaaagtgaagttaataaagggatgttctaacgtatgtgtgcatgttttggaacttttgtaacagatggcaaagaagaacaaggagatatatctgcaagaaatggaaggatataaaagaacaaaggaagaagaagcaatgagccagaagaaagaagaagaagaattcatgaaactccataaacaagaagctcttcaacttctcaagaagaaggagaaaaccgacaatatcatgaaggttactatactatactcacagtacattaagcttttttgggatataagtcagaaactaacacaacacatgttttctttcttgcagaagacgaaagagacggcgaagaacaagaagaagaacgagaatgttgatcctaacaaacccaaaaagcctacttcttcatactttctcttctggtatatacttaaaaccctgaatccacaaaacaatcagatcctaaactggtttaataatctcaaatctttttacagcaaagacgcaagaaagagtgtgttagaagagcatccagggatcaacaacgcaactgttactgcccacatttcat

SEQ ID NO: 169244 - DNA, 616 bp, Arabidopsis thaliana landsberg
tttccaactatgaattagttaactgacggaaccatacctttatggcagattaagacaattgaccggaagcaagaagtaccacatgatggtgccatgtgtgatctcctatggtctgatcctgaagatattgttgatggctggggattgagccctcgtggtgccggattcctttttggtggcagtgttgtcacgtcttttaaccactcaaacaacatagactacatagcccgtgcccatcaactagttatggagggttacaaatggatgtttgatagccagattgtgacagtgtggtcagccccaaattactgttacaggtaaataagattctcagagccgtctgtttcagtctatctatcctcatttcttgtagcttgatttttactcctatttcacttatgctccagatgcggtaatgtggcttcaattctagagcttgacgagaatctaaataaagaattccgtgtgtttgatgcagcccagcaggtatgacccttttagtaatatgttacttcccgttctgatctcgttgagcagataagtagactgacatattttctatatgcaggactcgagagggcctcccgccaaaaagccggcccctgattacttccta

SEQ ID NO: 169245 - DNA, 703 bp, Arabidopsis thaliana landsberg
ccaccatttgccggagcatcacaggcacaagctaacatctttctcatttatgcttccggtgccggcggtatgcgcgaagaaaccagcgaaaatatggtaacaaccctacgataaataaatatatataatacttttaaaaaacctaaaatcttgaacatataaatagggtgagagaatcagtttgagacagcaagtaaacaaccacttttccgctatcataaccgcggcggtgccactgagtcggttaaggcaatgtctatacacaatcaacatcggaagcaacgattacctcaacaactacttcttgtcgcctcctactctagctcgtcgtctatttaatcctgaccagtacgctcgatctctcataagcctctaccgtatctatctgacggtaagtattagatcattatatgattatggcatacatgcattcgtttatctagaatatatagagcaacattttctatatgtgggatatcttaacattgatatgtttttgtatgtgacaatgtgtagcaattgtacgtactaggagcgaggaatgtagcgttgttcggtatcggtaagatcggatgtacaccacgcattgttgctaccctcggtggcggcactggctgcgcagaagaagtgaacaaagccgaaatcatcttcaacactaaactcaaagccctagtcacagatttcaacaacaaaccgggagcta

SEQ ID NO: 169246 - DNA, 713 bp, Arabidopsis thaliana landsberg
gattattaatcggaatttctctttgatacagtatcatcagcaagaccgatctgttaaagattctagaaatgccaatacttgttgttctagatgaagcttacatcgaattctcaggagttgaatcacgcatgaaatgggtgaagaagtatgaaaaccttatcgttctccgcacatttagcaaacgagctggtaaattttggtttatcactctatataatctaaacattacagatataaagtctgcatctaagaattctgatgatatttcagatttagccgggcttcgagttggatatggagcgtttccgttgagtataatcgaatacctgtggagagcaaagtaaccatacaatgtctctgttgcaggggaagtagctgctttagcagcactctcaaacgggaaatacttggaagatgtgagagacgccttggtacgggaaagagagagactgttcgggctattaaaagaagttcctttcttgaatccatatccgagctattcgaatttcattctctgtgaggttacatctggaatggatgcaaagaagctgaaagaggatttggcccacccgggtgtgatggttcgtcattacaacaaacaaaagcttaaaggttatgttcgagtttctgctggaaagcttgaacatactgatgttctcatggagtgtcttaagcaattttattggcttccccatttgtttggtaattcttaa

SEQ ID NO: 169247 - DNA, 521 bp, Arabidopsis thaliana landsberg
tatttttctggttctcggcagtggcaatgctggcaagacgcagggagtatatctacctcggaggactgcttccgtctggcttttccttgctagcgtggctcaagaattctgatcagtttgcctcttcgacagttgagattcaggttactaacgatctaatattacaagtagatttattcttcttgtagttactttggtttctcaacgtttctatgaatctttttggttgtagatgtaccttggactcctgctcttcgtgggatgtatagtggtgaaaacacaggagataatagagaaagcacacagtggtgacatggactacgcggtacattcgctgatccttttcattggctttgtacgtgtgttccttcaaattctcagtataatggtaagttcactaagatattcttcttaactaatattagtaaatggtgctttcgttaacctcattgatggacccttttgttatgcagtggaataactctgccgatagaataagaagaaataatgaagaaacttag

SEQ ID NO: 169248 - DNA, 725 bp, Arabidopsis thaliana landsberg
gaaaaaccccctttttcggaagatttcctttttttggacttaccttgatcggttgtttttcccccattgaggatttcacttattgaatgccaaatgtgacaatcaatgagtatttggagggctctcctgatttcaaggttactgtgttttcctcttatctttctgtagaaaccacatcttgtgacgtacatctatcaattgattggtttatatggttctaggaaattctcgctgcatgcaacaaccgcatggttctgtttgagaataggctcagaacaagtaagcgcaagaaagctaagcaagttcagaagcttttagatcttgttgaagaagttgagaggaagaacaacaacaagccatttctgtttgatttatctcatgagtcaatggtaacatttatttttaatgcatgttcccttcttgatgtcttttgattgtagtataagtaaccatctgcatctcaggaaagcgaggctgtagttgacgaaaaggccaaaaagattagagcaatgaagagtaactacacaaaacaagagatgtccaattggaaggaagaggaagtgaatttacctctggccaagaaggtagagaaggtaaggtgtttccgagttaattgctatggtctctatggaataaatacaaaggctttgtcaagtgaacaagtttattgctcaggtgatagaaacaaccagtttgctggagcaataactgaatcaggagcagaa

SEQ ID NO: 169249 - DNA, 1072 bp, Arabidopsis thaliana landsberg; identical to SEQ ID NO: 51117
  unsure (1)..(1072): unsure at all n locations

SEQ ID NO: 169250 - DNA, 1790 bp, Arabidopsis thaliana landsberg; identical to SEQ ID NO: 34990

SEQ ID NO: 169251 - DNA, 1515 bp, Arabidopsis thaliana landsberg
ttgcaggtttatgcatccgggggttcaagctggattatcgacagcggatgcacaaaccacatgacgggggagaagaagatgttcacctcctacgtcaagaataaggattcccaagatatgatcatctttggatatgggaaccaaggcaaggtcaaaggcatgggcaagatagccatcaccaacgagcactccatattgaatgtatctctagtagagttgcttggttacaaccttttgtctgtaagtcaattgtgtcacatgggttacaattgtctctttacaaacgttgatgtatctgtctttaggagtgatggttcattagcttttaagggtgtattagacgacaaactctacttagttgattttttgaaagaggaggccgatctagatgcatgcttaatagctaagactagcatgggctggctgtggcatcgcgtctagcacatgttgggatgaagaaccttcataaacttctaaagggagaacatgtgttaggactaaccaatgtctgcttcgagaaagacagaccttgtgcagcttgtcaggcagggaaacaggtgggaagcactcatcacagcaagaatgggatgacaacatcaagacctctggagcttcttcacatggacctcttcggacccatcgcctatcttagaatcgggggaagtaagtatggtcttgtaattgtagatgacttttctcgcttcacttgggtgttctttttgcaggataaatcagaaacccaagggaccctaaagcgctttctaaggagggctcaaaacgaatttgagctcaaggtgaaaaagataaggagcgacaacgggtccgagttggagaacttacaagttaaggagtatcttgaggaggaaggtgtcaaacatgagttctccgctccctacacaccacaacaaaacggtgtggtagagaggaagaataggacacttatcgacatggcgaggacaatgcttggagagttcaagacgcccgagcagttttggtcggaagctgtgaacacaacttgccacgccataaaccagctatatctgcaccgcctcctcaagaagacctcctacgaactccttaccggtaacaaacccaatgtctcttactttcgtgtatttgggagcaaatgctacattttggtgaagaaaggtaggcattccaaatttgctcccaaagcagtagaagggtttttactagggtatgactcaaatacaaaggcgtatagagtcttcaacaaatcatcgggtttggttgaagtttctagcgacgttgtatttgatgagactaatggctctccaagagagcaagttgatcttgatgacatagatgaagatgatgttccgacggccgcaatgcgcacgatggcgattggtgatgtgcgaccagaggaacaacaggagcaagatcagccttcttcatcgacgttggtgcatccccaacccaagatgatggacaggcactcaagaagaggaacgtgatcaagggggagccaagaagacaagttatggaggaaga

SEQ ID NO: 169252 - DNA, 1205 bp, Arabidopsis thaliana landsberg
taaggaatctgacctttccttttccaaaatgcagtgtttattctcgctgcttgatggttcaggtttcccgagttgcttccagtttggtttctttaattttgatccgtggttggtatccttcagattatttttaactgtttgtcattagttcaagtataattgattttagaccattttatcttaatgtataaagcaggattccttaagttccattaaattgtctctgagactacattcaaattgagtttctgactgctttcacatggtgattatattgtaggctgacccgtcccaggaagctgttcctaggatgtcgggggttgatttggagctttctcgtcaccgcatatcggttttattgtcaacccgcactgcatatgagctgctcccagaatcgggcaaggtttggtttctttttctttttgcttgatcattgataatttctgtcttcatgtcctatagattatcagttaagaataacctttggcttcttactcggaaattgtctaaggtgattggaaattttacaggttattgcattggatgttaatttgccagtgaagcaagcattccatatactctatgagcaggtttactttatttgccaattacccttgtgtcagcttctgttcttgttaggatgttcatctctctgtctctcaccgtcatataaacattctaatattgttgcatccagacccggaaagggaaggaagtgaaacttaagtgaacaacattcgtctaattatacgtcgagattgtttggctttctggtttttgctaattccagatgctttcagggaatccctttggctcctctttgggactttggaaaaggccaatttgttggagttcttggtccactagacttcattctaatactgagagaggttggcttctattaaaactgttctttgctagagcattccatcgagttactattgtatattcttagaatttccaagacggaagtctggatatctcataaatcacatagttttaaatgttttactagcttctcagtatgaaatttcactcttgagtataatagcaaatttgtaaaattgcagcttggaactcatggatcaaacttgacagaggaagagcttgagacgcacacaatagcagcctggaaagaggggaaggctcatattagccggcaatatgatggaagtgggagaccatatcctaggccacttgttcag

SEQ ID NO: 169253 - DNA, 1621 bp, Arabidopsis thaliana landsberg
aaaaaaaagactgcaaagagtgtaagacttactttctaatttatattattttgaatctgagagtgaagaaatttataaatggcttggggtactattttacgacttagagaaacaatatcgaaattgtaaatgtgaatatctctctctatataataagccagggactggtggtaggtaacataattttgctaacgttcaaagcttgtgatctaaaagacgacgtattctttttatgaattcaatttttttgctaccaaagcttgtgatctcaattgtttgttagcgacccaccaggaagccacgtgtttggatcaagcactcagtccacaaccactcattctacctaacaaatgaaggtatagaagtataataattaaaagagatagaagaaagaattgctatgatacagtaaaaagagatcagatgtcaaatgtgaaacaaagcgtacataaattagatacaaaattagaagcagccacatttctccacaacggctcttgaaatcagtaacgtaaagtaaactgatgatgacaaagacccaaaaaaaaaaaaaaaaaaaaaaaaggagaattaaagagtgtctttaaagcagtaacgtataaaaaccctttttcgtcttctcttctatctcgacctcccaaatcatgaaaggatcaattcatgactccgctattacgggtttagaggctcagcttatggcattgaagagcggattaaatcaagccgtgagtttggggatcaatcatatcttaatttgctgcgatcatgaatatattttcgaattggtaagctttccttggctcacacgtatttgcttcaatctcataattaatgtttttccttgaaatatttttaggtcatgggaatatccactcctaagcaagaaagcattgccttgctactgcgtgatgtgcaaggcatcagaaaatatttgacttctagcatccctgttatgttgactcaaaatcagtctaatttagcctacgattttgcgatagaagcaatctcttctgagatcatcatagatattcctgctcagaaagaaacttgcaatatatgtttgaacgatgacatcaatgctgatcagatgttttccgttgataaaagtggtcatatgtgttggtctgaatgtgtgaaacgacatatagaggtgagactacttgaaggaagtttgataacatgtcctcattatcgttgcaattctctgctgacttctgttcgttgtggcaaccttttaacacctaaactaaataagatgtgggagcaaaagactaaagatgagttgattcctgtaatggatagagtttattgcccaaacccgaggtgctcgactttaatgtcggaaaccgagctctctggacttaacattggagtgaggagatgctgtgtaaaatgtggcgaacccttttgcgtcaagtgcaaagtttcgtggcataataactcgtcgtgcgacgagtacaagacgttacatccaaatcctacagaaaacgatggaaggctaagagatctagcgaatgagaaatcgtggcgtcaatgcagcaagtgtaaacacatgattgaactttcttctggatgcatcagtgtagtttgcaggtatcatctctaattacatctcttttcg

SEQ ID NO: 169254 - DNA, 1788 bp, Arabidopsis thaliana landsberg
  unsure (1)..(1788): unsure at all n locations
atggagatcagaagatcaacagaagaagttgaagagaatcatgtaatgcagattacaggaagcaatggcatagttcacaacatggagttcatgccacaagcttacctcagaaaccaatactcatccgagattgacattgatgaagagttcgtttccacttatcctctcgaagatgcccctcttcccatctttctcaaggttcaactttctcttttgctttcgattttccttcattaagacaaagcttattggtttcgcctcttttatttatatgcagtttgaagatgtggagtataaggtgagaaacagtcatgctagctcagcaaacctggtgaaaacaatggtgtcaaaggtggtaacacatacaaatccggatccagatggatacaagcacattttgaaaggcataacaggaagcacaggtcctggcgaaatccttgcgctaatggggccttcgggtagtggcaaaacaactcttctgaagataatgggaggaagattgacagataatgtcaaggggaagcttacctataatgacattccttacagtccatctgttaagaggaggtgagttggatattttctcctacctgaatcatactattatgtgctgatctttccctgttttccagaattggctttgtgacgcaagacgatgttctgttgccacaacttactgtggaagagaccttggcatttgctgcgtttttaagacttccaagtagcatgagcaaggaacaaaaatacgccaaaatagagatgatcatcaaagagctcggcctcgaaaggtacacttcttgaatatttccagcttatagtgagaactagctcgtagactttcttcaagcatgttcttggtgatgtccagacacatttcttgtaaacactaaactaagatttattgaaaaacacaatgaaagatgccgtcggacaagagttggaggaggttttgtcaagggaatatcaggtggagaaagaaaaagagcaagtatagcttatgagattctcgtagatccttctctgttgcttctagacgagccaacttctggacttgactccacttctgccaccaaacttcttcatattcttcaaggagtagctaaggtatcagtttctagttacatgcaaatagattactaacaaagttcttgaaagatacagtagaataagattcagtttgtctttttcaggcaggcaggaccgttataacgacaattcaccaaccatcaagcagaatgtttcacatgtttgacaagctcttactgatatcagaaggacaccctgccttttacggcaaagccagagaatctatggagtatttctcatctttgagaatcttacctgagattgcaatgaacccagcagagttcttgctagacttgnnnnnnnnnnnnnnnnnnnnnnnnnnnctacccgacgaactatttgctgccaaaactgcacagcctgattctgaggaagttttactcaaagtaaggatcacattaagtcatagcctattctactgttcatgggactcaattctagtgttcatggtttgcagtacttgaaacaaaggtacaagacagacttggagccaaaagagaaggaagaaaatcatagaaatagaaaggccccagagcatcttcaaatagcaatccaagtgaagaaggactggactctttcatggtgggatcagttcttgattctttcacgaagaacattcagagagcggcgtagagattactttgataagctaaggctagttcaatcacttggtgtggccgtcgtgttgggtcatctctggtg

SEQ ID NO: 169255 - DNA, 1326 bp, Arabidopsis thaliana landsberg
  unsure (1)..(1326): unsure at all n locations
ctgctatgttggcttgccatgtctttttgttctgatcaggccaaagggtcattgcatatgcctgggcattgaatgagaagtgctgaagagaaaaacaaggaataacaatgactgtggctgttgcttatttcaattccaaaagacatcatgttgttttgctcgactctcctggacacaaagattttgttccaaacatgatagcaggagcaacacaagcagatgctgcgattcttgtcatagatgcatctgtaggtgcttttgaagctggttttgataatttgaaagggcagacaagggagcatgcacgggttctgaaaggttttggcgtggagcaagtcatagttgcagtcaacaaaatggacattgttggctattcgaaggaaaggtttgatttgattaagcagcatgttggatcttttctgcaatcctgtcgttttaaggattcttctctgacatggattccattaagtgccatggaaaaccaaaacttggtggcagctccctctgacaaccgcctatcctcatggtatgctcctgttttcctttctgaactggcatttctggtacagatagctggtaatttacttagcatgctcgaaaataggccatgaaatggtttaattttttgctaattcaggtatcaaggtccatgtttattggatgccgtcgactctgtcaagtctcctgatagagacgtctcaaagcctctactcatgcctatatgtgacgctgtaagatcaacttcgcaagggcaggtatctgcatgtggaaaacttgaagctggagctgtccggccaggatctaaggtacaaatttcactatggnaagttttcttctcgtttggttgcgtgattgatgattttatatctgtctacctgaattaaccttaggatacgcttttctggtgattttacctttccattcccatcccatatctgagtcgctcgacctaaacccatgattgaacttttaacatcaaatgcccacaattactatattgtttacaatatctgtttgggtgttggaaggtttcacagtattaaattccctttgttatcagtagctttcgatcaaattattttcttgctgttctcttggttaatgaaactgcttcaactgattacttaaattactggaactttctgctaggtaatggttatgccatcaggagatcaaggaaccatacgatcactagagcgtgactctcaggcttgcaccattgcaagagctggagataacgtagcgttagcgttgcaagggatcgatgcaaatcaagtaatggcaggagatgtattgtgccatcctgatttccctgtatcagtagca

SEQ ID NO: 169256 - DNA, 2096 bp, Arabidopsis thaliana landsberg; identical to SEQ ID NO: 18135

SEQ ID NO: 169257 - DNA, 716 bp, Arabidopsis thaliana landsberg
tagttgagctgagtaaactggcgggtgagcaaaagcatgctgtggcgcagctgcgaaaggattataatgatcaaatcaagactggtgagaagcttaactgcaatgttagccagcttaaggatgctctggcgctggtggaggtcgagagagacaatgctggaaaggctcttgatggggagaagagaaacatggtggctcttaaggaaaaagttgtagcattagagaaaacgaatgaagctactggtaaagagcttgagaagattaagggtgagcgagggagattgattaaagagaagaaagaactggagaatcaatctgagtcattgagaaacgaaaaggctatccttcaaaaggatatcgtagagctgaaaagagctacgggtgttttgaaaacagagctagaatctgcgggaaccaatgcaaaacaaagtctaacaatgctgaagagtgtgtcctctctagtatgtggaatagaaaacaaaaaagacgagaagaagcgtggaaaaggaatggattcctactctgtgcagctagaagcgatcaagaaagcgttcaaaaacaaagaaagcatggtcgaggaaatgaagaaggaactggcgaaaatgaagcattctgtggaagatgcacacaagaagaagagcttttggacccttgtttcatctgttacttctctcctcatggctgcttctgttgcttatgctgcttcgctcaagtga

SEQ ID NO: 169258 - DNA, 1853 bp, Arabidopsis thaliana landsberg
atactcaatttaagactagtaaaaaaaatcaatgctcccgactgccgtcattaaagattttgatattaatctttgctttattttaccctaaatgtataatgtaagctaatatatatcaaataattgttagtcaaaagtcatcaaaattaacagatttttattaaacagattgtaataagatggaaacctctctataagaagtgctcaaaaacaaaggaactcaatttctctctctctctgatgattttgtttgtttgaagaaaagagaatattgttgtttgtctctcgtgatcgaaacaatgctttgtgattctcaaatacagtaacattttcaacatgctttgattccaaaaatccaaactttcattctctctctcaatctctctatatctccgagcagcgaggtagttgcacggcggccgccatgaatttccatcggcggcgctacccttactacaaccgtctccgtcgtctccttcctctcgttatcgccgtctctctatctctcctcattctcttcgcttttctctctttccttgctccgcctcctggagattccgatcgccttcctccacgcgttcgctactcatccaatgatgcgatcaaagctacaggtttccatattccggttagtgggttttatcattcttcgctaaagtttgaaacttttccgacctatttgatgatttagttggatccataacagagagctggaggcagatcagatcgtgatatctggcgttcacgaaatgctgaattcttttttggatgcagcaatgcaagcagcaaattcgcaagtgcgtaacactcttaatcatattccattagttagtaacactgatcttacgaaaagtatgaaactttcgattagtatggaatcaaggcactgattatcaagtcatacaaaatccgattacttgtttgcagattcgaaagcagtgacgagaaatgatcgatacttggtaatagccactagtggtggtttgaaccaacaacgaactggagtgagttttgtttgacttctcttgttaatacctatcttcatggattatcaaaatacaagcatttgtttactattaatcagctgatgggtctaatccttctacagattgtagatgcagttgttgcggcaaggattctaaatgctactcttgttgttcccaagttagaccagaagtcttactggaaggatgccaggtctgagacagattaagcatacttagctttttcttatgagaaacgttatgcatctttgtaactttgtgaatttttgtgcagtgacttctcgcatattttcgatgttgattggtttatctcagttctgtctggagacgtcagaattataaagcaacttccactgaaaggagggtgtacatggagtacaagtagaatgcgtgtaccacggaaatgtaacgagagatgctatattaaccgtgttttacctgttcttctcaaaaggcatgtaagtttccttctttcgctgaaactttttacttattgcatttaaaatatgtctaagcaaattgtttgttgtctgtattgactatttgcttagggtggtccaaataattgtcttcacaagtctaaccatttaattgttttcacaagtctttggtactattcttttttttggcatgcccatttcgttgattgctacaatattgatgtttgcttcgaaacatgaacttgaagcagtggttgtcttttggattaagcatctcgatttattcttatatcacttttgtctgtattatgcttcaggcagttcaactgaacaaatttgactatagactttcaaacaagttgagtgatgacttgcaaagctaagatgtagagtaaattaccatgctcta

SEQ ID NO: 169259 - DNA, 2166 bp, Arabidopsis thaliana landsberg
tctggtgaatatctcagctggaagcagtcgaaggaagattatcgtaggcactactgtcagcctttccattttcttgatcttggtatttgctgcaattatgttgtggagatacagagcgaaacaaaatggtaagagactgagaaacttagaagctttctctctctctctctctctgttactctcttttcctctatatcgaaactgtagtaaaagacacttctatatatacacactaattagtctataatctgtcaaatcttgacgttaagcctttggttgttaaactgctacaaatcaagcaatacaacatgcacatatcttattcgtatttctgttgtctttgatactttataagatgcatggaagaatggttttgaacgacaagatgtctccggcgtcaatttctttgagatgcatacaatacgaactgccaccaataacttcagtccttcaaataaacttggtcaaggtggatttgttccagtttacaaggtatgtgaaattatgtgttagttcctcaaatggaaagtttggtgttctctagataactttctgcaactttttccagggaaagttggtagatgggaaggaaataagtgttaaacgccttgctagtagttccggtcagggtacagaggagttcatgaatgaaataacactgatctcaaaattgcaacacagaaacttggttcggcttttgggatactgcatcgacggagaagagaagctactgatctatgagttcatggtgaacaaaagtctcgatatttttatatttggtatgtcttttattccatacatctctcgttattccttttccttccatcttatgagacatttttaatgtgtcactttcactaatctgttctactttattggctagatccatgtctaaagtttgagcttgattggccaaagagatttaatatcattcaaggtattgcgcgtggacttctctatctccaccgtgactcacgcctcagagttattcaccgagacctgaaggtcagcaatattcttctggacgacagaatgaatccaaaaatatcagattttggattggctcggatgttccagggaacccaatatcaagacaacactcgcagagttgtaggaactctgtaagaatctgtccacaacaacattcttaagaaaggatttatagtatagtcttatatattgacattttagtgaaactatttgatatttgaacagaggatatatgtctcccgagtatgcatgggcaggattgttctctgagaagtctgatatctatagcttcggagttctgatgttagaaatcatcagcggaaagagaatttcacggttcatctatggtgatgaaagcaaaggccttcttgcttatgtaagtgaaacaacttactgttttaacaatctaatatttcatcaaatgcagacacttccctgtttccttttctaaaacacttcttcacattctttagacatgggattcttggtgcgagaccgggggatcaaatctacttgacagagatcttactgatacatgccaagcattcgaagttgcgagatgtgttcagattggtctgctctgtgttcaacacgaagccgtcgacagacccaacactcttcaagtactatccatgcttacttcagcaacagatcttccagtaccaaaacagccaatatttgcagtgaacacggtagttgatgaatcaccgtctaagaggttgatcactgtcaatgagatgacccattctatgatcctagggcggtaagagattatgtgatgaaacctgtagagtgaatgtgtgtttgattgttcacgaaaggaatcagttttcgaatgtatataacttaacctttcatgctttttgtaaaagatttttcactgaagtaaatagagaaaattactatagatgagcttccaatttggttgaccaatgatttactatagagtttgcatttccaattgttctccagcagaattgtctaatcttgtgaggagcttatctgcagagccaaatgagctcataattttgggtttccattggttagatactatcatatcctcatagtataaaagtagaattagtcaatgccttaaatctaaataagggagccatgattgaatttgcacgtattaaaagtgaagaagaaactcaagtccacaggagaaaagtgtga

SEQ ID NO: 169260 - DNA, 941 bp, Arabidopsis thaliana landsberg
gcggtactaaaattagcggtatcgcggtgggtaacgagattttaggtggcaccgatatcgggctttgggaagctctcttacccgcagccaagaacgtttactccgctcttcgccgtctcggtcttcacaatgtcgtcgaggtacattaccttaatcttgcataccaaacatgtcgctaaaaccatgacatctcgaatttgcttattttgtttggaaaaagttttcagttttaactcaaaatttttaaaagattgcacgtttaaccaacgttaaatctcataaatacattatttttttccgagtaaagttgagaattcccctacacccaaaatgatcaatcatttttttgaaacccaaaatgattcagtttaaatatataaatctattaacctagtaacagaagtttgtattaataatatgaccatgtcgatcataatccagcttagatacgttagtaggcatgcatcaatttggatttctctttgaatttttttctttttaaatcatctctaatatttttaggacatcaaacttagaacctaaatgatgatttagcctaaaacattcaatatttgtttataggtgtcgagtccacattcagaggcagtgtttgcgaactcgtatccaccgtcgtcgtgtacgttcagagacgatgtggcgccgtttatgaagccgttgctagcgtttttttggcaaattcagtcgccgttctacattaacgcctacccttttcttgcatataaatccgacccgatcacaattgacatcaattacgcccttttcgagcacaacaaaggcatcttggaccctaaaaccaagcttcattacgataacatgttcgacgccatggtcgatgcttcttatgctgctctcgaaaaagctggctacacaaaagtcccggtacgtccgatccttattactatcaacccttttttgttggt

SEQ ID NO: 169261 - DNA, 648 bp, Arabidopsis thaliana landsberg
atgccgggcagacggtgccggcgcatggcctggtcagcgacgccgcacatttcgatcgctggtcgcagctgacgctggcgttcggtttgatcatcaccgtgcagggcttcgagacctcgcgctatctcggtgccgcctacgacgcaccgacgcgagtccgcacgatgcgctacgcgcagtggatctcgacgctgatctacgtcgcctacgtcggcttcgctgcggcgagcattccggcccgcgagctcggccactcggaaacggcggtgatccagatgagcgcggtggtctcgaactggctgccgccgctgctggtcgccgccgcgctggcggcgcagttcagcgccgccgtcgccgacacgctcggctgcggcggtctcgccgaggaagtcagccggcagcgcttgcacgaccgcgccgcctatgtcctgatcgcagtcgtcggcatcgccctgacctgggtcgtcgacgtattcggcatcatcgcctgggcgtcgcgcgcgttcgccgcctactacgcgctgcagtcgggcctggcggcacgcctggcctggaacaccggcacgccacgcgaacgctggcgcagcgccggcttctgcgcgctcggcgtgctcggcctgctgatcgtctgtaccggtcagtcggccg

SEQ ID NO: 169262 - DNA, 895 bp, Arabidopsis thaliana landsberg
tgtactttctgaagtcagattgttcttttcctttgtccactagcatgcaatcgcctattctggtgaatcgtggatgggttcctcgaagttggagagagaagtcacaagaatccgcagaggctgagttcattgcaaaccagtcaacaaaagctaaatcaccgtccaatgaaccaaagtcctggtggaaattttggtctaagacgccagtgattaccaaggttggtcttgttcagaaactttttcctttgtcataaggttggcttctcatatatttggtttagctcgaaactgtaattttgtgggatacatctgaatagaaatgtcggatctatgcagagacagattaaattcagctatctgcaaagtttcacttctttgtttattgtctttaacaaatctcttgcatacattgtgactcgtgaaaactgaaatcttgtaggaacatatatctgcggttaagcctgtagaagtagttggcgtaatcaggggaggggagaacccgagcatatttgttccatccaatgatccaagtaccgggcagtggttctatgtagatgttcctgcgatggctcgagccgttggccttcctgaaaacacaatctacgtagaggacgtccatgaacatgtagatcggagtagaccgtatcctgttccgaaggacatcaacaccttgatccgtagtaaagtcatgccacaggaccatctgaactactcaataacatggtaaactccatacagatacatgaggtgttcttggcattgtctggtcttaactgttatggtcaatgagtgacattatgtttgtgtctgtttattgatgaacaggtattctctctcggcggctgtcactttcatggcatacaagagactgaaagcaaagcctgtccgcagataa

SEQ ID NO: 169263 - DNA, 399 bp, Arabidopsis thaliana landsberg
atgccccatatccagacgcgcgacggcacccggctttatgtcaaggattgggggaatggtcgccctgtcgtcctgatccatggctggccgctttccgccgatagctgggatccccaggcattggcgctggcgggtgccggcttccgggtcatcgcctatgatcgccgcggctttggccgttcggaccagccctggaacggctatacttacgatagcttcgccgacgatctggccgacgtgctgcaggaaaccggcgcgaccgcggacgccacgctcgtcggcttctcgatgggcggcggcgaagtcgcccgctatatgagccgccctggcgccaagggcgtgaccagcgccgcgcaaaacagtacggtcgtcccctatatgctgcaaggcgacgacaat

SEQ ID NO: 169264 - DNA, 529 bp, Arabidopsis thaliana landsberg
  unsure (1)..(529): unsure at all n locations
caacgatcccgcttcttccccgaggacatgctagccggcttcctagacgccccactcccgatacgtcgtcggcgttcccggtggcgtggtgcgcgcccccccnnanaccgcncgcaaggtggctgtggtcgtcgacggcggctccgggcactatcncgcgttctgcggtgtggtcggaccgggattcgccgacggggccgtggtcggtaacgtgttcacctcgccgtccgcgagccaggcggtttcggtggcgcgtgctgcccatggggattcgggcgttctactgttgaccggcaactatgcgggtgacgtcatgaacttcggtctcgcgaccggcgaactgcgcgccgagggcatcgacgcgcggttcctcaccgtcaccgacgacatcgcgagcgcgtcggctgccgaggccgacaaacgccgtggcatcgccggtgatttcccggtattccgttgtgaaagagcagctgccgaggccggatattcgatcgattaggtcgatcgggtcgcgcgtcgagtcaacgat

SEQ ID NO: 169265 - DNA, 896 bp, Arabidopsis thaliana landsberg
cccgcaaactgatatacttggcctttgcaggaaccgatcatccaattccacatctgtacgatgttaacacatatctttgctttcttccttcaaacttccctgacagtggagtaagtggagccattaatcaggtatgtcacacgttatctgataaatgttaattgtgcgttctataaacatctcttaagatgatcaaggattcatggctgtgagattcatggtttttttaggtgagatattcttccacgggatccatctacattacagcctcaaaggatggagctattcgactctttgacggggttagcgcaaagtgtgttcgctccattggcaatgcacatggaaaatcagaggtcacaagcgcagtgttcactaaagatcaaaggtaaaatgcagactcaatcaattatctctgagaatcactagtttttcccaatagttcatggcagaacaattgattgatcatatggcttttgttaggtttgttctctcatccggtaaggattccacagttaagttatgggaaataggctcaggtcgaatggtaaaggaatatcttggagcaaagcgggtaaaactgcggtctcaggtgactcgttttctcaaccttttgagacaaaaatattcacttcgtcgactaattctaactggccttcactgttgtgttttgcaggcaatttttaacgacactgaagagtttgtaatctccatagatgaagcaagcaatgaggtcgttacatgggatgctagaaccgcagataaagtggcaaagtggccttctaaccataacggtgcaccacggtggatcgagcactcgccggttgaatcagtctttgttacttgtggaatagatagatcaattcggttctggaaggaatccgtttagatgagaatcc

SEQ ID NO: 169266 - DNA, 1207 bp, Arabidopsis thaliana landsberg; identical to SEQ ID NO: 19009

SEQ ID NO: 169267 - DNA, 144 bp, Arabidopsis thaliana landsberg
caggggaagggtacgggcagcttcggcaagcgccggaacaagacgcacacgctctgcatccgctgcggccgccgcagcttccacctccagaagagcacctgctgctcctgcggttaccccgccgcccgcatcggcaattgttag

SEQ ID NO: 169268 - DNA, 1231 bp, Arabidopsis thaliana landsberg
tactgtctggagactcagtccttgaccgttggccattttcacttcgacaaagctgatgtgtgatgagaaaggaaaaagcaaggggtttggatttgtgtgcttctcaacacctgaagaagctattgatgctgtgaaaacctttcatggtaagccgcatgatcataatttgttggtatataaatggaattatgacatagctcttggttcatcttatcatatgattattttctttcatgcttcgtagggcaaatgtttcacgggaaaccactatatgtggctattgctcaaaagaaagaggacagaaagatgcagttacaggttcaatttgggacccgtgtggaagctagaaaaagcagctcttcagcttctgtcaatccagggacatacgctccactttactacacaaacactcatcccgggatggtatatcaatcatacccgctgatgtggaagtctgctaacatgattggttcatcatacccaaactctgaagcagtcacatatcccccaatggtatatattcttagaattactatatatcgaaagaatattcataatgataatgtttgacacaaagatatctggtaggttgctaatgcgccaagtaagaataggcagaacagaataggaaagttggataggaatgctgtttcgtatgtgccaaatgtgtatcagtctactcaaatgcttccttgtcaagagatttttcgaagcagcaggtaatttggtttacttattaccatataccttgcgtaagaggttcaaattataacttttgtaaagcatatgcagcatagcagaacctatggtcgtgggaaagaaatgaagaaatcaatccaacagagacagtctgaaacagttgggatggagatgcaattgctcggagagttgctacaccctcttgtcgagaaactggaggttggtgttcttgaatctgatcattatgtaaatagtcacatacgattggtaatgttgattaacactatattcatattcagtgactgtacttatcattcttttgcagccccagcttgcaaacaaaatcacagggatgcttctggaaatggacaagtcggaattgcttcttttgctgaaatcaccagaagacttgtctgttagagttgatgaagcgtttgaagttctgaaatcatccaagacaaatctgaccgctccaaacactcatcgttctgattacttggcgtctggcattgctggcgtttcgattaagtga

SEQ ID NO: 169269 - DNA, 2573 bp, Arabidopsis thaliana landsberg
gagctacagagtcttacagagagttcatcaagtttacagaagattgcgggatttcctggagctttcctagtgaacagagaatacagagaagagacaagaagacattatgggacccgccgctgacgcccaagtcctccatgcaactgaccagaagacaagaatctatcttcttcttctcctcaccacttgacctcaacgcaccttatccccaccactcgacctcatcttatcaattcactcgatcccatcgcccctctctccacaaatactcgacctcgccacttcttatcctcaaacactcttctctcaaacactcgaccaacactcttcaccttatcctttcttgtccgtcactcgacctcaccatctttcttccccacgcactcgaccgcttctcattcgcctcttcaccaccgtctctcatcactcggccacaacgctcatcatctctccatccacgacatcactcgacaacaccaccgtttcttctcttccgcgagctcaagttcactcgaccgctcctctccttcctttcacactcactcgatctagcagtaggagcggacgacttctgcaatctcgtagtttatgcgaacgcggtgctggccgcagcagaaggagagaggtcgagtttcctcatagcggtgctggccgccagagagctgatgaggtcgagtacccacctgctggaggtgatacagaacaaggaggttcgtctatggcatgggagcaatcgcaggcagccattgacgagcaactacgttcattcttcgactgaggtaagcgcctcacttcaccattgtattataccgtctgttgtgatttgtttcttcattttttgtttctgttattggatttgtcctgagtactctcttccaagtttattcacacagtggactgtgtgatttaagtttgggggagggctcaggaagtgtgtgttgcattgtgtatatttttgagtctgcattcatctaaggcatagaaaaaccaaaaaatttgaaaaatttcagaaaatgatttcacaaaaaaaaagagtgttcatgtagttgcatcacatttaggatcgaatctagagtgtttcatttaggattgttgcatatgcataggggatgatgatgagatagccttgtaagcattttgattcaccggataaactcagtgccctcgttgctaattgtctgttgcatagtcaatgaatttgaaaaaaaaaaaaaactgaaccatgcttagattgctctactcgaccacactgtcatgatctgattccactccctatcaatatgaacctgaatctgatctttaattatcatgtctgcatcaaattttaactcatgtataccctaaaatacttggattttcttattcattttgatcactctggttaatccaagtagctgactctccttattagagctgttaacccaaacccaaacctagactttctttcaagccctatatcacttggtagaaagtgttaggttcgtaacgacagagatagtgtctcatgtagttctagttaccatttttcggactagataggactaggtgggcgcttatactttgggttggaatgtgtttaaaagaaagaaaaaaaaaaaaaggggttgattcattgataagaaaaggtaaaagactctaggtgaagtaagctaaagaagcagaaaaagtctagtaaaggttttaggatttgtaaagaaaagaaagagttcttgttagctattgaagatgggcaaaagcccttggttttagaatgttaaaaacaggaaccttagtcgtttaagaaatccaaatccgctagatgtatcaaagtgttgagaaagcttctgctagaattaagagaaaagaaaagaatgattagaaaaagggcttaaaagattcatgaatgcaaagggtagagttttcttatattaggattggagttgggattaccattagagcttcatttgatatactctgggtagatgggatcttatctctgtatgcatagcttgggacttacctttaacattctactaaagcttaatcattttttgagagatcccctgttcttgaccttttaccttagccaaatgagttcatttatgatgcattgcttgattcacgttccaaaactaatgaatgttaaagggattggtagatttgaaaacatgtgtaggtcgagcatatgagtcaaattgattgataatgacgcatggctatcgtttttaagtagaattcgatcatatctcatctgtctgcattacacccatttggattgacacctaaaatactacaacgacaggatagtgttttaggattaattgagcaaaaacttattatcagcagtatcagcagctatcaacaacaacttccaccacctaggttcacacagtagcaaaaccaattaccttcaccaacactagattcagacttgaagaacatgttacagcagattctccaaggacaagcagctggagcaatggatctcgccaaaaagatggcagaaatccacgacaaggttgactccactttcaacgacaaggttgaggcacttacctttaaggtcagatacaggaaggacaaactgtgtcaac

SEQ ID NO: 169270 - DNA, 246 bp, Arabidopsis thaliana landsberg
atgggcaagagtaagaaaggtaccggttcttcgcctcgctctggtgataagcgcaaacgtgagccgactcctccatcggaggactttgatcaactcagagtactcggaggaggagttctcctccgagtccgagggatctccggctcctgtctctcccccggcgtcgtctgatgattcagacgactcccaggggattgccgcagaggtctggacctacatccgggccatcgagcgctccgagctcga

SEQ ID NO: 169271 - DNA, 1263 bp, Arabidopsis thaliana landsberg
aatttcggattaaggatttaaatttccagtcagatttgggatcttcttttctcatcagtgaaatgattcattttcatgctggcctagtgtttatgaataataatgtttttaagatcttgccaactattttgactggggaaatgtctttattgaacaatcaagtcatagtaggaccgttcacatcacctctcactttctagtacttatgagaaatctttaacgcggtgcagcgcttgagaatgatagttttgttggttgttgcagatgtagggcgtattggaataggcatctgttatgatatcaggttccaggagttagctatgatatatgctgcaagaggtgagtcttcatatcataatgctttatccaaatggactatctgcttcctctctttttcgggtccattacgttttaaagaacctcatcacccacatgtttactttaatcatatcaggggctcatttgctgtgctacccgggagcctttaacatgacaactggaccattgcattgggaattactacaaagggccaggtatgattcacagtctactacattacgactttcttggcttatttaatcatgggtaaatcacaatgctcatcgatctgttttgttccatttcagggctacggataatcaggtacatgaaccaagttaaatacttgtattgatagccaaaagagagatacaagttctgacatttcttaatgaattcatagcaaacctgcatttttctttgagttatcaatacaagtattatcttctgctctttggggttagttttacttaattgactgttatcaaagtcatggaccggttaatagaactatgtatgctactttctccagttatatgtggcgacatgctcacctgccagagattcaggagctggctacactgcttgggggcactcaacactcgttgggcctgtaagcactaaactttttctgtgttacttgattgataatgaagcttttagctgatcactaaactttgaaacatatatattatttgacagtttggagaagtactagcaacgactgagcatgaggaggccattatcatagcagagattgattactctatccttgaacaacgaaggtaatcacggaaacaccagaactttcttggtttttgatagcgtgatccgctaactgaatctcgttttttttaccatcttaggactagccttccattgaataggcagcggcggggagatctttaccagcttgtagacgtacagcgcttagactctaaatga

SEQ ID NO: 169272 - DNA, 299 bp, Arabidopsis thaliana landsberg
  unsure (1)..(299): unsure at all n locations
atggcggaagaagaagaatcaatccgaccagagtttccaatcggaagagtaaagaaaatcatgaaactggacaaagacatcaacaaaatcaactcagaagctcttcacgtcatcacttactccaccgaactcttcctccacttcctcgccgagaaatcagctgttgttacggcggagaagaagcgtaagactgttaatctcgatcatttaagaatcgccgtgaaaagacaccaacctactagtgatttcctcttagactcgcttncgttgcccgctcagcctgtcaaacataccaaatc

SEQ ID NO: 169273 - DNA, 755 bp, Arabidopsis thaliana landsberg; identical to SEQ ID NO: 11187

SEQ ID NO: 169274 - DNA, 539 bp, Arabidopsis thaliana landsberg
atggcccggttggccgatcttcagaagaagattgatgaagctactgaagaaatgtgtcatcttactgaagatcaccaggaccgaagcctcaacatagggagcttcatcaagggagatcattcaacgaagatgagtggtatgatgactttcatcatgataactttacctttgatgatgcttctcctctggcggcagaactgcaggctatctcatggccacaatcgtacaagccaccccagttgcccatgtatgattcgcactcggatccaaagcaattcttgatgagctatgaggcaacaatatcctcatatggaggcaatgccgatgtcatggaaaagtccttcgtcatggcagtccgaagtatagcccaaacatggtactcctctctttggccaggacaaattacatcatggcagaagcttaaggatatgctggtcaccagcttccaaggtttttagacaaagccggttactgcctaggcattgtttcaatgcacacaagaccaggaagaatacttcaggcgtatgtcgaagatcctg

SEQ ID NO: 169275 - DNA, 625 bp, Arabidopsis thaliana landsberg
ttctaacttctaacttgatttattcttaaatgtggaacttaagtggaactttgctgatatatatgcatgattacataggatacatcaacagatagagttcgcattattgattggacttttgatgaagttatagctgaaggtatattatgttcaactgatccaaaagaatggtgaacaatactcaactaggtctgaatgctgcagttgttaaagttggtctggtaattaaaggcgatgcttttttgtggagaccaagtattgaaatgtcaatgatgagtgaagcacttaatgagaacatcgtctggcctattcagaagatacaatttataagttcatcgccggtacatgaatcagctaacagaccatcaccactacaggaatcacctaccagaccatcatcaacggtatgatatttcatcttctgtgaatttttttagatacagttaagtagctgcaatggtgagaactgctttaatacatatatacattcagattttaaattgacagactctaagtaacacttcgggtaacatcaatggtgggaaacagaagtgtattaagctggatatcaataactctagccaaagagttgcagaaggcaaggtttgttatcaaacctcagatg

SEQ ID NO: 169276 - DNA, 394 bp, Arabidopsis thaliana landsberg
taacatgcatcttggggagtcttctaagaggaagaacttgatcattcttcagcgagataagaaatcaagacaacacaaccaccaagaaactgagcaaagaatggaaggtattctcaaacctcgtaagaaacgttaagaactctgctcattttgtcacattttttggtttaaggttgccatgatttcatgttggcagcctcagtttcaggtttgaataacaactcatatatggtctctgtatcactttttggagttcgaaatgacatatctgctttggtatgttgttttagtttcagcttttatttcagcttttgttctgcaacatggatacctctgtgttaactttggtttatccatagttgttagtctgcagtttaaaagttctgttatgttt

SEQ ID NO: 169277 - DNA, 1103 bp, Arabidopsis thaliana landsberg; identical to SEQ ID NO: 11675

SEQ ID NO: 169278 - DNA, 435 bp, Arabidopsis thaliana landsberg
atgggttctttcaagggtcatgctttgcctggtacattgttcttggtagttggagtatggcacatttggagctcagttgttagatacatatcgaatcctagttcatttcgggttagagtttggcatcctggtcctggtttcaatgataggatcaagtacttggagctttacgttgttactattggctcgttcattgacttgtgcattgagttcttgtattcaactcatctcaagttctttgttaatggtgttgtgagtccctcccatatgaatgactttgagcactctgggatgcttctcatgttcttcatcctcggatttatcgctttgctctccgagaaatcaaggtattaaaaatgttttgattaatgataccatttatggcaatgatagttatgggttggatctttggtgagttgagaaatcaaaagttgt

SEQ ID NO: 169279 - DNA, 663 bp, Arabidopsis thaliana landsberg
cctgctcggtgacacacgcacaccgagagtacgacgaaatgccggcaataggtacagaactcggcagtagaagagacaatctggtaggccgtcactcttcttcggtccctgcgagatgtccgcaatacgcaggctcctcccaccaaatcttgtcaacagcagcaccaatatggaaatgctaacgtctttcttatggcgttatcgcaccatcgctctacgaccagaccaggacaaggagatgcggctcatattaattgtcaacgcacgttctaagcttaaaaatccaccactacctcgaggatactacggaaatgcctttgcgttcccagtcgcaatcgcaacagctaatgaactaactaagaaaccgttagagtttgctctgagactaataaaagaggcgaaatcgagcgtgacggaggagtacatgcgatcacttgcggatctgatggtgataaagggaagaccaagcttctcgtcggacggagcttacttggtttcggatgtaagaattttcgcagatattgatttcggaatttgggggaaaccagtttacggaggaattggtacagccggagttgaagaccttccgggggctagcttctacgtttcatttgagaagagaaatggtgagatagggatcgttgtaccggtttgtttgccaga

SEQ ID NO: 169280 - DNA, 514 bp, Arabidopsis thaliana landsberg
ccgcgcccggcatcgtcgtcgagggccgcgacatcacgacggtcgtcacgcccgaggcaccggtgcgcattctcctcaccgcctcgcccgagatccgcacccggcggcgggccgtgcagctcggcgcgagcgacgaggcggccaccgcggccgcgatcgccgcacgggacgcgaaggactcccaggtagtcgagttcatgtcggcgggcgccggcgtggacaccatcgactccacccacctcggcttcgacgagaccgtcgacgccgtcatcgatctggtgcggcgtcgtgccgccggacaggcagacgcatgagcgaaccccgcgaaccccgcgaacccgagcaggaattcgacgacgaggcggtccccgcgctcgacgaggtggaggccgagcgccttcgctccctcgacgacggcgttgcggccgcccgcacggcgtctctgcgcgcggggctggccgactacgacctcgaggacgaggacctcgacgttctcgacgcggcgaccgaggac

SEQ ID NO: 169281 - DNA, 481 bp, Arabidopsis thaliana landsberg
  unsure (1)..(481): unsure at all n locations
tctcgggcaatctggggttagccacggcaggtggtgtgttgcgagacgggatagggcattggtgtggcgggtttgccttgaatataggtgtttgttcagctccattagccggaattatgngggggtgtactacggactctatatggcttgggagaggaggtttacacgggtagagttggaggttgattcagagttggaggttgattcagagttggtggttgggttcgtaacaacggggattagtgatactcattcattgtcgttcctggtgcgtttgtgccatgacttcttatcaagggactggttagtccgggttactcacgtgtataaggaaactaaccgtcttgtggacgggttagcgaactatgctttttctttacctttaggttttcatatgttagatgttgttccgccctttgtggcgatgattgtagaggataatgaccgagaaactgcgtttccgaggcatgtccgaacttga

SEQ ID NO: 169282 - DNA, 787 bp, Arabidopsis thaliana landsberg
  unsure (1)..(787): unsure at all n locations
atatctccatcaagaggccgtgaaggtntagttattgttattaagtatagggttttcgtatgtagattttgggtatgtcactgaaaattttctgaagaaaattgcgtggtaatcttttttttcattacctggacactctgtaggtcaaggtcaagaagccgtggaaggttcgttctatctttctccagatgagtttgcattctcttgttgtctgtgattggtttgatagtttgcactttgcattgtttacgttatgtgaatgaattttggttgacagaagtgaagttgaaaaccctggtaccactctctatgtgactggcctatctacaagagtcactgacaaggatcttgaagcacatttcgccaaggaaggaaaggtgataacatctatacctgattctcatttctcatactaccagtttaagtctattttgtctctgcatttttgggcatataatctttgatcatatagtttaccattttcatttccataggttgcgtcttgttttcttgtgatggagccgcgcacccgtgtgtctcgtggttttgcctttgttacaatgagcagccttaaagatgctgagcggtgcattaaatatctcaaccagtctgtactagaaggccgatacataactgtggaaagggtaaaatttcatgctctactgattttggtggtagtttgagatcattatttgttgacttggaggttttctgatcattcagaaaatattgcatcaagcaacaatcagccatgatcagagtactcatccttgctcaacaaaattaa

SEQ ID NO: 169283 - DNA, 1215 bp, Arabidopsis thaliana landsberg
tgtctatgtttctatgctattccttcattctctgacgccttaaggggcttttaataaggaatgcattccaagactatctacttttggcttgatgaagaatagtcgggatggaaaaagttacagcactaatcttgctttcacccctcctgaatatctacgaactggtacatcattggttttttctccaagattaatatggttgagattaagttgcacgttctgtttgttattgtatttacagggagaattactccagagagtgtaatatacagctttggcactcttctgcttgatcttctcagcggaaaacatatacctcctagccatgtaagtattttagccataataagtttgttttccatacgagattgcagcttttacttgaaaaggtgaaggttgattctttcaatctgttttatacaggcccttgatctgattagagacagaaatctccagacgctaactgattcttgcctagatgggcagttttctgatagtgatggtacagagctagtacgcctagcttctcgttgtcttcagtatgaagctcgtgagcggccaaacaccaaatctttagtgactgccttgacacctcttcagaaggagacagaggttcctattgatttccgagccattagaataacttggaccaagtttctttttgttaactcgagataattttccttgtattgtaaattgcaggtcccgtctcatgttctaatgggtctacctcacagtggttcagtctctcctctgtcccctcttggtgaggcttgttcaagaagggacctgaccgctatgcttgagatcctggagaaacttggatacaaagacgacgagggtgtcaccaatgaggtaccttttcagaattatgttggaagaatcagtggtttggctctgttaatcagtgaatagtttctttcttggttcttcatggtgttgcgttactttggtttggcaatgcagctctcgtttcatatgtggacagaccagatgcaagagtctttgaactcgaagaagaagggtgatgtggctttcaggcaaaaagactttagagaggccatcgagtgttacacacaggtcgagttttgttttgtacataaaatgaagtagacaaacacatagcattagcctgattatctttcttgaaactttgacagtttattgatggaggaatgatctctccaacagtgtgtctcggcgtactgagagcac

SEQ ID NO: 169284 - DNA, 437 bp, Arabidopsis thaliana landsberg
ctggggccggtgctcagttctgttctttaccgccctgagaagccggcgcattgggggttgggggggcgcggacggccgagtccatgccccgccgttcgagtacgacccgcagacgttcgacccgccgggcgatctggtggaggtcggcccggagggcaccgtcatcagctggacgtggacggagcacccgcgagaagggcagccgctggaccgccccttcggctgggcgctgatccggctcgacggcgcggacacgaccatgctccacgcggtcgacgccggttccgccagcgccctgcgcaccgggctgcgcgtccgcccccgctgggccgccgagcccgtcggccacatccgcgacatcgaatgcttcgaaccggccaccgaggagcccggtgggccggaggcctcctcggggggttggggtgcgaataagcccc

SEQ ID NO: 169285 - DNA, 1290 bp, Arabidopsis thaliana landsberg; identical to SEQ ID NO: 9117

SEQ ID NO: 169286 - DNA, 529 bp, Arabidopsis thaliana landsberg; identical to SEQ ID NO: 73696

SEQ ID NO: 169287 - DNA, 629 bp, Arabidopsis thaliana landsberg; identical to SEQ ID NO: 16259

SEQ ID NO: 169288 - DNA, 635 bp, Arabidopsis thaliana landsberg
  unsure (1)..(635): unsure at all n locations
atcaccaactagcactccatatcgatgtatctctagtagagtcgcttgttacagccttctgtctgtaagtcaattgtgtcacatggggtacaattgcctttttacaaatgttgatgtatctgtctntagaaggagtgatggttcattagcttttaaggggtgatggttcattagctaagactagtatgggctggctgtggcatcaccgtctagcacatgttgggatgaagaaccttcataaacttctaaagggagaacatgtgttaggactaaccaatgtttgtttcgagaaagataggccttgtgcagcatgtcaggcagggaaacaggtgggaagcactcatcatagcaagaatgtgatgacaacatcaagaccactggagcttcttcacatggacctcttcggacccgttgcctaccttagcatcgggggaagtaagtgtggtcttgtaattgttgatgatttttctcgcttcacttgggtgttttttttgcaagataaatcagaaacccaagggaccctaaaacgctttctaaggagggctcaaaatgaatttgagctaaaggtgaaaaagataaggagcaacaacgggtccgagttcaagaatctgcaagttgaggagtatcttaaagag

SEQ ID NO: 169289 - DNA, 1358 bp, Arabidopsis thaliana landsberg
  unsure (1)..(1358): unsure at all n locations
ccccccccccctccaccctcagcagagacaagaatggaatcaatgcttgagcagattctggagagccaaacaaagcttgttgtggagtttaatggcaagtttgatgctgtctacacagatcttaatgggaagatcgacaatctgagctctcacttgaagaagctagatgtacaggtagctcaaactgcacaacctatcaagagacaagagggttttcttcctggtaatcccgatgctaacccaagaaagagctgcaatgccatcttaatcagagaaggaaatgatgtgtgggaggaattggacactgaagacgagttggagatcgtagttgcagagatggtgtcgacagacaccctcatgtgtcgatcgacaccatatgggatgctcttctcttagacgactcaatacgacggtgtcaatcaatacccctatggtgtcgatcgacactggatccggactgcaccctgtgaggtgcaaatacctatgcagatcgagtctgtctacactcctcctgtcccgtatccgaagaggcatcgttccaagcaggagattcatgctgctaagtgtacaaccataatggagaagatactccatactcttcctaaggatgcttctgagacatcttctccttcactcaacaggtatgtcaaacgacttgttgacaatggaattagctcatatgaagctaagctgcttaccagagatatcagtgcaatcatgctcctaaggccaagaaggagaaggcacaaagagtagacatagctgagtacatcctcattattactcatggtcagacaactgagaagcttccagatccaagtagctttgttcttgattgctctatctccacaagcagattatgccgctctttgtgtgatatgggatcaagcatcaatctcatgcctaagtctgttgctgagagactaggcatgactcactacaggcctactcgcatcactcttctctttgcggatcgttcaaagcgaatccctgaaggaatccttaaagatgttcctattcaggttggtaactctgttatccctgctgattttgtggtcctagattatgagaaggaacccaaggatcctcttatccttggcagagcgttcctagctatagctgatgctaggtttgatgtgaagagaaggagaatctctctcaagatttgtgatttagagatggagtttggaatggannnnnnnnnnnnnnnnnnnnnnnnnnnnnncattgcttccaccacagacacacctcctcagactgctcagaatcccaccacagagccacacacaacgctcccattcgctcagctcaccaacgagagttgcagagcaacggtgtcgatcgacacacctacccct

SEQ ID NO: 169290 - DNA, 2060 bp, Arabidopsis thaliana landsberg
  unsure (1)..(2060): unsure at all n locations
ttaaatttatcacatttccaacttacaaaggtactcaagatatatgatatgaatgtcacatagtcatctatgtgaggtatggaaggagaggaacatgatttcactctataccaagtcattttacatgtgatgcttcttaaactctaatcttgtttttttatgattgtattatgttgtatcacaaatgcttttactctttcgatttctcccaacaaaagtatcaacaaccatcaaaatcccacacttttctaaatcatctagtcactaaacactagaaaccccacacttttctagacctacctttcttataaaaacactcgtcataaaagattccttttaatacaaaataaaaggattgttgtttctatcatttatgattttattccaagggacaaaacctttcaagtgatttttgacacaaacatttcaagtgatttgtgttaaattaacaaatcatacgttattcaattatagtttttaaaatctcaaaaatctaatgttattgaactagtggttttaaaatctatttaaaaatcccttgttattaaaaacattttaaggattagattgttaatgactttaaaacactttaagtgaatnttagttgatttctcagataaaaataaaaaaaattcaaatctcatgattttaggtgaattttgagaaaattttacaataaatcataacaacttccttaaattcacccaaattctttaaaattatataaaaattcaaaataacttaaatcattcaaaatagaagattgaatacactcccggggccccaagagttttgcaaacaatcatatacatgtaaaagtttaagactataccatttatgtgatttactaatcatataaaataaattaaatacacatcgtttagttagcagtatataataaggctaccatttagacggacacagctaattatgagagatagacagagagggaaaacaactacacaagtcaaattttctgttctaaaaaagtaaaagaagtatggtggaggaaacgagctctggtggtggctcatcggcttctccgatcaaaaccatcgttgttttggttcaggagaacaggtcgttcgatcacatgttaggttggttcaaggagcttaacccagaaatcgatggagtatccgaatccgaaccaagatccacccactttctacatctgacccgaactctgctcaaatcttcttcggcaaagaatctcagaacattgatcctgatcccggtcactcttttcaggtacaactccggtttagttccaaagcatcgttaattttgtatagaaatatacacttcttaaccggtctagtgaacataaatatcttcttaaataattcggttcgggatctaaaccgggacattgatgaaatggtttatctacgatctttgaatttcaggcgatctacgaacaagtgtttggaaaaccattcagcgacgagagtccgtacccggatccgaaaatgaacgggttcgtacaaaacgcagaggcgataacaaaagggatgtcggagaaagtagtgatgcaaggttttccgccggagaaacttccggtattcaaggaactagttcaagaattcgctgtctgcgatcggtggttctcgtcgttgccctcgtccacgcagcctaaccgactctacgtccacgcggcgacatcaaacggtgcgtttagtaatgacactaacacgcttgttcgtggctttcctcagaggacagtgttcgaatcacttgaagagagtggtttcacatttggaatttattaccaatcctttcctaattgcctcttttacaggtaataattggtatttctttttgttttaaatttcatataattagaaaagtaaaattcaaagttacgaattatgattttagtgtaggaaaaaatcgaatacgaatatatgttttaagaaaaaacatatggtagataatgatgaaccgatgaattgtagtgacatcttaaaaaaaaaaaggtgatgacacctggattgcaatgtctacttaatcgaaacatatagaaaacgaaataacactctccatgatcgtgtcttatt

SEQ ID NO: 169291 - DNA, 931 bp, Arabidopsis thaliana landsberg
atggaaacactagaaactgagaaattcttctcagacgataaacctctgccaaaaccaattttagatcattctgagatcaagacaaaagcaagaagaaacgctgtcgtctcagttctaattcagcccttccaatggttacaaatgctgagttctaggctaaacctgagcttcgtgctaggtgtggtccttgtgtacggtgtaaaccaagggttctctggttcgatattcaaagtcgtcacagactattactggaaagatgtccagcaagtgcagccatcggttgtgcagctttacatggggttatattacattccatgggtcatgagacccatttggggtctcttcaccgatgtattccctatcaaaggttacaaaagaaagccgtattttgtagtttctggtgttcttggtttggtatctgcgattgctattgttgttcttggtaagttgcccgctgctttggctttgagctgcctcttaggtgtctctgcagctatggccattgcagatgtggtgattgatgcgtgtatagcaacaaacagcatcaatatccgatctttggctcctgatatacagagcctttgtatggtttgttcatctgctggcgctttggttggatacgcaactagtggagtcttcgttcaccaacttggacctcaggttgagcctttacacctttttagtcacgttttcaggacgtgttccctttagatatcgagattagaaacttgaaatctcgtttttctgttttgttttttctgatatagggagcattaggggtattagcattttcgcctgcaacaatcgtcatacttgggtttttcatctacgagaaaagatcttctactgttcctacacaaaagaccaaaaagataaggccttagcctgtaatctcaactcctttgatctctctcacaggtgaccagaattg

SEQ ID NO: 169292 - DNA, 674 bp, Arabidopsis thaliana landsberg
cgaaattgcttctacattatggagttaagcatcgggttgctactccctaccatccacaaacgagcggccaagttgaagtttccaacatgcaaatcaaagaaattcttgagaaaacagtgggtaaggcgaaaaaggagtggtcctacaagttagatgatgcgctgtgggcttacatgacagctttcaaaactccgcttggtaccacaccttttcattttatatatggtaaagcttgtcatcttccagtgtaataagagcacaaagcagcttgggcagtcaagatgattaatttcgacatcaaatcggctggagaaaggagacttattcagttgaatgagcttgttgtaatacgaattcacgcctatgacaactcgaagctctacaaagaacgcacaaaagcttaccacgacaagaagatcctcactcggacctttgagcctaatgacccagggacttctttatgaactctagattgacaattatttcctggcaaattgtcttctcgttggacaggtccctacacaatccactcggttaggccatatggaactatcattctcaaaaacaacaatggcaaaccatttgctgtgaatggacagagagtcaaacactactgggctgaagctgagattccagtagaaaagtctttggatctctaggacccaccggttgat

SEQ ID NO: 169293 - DNA, 1233 bp, Arabidopsis thaliana landsberg
  unsure (1)..(1233): unsure at all n locations
tagatcaccgaccccaattcttcatcgacatgcacactagcaaacctacaataagggaggtttatgagaggaagaggcttgccgcaaaggagaagcgtgtcgcgaaagagaaacatgctgccgagagtgtgaatgtcgatcccgatacagccagggattgggaagttactcttgaggttgttttgcctgctgcgttggagcctgctgaggtgggtgataccggcttatctctgacagatccgccggttgaagtagctagtcaagcgatcgtcgcgattccgaccggcgacaaggcctcgggaaaacgtccacaggttgacgactccaaggagaagaaaaggaagaagaagaagaagaagaagaagacagcgaaaagggaggacaagcctcctatttttgaggataaggctgcttcggcgaatctcctcagaaagtgcgcgagtagcctacttccggcttcagatactctactggagtctagaaagtacgctgagacggcgtcacattttctaagggtaagtgccttaatcattttagctacttggcgcgttctctgagctattatgaacgtggatgtctgtctttttgtttcaggccgttggttagatgaatgggatggtccagtcctataactcggcaatgcaaaacaatctggaggcggttaataagttggttgaagctgacgccagggcgaaagaggtcgagcaggcgagtgacgtggtgttctcncaggccatcgagtcattattgttgacagaagaggttaaaaatatagctatggtcaataagaaatatgccatcaagatggtcgagcgcgacctgaagatggactctgaggttgttcgttgtaggcgacttctcccgaggcgagaggacttaggaacatgaaagtggctcgggctatgcaaacatgcaaggtgagaacttcggaggccttcaccgccaagttcagggtggccgaggagaagatgtcgctcttcgaggatgctaacgaccagtttatgtatttgccccaaggcgtgggctaatccacaaatgatcaaggcgcttgaagatggcagatctttggcgaccgagaaaaaacaggtcgaggagtggctgaaggatttcgccgatgcagaggtcaaccttgttcgtctcacatctgaactgaaggaagagctcaaagcccctgctcctgaaccagctcctctaagccctcgaggtaatagatcgatcgagactcttgcggat

SEQ ID NO: 169294 - DNA, 623 bp, Arabidopsis thaliana landsberg
  unsure (1)..(623): unsure at all n locations
cataaatccacagaccattatgcttggcaggaacnccgtcaaacaacatcgaactttgggcacgtgaacaaaccatcgatccaggtgattatcactaactgaatgtgtcctgtttttaagttgaaacgaaatcaaaggttttctctgatactgacttttggatactactatgcaggctttgattcacgggttgaacagacactattactcaatagcaatcaactataggaagaacgagcttgaggagaagatgttactcaacctccacaagaagaaatggacagatggtctgacgctaagacgctttgacacccactccaagaccaacgaacagacggtccaggtaaagaaacacagggttatgtttttatctgttcaagcatattctacaatcatgttcattgacattttcattatctcctgtttaacaggagatgttgagcttggctgctaaatataacaaggcggttaaagaggagaacgagttgtcaccagagaagctggcaattgtgaatgtgggaagacaagatgcaaagaagcatctggaagaacatgtctcgaacctcatgtcatccaacattgttcagacactaggcactatgctcgacactgttgtcttctag

SEQ ID NO: 169295 - DNA, 589 bp, Arabidopsis thaliana landsberg
gtatgagctgaaaacccgcaatgaatcaatctatatttagcaacttgactattgttttggttcgttgattctgttttattttttatctcatgttatgtagggtgtggctatagtaatgcttttggtgattgttggtgttaacttaggattaggaacacttcctcctgttgataattttgctcatattggaggtttctttggtggttttctactcggttttcttctcttgattcatccgcagttcgaatgggaagaaaaccaagtttctcttatgcctggtaccattgttaaacccaagtacaacacttgccaactcgtgctttgcatagttgcatcgatcgtctttgtcgcagggtaagcttcagaactttcttgatccttcatgatactaactaccatttcttcttctcatgttggttaagcttcagaacatttgattgggttactaaaccggacttcggttttgatggatgttataccaatgtgcaggtttacttctggattggtgatactattcagaggagatagcttgaacagatattgtaagtggtgccataaactaagctactcctctaaatcccaatggaca

SEQ ID NO: 169296 - DNA, 546 bp, Arabidopsis thaliana landsberg; identical to SEQ ID NO: 31703

SEQ ID NO: 169297 - DNA, 533 bp, Arabidopsis thaliana landsberg
  unsure (1)..(533): unsure at all n locations
ctcacatgccaataccaaactgtcgtatgcncaggtgcgtgcacgtttgacggcgtgctggacaggataccattgaagacaggcagcctgcnnnnnnnnnnnnnnnnnnnnnnnnnnnnnnnnnnnnnnnnnnnnnnnnnngccctatttcaatatttctgaaaatgaatacctcgattacctgagggagaaacagcgtcatgaacaggcagataaagaggtgatgctgttattgtctgacggacaggaatacccatacagcggcnnnnnnnnnnnnnnnnnnnnnnaatttgagcagaacacaggctccattgcattcagggcacgctttcccaacccttcccacctgctgaaacataaagccacaggcaaagtatgtctttccaggagcgtagaaaaagcgctggtgctgccgcagaaatccgtcttcgaaatacaggacaggaactacgtgtacatcatcgacagcaccaataccgtgaacatacgcagctttgtgccgaaggcccgcttcgaaaaattctacgtggtgg

SEQ ID NO: 169298 - DNA, 1084 bp, Arabidopsis thaliana landsberg
ttatgttattagactcttcaggttgcagtatcccgtgtaatcaatagatttttctggcctaaaacttcatggagcaaaattttctcttacttagtctgattgactttgttgtttttcggtcgatgctctcatttggttgtgtttgtctcattctatttgcctttatgttaaaagatgttgtagtggtagtacaccaatcgtatcatacgttagtagaagttgtagttctattaggtttggttttcattgaaatggcttcccctgaagaagcttctacagctttcatatctcttgaatcctatgtaagaatattgcattcatcgcttcttttatgtctaaattggcatataattgttgagattttgctgtgcttgtctcatttttatctgtcttttagattagcagctgctgtacattgtgttaatagaccttttcatgttgcagcatcccaatttgattgatttgtgttttttttgtacctggtctttctttgattttcatctgccatttaattgtgtattgttgtttaggaatatgagggtcgtcgtttgaaggtagactatgcaaagaccaaaaagaagaagacatatgcgccgcgtgagacgccttcaccagtgcctacattcaatttgtttgttgcaaacttggcatttgaagcaagggccaagcatcttaaggagttctttgatgcagacactggtaatgttgtctccactgaagttatattccatgaaaatccaaggaggtcgagtggttacgggtttgtctctttcaaaaccaagaaacaggccgaggcagcgcttattgagttccaaggaaaggtaaatccaagctattctaaatgataatgatctaatcataatttaaagcattctaggcttatcagttatgttaattttgagcaaagttgaagctcattattaccgtctgatatagttattgaatggaataaaaaatacaagagagtgtttatgttttggtttatttgggtatgttgctgataccatctccagctcagggaccatagatggacccgtaaaaagatttatatagtctttagactcttaatgcatcaatgagacaa

SEQ ID NO: 169299 - DNA, 1277 bp, Arabidopsis thaliana landsberg
cttcaccatcttggtagagctttatcgaacctgtgggatctgatggatgcatcttatgaaggtcgtcaaaagttttttcatgtcattgatttactgtcgtccgcaccatcagacgtgtgtgctcctggaagcattacattggacataattcagcaggtaagtatataactatgtagacatgtagtacaatggtttcataccaatgatggctggtggtaaccgccttttctttgtgcaaatttttcccaaggctgaggctgaagtcaagagactagatcaactgaaagcaagcagaatcaaagaacttttcatcaagaagcaaaaggaactagaagatacgtgcaacatgtcgcatatggagactccatcaacggaaatgggaaatatcacgaaccttgtagactctggtttgactaattgtaactttctgcaactgctacgtgtctttgttatacatgtcaaactcattgcagagttttgtcctctattttaaaggggaagttgaccatgttgaccttctagccgccatggatgaaaagatagcaagagcaaaggaagaagcagcaagtagaaaaggaataattgaaaaagttgataggtggatgttggcaagtgatgaagagcgctggctagaagaatatgaccaggttccaatctcttttctatgaaagtaactaaatgttatctctgtagtctaactcatacaagaaacactaacgttgtcacaggacgagaatcggtactcagtaagtagaaatgctcatcgaaacctaaggagagcagaacgggcacgcataacagtcagcaaaatctcaggtaatataagcagttccttagtgtccaacacaaataaagctacaaatgaccctgcattttcttaagttaggaagcaaactagtcactgacccttctataatatttggaccaggattagtggaatctatattggttaaggctaagagctgggaggtagaaagacagaaagtcttcttatacaatgaggtaacacaacttgatgcctttttgaattaacaaagagaaactctaaattagatagagtaatcatcacctgttaagagttatccaggtacctcttgttgcaatgttgcaagaatacaataagctgaggcaggaaaaagaaatggagaagcaaaggctccgggttagtctctcctcctaagccttaaatacagtaagaaaaccaaaactgtgaaaggaaatatttgaagttaaacctgattgacaataaaatgcaggaaatgaagaagatgagcatt

SEQ ID NO: 169300 - DNA, 1332 bp, Arabidopsis thaliana landsberg
aaaaagtaaaaaaaataaatatgcaggaccgcgtgagattcatatgcaaaagaaccgtggtgagcactagatcgattgaaccaggacgattataccagttatcagtattggaccacgtcatggaaccaaaccacattcgtctagtctactattaccggtgttccaagactagagaaccgggagaaatcacaaaaaaattaagggagtcattagcatacacactcaattgttatccgattgtaaccgggagactggttaaagaagttgatggtatggaagagaataaggatttaagccaacgatggatggtaaagagcaacgacgccggcgtgaggatggtggaggcgagagcaaccggttcagttaaggaatggcttaggagtgtaaatagagaggaagaactcaagcttgttcattgggaagacatgtatcatcttcaatattattggtctaccttctgtgttcaggtatatataatccggtttattctggcttggtttagtacggtctggttttgtcttactttttcttgttttatttttaatctacaggtgactgagtttgaaagcggtggtttagctattggattaagttgtagccatctcttagccgatccagtttgtgcaatgatgtttattcgagcttgggcagatttaactttgtctcggtccatgatggctccaccactattccacccgttgccgcctcgccggttttccaaccaaagactaatctctaacaaccaactgcttagccattacatcaaatcttgctcttcaacggctccactttcaaacgtgaccgaggaccatatggccaccgttacttttctgtttccggatccgctggtcagagccggcgagaatgagccaaggatttcgacatttgagattttggctggactcttttgggtctgtgttagtcgagccaaaggaaaaagaaacgagctcatggacatgtccttgtgcttagacgttaggaaattattgcgtttagaccaaagttattttggtaattgcatggtttatcacaaggtaccttactccaaaccggttaaaaccaaagataaactcttattccacgctgttcaagagattgagaacataaccaagagactagactacgacacggtcatggacttgattgagtggttgagtagcaataacggtgcgatatcgaatggttcagatctcgtgtgtactaatttagagaacatgtctcattcacgtgcgatgatgttcgaggaggatttggctctgagccacgtatcttgctatgtagaagggcctgtagctggaggtggacaggtcatagtgcttccctcaccgcccg

SEQ ID NO: 169301 - DNA, 674 bp, Arabidopsis thaliana landsberg
ggcccaaaagccgggccccgaaaggccgcccggggtgcccccggttaagcccctggggcgggggcccagaccaaggcggaaccctgccgattctggatgccaataccattgggcccggtgcaggcgctgaatgcggtggacatcaaggtgcgggtggacggcgagttacagcagttgcacttccaggagggccatatggtcaaggccgggcaactgctcgccgagatcgacccgcgcccctacgccgcccaggtgctgcaggccaaggccaacaaggcgcgcgacgaagcgcagctggcggtggccaaggtcaacctcgagcgcgccggcaagctggccgccgcccatgccgggccgagccaggacgtgtacaccctgcgcggccaggtcgcctccgtgcaagccacgatccaggccgaccaggcggcgctggacaccgcccagctgcagctcggctacacccgcatctccgcgcccttcgccgggcgcaccgggcagcgcctggtggacgccggcagcatcgtccacgccagcgacaacaccggcttgctgacgctcccccagatggcgcccatctccctggccttcagcatgacaccaggacgacctggccgaagtactgcaggccaacgccgggcaggcgctgcaggtcgaggcgctgagccgcgtcggcc

SEQ ID NO: 169302 - DNA, 843 bp, Arabidopsis thaliana landsberg
ctctagaggatcagaggatccccggcttatgaggtgcaagtccatcatgcgggaattgattggagggaaaaagctagggttttgaggattcatatctgaaccgctcaggaaagtgaaaagtctcttgcgtgctctagagaactcactctgatctctaaggaaaatcattctgtgcaaatgaaatcgttcttcaagggtcttgtgcaatctagaatcgagtcttcaggatctgaatcttcatccatagcatcagaaagctacagcccaaatatgatggatgatcttgtgagcactcctcacaatcagttggttctgcatgcagatttcggcaggccacatttgcgacgtgcttcatcaccggactgcctccacatgtccagcttcctgtagaacttgtggatattagtgatgatgatgaggacaattcgtcttccatcgttccagtcagaaaccgacagaactctgtgccaatgtctactgaaatcccaggggtatcatccgtgacatcgcgtctggcgaagcgcaaacgagacactctaagtgaggagttcctgtcacagaaacaacagaaaggaaagggagttgttgtttcaggtcctagaaggagcaatctatttcaggagttcaaattcagttctcctctcgctgaacaaaggtacttgtatttctctcgtcgacaaatgatcaaggaactgaatttggatcctctggctgataaatggatcacggatgtgatctctgaggcgggtcttctcaacacagtaacgggaattcaaggattttaggacgaggtggtctatgaattctgggccaacttaccttccgttcgagtggaaaggactc

SEQ ID NO: 169303 - DNA, 607 bp, Arabidopsis thaliana landsberg
tacgtcgtgtttctttctgtcgaaattgattggtcggccgttgattacttggctatggcctgacaaattaagattctttcaagcagaggtaagtctctttgttgtagcgatgaaatgatctttgtgaaagttctttacttggtactgattaagttgtggctttatacctttcagattagtaagcgtagagataagcttctgaactatatgttgtttttgaggataacaccaactctgccaaatctttttatcaatcttgcttctcctatagtcgatgtacctttccatgtcttctttttggcgacattgattggtctcatccctgcagcttatataactgtcagagtaagctcttttacctccatctttccgttaatgatatgctatcattcaacattcctgtgtttcatctcttttcgccatctacataaagaacgaagaacatggctttaaattctggttctgtttattgcaggctggccttgctattggagatctcaaatcggtgaaagatctgtatgatttcaagacattgtcagtgcttttcctcatcgggtttatctctattcttccaacgatactgaaaagaaagaagattgttgaatag

SEQ ID NO: 169304 - DNA, 599 bp, Arabidopsis thaliana landsberg
agtatattcttacgctgtagttgagttggtggatgatagtggcctagtaggttctggtttgctttttacggtaggggctggtaacgaacttgtttgccaggcagctgatttttatagtcagaccttaaaaggcaaagatatagaagatgtaatggtagattttggagggttgttcaacaggttgtctaatgagcagcaattcaggtggttagggccccataaaggtgtcgtacatttggccctggccgccgtaaccaatgcttgttttgatctttgggccaaaaaaagaggcgtaccactttggaaattacttcttgaactttctccagcagagatcataagcaccttggatcttagttatttagaagatgtcctaaccagacaggaggctttagccattttgacgggccagcaattgtcagcatctttaagaatgcccatactaaaggtaggctatcctggatatgacacttcgattggttggtttaattacagcgatgataaaatcagagaatcttgtaaaaaggcaatggatgagggcttttctgctgtcaaattaaaagtaggatctacagacacccaaagagatatgcgcaggg

SEQ ID NO: 169305 - DNA, 1493 bp, Arabidopsis thaliana landsberg
tttcaaactgttgtagattgcacaaagactagataagctgcagaaaagaggatggaagcctcgaaggacgattattctgtgtaattgggatgctgaggagtatggcctggtctctagtctctacctcactgtttatatgtgtgcttttgtgatgttgaaagaagcagaaatttggggtttgatgttttttttttatgtagattgggtcaacagaatgggtagaagaaaatagagagatgttaagttcgagagcagtggcctacttgaatgtagattgtgcggtatctggccctggatttcatgcctctgcgactccacaactagatgaattgatcaaagtagctgctcaagaggtactttcaaaggcagttttatagcaatcttttgagcaaggaggacacataatcaagctttttggttaactgtgtgcaggtccgggatccagataacgcaacgcaaacaatctatgaatcgtggataggatcaagcgactctgttgtagtaagtgaagagactagcttagataatgaattttgtcttatggttaaactgatttgtttacttggtatgtgaagatcaggagattagggggcggaggttcggattatgcatcatttgtacaacatgttggtgttccaggagttgacatgtcctttggacgaggtaaatatctgattcagccacttacatgaaccaaatatcattgtctgctgtataaacgccgagtcagcatttttactaataggctatccagtatatcactctatgtatgatgacttcacttggatggaaaagtttggtgatccgatgtttcagcgacatgtcgcaatggctagtgttcttggtttggtcgctcttcggttagcagatgaggaaattataccactcaactatacttcctatgcattagaactcaaggtaactaattgatatcctataaaacatatggccaaagcaattaatgagctaagaggttgctgtaatggtatttgtcaacctgcataaaacagaaaagcgcggaagatttggagaatgagaagttaggacatagcatagatgtttctacgttgattaagtctatcgaagatttatctacggctgcaaaacggataaacatagagaaagaggtaatgacatttgtttacatttgacaaagtgacaagtatattggttgtattgagagtagtcttgagtggattgtgcaggcagttaaaggaactcttaaagtgagagagcttaatgatagattaatgatggcagaacgagctttaacagaccgagatggactctctgaaagaccatggtacaagcatttgatatacggaccatcgaagtacgatgactacggatctaaatcattccctggagttgatgatgcaattgacaatgcaaacagggttaacacaaaagcatcttgggaaaatgttcaacaccagatttggagagtctctagagctattagacatgcttcacttgttttaaaaggtgaactg

SEQ ID NO: 169306 - DNA, 2064 bp, Arabidopsis thaliana landsberg; identical to SEQ ID NO: 5415

SEQ ID NO: 169307 - DNA, 2526 bp, Arabidopsis thaliana landsberg
  unsure (1)..(2526): unsure at all n locations
cagatattgcacttggagatttagaggtcagaattcaatttttaattctgttttggctgagaagtctttattttaatccctcttttattttgggatcaggcttgcttttttatgaaatttatactttttcttttgcatcgtcaattactttctctggcagagacaacttgctgatcacgagcatgaagtacttgaaatgaattcaaacagtgaaaagcttcggcagacatataacgaacttctagaattcaagatagttcttgaaaaggtaggtgtattcgcctttcgtctcagatctatatctagtaattgacaaggttgtatagcgcagtagctgttgctcacttttcatccaacttttactcgctaagatgtaagctcatatattgctctttttacctttttttccaggcaagtggtttccttgtctcaagtaatactcatgcaattggagaagaaattgaactacatgaaagcacctactcgaataacggttttattgagactgcctctttacttgagcaggtgattgcatgtcaaagtttccgttttactgttgctacctggagtctcatttttatctttactaagaaaacagttattttattcacaggaaatgaatcctggacactctaatcaatcaggattgagatttattagtggaatcatcaacaaagacaaacttcttaagtttgaaagaatgttgtttcgtgcaacacgaggcaatatgcttttcaaccaaacaacctctgatgaggaaatcatggatccttcaacatcagaaatggtcaggataatctctgatctcagtgataatcatatgttatttcagttggatgcttatttactaactggttttgtgctcgtaggtggagaaagttgtatttgtggtattcttctctggggagcaagcaagaacaaaaatattgaaaatatgtgaagcatttggtgcaaattgctatcctgtccccgaggatacaactaagcagaggcagcttactagagaagtaagttaaacattccagaacttgttcttatttagagagagctattgaagatatttctatacactgtttttgtaaaacgattcctgcaagttgatttcatcttgttcatatgattttgttactgtccaatcatatgtgactgctgatttctttttcacactgtatgcatcacactattgctgttcctaaatatcaatgtatctggagtgtaggttttatcccgactctctgatctggaagccacattagatgctggaactcgccatcggaataatgcccttaattctgttggctatagcttaactaactggatcaccacggtaagaaataacatctgcaattagtttttttcccctttaattagatgaagtatatatgggattttatggtccacacattatgttacatccgtgattttagctggccttttactggtaggttcggagagaaaaagctgtttatgatactctgaatatgctaaattttgatgtaaccaagaaatgccttgttggcgaaggttggtgccccacatttgctaagacccaggtatactacaacgttgttatcacttttacacaatcgactatcatttccttgtaagtgcaattcatcaacaacttatgtgcagattcatgaggtcctgcagcgagcaactttcgacagcagttcacaggtgggcgttatatttcatgtaatgcaagcagtagaatcacctcccacctatttcagaacgaacaaacttacaaatgccttccaggagattattgatgcttacgggttagttccacttttgatcattaccttgtactattgtaatgttccatggtaatgagaaaacatcatcatttagatgcaagtttttggtcccgtgtttccctcatcatacattcatgattttagaataactggctgctttctaacaacgcttaacattcttcattccgtaccttcttaatcaaatgatttgttgattgcatatgccagtttatttccgctgatcaccacattgtatgtatgacatgatacttacttggcagtgttgcgagatatcaagaggcaagccctgcgtttattcagttgtcacatatccctttttgtttgctgttatgtttggtgattggggtcatggtctatgcttgctgctaggagcgttgtatcttcttgctcgtgaaagaaagttgagtacgcaggtatggttgtcaccctaatgtttttgtattagttgaacgagaaaccagtgacagtactggctttgagcataaaacatccataacaccataacatagagttttgttttgtggctgataaattttttgtnnnnnnnnnnnnnnnnnnngctgcagcaatagttatgttgcattctcgtgctctcagctagtgttgcaatttcttgtgctcttagaggattttcagatgagagatggtgaatttcaatcatttagagtcagtataaaatatatggcaatagcaattagttttaccttttcactgtaggatataggttaacatgagggttaaa

SEQ ID NO: 169308 - DNA, 1036 bp, Arabidopsis thaliana landsberg
catggctatacaaggcgacaaggaatcatctataccttagctacctcaaattcgaagccataagcgcttacgttgccgaattcagctgggatctcaagtacgctggtgcgcagatcctcatcaccaaggtacataacacatcaaaatttaacttctttttttcaaaaccaatttatgtattaaaatatatgtaaatgcatgcagttgatcttcgaaggccacaaaggacttgatctatacaaacaacaagccgatagttttgtatgctctaacctccctggcagtccttaccaccaagtcttcactaccccaggttttgcctccatgaaataacatatatacatatttgtaaaacttaatgtatacagtatgattgatcatatatagtgtgatcttcttgcttaaaggtggtatgattcacttgagggatggtgccaacagtcaatatgtcaccgccaccgccttcttgttctcggcctacgctgatatactacagaaacacaaccaaaagatctcttgcggtagccaccaattcgattcaacacacctcatggctttcgctaaaaaacaggtattatatatttttccataagaatgcaaaccaaacatacacaaaatatttgtgttccttatttttcacatatgagttaagaagttatatataatgtgttagatatatacctaatgtgttatcattatatgcatgttacagattgactacatactagggcataacccacaaggaagatcgtacatggttgggttcggaccaaacccaccaaagcaagcccatcacagaggagcctcagtgcccatgcatgaagccaacgcgccgctaagctgcccattgagcttcgtgaaatggtacaacaagaacgtacctaacgctaacgagctcaccggagccattttgggaggacctgaccgtcaagacaaattccaggatctccgatggacctccgtgtacacagagccttgtacttacatcaactctatcgccgttggtgttctcgctaagctcgctgcggcttagagc

SEQ ID NO: 169309 - DNA, 1558 bp, Arabidopsis thaliana landsberg
cttgaagatctttgcaccagtgatggtattagcgcttgttgttcttgttccagtaaatgtatcaagtggaacacttttcttcttgaagaaggaacttgtggtcagcaatatcgataagctctctatatccaatgttcagcccaaatcttcaaagtgagcttacttgtgaactaaaattatgctttactaatcaatgagttttactggctaaagtttaacatttctgtgtatgtgtgtgtgtgtgtttaggttcttctttcatattgcagtagagtacattttcacgttctgggcatgtttcatgctctacagagaatacaataatgtcgctattatgcgtctgcagtatttagcttcacagcgtaggcgtccagaacagttcactgtgagtgaaaaagccgcaaacttcaaacatggataattgttgcatctatgtttatatatactactgtttgtttttgcaggttgttgttagaaacgtccctgacatgcctggtcactcggttcccgataccgttgatcagttctttaagacgaatcaccctgagcattacctctgtcatcaagtaattttgtttgtccttcatcacttactttagttgtagaatgcgttagtgtgtgattgatgaattcaacattcttgtttcaggctgtttataatgcgaacacttacgcaaagctggtgaagcaaagagcgaagttgcaacgttggtttgactattatgtgctgaagcatcaacgtaatccgcataagcagcctacttgcagagttagtctctcccacgccatttgtttagctttttgaaatgaaacgatgttgattgtgatgggcggattttcttttttcagacaggttttcttggtctatggggtaagagggttgattccattgagtactacaagcaacaaatcaaggagtttgaccacaatgtaagccattcatttgctttttaagttactgctgaaacagaaacttaaacctcgtttcatctttggtgatacagatgtctttggagcgtcaaaaagttctcaaggactccaagctaatgcttcctgttgcatttgtgtcgtttgattcacgatggggtgctgctgtttgtgcacagacgcagcagagcaagaatccgacattatggttaacgagtagtgctccagagcctcgtgatatctattggcaaaaccttgctataccttttatctctttaaccatccggaaactcgtaattggtgtctcagtctttgccttggtctttttctacatgattcctatcgccttcgtgcaatctcttgccaatttagaaggtcttgacagagttgcacctttcctcagacctgttactagattgtaagtctctccatctatctcggttttttgcttcttggtatgttagaccattgatccctctccttggtatttattgcagggatttcatcaagtcattcttacagggtttcctccccggtcttgcgctgaaaattttcttgtggattctccctacggttctgctaattatgtcgaagattgagggatacatcgctttatcaacccttgagcgta

SEQ ID NO: 169310 - DNA, 1455 bp, Arabidopsis thaliana landsberg
tctacgtctcattggatggatatactaagcaatcgtctgcataaatgcattagacgaatcaagaattttctttgtgttttctgagttgagtcacttgcctgcctgcagcaaatgaaccaaaagatgcagacatattatggacaagtgtacaggtggatgatgagctcaaaaaagaggtgggaataacagatgaccagtacataaatcagtttccctttgaggcatgtcttgttatgaagcatcatcttgcagagactattcaaatggtaaattcagcagattatacccttagattatcatagcacgttagtaacttgtttctgaaatccctatgttttgctttacagggttatggatctccaaaatggttacagcctacctataatcttgaaacccaattgtcccagtttattggggactattgtgtccgcaaacgtgatcaattgaacaatttgtggatcttgaaaccatggaacatggcacggacaatcgacacaagtataaccgataatttatctgctatcatccgcatgatggaaactggtcccaagatctgccagaagtacatagagcaccctgctttgttcaaggggaacaagtttgatctgcgatatgttgtgctagtgcggagtattgacccgctggagatttacctaatagagatattttgggtaatgcttattttaattttcattacaaccaatacaagcgcttatttactcatatatatcaatcctatatgtttgatttcaggttaggttgtccaacaatccatattcattggaaaagcacagtttctttgaatatgaaactcactttactgtcatggtattagttaagaacactctttccacataatgattcagcaactctcgttttcccttttcatgttcattctcttatgcgtttcagaactatggtcggaagttgaatcacaagcccacggcagagtttgtgagagaatttgaacaagaacataacggtatacactatatttgggtttactttctccagatttttatgcatttcattttgtcaataacacgattcaactctcaatagttaaatggatggatatccatgagaaggtgaagcaggtgatacgggcagtgtttgaggcggcagctcacgcgcatccagagatgcaatcccccaaatctagagcaatgtacggagtagatgtaatgctcgatagctccttcgagccaaaaatcttggaggttcgttactaaaactacctgacatatacttgtttccttgagaataaactcttggaaattgcaagttctcatgattgtctatgcaacgcaggttacatactgtcctgattgcatgcgggcttgcaaatatgacatggaaaccatagatggaaaaggtattgttaaaggcggagatttcttcaataatgtattcgggtgcctcttcttagacgagactgcacacgttactccattg

SEQ ID NO: 169311 - DNA, 1493 bp, Arabidopsis thaliana landsberg
taaatctcttacgacctattcttacaggctatccgacatattggtcttgatagtaagtgttttgattttcttaaaaaaacgatatatatatagtacatgatacactgtttgttttcttacaattcaggtcacctgcacactaactaatgttttatgtttgtttactaatcttccaaagaggcggtgccaaaaaagatcctatcgttcatgatcgtaccatacttgtcaagagagaacgtatccagccatttacaggtttgatatctcttgtcaaaaatgtttttggattttactgtttaaaatgggaaaaagttggaaaaacctctattaactcgaatcaaacaaataaactttatatcttattaagcacaaaaatcttccaagtttgagttgatttgtcgatttcaacctatccttagtcaacatcaagagctcgttataacaccctttaacttaaacttggggacttttttcctccactttaaatacatcataccatgcatagattatgtgtcattctacttgttatttaacttaaattcatttgctatgttatgcagaaatatcggatattcttgagaagagttgcggagcagggtttgtatagcatgttgtcggatagaggcatagactcgatgtttcgacaaactcacattaaggagccgtacttcaactattacacaccatctacttcttggtatgacacaagtcttaacaatagatcattctattccaaacccgtacatggctttggacagtctaaactcttgtccacaacacgtgagcccgtctgcttcaaccagatgccttacaactacatgaaccggtcatccacctatgagccgcaccgtattggatctggatcaaacttgacgctgcccatccagagcaacctcagtttcccaaaccaaccatctcaaaacgaagaaagaagaagctttttcgaaccacccgtgatggcaaacaaaatcgcccaaacatctcaagttcttgggtttggacaacttggaccgtcagctatcagtggtcataatttcaacaataacatgacgagtagatatggaagtttgattccgagccaaccgggacctagccacttctcctatgggatgcaatcgttcttaaacaatgagaacgtaacatataaccctcagccacctgccaatgcaactacacagccaaatcttgatgaacttcctcaactggagaatctcaacttatacaatgatttcggcaacactagtgagcttccttacaacataagtaactttcaattcgatgacaacaaggtatattttcccaaccctaatcttacaatgatatatatatgtatattgaagtaggtgctgtgagatatgtgtttaaataatcggtttgtgcagcatcaacaaggagaagcggatcccaccaaatttgagctcccagctgcaaaattttcgactgaactgaatcatgaagacgatggtgactggaccttcgtgaacataaaccag

SEQ ID NO: 169312 - DNA, 1062 bp, Arabidopsis thaliana landsberg
tcaagaccatcgactccaacttctagaccacaactctcagcaagctccccaaatataattgcttctagaccaaattctcgtccttcaacccctacccgtcgaagcccatcatccacctcattgtctgcaacatcaggacccactatttcaggtggacgtgctgcatcaaatggtcgtactggaccttcattgtctaggccaagctctcctggacctagagttagaaacaccccgcaacagccaattgtgctagcagacttccctcttgatacaccacctaatctgagaacatctctcccggacagaccaatatcagctggcaggtccaggccagttggtggtagcagcatggctaaggcaagtccagaacccaaaggtcccatcacaagaaggaattcatctcctattgtgacgagaggaagactcactgagacccaaggaaaaggccgttttggtggtaatgggcagcatctcacagatgcaccagagccccgaaggatttcaaacgtttctgacataacttcacggagaaccgtgaagacctcgacaactgtcacggacaataacaacgggcttgggaggtcattctcaaaaagttcactcgatatggccattagacacatggtacatatgtctcttctcactaaatgcaagtagctttataccatgctatgaatatctcaacattttttatggtgtgtgtaggacataagaaaccggaagactaatggttgcgcactatcaaccacaacgctattccctcagagcatcagaccagcctcatccaagatccagccaatccgttcagggaataatcattcggattctatcagcagcaatggcacagagaacgggaatgaagcaaacgagggtagaagactgatggggaagttgagtgacatggacatgtatgagagctcaaggtatgatgcattgttgctgaaagaggacgtcaaaaacacaaactggttacatagcatcgatgaccggttgtcagatcacggactcatgtttgacaatggaggattcgagctacttccagagccatttgccccactataa

SEQ ID NO: 169313 - DNA, 1281 bp, Arabidopsis thaliana landsberg
atgacggaacagttgctgcttcatggaactcttgaagtgaagatttataggatcgataagttgcatcaacgttcaagattcaatttatgcggcaaggtaatatataatttcaacactatctactaataagagatgttagacgaaggttacttgtaaaataagactcaaaaatgattcataggggaacaaggagccaacaggtaaaaagactcaatctcaaatcaaaagactaacggactcatgcacaagtttgtttggaggacatctatacgtaactattgacctagacaggtcaagagtggctcgaaccatgatgagacgtcatcctaaatggttacaatccttccacgtctacaccgcacattcaatctctaaaatcgtattcacagttaaagaagatgaaccggtcggtgctagtttgatagggcgagcttatttacctgtaaccgaagtcatcaccggacaacctatagaccgatggcttgatatcttagacgagaataggagaccaatccaaggtggttccaaactccatgtacgtgtgaagttcactcatgtgacacaggacgtgaattggaacaaaggaataatattaccttccttcaatggagttcctaacgcttatttcaaccaaagagaaggttgcaaagttacactataccaagacgctcacgttcttaacgaataccctgatgttaccctcacgggaggacaagtgatatacaagcatcatcggtgttgggaagagattttcgatgcaatatgggaagcaaaacatttgatatacatcgctggttggtccgtaaacaccgacgtaacattggttagagatcctaaacggacgagaccgggaggagacctaaagttaggggaattgctgaagaagaaagcagaagaaaacgtaaccgtgctgatgcttgtgtgggacgatagaacgtctcacgaagtgtttaagagagacggtttgatgatgactcatgatcaagaaacttacgattacttcaagaacacgaaagtgcgttgcgttctctgtccgcggaatccggataatggtgatagcattgtgcaagggttcgaggtcgctactatgtttactcatcatcaaaaaacgattgtggtggacagtaagtggacgggtcattaaccaagagaaggatagtgagttttcttggaggtattgatctttgtgatgggagatacgacactgtagagcatcctttgtttggtactctgaatagtgttcatgctaatgactttcaccagcccgaacttgatggtgca

SEQ ID NO: 169314 - DNA, 2119 bp, Arabidopsis thaliana landsberg
accggaatggctctctcctggcctctggtggcccaatcctgaagaagctgctccgtcctctactagagaactcataaagctccccgacaacggagagatgagtttgaggagatccacgacgcttaattgtaattcgcctgaagagaacggaggagaagggagagtttcgcagaggaagtcatctcgtggtaagtcacagccgctgcttatgttgacgaacggttgtcagcttcggaggtcgccgagatttaggccggtgcatgcaaatttcgacaatgtttgctcggttccggttaccgaagggggagtttcgcagaggaattcctctcgtggtaagtcacagccgctgcttactttgacgaacggttgtcagcttcggaggtcgccgagatttagggcggtggatggaaattttgacagtgtatgctcggttccggtgactggaaagtttgggtcgaggaagagaaagagtaatagtgctctcgataaggttagtcgtttgttcttgttagtagccacacaatgcaatgcagcttagttagagattggaaagtataatcgtcgttctttttttttgggttgatgcagaaggaaagctcagattctgatggattggcattcaagtaagtaaaagcttcacagcatttgttattgttttttttgcttgggaaatcatccttgaaatggggattttatgttaaaaattgatgcagagacatagctgtaattgccaagagcctggagatggaaatcatttccgagtgccaatataagaacaacgttgctgaaggtagatcaagattgcaagatccagccaagaggaaagttgacagtgatacattatcatcttcaagcatcaatagttctaaacagaatctcggaagcaataaacgaatgaggagatctcaaagattcatgaagggaacggagaatgagggagtagaaaatctaggcaagtctaaaggaaaagggatgtctctggcatcttgctcatttcgaagatctacaaggctatctggaactgttgaaactggcaacacagaaactttgaacagaagaaaagattgtggcccagcattatgtggtgcagaacaggtgaggggaactgagaggctggtgcaaattagtaagaatgatcactgttgtgaggctatgaagaaatgtgaaggtgatggcctagtttcatccaagcaagagctattagtttttccttcgggttgcatcaagaaaactgtaaatgtttgtagggacagaacgttaggaaaacccagatcttctggcctaaatacggatgatattcacactagctctttgaaaattagcaaaaatggtgctagtaatggattaactatgacgactgcgttagtggagcaagatgcaatggagtctttacttcagggtaaaactagtgcttgtggtgctgctgataagggaaaaactcgggaaatgcatgtaaattctactgtgatctatctctctgacagtgatgaaccgtcttctattgaatatttaaatggagataatttgacacaagtcaaaagtggatctgccctctcctctgggggtaatgagggaatcgtttcactggatctgaataatccaacgaaatcaaccaagagaaagggtaaacgggtaacccggactgctgtccaagagcagaacaaacgtagtatctgttttttcattggagagccactttcttgcgaggaggctcaagaaagatggcgctggagatatgaacttaaggtagttgattaatttctttgcacttgactgctttagcttaaaaaattgttaagttagtttgagcagtagagattgcatagtcttaagtatatatttgtaatccaacataaaaggacctcatatctttcttttcactctcaaaatatccgcttcatttctgattatgaatttcactaattttcaggaacgcaaatctaagagtagaggccaacaatcagagtaagtactggttgctttatcaactcactgttttttttctacaatattctcttccttcatatgtggtctgttttactgcatattcaatatcctgagcaaagtttttgaagagatgacgaagacaagattgttgcaaatgtagagtgccattatt

SEQ ID NO: 169315 - DNA, 626 bp, Arabidopsis thaliana landsberg
cgttgcctgtggcaaggtgatatccgtttactgtggcgcactatatccgagccggaatcataaggggctgagccttcaggaccttcggaatgagcggacaggacacctgcgaattgtgcttatagaatgtgcgtgtgccgcgcgaaaatctggtgcgcatggtcaaagggcagggcttcaagatgttgatgaaggagctggcctgggagcggatgatcgtggccgttctctctcaatcgtccgccgagttgagctggcaactggccagggactacacggtccagcgcaaggtcttcgggcacccgataggcagctaccaatacaaccgcttcaggctcgctgaaatgcgcaccgagatcacgatcggccgtgtatttgtcgaccgttgtcttgaactcgtactcaagaatcagcttgaacaggacgccgccgctgccgcaaaactatgggtcactgaaatgcagggacgcatcaccgaccagtgcctgcaactgcacggaggttacggatacatgctcgaatatccaattgcccgtatctacacagacacgcgcgcgcaacgtatctatgccggcaccaacgagatcatgcgcgaagtcgtggctcgatccatgtaacagggctac

SEQ ID NO: 169316 - DNA, 1161 bp, Arabidopsis thaliana landsberg; identical to SEQ ID NO: 16546

SEQ ID NO: 169317 - DNA, 2726 bp, Arabidopsis thaliana landsberg
atggacaagagaataccgtaccatctgaaaggaaagggcctggaaagaggctactcccccccaccaagaaggagaataaaagccccggatctggacacttctgagctcattggcagcaaactccctcaccctaatggggagactcactaaccctctagaccaaagactttggtctctattccctttccttgcaaatcgatggactcttaaaggcaaagcagtagggtcggatttgggaagagggtgcttccagttctgctttgactatgaagaagatttgcaaaaggtccttgataacagaccgtaccacttcgaccaatggatgatcatcttgcagaaatgggaaccaataatctctgactccttcccctccaagattccctcttggattgagttacaaggtctacctaaacactactggcaaccagaaatgctgaagtcaattggcgaggagcttggtgagatcctagacatggaaattacttcttccttagtgaaaatcagaatcctaatcgatggtctacaacctctggtaaaggagacagtggttgattttccagatggtagtgaagcaatcgttttactagaatataaaaacctaaagaaccattgccatcattgtttccgcctatcacatgaaaagaaaaactgccctgggttaagagaagcgacagagttacctggtgatgataactcctcaagatctcaacaacaccccagagagtcttcaagaaactactataccccaaaggataatttcacagaccctagaaaccaacaagtaggacctgttaaatctgatatcccacaaacaagaaactcttctttgaaaagaaagttttctgacagagaaagaatgccaaactcatactctgcagaaagatcctacaatcgcaaccaccactcttctagagcaccacaaggtcggtctgcggttctctatgagcgaagatctagtagagaactttcttactctcagcactctaatgacattaataggatttcacatcagagtaattttcagtggaaggaaaaatcttctccgatacctatctcacctctggagatctctaactcctccagaacaagacgaccccctctggagagaaatatttccagcatggccccctgctctcctcccctacgcagactacactccctagaagtggtctctcatcctcttccaattcctacaaaagaacaagtcatgggcaaattaagagaagtcactgtccaatacacaacttgtgctgatcctactgaaagtgcagcacagaaacaaagggtattgcaaggagaggcaaaaaacttgatgaacaatactgctgaccaaattattgaagctatagtagcctcgctaccaagttccctccctctattacctgataatagatctggagatccgatgcctgactcagtccccattgaagagcaactaataccatccaaagaagcagaaaaagtagtcaaaagaggaagaggtagaccccctctttcaaatccagctgggaaaaacactctaaaaatcactggggtcaagtgtcaatagaggaaccttgttcacagctccccaaaaaagaaccatacctcaaagccacctcaaaaacaaggtcactcaaaagctggtacgagtagagcacctcaaaactcgggttcaccacctcagcatgctggcgtttctgtaggaaaagccccaacttcagctccttctagctctggaggtccaaaagtaaaactgatccctgcgatgaagaaaaaaactttggattttcagaagccatcaacccatcttccttaagggctgtgagctggaactgttgtgggttggggaatcccatgacagttcagcggataagagagatccgtaaaaagatctttcctgacttactctttattatggaaacaaaaaaccccacaaccacagtcttgaatcttcttcaaggacttaactatccctcccatcatttagtggaacctcactcaccaggtgctggtggcttaaccctgttctggaaaaataacatagaagtagaaatacttagttcctgtccccactttattgacactagaattaaggcaaaaggtagggaattctatgctactttcctctatggagagccagacagaacaaagagaacacaagtctggactcgactccaagatattgccctcctcagggatggaccctgattgatcactggtgacttcaatgatatcattggcagcaatgagaaagttggtggtttagagagaccagaaagctttttttcagacctgcgctcctttatgtccacttgcgatctatatgacctcaaacacactggaagttttctatcttggaaagggaaacgtcatactcacacggttatgtgcagactggataggtccatggccaacagtgattggattattgcttacccctcaggcgacagtgagtatctccgtttcgagggctctgaccatcgccctatagttacatcctttgatcctgtaaaaaagaaaagaagaggcctcttcagatatgatagaagcctgaaaactaatgaggaggtaacagctctcatttctgaagtttggaactctgaaaatactgcaatgattgatagaagaatccatctgtgtagagaagctattatcacctggtgtaaaacccaacactctaatagccaacaagaaatccattctctcagaatccaactggatgaccaaatgagtaataatgatgc

SEQ ID NO: 169318 - DNA, 355 bp, Arabidopsis thaliana landsberg
ccctctctcaatccaaaaaccaaactccaaggttcaagatcttagtcaacaagactacttaggagagactgaactatcatctacgaccactaatgatattgtcaaaaataatgacgaagatgacgggacaatccctgatgaggaaagtctcatagagctctccttaccaagcggccattacattggccaccactatagtactatgattggtaaacaagatcaaaagatcatgtacaacaacatcccagatttcaggcttatccaattatcagccgagtatgaagacgataatctcatcgaaatcgacatttccatcggatcgatcaagtgttcaaggttccagatcaaagcctga

SEQ ID NO: 169319 - DNA, 1312 bp, Arabidopsis thaliana landsberg
ttcgtggtgatcctagatataaactaatgtctcccgaggaagtgataggaaaatttgtgagctttgaattgatgatcaaaggcttcaagaagatcatcgagcaaggcgcctcctccgtacccgagatacaacccgtcgcattcaaggtgacggaggagaagaaagaagagtctacatcaagtagactctccatcgatgcctccaagctcgacagcgaggacatgacgctcatcatcaagagcttccgccaaatcctcaagcaaaggagggggaaagactacaagccccgctccaagaaagtttgctacaagtgtggtaagcccggtcacttcatagcaaaatgtcctatttctagtgacagtgacagggcgacgacaagaggaggaagaagaaggagaagaagagatactacaagaagaagggcggcgatgcccacgtatgtcgggagtgggactccgacgagagctccaccgactcctcctccgacgaggatgccgcaaacatcatcgtcaacaaaggtctcctctttcccaacatcggccacaagtgctttatggcaaaggacggcaaaaagaagaaggtacaatctagaaccacccccaaatataatacatttagtgatgagggtagttctagtgaagatgaggataatttgcttaccctatttgccaaccttaacatgcaacagaaagaaaaattgaatgaattgataggtgctattcatgagaaggatgaactcttggatagccaagaggaattccttattaaggaaaacaaaaagcatgttaaagttaaaaatacttatgctcaggagatagaaaaatgtgaaaacttgactaaagagcttagcatttgccatgacactatttccaaccttagaactgagaatgttagtttaattgctaaggttgaaaaatcaaatgtttgtgatgattcaattgttagtcttaaaaatgataatgctaatttgatcactaagattgacaaattgaatgcatctctctctagccttaaaattgagaatgaaaaattaattgctaaggctaaaaatttaaatgtttgcaatgtttctatttccaatcttagagatgagaatgctatcttacatgctaagattgttgaattaaatacttgcaaaccctctacatctaccattgagcatgttaccatttgcactagatgtagagatattaatgttgatactattcatgatcacctagctttaattaaacaacaaaatgatcacatagctcaacttagtgctaaaattaatgagcctgacttagaaaacccaaaatttaaatttgctaaa

SEQ ID NO: 169320 - DNA, 796 bp, Arabidopsis thaliana landsberg; identical to SEQ ID NO: 69935

SEQ ID NO: 169321 - DNA, 1780 bp, Arabidopsis thaliana landsberg; identical to SEQ ID NO: 29504

SEQ ID NO: 169322 - DNA, 1530 bp, Arabidopsis thaliana landsberg
atctccagaggagaagatgactttttgcctgggaatataatcgaaatcgagcttcacaacttcatgacattcaatcacttggtatgcaaacctggatcacgtttgaaccttgttattggacctaacggatcaggtaagagttctcttgtctgtgccattgcactctgtcttggtggtgagcctcagcttcttgggagagctactagtgttggagcatatgttaagcgtggggaagattctggctatgtcaagatctctttgagagggaacaccagggaagaaaatcttacgatttttcgtaagatcgatacacgtaacaagtctgagtggatgtttaatggaagcacagttagtaagaaagatattgtggagataatacagaaattcaacattcaagttaacaatctcacgcagttcctgccacaagatagggtttgcgagtttgccaagttaactcctgtgcaactcctggaggagacggaaaaagctgttggggatcctcaactgccagtccatcatcgcgcgctagttgagaaaagccgtgatctgaagcagcttgagagagctgtggcgaaaaatggagagacgctgaatcagcttaaagctcttgttgatgagcaagagaaggacgtggagcgtgttaggcagagagagttgtttttgactaaggttgattccatgaagaagaaattgccatggctaaagtatgatatgaaaaaagctgagtacatggatgctaagaagagaatgaaggaagccgagaaaaaattggatgaagctgcaaagaatttgaacagcatgaaggaacctatagaaaagcaaaagaaggagaaagcagagacagattcaaaatgcaaaaaagttaagaatctcatggatgcaaatggaagaaaccgttgtcacttgctcgagaaagaagatgaggcagaagcacgtgtagtggcaacgtacaaagaactggaggaattgaagaaacaagaagagcatcgtcaagaaaggattctgaaagctactgaggatctcgttgctgcggaacgggaactccaaaacctgcctgtatacgaacgtcctgtagccaaacttgaagaattgagctctcaggttacagagctgcatcatagcattaacggaaagaagaatcagaaggaggacaacgagaagcttttgtctcagaagagatacaccctgcggcaatgcgtagataagttaaaggacatggagaatgcaaataacaaactcttgaaagcgttagctaactctggagctgataggatatttgacgcatatcaatgggtgcaacagaatcgtcatgagtttaaaagggaagtatatggtcctgttttggtggaggtttacgttccaaatcgagagaacgcttgctttttggagggtcatgtttctttttatatctggaagtcttttatcactcaggatccggaggaccgtgatctgctggttaaaaatttaaaacgatttgatgttcctgttctaaactatgtgggcaatagcggcaatcaaaaggctcccttt

SEQ ID NO: 169323 - DNA, 446 bp, Arabidopsis thaliana landsberg
ttatccctgcttgtgttgcctgttaattaactgagaccgtaaccgcaccgaaccggttctaggtcattttgagagattgtgttccgtatgaaaaaaacaaaacagagcattgttgcttgtagaggaaacaatctttgttcggtttcagttttttacagagctaaactagaggttccgaatttgtgaattttgatcgaaattcatgttttggttttgtacgatagctagcacaactcttcgactcatcggttgggataacaggacaagtagagttagtggaactagacggaccattcgttacgataagtttaagaggcaagttttggcatacgcgtgcaatggttctagctcgacttgggaactacttaaaacagaggatccctgagattttggaggttaatattgaagatgaaaagcaactcgatgatagtcctgcaaatttctaa

SEQ ID NO: 169324 - DNA, 1444 bp, Arabidopsis thaliana landsberg
  unsure (1)..(1444): unsure at all n locations
agcctagtaacttttctatggttgcaggagtcccggtaagatcataaacatcgcgataccgacattcgaagtacttacacaattcggagttgctgcagtcataatcaagaatactggtgaagtagaagcgtcttatagcttaacggtaatatccaaaactgaatcttatctgatagtttggttcgatatagtaatcgcatttcgcttccttctgcgcagtttgattgctccaaaggcgtggcttttgttgaggtaactaactctttttaaaacttctaagaagaagcgttgtttagaggaatattacaaactgataatgttttcaggaacaatttttcattataaaaccgaaagcggttactactcggtcttttaagctgtacccgacgaaagatcaggctgcaaagtatatatgcacaggtgattccttataaaaaaagactcacctcctccctttaccttgcctgtttccttgcataacaatcctctgttttttttgtgtgtagctatactcaaggactctcagttcagcgaagtagaccgagccgagtgtcaatttagtacaacggctaccgtacttgacaatggaactcaggtttcattaattacaatggaattcaaacggttttgattaatgttgatgttgataattaagtgaccatttttatcaacatgcaggttactaatccatttcaaattccagagactcaacctaaaggtttctttgattcgattaggatactatggacgaaaatcattaatggtttagtcgatttcatcaccggagatacttgcaggttacaacacttttcctaacctaacttgtcataataataacttgaaaagtgaactaatatcaataatattatgcagaaacaaatgctcgagtttcttcgacttcagttgccacattcaatacgtttgcttaagctggatggttatgtttggtcttctcctcgctctcttcccaattagtaagtgtttcaaccgcaaccgcaaccgcaaatcgctaacataatatcgaagactcgaactaacggttttgttttcagcttgtttgcttctttggctcttgcaccaaaagggactctttgatccatgctacgactggtgnnnnnnnnnnnnnnnnnnnnnnnnnnnnnnnnnnnnattaccctccagagcagacgttgttaaccgccatcatcaccatcacaagcatcgtcatcaccataatcaccatcgtaggacacaccagagacacaaacatcatcatggtcaagacgacgacgtattgcagaagatgatgcttgaacgtgaccacagcgactctcactactaccannnnnnnnnnnnnnnnnnnnnngatagcaagcagaagcagcgtaggcgagccaagcacgggatcgtcctgccacgtgatgtgcacgtggaaagacggaggaaacaaagactacgtgagagt

SEQ ID NO: 169325 - DNA, 427 bp, Arabidopsis thaliana landsberg; identical to SEQ ID NO: 55923

SEQ ID NO: 169326 - DNA, 2535 bp, Arabidopsis thaliana landsberg
cgtttcgttaacaaaattttcgcctacagatcgggaagaccacatagcccacgtgcgggaatgtttcaaacaactaaacttatacaacgtcaaacttaaccccacaaagtgtcgctttgatgtaagatccggcgagttcctcgagtacctggtcacccaccgcggcatcgaggcgaatccaaagcaaatcgaggcattgttgggaatggcatcgcctcaaaacaagcgagaggtgcggccctcaaccgtttcatctcttgatcaacagacaaatgcttagccttttacgatgtgctacggggaaacaaaaagttctagtggacgatccgatgtgaagaagcttttcaagaactcaagaagtacctagcaacaccacccatcctcgccaaacccgtaatcagagagccattatatttgtatattgccgtatcggatactgcagtcagcggagtgctattccgagaagacagaggcgaacagaagccgattttctacgtctcacagactttcaccggcgcggaatctcgctatccacaaatggagaaacttgcttcagcggtcgtaatgtcggctcggaagctacgaccctatttttaatcccattccatcgtagtaatgggatccatcttacacagtccaagccaatcaggacgtctagctaagtgggcaatcgagctcagtgaatacgacatcgaatatcggaacaaaacatgcgcaaaatcgcaggtcctagctaattttatcgtcgaattacccaccaaagaagctcgggaaaacccactcgacacaacttggctcctacatgtagacggctcgtcatcaaaacaaggctcgggttgtaggattccgcctcacctggccaacgggtgaaatcctcgagcagtcattcaggttaaacttcgaagctaccaataatgtggccgagtacgaagcacttgttgccggacttaatctagctcgggggttaaagattgaaaaaatccacgctttttgcgactcccagctcgtcgcgaatcaattcaacggggaatatacagctcgggacgaaaaaatggaagcctacctgattcatgttcaaaagttagcaaaaaatttcgacgaattcaagataacaaggattccaagaggagaaaattcatcggccgacgccctagctgctctggcctcaacctccgacccgaacctgagaagaatcatcccagtggaattcattgaaaaaccaagtattgagctcggcgaagaagaccacgtcctcctgatacaaatcagcacggatcaagatgacccgaacgaatgcagcccaaagtggatggaacccatcataagctatatatccgaagggaaattgccctcggataaatggagggctcgtaaactcaaagctcaggctgcacgtttcgtcttaatagggaaaaaactttacaagtggcgattatccggaccattgctgacctgcgcggaaggagaagcgacttgcaagatcatgaaggaaattcacggcggttcgtgcggaaatcattccgggggaagggctttagccattaaaataaaacgccacggattcttctgaccgacaatgataaaaaactgcgaaattttttcaaagcgatgcgaaaaatgtcaaatgccaacaatccatcagccagccgagctcttgtcatcaatcgcctcgccgtatccattcatgcgatggtcaatggatataattggacctatgcatccctcgaagcagaaaaaattagttctcgtcttgaccgattatttctctaagtggatagaagccaaatcttacgccagcataaaggacgctcaaatcgagaacttcgtgtggaaacatatcctatgccgccacgggataccttatgagatcgttacggataacggctagcagtttatatcaacccgcttccaaggcttctgtgataaatgcggaattcaacttagcaagtcaacaccacgatatccccaaagaaacggccaagccgaagccgctaacaaaacaatcctcgacggattgaagaaacggctcgatgctaaaaagggctcgtggtccgacgaactcgaaggtgtactttggcgcatcggacaactcctcgccgagccacgggagaaacccctttcgcctcagtctacggaacggaatgcgtaattccagccgagatgatagtgctgagcctacgccggagtgtatcccccgagaacacccctgataacgctccaaggctcctcgacaaactcgatctgatcgatgaacgaagagattcagccctggttcgcatacaaaattattagaatgaaacggctcgacattacaacccaaatgttcggcaacgaagattccatgaaggagatcgggtcctccgaaaagttttccagaacactgccaaaccgaacgctggaaagctcgggacgaactgggaaggaccgtacttaatttctaaagtcatccgacccgtagtgtatgagctcgctgacttaagtggcaaagccgttccaaggtcatggaacgcaatgcacctaaggaaatactacaac

SEQ ID NO: 169327 - DNA, 779 bp, Arabidopsis thaliana landsberg
ataattggtagagggaagtctaaaaagaagattgaccatcttgtggaagaagttcaaggcattttagaaaaaatggcctgtattgacgctgttttggttgcatggaacgatgttaagtttgcttttagacttgcaagagaagccataggcagaaacagcgttgatgtgaacgcagaacaaggagagacttgtggcatattttttgaagaaaccgatgtagagcacatgggttcgttaccgagaaatgccttcaccgtcattgcttttcttgtgtgaaacaacatgtgaaagtgaagctgcgtagcggaactgagcccacatgccttgaatatggatgcaagtttaagctcacccttgaaagatgtagtaaagtgttgacactaaagcttattgagatgtggaaacaaaagatgaaagaagactccattcccgctgcggagagaatatattgcccatatccaaactgctcgatgctgatgtccaaaaccgaactatccagtgaagccgacttatccaatgttaggacatgtgtcaaatgttgtggactattctgcattgattgcaaagtaccatcgcatactgatttatcgtatgatgattacaagaaacttcaccctgaccctctagttgatgacttgaagctcaagtctctcgcaaacaacaaaatgtggcgtcaatgtgtcaaatgtaggcacatgatccaactttctcatggctgtaaccacaaaacttgaaagtatatatatttatttaactcgattttgctacatcagatgaat

SEQ ID NO: 169328 - DNA, 1514 bp, Arabidopsis thaliana landsberg
tgccctgaaaattttgcaaaacatggtggcagctgttttggttttatattcttctttgcaggatggttcatgtgccgcagttactgcatcttgcttcgctatcaggcatattaaaatgtaaggtcccttcatttgtgaataagacactgataagcgcgccaatttggcatttctcactttttaattcatgacgtgcatatgattctgctatttccaaaattttcccacttcttcatttctccaaattctgtgaagggatgggatctttaggagggagggaaattagaaactaaagctgcaattgactttaccaaactttttacacagttttccctgttaataattcctttcgaaatttatgcctttatcagacacttaagctctaaattaagcataatcttccaggtatatgcagatactttagacattcgtctagctctttacctatccttcagcaacccatttgttcaattcccctgggtacgtgggtccctagaatcggagaatcaagtagcaaacctcttgctacattgagacctcacgcctctttgggttctgcgctcgcattattagttcaaggtaatcctttttcttatcttgttgcagcaacatcttattcaaagctcatctgcaactcagactatcaacctctacattacaatcagattttcagttttaaatattttgtctagatggtaatataatcaagtagctgaacacatgggtatactcaagtcaatgcagaccaacaaaccaactttagatgttacgaccacttttattatttttatacagatgtaattgctgcaacatgagtaaactaacgaggtttaaaaacatagaaacatttttgtcaatcttaaagcagatatatttatagaatttctcgtgatcttttccctggttcctcatagatggaaatgaatgaatgagtcatgcttaatttatgtttcctggttattacagctgaagtcagttcaattcccgtagtggatgacaacgactcgcttattgacatatactctcgaaggtaaacctctatccatcaatcgacatgatgtcttatgcattccatctttgacgtccttgtgttctgatgatatttgtaattggccagtgatataactgctctggctaaagacaaggcatacgcacagattcatcttgatgacatgacagttcaccaggtaaacctctcatcagaaaccaagatccatcacatgtctcatcaaattacgagttttacttaaatgtaacctgcctatctatcatggaaattgcctcgtttctgatttatttgaacatacatctttacaagaatgaaagaagagatgaaacgttataataaagtggaggataatgtgtttgtgggttttcaggcgctacagttggggcaagatgcgagcccgccttatggaatcttcaacgggcagagatgtcacatgtgcttgcgctcagactctcttgtgaaagtgatggagcggttggcgaatccaggtacacactatctctta

SEQ ID NO: 169329 - DNA, 1106 bp, Arabidopsis thaliana landsberg
tttctatagcgtcttcaatctttccccgtgctccctcgtatgtgagctgctctgcctcttgggcccatcttccgatcgggctgtgaccgatgctctcggccatgtggtaaacctattggtcgggtggcactctctctttctgcactggtccgctatattcttcacaagttcattctttggtcataccagtcgtccagtcatcgatggcagtagtgtagtttgcattataagtgcgggcctgaatttcttcctatgtttggaaggtgaggagcactacagttacttgctttgctggtattacatcctccatattttccgctttcaataagcaggaaaaggactttattacttcatcaattgtaagtattgaagcctttttaggattgttggtattactatctcgactttagttttacagtaggtgcctaatgtcttttagtttttgtagataaccgctgcattgcatgacaaaacaccttcagtcagatcagcagcttgccgagcgattggtgttatttcatgttttccagaaacttctttaaggtaacttaaccctttgtcactgtctgttgcttgtcctaactcaaccctgacaagatattcatggtcaagaacttaaagaactttgtggatgcagtgcggagatatatgaaaaatttatcttagctgttgaagcgaatacccgggactccttgacctcggtattgcattactgactttcatttatttgttctcatgatctatgcattttatattttattgttctactgcaatgggatttatttttgtcaattcaggtgcgtataacagcatcatgggctttggccaatctatgcgatgctctgcgataccgcgttgatgataggtcctttgaaggtactagtactgacgttatgattagacctgatacaacgtttggatttacttttcttttatcctcctaagtaggattgaagacaacttcacaagttgtggatgcactaatagaatgtgctctgcgcctaactgaggatggtgacatggtatataatatcgttcccaacatattttgataattagtatcttttttactcagtgatatgctttttatcccaaaattcctctgt

SEQ ID NO: 169330 - DNA, 603 bp, Arabidopsis thaliana landsberg
agcgcggtggttgaaggggtggccacggcgaccgaagtgtccaccataggcatcgtctactctggcgtaataggcattcttgtataccggtgctttgacatcaagcgcctgtacccgatacttatcgacacggccatattgtccggtgccatcctgcttattatcggcacggccacgggcatggcctggtcgttgacgcaatcggggttttcaagcgatctggccgaattcatggcacacctgccggacggcgcatttaccttcttctgcgtatccattgtcacgttcattgtgctgggcagcgtgcttgagggcattccggccattgtacttcttgggccgttgctgtttcccattgcggcggaactcaacatcaacgaagtgcattacgccatggtcgccgtgctgggcatgggcatcgggctgttcgcacccccattcggggtgggctactacgccgcatgcgccattgggcgggtggcgccggacaagggcatcaagccgatcatgggctatcttgcgtcgtgcaccataggccttattctggttgccgccataccgtggttgtccaccggctttttgaagacaccatgaacgacaaaa

SEQ ID NO: 169331 - DNA, 1031 bp, Arabidopsis thaliana landsberg
attggatgagtacattgaggtgtatcatgatggtatttgatggcgtcaaggacgagttgtggaaagtgaaggaggagtgatgggatctctctttcagaattggaaaatattgcttttagaggctacaaagaagcaattaatgttcaaacaatcggatcttaggcctttgagggtgtgggaagatggcgtttggaaggtacttcacgttttcttttcactactttcagttaacactaggtttgcaagaatcttcagcaaaaaacatgctccattgactgcatttctttgatgtgtaatgatggtttgcatttgaaagtctctgtattattattatcatcctgttgtggtttctgatctgtgttagatttgcagacaagggaatcatctttaactcagggatcaggagataacacaggtgattctgtgatgaatggtaagttggtaacactctcctctaacggattctccaaatccaatttcagtttctgtatcatgaatgttgatctcataatgttttccagcaaagtctgatccacctgtaactccacctccgggcataataactatgacaccgttaaaacaatcagaggctgaaactcaaagaaagacattccccaagaagacacttccaaagaatcagaatggttcaggaaacgattcaacactagagaatgtaaagttacttcttcactttaacattataatactcactttctatgtagtttgttagctggtggcttattatcttaatccttttgactgttatctatctattgaatgatagttcacctttgtgtttttttatttcttacttctatgcaggaaaataacaatcgaaagaggaaaagagaagagaacctttgttctagtgttgaggaaaacaaagtcaaggatactacaacggttttactctttgagaagaagttaccagtttggaagatactcgaatcaatggaggtatttaaaacaatcccgcaaagtcctcatttccgcccctggcaaagaatagagaagattcccgtgaaatgttg

SEQ ID NO: 169332 - DNA, 512 bp, Arabidopsis thaliana landsberg
atgcgccgcaccaacgtcgtggagtcgctgcgggtacagatccgcacggccgacggccgcagcggtgtgggccaggcaactccggtcactgccgtcaccgggaaaacgctcgagtccgagcagacggcgatcctgacgcggctgcagccagcggtcatcggggtcgacgcaggccggttggataccgcgctgcaagcgctgcatcacgccgcggcaggaagcgatccgagcgccgcggcggcagttgacatcgccttgcacgatcttcacgcgcggctgcgagcgctgccgctcagccacctgctggccgaacggatcggactccaggcgccagcgctcacgcgggtcgcgaccgacatgaccgtgagcgcggccgccccggcagagatggtgcgctccgccgaggcggcgctgcaggccgggttcagggtcgtgaagctgaagataagagacggtcggcacgacgatctggaacgcgtgctttcagtctccgcggcgctcggctcgcgggt

SEQ ID NO: 169333 - DNA, 3755 bp, Arabidopsis thaliana landsberg
  unsure (1)..(3755): unsure at all n locations
atgaagcttcatgtacaagcagttggaactcaattttacatatgtggctccgaccaactttccggcgacttttccggtgatgtacgtcaccggaatgaccggatgatagagtctttggattccttgtaatgagcactataagatagtatagttacatgtaaatattgaagttattatgaatgagtaattgagatctaaagtgtttagcttgaaagtttacaataacaaatattgacatttgtcccacattggatgtttgaagattctcctctagtatatatagtgttatccatttaacatggttcactagctattgggaagtgacactatagtgttggagatgcaagtcctttatgcaacaacacacatgcgctgtcgccgtgtcgggtcgggcttgagcttgggctcttggggaataaccaatgttctttttggagaaaatacttatgaggctttgttgcattatttgtaacatttggaacacctcttcctctcattctcttcactcgttttttgctacaagttaaacgaaactctctccctctcctcctttcttctcaaagtaagtcaagagtatatcgtttgtttcaagtttgcagattccgctatcgtgtgttgcgataccgatcttatagtgattgtatcctgcgatccgctgctcataaaatcgccacactgcgagagctagcaagatcctttgggaaagtttggaaacactgtacaaagtcttcaatgtgggttctggaaaattcgccactgggaacttccttaactacaaaatggtagactcgagacccatcatggatcaagtcaatgagttgcaattgatagtctaaggcatagctgatgagggaatgaagatctgtgaaaccttcacggtgaattccattatcgagaagttacctccaagttggagtgatttcaaaaacttcctgaattcaagcaagagcctttgagcttacagaacttgatcgctaggctgcagaatgagtcttccgagagagacaaatcttgtttcgtagctcatgatgcaaatgtggctgagtacaagataaagggtaaagccaaagttgtttataacaacaagggtgaaaaacctaacaagggtggtccaaagataatgtcatctaaaccctccactagctttaagaagcaaggtgatattaaaaaaaattctgggaagtgcacctactgtggcaagcaaggtcataaggcgagtgagtgttgcagcaaagctaagggaaaaggtcagctaaccaagcgaatttgactgaagatgacctctatgcggtggtcactgaagcaaatgtggtgacgactgatgaaaacccaatggagtggtggtacgacagtggagcaaccacccacatctgcatcaatatagacatgttcaacacctatcagaagtgcaagtctgacgacaaactgatgatgggcaatgtctctcactccaagattgaaggcactagtaaggtggtcttgaagctcacttcgggaatgactatcaccctttccaacgtgaagcatgttccaaaacatgaggaagaatctgatctctggtactctgatgaacaagcactattaactttgagtccgaccaactttgaaaatcaactctcgaaaactattaagatagttagaagtgatagaggaggagaatataatgagccattcaatgcattttgcagagaaaaaggtattatactccaaacaactgctccttattcaccaaaatctaacagggttgcggaacgaaagaatcgaactctgaaagaaatgatgaatgcattgttgcaggaatcagggttagcctagaacatgtgtgtgtgtgtgtgggggggggaaagaagcttttcttaccactaactacatccttaataggaaaccacataaggtgactacaaagtcaccatatgaactttggaaaggtacagtaccctcgtacaaatacctaaaagtgtgggggtgtctagcaaaagtggctgtaccccctcccaaaaaggtcacaattgggcctaagattgtagactgtatcttcatcggatatgcgcacaacagcaatgcttatagatttcttgtttataaatcggatattccagatatccatgaaaatacagtcatggaatcaagaaatgcatcgttttttgaagatatttttccttgtaggaaaactcaaaaacgaactcgtgatcaacgagttgcagcaacatcggaagctgaggacaattctttgggtactattactgttgaagaaacagaacaggaacctgaagaacaacctaggcggagcaaaagagctcgcaaagagaaatctttcggtgatgattacttgatggcgtttttagctgaaaacgtaccaagaacttattcagaagccatgtctacccntgatgcaccttattggaaggaagcagtcaatactgaaatagactttatcttgcaacatcatacttacgagatagcagatctaccccaaggttctaaaccattggagagtaaatggattttcactattaaaaggaaaacgaatggtgatattgataggtacaaggctaggcttgtggtacaaggatttcgaaaaaaagaagatttaaatttctttgatacctattctccgataacgagaataactttaatcaggatgctcataggcattgcagccttacgagatcttgaaatacatcaaatggatgaaaaaacagctttcttacatggagatttggatgaggaaatctacatgaaacaacctgaagggtttgttatcccagaacaagaacacaaagtgtgtaaacttgtgaagtcactatacggactcaaacaggctcctaagcagtgacatgagaagtttgacagtgttatgatgtctaatggttttaccattaatgaatgtgacaaatgcatatatttcaaaattactccaacatggtacattttgttatgtttatatgtagacgatatgctcatcttggggagcaacacaaatatcataaatcaaactaataacatgctcaaaagatattttgaaatgaaagacatgggtctagcagatgttattttgggtataaaaatcatcagaactgatgaaggcattaccttgtctcaaacccactatgctgagaagatacttgatcgtttcaagcattactctaatgggactgcaaaaactccagtagatcctcaacttcacttgaccaaaaactcgggtgaacctgtgcaacaggtggaatatgcaagagtaattgacagtttaatgtacttgacaaacagtacaagaccggatttagcgcactttataaatgtacttagtcctacacaagcaatcgaggacataagcattggtattataggagcccaaaaaccgaattgagaaacaagtacgaattttactaaaataacgataacaataaaattacaataacagtaattaaggacagaaagtatatcacggaggcaagatatgatatctttttccttaatttaataaatcggccgtaagtgcttttcggacatcacgatttttgaatcccaggatacaaccgatcacgaactaatacccgagcacacaagtattatttcttaataggtatagatataaattgatatatatatataggtatatatattcttaataaacaaaataatgttttttaaaaataatataattttttttgagtaatatttgatactagaaaatgaaagattattagaatttattaaaaggttgtgaaaaagtttcttgcattattaatgatata

SEQ ID NO: 169334 - DNA, 1108 bp, Arabidopsis thaliana landsberg
  unsure (1)..(1108): unsure at all n locations
gaaaattctcattttctcacgaaacaacgaagacttcccatcaccacaatcaaaaacacaataaaaacatgagcaacgaagaaaacatcaaatctgataataagagcggcgattcctctgatctccctaccattcccgccttaggtaattttcataaacaactcacaaaattttacatctttttctcgataaaacaataaatctctggataatccaaccaaaaatctaccctctcacatttacttctgcctcaagtaaatgccctgttttatatattttcgatcttggaatcaacaaggaatagggttaattgaagctagctaaccattatgctttgtagatattggggcagaggaatgtgatcttcttgcagagcttaaggcaagtcacttcaaattgttgataaaaattcacacagtaacttttcttgtgtttcctctggttttatgatccttttgggtgttgattaacttacagaacctaaccttaaagcgaccatttgatgtgaaaaaactctcacctaaagttaccaaacgtgttctgtttctcaaagacattcaagtactttcaaattttcgctcttttacaactaaagagagaggctcaatgttcggtttatgtatacttgtagagtaaatttttaggttacacacgatgaactcgaagagaagtttcttnnnnnnnnnnnnnnnnnnnnggcaacatatgataatctctacaagccgctttttgctaaggtgacaagtttaatattttatcttttacttaatgttgtatggggttaaaattcctgagatgtactgagaatttgcagaggtatgaaattgtgaatggtgtggtcgaagctgaagcagagaaagaaggagttcccaatttctggttgattgcaatgaaaaccaatgaaatgctcgcaaatgaggtacatgattcaattgatttttctggaagctatgtgttcattgacactgaatagattaatgtaaaaactgtcttgttttggtttatgtagataacggaaagagatgaggcagcattgcagtaccttaaggacatcagatcttgcagagtaaaaaacacttcaagaaatttcaagctggagtttctcttt

SEQ ID NO: 169335 - DNA, 754 bp, Arabidopsis thaliana landsberg
aaccaaaatcttcctcccggaagccccaataagagaccaacaaatttttgtgtctctgttcacttcccacggcgtagatgaaaatgtacgatgatattctttttcaatatccgattactcatgtatttaaaagaaaactaaccacttcatttatttatttatttgaaaacagaactggagtgatttggctaaccaagttcgatcagtaatgaaagactaccctaagctccgtcttactcaaggaagaaaagtaagatatcgtattaattattattttattaaagtataaggtaactataatttattttattaactggtttatattctcgtatattatttcaggttttggaggttcgtccgattattaaatgggacaaaggcaaagcactcgagtttttattagagtcacttggtaaaatattcctcaactaattaactatttaatgacgagagaaatggtttatatcaatagtattaattaaaattagtattggattgtgtaggatacgctaattgtaccgacgttttccctctttatatcggagatgatcgcaccgacgaagatgcattcaaggtatatacagaatttagtaatcatttattagattaaattaaataatttatgttcaatcatctaagtaaaattgatttaattattgttataggtattgagagaacgaagacaaggtcttggcattcttgtatctaaatttccaaaggagactagcgcgtcttattcactgccagatcccga

SEQ ID NO: 169336 - DNA, 1497 bp, Arabidopsis thaliana landsberg; identical to SEQ ID NO: 22506

SEQ ID NO: 169337 - DNA, 1484 bp, Arabidopsis thaliana landsberg
agtcttcgctacgctaggctactctagcaagcaaacctagggagtctgtgctttacagaatatgacgatgttcaaaatggtccacgccgtttcaaataccaattcatcgccttcgcaacttctattaaaggctatgaatacatgcggaaggtcattgtagttgatggaacatctatgaacgggagatatggtggttgttttatatcagcgtgttgccaagatgggaattttcaaatcttcccaattgctattggtatcgttaacagtgagaatgatagcgcttttgaatggttttttcagcggctcaacgttatagctcctgacaatcttgatttaatgtttatatctaacagacatgctagcatatacacggggttgagtaaggtaagaaacaacattgctttgaagcattgtggcaaatagtataccgatagagatgtacttattttacatatagaatctggttcacaattgacaagtacagtttgattttttgtctttggcatcaggtctatacgtaagccaaccacgctgcttgtactgttcacctttggcggaatgtcagacatctctacaagccaaaaaaccctctctgactaatgtctgaagctgcacaagcgtttcatgtcactgatttcaattggatttttctcaagatacaaatattaaacccaggatgtgctgcctatttagttgatttgggtacgtttgttttactctctattattatattgttcagcttccatatagttatagtaaagtggttgacatgattgtaaattacataaccatgtatgttgtaacgtgtatagggttttcagaatagaccagagtgcattcaaaaggtcggcgtttcaatatcatggatagtaacatatgtgagtcgtgaaacaacgttataagagaggcacgcgagtatcctcttatttgcatgcttgagtacataagaacaaccttgatggattggtttgcttctaaaagggctcaagctgaagactgccctacaactttagctccgagagttcaagagcgagttgagaaaaactatcaagccgcgatgtcaatgtctgtgaagccgatttgcaactttgagttccaggtccaagttaggactggtgaatgttttattgtcaaattggacgagtctacgtgttcttgtttggaatttctgggattagggataccttgtgctcacgcaatagcagctgctgctcggcttggagttccaacagattctttagcagcaaacgaatattttaatgagctagttaaactaagttacgagggaaaaatctatccaattcactctgttggtggcaaggtcgcacccggaattgcttcaggaactacaggggaggtgcatccaccatttgtgcaccggccaccaggaagaccaaggaagataagaattttgtttcgtggtgaattcaaggcaagttcataaaagtaacacagattgttgtccattctgttttttaaaagct

SEQ ID NO: 169338 - DNA, 457 bp, Arabidopsis thaliana landsberg
agtatgtttcggtcgatatccgccatctgctgccgctgccgcgcggattatcactggttgaggccgcgtccctgccggaaaatatactgacggtctacgccaacctgatggagcacggtgccctgcaagcgggtgagaccgtgctggtgcatggcggtaattccggcatcggcgccatgacgatccagatgggcaaggcatttggcgccagggtcatcgccacggcgcgcggcgccgataaatgcgcttttgcccgatcgatgggcgccgacctggtgatcgataccgagaccgaagacttcgtggcggcagtcaaggcgtttggtggcgccgatgtggtgctcgatatcgtcgccggcgatttcttcgccagaaacccggcctgcctgaatatgcgcgggcggatcgtgcaaatcgggttcggcaaggatgccgtggtcgagatcgatctgcggcg

SEQ ID NO: 169339 - DNA, 2183 bp, Arabidopsis thaliana landsberg
gttgtgccttcgatttggtttcataaaatccgaaaatggttaaagctgtggttcgtcgcaacactcgcaagacaggaagctcatcacgcgcaggaagcacctctcgagcaggaagcttaccacccattcaggaagcattgtttgcttcgtttggctcctctgttctgatgaaccctgacagtgttcactctcctctgtttcttcataacgccgaccacccagggatatcgattgtctctgtgcagctagacggcgtgaactacaaccagtggagctctgcgatgaagatagctctggatgcgaagaataagatcgcattcattgatggctcttgccctcgccctgaagaaggtaaccatctcttacgcatctggtctaggtgtaatagcatggtcaagtcctggattcttaactccgttaacagagaaatctatggtagtattttgtcctttgatgatgctgctcacatctggaacgatttacacaatcgttttcacatggcaaatctccctagaacctttcagcttgttcaacaaatccaagaccttcgtcaaggctctatgaacctttcaacctactacacaactttgaaaaccctttgggataatctcgatggtgcagaggctagtgtaccctgccattgttgcaaaaaatcaacttgtgaaagtcagatttttgctaagtctaatgtgaacagaggaaggattatcaagttccttgctggtttgaatgagaagtactcaatcattcgtggacagataatcatgaagaagcctctccctgacttagcagaagtttacaacatcctggatcaagatgatagtcaaagacagttcagtaacaatgttgcttcagctgcttttcaggttactaaggatgatgttcagcctggtgcgttggcttcgtcctctaacatgcctcaacctggaatgttgggtgctgttcaaaagaaagacacaaagccgatatgctctcactgtggttacacaggacatacctctgagagatgctacaaactccatgggtatcctgttggctggaagaaaggaaagtctttctatgagaaaattgctcaggcctctcagtcttcacaggctcctaagccaaattctgctgtcactgcacaagtaacaggaaacagtcagaatactcctgcaggtctggaaagtctctttgggaacatgagcaaggatcagatacagaatctcattgctttgttcagctctcagttacagcctgcttctccggttctgaacactgctccaatgtccacttctcacaacaatgacccatctggtattactttctcatcctctactttcagcttcattggtattctcactgtctctgagactgaaatgacacatggtacatggattgtggattctggtgccacacatcatgtatgtcatgtcaaagatatgttccttaatcttgacacttcagttcaacatcatgtgaatctgcccactggcactaccattagagttggaggtgttgggaacattgctgtaaatgatgatctgatattgaagaatgttctgtatattcctgagttcagactgaatctacttagtgttagtgctttgaccacagatattggtgccagagttgtgtttgatccgacttgttgtgtggtacatggtcttaccaaggggtcaacgattggaagcggtagaagagttggaaatctatacttgctggatgttgaagattcagtgtctgaagacgttgtatctacttcttttgttgcaaactctgttgttgatgcatctgtttggcatcaacgacttggtcatacatcttttgatctcatagacttgctcacagatgtacttggaatttttaaaaccaagaataaaggattgttacattgtgatatttgccagcgtgctaaacaaaagaagttaacttatcctagtcgtcataatatttgcttagcaccttttgatttgctgcacatagatgtctggggacctttctctgaaccaacacaggaggggtatcattacttcttaaccatcgtcgatgaccacacacgtgtgacatgggtctaccttatgaaatacaaaagcgatgtcctcaccatttttcctgattttatcacaatggtagagacacagtatgacacaaaggtcaaggcagtacggtctgataatgctccagaacttaaatttgaggag

SEQ ID NO: 169340 - DNA, 1060 bp, Arabidopsis thaliana landsberg
atggaggaggaaagcactctagtacgagcagaagatccaaaacacgtgggtagagtctccagcgaaatcaaacctgactcgtacaggctttacttcaagggtttggttagcgaggaaaccacagagttattagcgggatttggggttgcgatttgcgacaaagatgataatctcttgtttcagatgaaagaacaagttcatgactctagggttacagttctagaggttgagattatggcattgaagcgtggactaaccgaagctgtgggtttagggattgatcatatctcaatttacagcgatcattatcggatttttgaattggtaagtttgctacttgattgtcaaggttcacatgtccctttgcttcaatcttgttattgatgtttttaatttgccttgaatgttttaggtcatggagaaatctgcttctgcggaagagaactttgccttactaatggataacgtgcaacacattagacaacgattgacgtctagctttccttttctggtgactaggaatcaaattaaatttgtgtatgaacttgcaatggaaacaatagtttctgaaatcagcatacatatacctgatcatgacaagacttgcagtatatgttccgatgataatttcgaacctgagctgatgttttctgttgctttatgcggtcatgaattctgtgttgagtgcgtaaaacgacatatagaagtgaggctactcgcgggaggtgtaccgagatgtcttcattatcaatgcgagtctaaacttactcttgcaaactgcgccaatcttttgacatctaaactaaaagcaatgtgggaactaaggatcgaagaggaatctattcctgtggaggagagagtttattgcccaaaccctatgtgctcgagtttaatgtcggtaaccaagctctcaaactcaacaagagaagatgtaactatgagaagctgtgtcaaatgcggtgaacccttttgtatcaactgcaaacttccgtggcatagcaacttgtcgtgcgacgattacaagagtttgggtccaaatcctacaacaaatgatataaag

SEQ ID NO: 169341 - DNA, 1528 bp, Arabidopsis thaliana landsberg
gggttttggtttgagattaggggtgaagatgatatagtggagctcttatggaacggccaagtcgttcgaaccagccaaccacaaagaccttcctcgggtaaaccttctcctactccacccattctgcgtggtagcggaagcggcagcggagaagaaaatgctccccttccacttccacttctacaacctccacgtcccctgcatcatcagaatctcttcattcgggaagaagaaatgtcttcttggcttcactattcttacactggtgtcacgtccacaccggctactcatccgcaaagttctgtttccctgccaccaccaccacccaatgctccgtacatttccgttctttttcctttcattctcttactctttgcaatttgacgagtctgatattttagggtttggattttggtttgaaattaggagtgaagatgatgtggtggaactcttatggaaaagcggccaagtcgttcaaagcatccagacacagagacccattcctcctcccattttccgcggcagcggaagtgggggaggtgaagaaactgttctgcctctgcctcccctgcatccgtctcatcaaaatatcttcatccaggaagacgaaatggcctcttggctttaccatcccctccgtcaagattatttttcctctggcgtcgcctctacttcagctactcgccggcaaagttccgcctctctagcaccaacaccaccaccacccagtgttccctacggtcagattcccgttgcgagaaggacagagaattttatgaacttcttgaggctaagagggaacatattttccggcgatagagttgaagcttgtccggtggtgatagaatcgacgcagataggctcaagcgcgactccgtcgtcttcagccgctgaatcctgtgtaataccagcgactcacggcaccgagagtggagcggtggccattaccggagtatcccgtacttttgcagttcccggtcttggtcggaggggaaaggcggtggcaaccgatacggccggaacatcatcttcaggggtgtgcaaggccgaaacagagccggttcaaatacaaccggagagggagacgaaaattgccgaagacaagaagagagaagaaaccattgcagaaatccctgtgagtcacagctaccataggttcacctgttgacacgtgcagtgtagcagtcaaggctcaattttatcttgtttcttggcgtacagggaactgaggaagctcatggttcaacgtttaggaagaggtcacgagctgcagaaatgcataacctctccgaaagggttgttatattttactttctaggttttaataatggactctttgtttcatctctccattaaaacgtagtttgtataactgttaaacagagacggagggaaaggatcaacgagaggatgaaaactctgcaagaactccttcctcgctgcagaaaggtctctctcagttatttataacctgtggctgttaaacataaaaaaagttagattctgatgacatctgtttctattctga

SEQ ID NO: 169342 - DNA, 1051 bp, Arabidopsis thaliana landsberg
tggctgtgcttccagtcaaacccttgagagacttactattgaccatagatattgggctgaacataacttggagagctttacttttgatactccgagtcttacctacttagactacaatgctcatgttccgggatcgtatccaactgttaatcttgactcccttgtcgaggctaagctcaatcttggttttacaactgatcttgtagaagatgatgacgatccctttaccagcgatccaaccaatctaatcaaagggttaagaaatgttgagatcttgaacttatcaagtactgatactgtggctgtaagtgtgctcctttttttttactctttgctacttttaaccttttcacttatcgttgcttcacttccgcttccgggtggtataagaatcaaaatctcgtttgatattaaattgtttcttgaggttatgatttttatttttatttttgttcttcaggcgttttatttctccaatgaagcaatcccagtatttgaaaacttgcatcgtttatctattgcaactgaacgtgaattctgttggcgaactctgccatatctgctgaagaagcctccaaatctagagtctctcgtcattggggtatggaccccaaaacatttcaggtatacaacaacacctaatgaagtctccaatctctaattctccttcttgttacagggtcccttgcactacaattatcagttgggcgatggttatgagtctgaggagatttattctgaagatgatgatgaggaggaatcggagtctgacggtgatgagcctatttgtgagtgcttgtcagattattctttcctagagtcatgtcttgtgaagaccgtagagataagcgagtacagcggaactaaaatagagttgaagcacatgaaacatttcctggagaaattgtcatgtcttgagcttgtcaaagttttttctcatgaaagagatgaagaggaacatgttcaactcagaaccaatctgctgaatcttcctagatcgtctaagtgcaagacccagttcgagtttattcctcctcgtagctctgtttga

SEQ ID NO: 169343 - DNA, 563 bp, Arabidopsis thaliana landsberg
cactgtcaaaactacattgctttgcgtaaacaatgcggcattccaaaagcagaagattggccacagttggatctgtgtcaaagcctctatcatcgtataaacctgctcttgttctcatgaaaggacaagtgattgagcctaagaatatagaggaagtacgtgacttgttggtgcatcaactcgtgggagcaaaactccatgtgttcagtccacgtaagtcgtctcgctctgttaggtaaaatatatcagtataaaaataatccacatagttataatttatatgttcatttgtgttgtgtgtagtagggaatggtccctctggtgagccagccagctatgttggacttagagatgggatcattgttaaagttgagaagattcaaagaaagaccattggaacagtgaagatatggtacaagaagaagtttgtatttctcaaagtggctatggcgaggaggtttgcacgcttctctcagcctcaggacataggaccaggcacacagccggacttcgggccatcattgctgcttgttgacttttgtgtcccacgcctatccatggag

SEQ ID NO: 169344 - DNA, 1195 bp, Arabidopsis thaliana landsberg; identical to SEQ ID NO: 26666

SEQ ID NO: 169345 - DNA, 1874 bp, Arabidopsis thaliana landsberg
caaatgtaaccccatcgatctcagggaaacaaatatttcttgtccatcatcgatgataaaacaagaaaggtatggctgtatttccttaagtctaaagatgagacttttgataagttttgtgagtggaaaagcctagttgagaatcaggttaacaagaacgtgaagtgtctgaaaacagacaatggtttagagttctgtaactctaggttagattcttactgtaaagaacatggcattgagagacacaggacctgcacatacactcctcagcaaaatggagtagcagaaagaatgaataggactattatggaaaaagtaaggtgtttgttgaataagtcaggagtagaagcggtcttctgggctgaagcagctgccactgcagcatacttgataaatagatctcctgcctctgctattaaccacaatgtaccagaagagatgtggcttaataggaaacccggttacaagcacctcaggaaatttggatccattgcctatgtacatcaggatcagggaaaattgaaaccaagagctctaaaaggtttcttcctgggatatcctgcaggaaccaaaggctacaaggtttggttacttgaagaagaaaaatgtgtcatcagcagaaatgttgtgtttcaggaatcagtggtctacagagaccttaaagtaaaagaagatgacactgacaatctgaatcagaaagagactacatcgtcagaagttgagcagaataagtttgcagaggctagcgggtcaggtggagttattcaacttcagagtgacagtgagccgattacagaaggtgaacagagttctgattcagaagaagaggtggagtactctgagaaaacgcaggagactcccaaaaggacaggactgactacatataagcttgcaagggatagagtcaggagaaatatcaaccctccgactagattcacagaagaaagcagtgtgacatttgcattggttgttgtggaaaactgcattgtacaggaaccacaaagttatcaagaagctatggagagtcaggactgtgaaaaatgggacatggctacacatgatgaaatggattcattaatgaaaaatggaacctgggatcttgtggacaagcctaaagacagaaagattattggatgcaggtggctgtttaaattgaagtctggaattcctggtgtggaaccaacaaggtttaaggcacgtttggtagccaaaggctatactcaaagagaaggagtggactatcaggagatatttgcacctgtggttaaacatgtttcgataagaattctaatgtctttggtggttgataaggacttagaactcgaacaaatggatgttaagacgacgttcttgcatggtgacttggaagaagagttgtacatggagcaacctgaaggctttgtgtcagattcaagtgagaataaagtttgcaggctcaagaaatccttgtacggattaaagcaatctcctcggcagtggaacaagagatttgatcgttttatgtcaagtcaacagttcatcaggagtgaacatgatgcatgcgtctatgtcaagcatgtaagtgaacatgatttcatctacttactgctttatgttgatgatatgcttattgctggagctagcaaggctgagattaacagggttaaagaacagttaagtactgagtttgaaatgaaggatatgggaggtgctagtcggattcttggtattgacatttacagagacagaaaaggtggagttttgaagctgtctcaggaaatctacattagaaaggtactggacagatttaatatgagtggagctaaaatgactaacgcaccagttggtgctcatttcaagttagctgcagtaagggaggaagatgagtgtgttga

SEQ ID NO: 169346 - DNA, 931 bp, Arabidopsis thaliana landsberg
tcatgcaaaaaaacctgaccctgcaatacctgatgtagtttgggcctgggtatcgattaccatgcgcccgatgagtaccccattgccgattctgagactcatttcggtctgtttaccaaatttctggagcccgaaaaatcgcaggaagtgcattttgagctgggccgttcgctggtgggacaatgcggcagcctcattacccgcgtagtgtttatcaaacgggggatcaaaaccaatttcatgatcgtggacgcaggtatgacggagttgctgcgtccggccctgtacggggctttccacaagatccaaaacctcaccaaaggcaacgggatcctgaacaaggaattttatgatgtggtgggacctgtttgcgaaagcagcgacaggtttggtaagcgaatcagtttacctgtatcggagcgcggtcatatcattgccatccgttcggccggagcttattgggaggtcatggccagccattataatctcagggaattgaacccggctttttattattgatgtcgatacaggattggcttgcgaaaaaaatttgtcatgaaagccctaggcaatcgggaggttcaaggttttaacccgaatttaaggcaacccttgaattgcctttctcgtctaatacgcagttaaccaatctttatgaacaaactattactccccctttttgccctcgccaccttgagcgcaagcgcacaaacagtaggcattacagccgagcattacgatgctttaaaagccaatgggcagctcaaccccaaagcgcagtacaggattaccgacctgaacagctccacactcttcaagtacaagccggccaatcacaccaaggctttgcagacccgttcgaccttgcgatgtttattgtcactggacagtacctatacgattgccatggcgcccaatgacgacttctcaa

SEQ ID NO: 169347 - DNA, 356 bp, Arabidopsis thaliana landsberg
gttgacatatttttcgtcatatccggattcctcattactaggataatccaggatgcgctaagcacgggaattttttcgattggttggttctatagtcgtcgcgtgcggaggattttcccagcgctgtttgttgtattggcattcgttctctgtatcggttggttcctgcttcttcctgatcaatattcagagcttgggcgccatgtggccggcggcgctgcttttatatccaatttgcttctgtggcgtgaatctggctacttcgatgtcgctgcgacgagtaagccactccttcacctctggtcacttggcattgaggagcagttctatttagtctggcctttgcttctcatgct

SEQ ID NO: 169348 - DNA, 492 bp, Arabidopsis thaliana landsberg
atggaagcctacctgagtcatgttcagaggttagcaaaacatttcgacgaattcatgatatatcaaggattccaagaggagaaaattcatgggccgacgccctagctgctctggcctcaaccttcgacccgaacccgagaagagtcatcccagtggaattcattgaaaaaccaagtattgagctcggcgaagaagaacacgtcctcccgatacaaatcagcacggatcaagatgacccgaacgaatgcagcccaaagtggatggaacccatcataagctatatatccgaagggaaattgccctcggataaatggagggctcgtaaactcaaagctcaggctgcacgtttagtcttaaatagggagaaaactttacaagtggccgattatccggaccattgatgacctgcgtggaaggagaagcgacttgcaagatcatgaaggaaattaccgggggttcgtgcggaaaccactctgggggaagggctttagc

SEQ ID NO: 169349 - DNA, 3257 bp, Arabidopsis thaliana landsberg; identical to SEQ ID NO: 396
  unsure (1)..(3257): unsure at all n locations

SEQ ID NO: 169350 - DNA, 2245 bp, Arabidopsis thaliana landsberg
  unsure (1)..(2245): unsure at all n locations
gacgaggactgcgcccaagccggacatgtttccacgtcgatctagggggtccctccaaaggcaaccatctcggcatgtcgggggatggtgatctccctaggccggtgcctcgcgttgacatcccacgggagctagctgtggtccccgttcaggcggggggccatgacccacagctcgagcaaatccatggggtgcaggccgggcttgacgagggagcaggagcgcttgagccaatccgccgggacgtcgggcaggcatgggcgggccaacctccggccggagaaatgtgtcatctaccccagggcttccagcaccgcatcaccgacgatgtcagggtcaggccgccacccgcatctagtggggtcggccagaacttggctgcagcagcaatgctcctccgcgcgacgccggagccatcaaccaccgagggacggcgaatccagggagagctcaagaatctcctagaggacgccgcggtccgacgggccgaaagctccgcctcccgaagcaggggtacccctcggaacaccgcgccgcgacttcccgattcatgcgggaagcctcggtccacaccgggcgcacgccaacacagcgcctgcggccccgggtcgcctcggcaacgagcaccatcaccgcgaccgtcgggcccacctcgacgagagggtgcgccgaggctaccacccctggtgtgggggacgctacgacagcggggaggatcggagtccctcgcccgaaccacccggtccgcaggctttcagccgcgccatacgacgggcgccgttcccgacccggttccgaaccccgaccactatcacaaagtactcgggggagatgagaccggaattgtggctcgcggactaccggctggcctgccaactgggtggaacggacgatgacaacctcatcatccgcaacctccccctgttcctctccgacactgctcgcgcctggttggagcacctgcctccggggcagatctccaactgggatgatttggtccaagccttcaccggcaatttccagggcacgtacgtgcgccccgggaattcctgggacctccgaagctgccggcaacagccgggagagtctcttcgggactacatccggcgattctcgaagcagcgcaccgagctgcccaacatcaccgactcggatgtcatcggcacgttccttgccggcaccacctgccgcgacctggtgagtaagttgggtcgcaagaggcgagcgagctgatggacatcgccaccaagttcgcctcttgccaggaggcggtcgaggccatcttccgaaaggacaagcagccccagggccgcccgtcggaagatgctcccgaggtgtctgctccgcgcggcgccaagaagaaaggcaggaggaagtcgcaagcgaaacgcgacgctcccgacgcagaccttgtcgccgccaccgagcataagaaccctcggaagccccccggaggtgctaacctcttcgacaaggcactcaaggagacgtgcccctaccatcaggggcccgtcaagcacaccctcgaagagtgcgtcatgcttcggcgccacttccaccgggcctgggcacccgcggagggtgcgagggcccgcaacgacgacaaaagggaagatcgccaagcaggagagttcccgaggtccgcgactgcttcatgatctacggagggcatgcggcgaatgcgtcggctcggcaccgcaagcaagagcgtcgggaggtctgctcggtaaaggtggcggcgccagtctacctagactggtccgacaagcccatcaccttcgaccagggtgaccaccccgaccgcgtgccgagcccggggaaatacccgctcgtggtcgaccccgtcatcggcaacgtcaggctcaccaaggtcctcatggacggaggcagcaacctcaacatcatctacgctgagaccctcgggctcctgcgtgtcgatctatccttggtccgggcaggtctgcgcctttccaccggnnnnnnnnnnnnnnnnnnnnnnnnnnnnnnnnnnnnnnnnnnnnnnncgtctgctttgggattggttgcaacttccgacgggagacccttacgttcgaggtggtcgggttccgaggaacctaccacgcagtggtcggggacgccacgctacgccaagttcatggtcgtctccaactacacctagctcaagctcaagatgtcgggcccaacgtagcgacacgtgtacgaatccgaggcctcatcgccgaccgtatagagctctccaagg

SEQ ID NO: 169351 - DNA, 749 bp, Arabidopsis thaliana landsberg
atggcttattctaaagcttgttataaactcatcaccaccattacaatcctccttctatacttcacatttgcctctcttgccgaaaacgtagatgtaagtgaatgcagagctgaatctggagatccatcatgtcacaacaacaaagaagctaaaaagcttaaaatgattgcaatcccatctatcttagtggcgagcatgatcggtgtttctttacagttcctttctcgttacattcctgctttaggacccgaccgagttatatttgggatcattaagactttaacttcgggtgtaattttggcaaccgcttttatgcatgtgttaccggactctttcgatgatctcacatccaaatgtttgcctgaagagccgtggaggaagtttcctttcaccactttcatcgcgatgaactcggcttttctcgttccgatgattgctttggtgcacttacaagaaaaggtcaacgatgataagacaagtcaacttcttaggaatagagtcattgctttggtgcacttacaactttgatatatttatcattgcttatgatctttagttgaagctagagatcgatttttactaaacttgttttctcttacttgttaaaaactagtttggataaaggtttggaatttcgaatcatcaaagactaaataatttaaatgattgttttggcgcagatgtcaaaagtagctggtgtcgtgttccaagggatcttcaatggtgttcaacggggggcgggggggggc

SEQ ID NO: 169352 - DNA, 394 bp, Arabidopsis thaliana landsberg
aaaacgttcattgttgaggtaactatgatgaaagatttccaactagatggtgatatgatcatatcgaaaacgctatcacgtactgatgttgaccaccatggacgtgtgtttttacccaaaaaccaagtgctctcggtcttgaaaaagatgagaaatgttacaaaagaaagcttgccaaagggtattgaactcaaagatgtatacatcattgaaaacgattcatactctgttatgctaaagtccaggaacaccaccaacgattttgttctggcatccggttggagcattatgaagcattcattttacctccaagaaggtgctgatatcaaactattttgggattacctgaaatacagattcattatcctcaatttcccaatacaaccttaaattc

SEQ ID NO: 169353 - DNA, 909 bp, Arabidopsis thaliana landsberg
ctgggtttctttctgacgctattgttgccactagtctcgttcgttgttactctgcgaatggaagtgtggaaatgcttctgaagtgttcgacgaaatgcctgttaaagacttggtttcttggaacgtaatgatctctggcttttctcatgctggtttacataatcaagcgttgagtatgtacaagcgaatgggaaatgaaggtgtgtgtggtgactcttacacgctcgttgctttgttatcttcttgtgctcacgttagtgctttgaatatgggagttatgctacacaggatagcctgtgatattcgatgtgagagttgtgtctttgtgagtaatgctcttattgatatgtatgcaaaatgtggtagccttgaaaatgctattggtgtgtttaacgggatgcgaaaaagagatgtgttgacctggaactcaatgattattgggtatggagttcacgggcatggcgtagaggccatctcgttcttcagaaagatggtggcttccggagttagacccaatgccatcacattccttggatagttgttaggttgtagtcatcaaggtctagttaaaagaaagactagagcattttgaaatcatgagttcacagttccatttgactccgaacgtcaaacactatggatgcatggtggatctctatggacgagcaggtcagctagaaaacgcccttgagatgatatatgcgtcttcctgccatgaggatcccgtcttgtggagaaccctgcttggctcttgcaaaatccacaggaatttggaattaggagaagtagccatgaagaaattggtgcagcttgaggctttcaatgcaggggactatgtgcttatgacttcgatatattctgcagcgaatgatgcgcaagcttttgctagtatgagaaaactaataagaa

SEQ ID NO: 169354 - DNA, 500 bp, Arabidopsis thaliana landsberg
actgtgaagatctacaccaatgcgacggtttcgccggacagcctgaagggcgaacgcatcgccattatcggttacggcagccagggccgcgcccacgcccagaacctccgcgattccggcgccgacgtcatcgtcggtgtccgcaagggcggttccggctacgaaaaggccacccatgacggcctgcagactgccgaaatcaaggacgcgatcgccgacgccaccatcatcgccatcctgaccccggacatgtcgcacgccgagatctacaaggacatcatcgagcccttcgcccccaagggcgcggccctgctgttcgcccacggtttctcggtcctctatggccgcgtcgtgccgcgcgccgacatggatgttatcctggttgcgcccaagggacccggcgatctcgccccccgtgaataccagcgcggccgcggcgaaccgtcgctcttcgccgttgaccgcgatgtcaccggcacagccgcccgcgaggccctggg

SEQ ID NO: 169355 - DNA, 1075 bp, Arabidopsis thaliana landsberg; identical to SEQ ID NO: 19237

SEQ ID NO: 169356 - DNA, 2021 bp, Arabidopsis thaliana landsberg
atgaatcgggttcgggttcgggtcgggtaagagatagttgttgggaaggaagatggttgaagagaggagattggttgttgtttgtagaagaatgggtggtgattggttgagagaattgatgagcttttgtaacatttcattgttttaaattttagggtttgtttattttggggatttgagtattgtggattttaatatgagaattggtaatgtgtaatgtgtagtttgggaatggggagagagggagggaggtagatgaaacagttgagagtaatatgtggattttgaagggtatttatgtcattttagtttaatggaaagttgtcgtcgtttgcgactggaagctttttgacggcgcccatggcttgtagctgctgacgacaatccttatcccttattttgggcttcagctacttccacgagcccattagagttttttttaatacaaaaaatgtcaaagaaaagaagaaagaaaatgttgattgaattttagaaatttggcaaagccaaaaaagacttttgagagtttatcgtaacttttacggtgtgtgactgactctctcacgagtcacgagcgtgccccgttaaagagcgtttgcgcaattgcttagcactcaccacacagctgaggtaaccccacacgctctactttttgtgctgcggtaaccccacaccgcaagtaattgaattatttttagggttaatatttttatgcaagaggagacataattgactttgtggagcgttcatttggaaattcataaatctttgtggaagatgacgcaatttttttacaagagacttgttaagtcaagcttttttttttccacgaaatgtaaaacagtccatgggtctattactagagccatcacttatgaacattgagaacatcattcatttcactttctgaggaaaaaaaaaatcaaagaaaaaaagtatattgcattcttgaagtcagatgaagatgacaatatggagcttgtgtttaatcttgtccctttctaattcagttctcgttttggcttctcatgttaagcacttatgtcgtcaagaccagaagaatgctcttttggagttcaagaacgagttctatgtccaagagttcaattccaatgggattgttggtgttaagaagacagagaagtggaggaacaacactgattgctgttcttgggatggtatctcttgtgatcctaaaacgggtaaggtggtagagttagacctcatgaacagttttcttaatggtcctttgagatatgatagtagcttgtttagactacaacatcttcataatctggatcttggctcgaataatttttcgggtattctaccgggatccataggcagcctcaaatatttgagggttttgagtcttggtgattgtaatctctttggaaagattccttcttcacttggaaatcttacttatctcactaatcttgatctttctgttaatgatttcaccggggagctaccggattcgatgggacatttaaacaagctaacagagttgcatcttggatcggcgaagcttagtgggaactttcctagtatgctactcaatttgagcgagcttacgttgatcgaccttggttctaaccagttcggaggtatgctcccatctaatatgagtagcctctctaaattggtgtattttgggattgatagaaattcattttccggatctattccatcgtctctcttcatgctcccttcattgacctctcttgttttgggaagaaacgacttcaacggtcctcttgactttgggaatatctcttcaccatctaatcttggagttttgtcccttctagaaaacaatttcaatgggccaatcccggagtctatatcgaaactagtcggtctcttttatcttgacctctctttatggaacacaaagagaggcatgggcgatttcaacattttcttgcatctcaagtcacttacgttccttgacctctcttatattaatacaagaagcatggctgacataagtatattctcacctcttttgtcacttg

SEQ ID NO: 169357 - DNA, 425 bp, Arabidopsis thaliana landsberg
tacgtcagcctggatctcatccttctcctggctcggtagttagtcttcacggaaggttcgagattctatctctctcaggatcttttctccctcctccggctcctcctacagccaccggattgagtgtttacctcgctggaggacaaggacaggtggttggaggaagcgtagttggtccgttgttatgtgctggtcctgtcgttgtcatggctgcgtcttttagcaatgcggcgtacgaaaggttgcctttagaggaagatgaggagcacttgcaaagtggcggcggcggaggtggagggaatatgtactcggaagccactggcggtggcggagggttgcctttctttaatttgcctatgagcatgcctcagattggagttgaaagttggcaggggaatcacgccggcgccggtagggctccgttt

SEQ ID NO: 169358 - DNA, 242 bp, Arabidopsis thaliana landsberg
atgccctatagttactctcaaccatccacgtccgaagctagttggaatagtggagaggcgaatgccgatgcaaattgggaggttccagaaaaatgtttttgtggtaagcctgtaaaacttgaagtgtgcaaaactggttacaggcaaggcgacagagtctacaaatgcccaatgcttaaagtaagttattgtgttttcatttcattggaacaacaaagtacaagtgaattatatttatgaag

SEQ ID NO: 169359 - DNA, 530 bp, Arabidopsis thaliana landsberg; identical to SEQ ID NO: 67978
  unsure (1)..(530): unsure at all n locations

SEQ ID NO: 169360 - DNA, 343 bp, Arabidopsis thaliana landsberg
atgggccggcactatttacgagtactagaattatagcaaccacaactttctctctgttgtcatgtagttcgatgtgttattatcaggacgtacaaccttatttcatttacggcaatgttaccccactatcgttgttacgcgatggttttaaatatggacacatcttttatgaaacaacacatattcatctcttctttgttcatcatttagtttgagtttcaactatggaacttaatcatgattcgatattcgctcctgaggttcccactgaaattcatggagtcaaggtcatgagacaaacttcggatgctaagcttgctgaactcggggttacctcttggca

SEQ ID NO: 169361 - DNA, 710 bp, Arabidopsis thaliana landsberg
caggctgcaattgagtacactcattctttatcaagggcacagcctgctcgttctctcaatggtgctggcctttgtcctgctagtagatcacttagcacccaggccgccactacgtcaagcacaccacagcctccgcctcccccaccccctccagagaagactcactttggtggcctcaaagatgaggatcgcattttcaccaacctctatggtctgcatgaccctttcctgaaaggcgcgatgaagagaggtgactggtataggaccaaggatttggtgatcaagggggcagactggatagttaatgaaatgaacaaatctggacttcgtgcacgtggtggtgctggtttcccttctggtcttaagtggtcctttatgcctaaagtttctgatggccgtccctcctatttggttgtcaatgctgatgagagtgagcctggaacttgtaaagatagggagatcatgcgtcatgaccctcacaaattgttggaagggtgtttgattgctggtgttggaatgagagctagtgctgcgtatatttacatcaggggtgaatatgtgaatgagcgtttgaatctacagaaggctagaagagaagcgtatgcagctggtctcttggggaagcctgcatgcggttctggttatgattttgaagtaaatatcaaaattggtgctggtgcgtacatttgtggtgaagagactgggcttct

SEQ ID NO: 169362 - DNA, 197 bp, Arabidopsis thaliana landsberg
atagcatttttggtgatactgagattgtatgtacactaaatcatggggttagtgctaccaaatatatagtaacatttactgcatataaagagagtcgttttgttataagatttggcgccataaaaatctgggaggctagagatgatgggatatatctcacagatgaagatcacgatgcagtgaaaatgtatggttgg

SEQ ID NO: 169363 - DNA, 1021 bp, Arabidopsis thaliana landsberg
atgaaactaaagaatatcttgccagtcttgtgttttttccttttaagctttcctgttttgtctgcacaaagatgcgggaaaactggtttttctctacttgatgatacgtttgataaaaaccgtcgtcttctcctctcttctctcgcttctaatgcctcagatcaaggcggcttttacagtgcttcagttggacaaggatccgagcagatatacgctgaagggttgtgcatcccaggtgctgaaccaaaagattgctcaaactgtttcaactattcttctaatagcgtgattgagagatgtcgtaaccagacagaaggtcttatctggtctgacgacatgattctttgtatgatacgtttctccaaccgtttgttttctggttcactggaaatggaacctagttataatttgatcgttaatggagatatacaagtaaacttgaccgagtttgatagatcgtgggaggacttgactagtcatatgatagctgaagctacttcatcgtcatctcaacgcaagtactatgcagctgaagcagtgtctttgacatctttccagaatatctacttattcgtgcaatgcactccgttcatatctttgcgggattgcaacacttgtttaagtcaaagtgttagagactataaatcatgttgctatgggaagaaaggtggcaatgttaatcgtcccagctgctttttcaggtgggaaatttatcctttttctcaagcttttaacaatactttggcacatccagctccaccctgaacatctctcacaccttcgttacgccacaggacaaacacgaacaagagaggtaagttgtctactgttatgaaatgatttaaagaagccttgaaacatattcaaacattagatgatttatgtttctttgtgtcaacggtcgcctgctattcgggcttgtgcaggaattatcgttggaatcactgttgttctcaccttggtgatcagtgtgctgcttgttctagggtattctctttgtaggagacgaaaagcgtctcac

SEQ ID NO: 169364 - DNA, 183 bp, Arabidopsis thaliana landsberg
atgaactgaataatactaggtgggatttaatagcaggaagagtggtaggacgagaggcaaaggacatagaaagatattggattatgagaaactgtgatcattgttcccacagacgacgccgagtccacaaatttgaccgtttctctatttctcctccttaattttatgttatcatggacaaga

SEQ ID NO: 169365 - DNA, 1963 bp, Arabidopsis thaliana landsberg
ctctcaggacgtggttttcaatgaggaagtgatgtttaaagattctgggcaagacgataaagaaaaagaagcatcagaacaagaggttgaagtctctgtcattgacacgtctgttaaaacaggaacagcagaaacagaaactgcagaaactgaaacatctgaaaaaactcaaggtggagcttctgatcaaggtaatggagaagatgatttatcatctctaggtcaaggtcatgaccaggattctgaaacagactcagaagatgagtacatgccaccaagtcttgaagattatcagttggctagagacagaaaaagaagagcaaccaaaccaccaaagagatttgatgagttaggagattcaggttttgcctttaatctaacagaagatggtgaatttctagagccaacaagttacacagaagcaatgcacgatgcagatagtgaattttggaaagaagcagcagatgaggagattaaatcacttaacaagaaccacacatgggatcttgtagataggccagaaaaacagaaagttataggctgtaagtgggtgtttaagagaaaactcgggattccaggagtagagcaaccaagatttaaagcaaggctcgttgctaagggttatgctcaaagagaaggaattgattttcaggaaattttctcacctgttgttaaacatgtctccattaggctaatgctatctgcagtagctcactttgatctagaattggagcagctcgatgtgaagactgcatttttacatggaagtcttgatgaaattatatacatgagccagccagaaggttatgaaaacaagagatcacctgagaaagtgtgcttgctgagaaggtctatctacggattgagacaatcaccaagacaatggaatcaaagatttgatcagtttatgaaatccacaggttattcaaggagtttgcgtgatagctgtgtgtatttcaagaaaacatctgaagaagaaagaacatttcttctcttgtatgttgatgatatgttgatcatatcaaagaacaaggaaacagtcaaggaattaaaggaaagactgagttcagagtttgaaatgaaggatttggggcctgcaaggaaaattctgggaatggagataacaagaaaccgagaagaaaatattttggagttatctcagagaagttatctgcaaaaggtgttaaagacattcagaatggatgaatgcaagcctgttaaaacaccattggcaccacatatgaagtttgtagcagcaacagagactgaagcagaggagcaagctgatcaaatgaagtctataccttatgcaaatgcagtgggaagcataatgtattctatgatcgggtcaaggcctgaccttgctcatcctgttggagtcataagtaggtttatgagtaaaccattgatgaatcattggctaggtgtgaaatgggttctccgttacattaaggggtctattgattcaaggctgcagtacaagaaagaaggtgattttgtggtgacagggtactgtgattcaaatcactctggagatcgtgatcgaagtagatcgaccacagggtacacattcactgtaggagggaacatagtaagctggaggtcatgcttgcagccagttgttgcactgtcatcaacagaggctgagtatatagccttaacagaggctgcaaaagaagcatattggctaaaagacttgatgaatgagctgggatttaaacaaggagcggtagatatccattgtgattctcagagtgctatagctttagcaaagaatgcagttcatcatgaaaggacaaagcatatccagagaaggtttcattacatcagagatgcaatcactgatggagaagtgaaagtgctgaaaatatccacagttcataatccatcggatattttcacaaaggtggtaccggttaacaagttcctgagcgcgttgaagaagctcagggttacaagtgcc

SEQ ID NO: 169366 - DNA, 551 bp, Arabidopsis thaliana landsberg
atggatagcataagtgagttgccctatgctctgctcttgaagatattatctttactgcctactgcgagagatattgtggccactatggttttgtccaaacgatggcaaccgctttggatgatggtgccgagactcgtttatgatgatagctatcagaatctcgagtatggaagtttttcgcggtttgtagacaagtctttgtttctgcacgaggctccagttatagaaactttgcatttcagacttggtaaaacatgtggtagtggagatattcgagtgtggattagagctgctgataaatgctttgtacgtaggctgattatcgagttcgacagctcttctagtgcatctccagccatacttccaaggagtttgtacacggggtgtagaatgcttgcgatcttgaaactcactaaaacagttcttgtggatgttacttctccgatttctttcccgtctctcaagagattgatccttttatctgtgaaatacccgagtgaagaatttgtccagaggatgttatccaattgtcctgttcttgaactcttgta

SEQ ID NO: 169367 - DNA, 759 bp, Arabidopsis thaliana landsberg
agcgtttcaatgctttaagaatggtatggggattctctcaaatgcttcctctccacttattcgaaaatccaaaaaatggatatatattcgacgggcaaaaatgcgagtttggtgttgaagtgatggttgttccaccccttaccaattgggaagtgatgtcttttgatcagaaactctcaccatccacattctcctggagtgccaatggtttctccttattgacagagaatctttatgtgtcaaacaacttttcagttggaggaagagaatggtgaggctaataagtcattgaatatatatacacgtctatgtatgctaagtgtatacaaaataatgtgacttttctataggtgtttgaagatgtatccaaagggaagagaggcagatggcaaatggttgtccttatttctgcatatatatagctgatagtgaaaccttttcggaggatgagaagatttacgtgcatgcagatctccgagtattatacccacgtccacatgtatacaacaatcacgtcacacagaaacgtataattaactttgaaacacaattttctatattcttgaataaatcacttagttgcttttttcaagtcttaactaaattttcaataccttacatatatttatttttcttgcagttaacgtctgttacaagaaatcaactcaagggtggggttgcgaagattttgcggctatagccaagcttcgggagtgtaattacttggacaatgacactttgacattggaggtcgaattt

SEQ ID NO: 169368 - DNA, 1906 bp, Arabidopsis thaliana landsberg
gtcaatttcgttgttgtttacgctgctccgatcgccagtagaagaagtggactttgggacaggttaggagatgtcatccgtggtatggatggacctgtggtgattgggggggacttcaacacaatagtgcggttggatgaacggtctggaggaaatggtcgtttgtccagtgactctccggcatttggcgaatggattaatgatcactctctgattgatttgggttttaaagggaacaagtttacttggaaaagaggtagagaagaacgtttctttgtggcaaaacgattggatagggtcctgtgctgtgttcacgctcgtttgaagtggcaggaagcgagtgtgctgcatttgcctttccttgcatcagaccatgcccctctctacgtgcagttgactccggaggtaagcggtaataggggaaggaggccgtttcgctttgaagcagcctggctttcgcatccgggctttaaggagctactgcttacatcgtggaataaggatatctctactcctgaggcgcttaaaggtttgtagcaaaccttacagcaatggaataaggaagtcttcggagatatccggaaaaaaaaagagaaactgttgggggacattaagagagtgcatgagctgcttgatctccaccaatccgatgatcttttaaaaaaagaagaggagttgctaaaggattttgacgttgttctggagaagaaggaggtagtttggatgcagaaatcaagagagaagtggtttgttcatggggatcgaaatacgaagttcttccacacatctacaatcatcaggagacgcaggaatcgaacgaaatgttacaggatagtgatggtcgttggttatcgaatgcgcaagagctggaaacgcatgccattgattattataaacgtatctattcactggatgacctggacgttgtggtggaacaactacctcaggaggatttcacagctctctcagaggctgatttgagttctctgacaaaacctttctcgcctttaaaagtggaaagtgcgattcggagtatgggcaagtacaagtctccttgtcctgacggttccaacccgtcttctatcagcggggctgggatggggtgggtgcatcagtagtaaagtttgtgctggagttttttagaaccggttatcttcctccggagattaatgatgctttagtggtgcttatagcgaaagtgtttaagccggagaatataacacagtttcgtcctattagtttatgcaatgtcctgtttaaaaccattaccaaagtgatggtaggaaggctgaaaggtgttattacgaagctcagtgggccggcacaaacaagttttatccctggcagattaagcacggataacatcgtagtggttcaggaagtagtgcactctatgcggcgtaaaaaaggagtgaaggagtggatgctgctgaaacttgacgtggaaaaagcctatgaccgcatcagatgggatttcttggaagataaattaattacggcaggtttgtcagagaattgggtgagatggattataaaatgtgtagaaggtccttcgatgcggttattgtggaatggtgagcgaacggatgcgtttaatccgttgcgtgggctgcggcagggagatccattgtcaccatatctgtttgtactgtgtttggagcggttgtgtcatttgataaaagcttccattgcagggaagaaatggaaaccaattaaaatatctcagactgggccaaagctctcacacatctgttttgcagatgatctgattttatttgcagaggcttctgttgaacaaattcgggtgatcaggggcgtgctggaaaggttttgtgctgcgtcgggccaaaaggttagcttggagaagtccaaaatctttttttctaagaatgtctcaagggagatg

SEQ ID NO: 169369 - DNA, 768 bp, Arabidopsis thaliana landsberg
gcgtttgcgtttacaattagtatagtctaaaatctatactaatctttgaaatgtttaggtatgacgacggttttgttagttggggccattggtcaagctaggtacatgacacacatagcccgagcccatatgatgcctccatggctagctcaagtcaacgcaaagaccggaacaccaattaacgcgaccgtggtaatgcttgccgcgacagctctcatagcattcttcacaaaactgaaaattttagccgatctcttgtctgtttccacacttttcatcttcatgttcgttgctgtggctcttctcgttagaagatattacgtcaccggagaaacatcgacccgtgaccgtaacaagtttttagtgttcttaggtttgattcttgcgtcctctaccgcgactgctgtttattgggctttggaagaagaaggttggattgggtattgcattacggttcctatatggtttctgtctacggttgccatgaagtttcttgtaccgcaagctagggctccgaaaatttggggtgttcctttggttccgtggttgccttctgcttccatcgctattaatatcttccttcttggttccatcgatacaaaatcgttcgttaggtttgcaatctggacaggtattctgctcatatattacgtcttgtttgggttgcacgcaacgtatgatacagctaaggcgacgttgaaggagaagcaggcattgcagaaagctgaggaaggtggtgttgttgctgataattcttgttctgcaact

SEQ ID NO: 169370 - DNA, 1204 bp, Arabidopsis thaliana landsberg
ttccacttcccccacgactcccaaggcggttccgtcatcatctctagcttgcgtaaggtaaattcactttactctctccttattatttttcactctttatctttcttttagaacaaagttcctttcttcttcctctctgcatttctctccttcgaacccccagactgttcattttcttacgatgaattctgaaaacaaaaggcctgaatctccatattttaaagaaggtggctctagtaatgacctttacacccggccgaatgacatcgccagtccacattatcaatctacatgcactcttcaatcccttaaccgactgagagaactctgccgaatcccacccgaagttatgagggattcacagatgccagagcccaccgaatcgccggaggaccaccgtcccggattcttttgcgtttacaaaatctacttcaaaggttgcggattgaccttcccccttcccgaagctttggttcggtatttggctgctcttgaaatcgccctacctcaattgacccctaatctcctctgaaccatcctatgtattattaccatcgcggcggaggccggtttcgtcatcggggttcccgagttgaacgaacttctcagtgttaggagttcgtcgaagaaaaccaggtacttttcagcatacccgaacgccaacagaaatctcatctcgaatctcccaaacaaggatgagaattggcaccatctttggttcttgattaagaaaacccctgcctcgattggaaatctttccgatgtgctcccatcgaagtggtctgcgaaacctggtagaaattaggtcgtatatgcctttttgcttatttttttcttttatttaatcgactttatgatttccacttcgcagctttcattgctcgaactctcccgaccgtagaattcgttgaattcttcaagattgttatcgagggagagaccctctggaactctttcactcttgatcgggtcattgaggccaatcataagcttagaatgagtccacccagacaactactccaacttccaccacctccacctctacctcacggaacttctacttgggctatagcttcccgtcgaaagacgttatccaagccgatgacagaggcttgtgaggcgaacaagtcattccttcagtctgctgtcgacaagaaagaatacagtagaactctgctggtcgacgatggtagcagtcgacacc

SEQ ID NO: 169371 - DNA, 288 bp, Arabidopsis thaliana landsberg
taagacccttcactagctgcaatgtttggtcttccactctttccttccgacctctacgagttgggaaaaatggcgacgaaggcgagaacaacgaaaccatcattggaagaagaagaagggagtccactcagaggcattttatgtgtgaaaaccagacgagacatgaagagatttgaaaaaacagaggattgcttcatcctcgatttcaatccttttgattcgtttgacgttaaaaggctctcattttcccttgataaagatttggaaatcatccatgagtcaggccag

SEQ ID NO: 169372 - DNA, 676 bp, Arabidopsis thaliana landsberg; identical to SEQ ID NO: 12672

SEQ ID NO: 169373 - DNA, 866 bp, Arabidopsis thaliana landsberg
atggggaaatcaaagaaaaaggttctaaataaatctctgattactcatcctagcaccagtgacgatactctccaagtattcttctttcttaccatgtttgtttcatgttttttggaaatgaattagaattgtaattagacaaagatcatgctaaactttttgcagttgttcgatccaacatcgtctcctacaaaggaaaaagttaactggaacaatgttcttggcatttctgattacctctctaaacaagccaccagaggttttagggttctctgttaatatttgttaatttctcggttcttttttttttgtgatttcttcctctcaatttggttactacttaattatgatagtgaaaacgctatggactggagaaactccaaaagctgaatcagttaaggagacaatggagtcttacttcaaggctcttctagggtttttgctctgttgtcatggaagcactcttggtgctggtcctactttgtcttcaatcgtacacggttctgttaagcaaatcgttgactccagcttcagattgtttcagggttctgtatctctttacggtaataatgaaaagttttatacttttcaactatctcaatgtaacatctattgaactcgtcttgtcaaaggatagtgtagccactgtttcatttgctttcaacatacacttctcgtgagtgctttaactgtggatgatgttgccggtgttttgtttgtatctgttaaccagatggatcatatgaaaagggggaaaagccgtctatttcgtagctttcaggagcagttttggaggcatgctctagtttcaagaaggttcctacaacaaacctcatcgcgattggcagtgctatttctcaggttcg

SEQ ID NO: 169374 - DNA, 1111 bp, Arabidopsis thaliana landsberg
aatttggatgcaatataaagtttagttgaaaaggttgtacataacaatgtctttgagtttgttgtgaataaatcggagccgttgagatatgtggttgtaggttcagaagcacataatggatgcgattgatatccatgaactgcgagacgtgatatgtgtaagctatatgctatattaactcatagaaggattcattcatgctctcagtcaagtacaactattgaacgaagtaaaaagagaggcacaccgactatggttacttcgttattggttgaagattatccgagataaattgccactccaatccaaaagctcttattgaattggttcaaggaagatttggtgtgcaagtcacatatattatagcgcgtggagaggagaaagagaagaagcaaatgatattaaaggttcccaagagaaaggttttaggtttgtgcattgttatatgtacatgtttcaaaagatgaatcatgattcagtttattatcgcggaagtagatgaggaaaataagtttaagtaattgtttttcgcttaaagagcttccattgaaggcttccgagttatgagaaaagtcacattgtggatgaaactcatatgaagactgcatatggcggagttctaattgtatctacggctcaaaatcccgatcatcaccattatctgattgcttttggtgtagtggatggtgagcaaaattgatagttggaattggtttcccaagaatctcaaatcgattatactagatgaccatgaaattgtgtttttttcgaatagaaaccaaaatctccttgagacaatagcctatatctgatccattgtccaccatggatattgcatctaccatcaaaacttgaaattaaaggtttataaagtaaacaaaggcatttgtgcaaaaagtttagggaatgtgctcgagcttatatggaggttgaatttttaaggctttatagagtttgatcgactacatatcatttggcacgcacatatcgagatgattatgcggatgtgacaaaatgggcttgatgttattttggagaagcaaagtacaacatagcccccataaattcagtaaaatctataaatagtatttttaagtaagtattttaaata

SEQ ID NO: 169375 - DNA, 868 bp, Arabidopsis thaliana landsberg
ctcgaagatcgtagagagagaatcgccattggtgattcagaaaccaaaatcataaactcaatttggcttatggagaagacgagaagaataagaacaagagcatctagaaattaaacacgtggcgaataatggaccgagaatgtatccggcgtcgtttttagttaaaagcccatatttattttgaaagcccaattcaaatccaagtccattaaaacaaaattacgaaaattgctttcgattttctcatccaaattggttcgtcttccccataaactctcagtctctagggttttaaccgtcggcgtatccgccatgagaacactgcggagaaatgttacggagaatcttcttaccatctcccggcgtagaacggagaagaagacctcaccgaataaaacagaaaagtcagtccagatcccagttgatatcatcatcgagatactcctgagattaccggcgaaatctatagcgacatgtcgttgcgtgtcgaacctctggatctccgtaatttgccgtcaagatttcacagagctgttcttgaccagatctttgcatcgaccgcaactcttattctcctgcataaaagatggtaacttgttcttcttctcgtctcctcagcttcaaagtccatatgagaactcgtccgccatttctctaaagaatttctccttatgctataaaatttcgcgtcctgtcaatggcttgatctgttttaaacgtaaggaaatgaacgaaacagtgacagtgatatgtaatcccagcactggacataccttaagcttacctaaaccaatgaagacgagtattgggccgtcaagatttttcgtgtatgaaccgattcagaaacagttcaaggtattgttgtgat

SEQ ID NO: 169376 - DNA, 996 bp, Arabidopsis thaliana landsberg
  unsure (1)..(996): unsure at all n locations
catgattctatcttggagctccaaatgatctccaccgttgttttcaacttctaatctctaccctccacgggtgggtcagttcttaacccttcttttactatatcagactggtgcaccctcgagaaggtccctttgttcgtctttagagtccaatcttctgctacatctgcctcgccttttgagtattttctatgaggcataggccgagatgagtctgaggatcgtaggaagcttcaatgttcagtaaaagtggagatccgaggatacgacccggcnnnnnnnnnnnnnnnnnnnnnnnnnnnnnnnnnnnngggccatcaatatagattgatcggttgggaacctaaagattacagaggcgtggcttttcttccgctaaacaacaagggaagagaaggagaattcgttgtgattctcaattacacttacgttttgatggtgttaacaagtgcggaaatgaagtggaagcggcttgagaacgtcccatatgctatatgctcggatttagtcacttttagaggatgattttatgcatcctttcttagcagaaatactttcgttattgatccttattcgctggaggtaactctcttgataccctcgcctcacaagccactaaactacctggttgcatctggtaatgatgaactctttctggttgaggtaaccatcccaaattctgatgtaatagattttagccggttcacatgtatagtgagtaggctagatgaaaagggtggtaaatgggttgaggtcaccgatttgggaaaccgtgtgttctttattggatactttggaaatgtctcttgctccgctaaggaacttcctgatggttgtggtcttagtgggaactcaattttgttcaccaatgagccaacttttgcctataaatatggcctacatactagaagcgcggacgatgatctcaattgttggagagccacaagggagaatcgtgtgatgatcctcaacacatctcctgttttggctatccaa

SEQ ID NO: 169377 - DNA, 2170 bp, Arabidopsis thaliana landsberg
aatttcttggattcatataaatcaaatgcagaaatgatgaagtgtccatgtattcgttaaatgtaacaaaaatgaagtcaagaaaagatattgaatgtgacttgatgtgcattggctttttaagctcttatacaacttgggtattacatggagaggatatatgtgtcacagggaatgcaagagtaccttctgatattgatcgagctgatttagattcaactttgaatctcttggatgatcttttcaccgatattaattcgaatttgtctggtgaacacgtacctggatcgtgtgatcaacctgtggacactgatataccatcaacttcaagtggaaattgtggaaaaggagaaggttttgatgatttgtttgctgaatttatccaaaagctatatatgggaagtaataagttcacgaagttgtctttcatattgaagttgtaccatatcaaatgtttgtgtggaattagtgacaaggagatatctatgatgcttgatttgctgaaagatgcatttacacatgccaaattaccagcttcatttaatgacatgaaaaggttattcgaaaacaaggaacgacttatgaatcaattaacgcatgtccaaatgattgcatgttatattgggatgcaaatttaaaaagggagattcgcaaagtttgtaaaccctcttgttggaaagataacatttcttcgcagagtatggtttttggatcagagaataagaaaaataaagttcctacaaagattttgcgttattttcctctaaagccacgactgcaatgtttattcatgtcatcgaaagcagctacccacatgagatggcatacaactgctaatataatgatagtaaacttcgacatccaagagatggagagacttggaagacatttgattaaaaatttaccaaattcgcagctgatccaagaaatgtcagacttggtttagcaaatgatggtttctacccatttggtactatgagtagtagtatagcatctggccagtgatactagttccttataactttccaccgtggatgtaacgcccctgaattgctctatggtcggacaaaccaagggcaagccaaaaacgctacattgatagctcatatagacgagttaacttaggttccaaacgcatttagacccttatccgaatcatcatatgaagaatccctcaaattgtgagttgagggttttcaacccttgccatgatcgcaagttgtgttagtctggacaagactaatatcgaatgaaacacactctttatacgaaaataatattttataacatataagttctcgtacaacaagtatccaaacgttttaacaatgggcccttgagcatacacgctcaaatccaacaagaatcgaaatcactaagttttgcaaaaccaataactctatatttacattcctatgtcctgagcatctctctaatggctcccactaaggttttctgcagaataaaatggagtcataactaatctaacattacttagtgagctcgtaattccctgtaacagatattagttcttcatcccataattctaacacgaaacacgcatcagagaatagcaacgaaaggtagcttggcgaaacaattacaaaaacatgcacatgcaattttgactccatatttaaatcagttttatagggcctgatatgctgccttcactcacccacaccacacattcacccacaccacacattcacccacaccatacacactcttgtgaactcccaagttacaactacaaagacatgtaaccagagcatcagtaccaaacgctacaccgtcgtgtagactgcatcagctagggtagctaacccaatctctccgagcccttcgcactacgtgtagatcgagttaccaaagttaaacaatactccacgatagcacggtgatgcagcgcattaactcttatcaaacacacttgagctttacgtgtttgatattgatctatctttcttaatttgtttgcgctttttacttgggctttgttcctatttcttatttacttttcgttctttgacggtgttgctttctagggttttaagtcttatttaaggttaattctatggatgtttaaacgcagcttttggtttatgaataaaacagagaagttgttctcttctaaagtctttgaattctctcttcttttggtccgttc

SEQ ID NO: 169378 - DNA, 409 bp, Arabidopsis thaliana landsberg
ctcgtctcaagaccgagtgagtcaccccgttgcaagttttagttataccattgagtataccagacttggtcgaggttctaaatttggcgttattacaaaatgcgttaaatgatcttgcagataggtctagactatgcagcggatgttcggttcctaaaggtaccagctgtcgtttctatagattgtcgtcataattatgcttaatggtggacactgaccgttatgggttagagccaagctttagtcctagtcagatggtccttattttaccatcaggcccagtatcgtgcgagatggccccttttttagaaatgttatatgggcaaatgcctaaaataaagtatggtattcccatggatagcctgcgctataacagagggaatgatcagtacccatcccttatagtact

SEQ ID NO: 169379 - DNA, 491 bp, Arabidopsis thaliana landsberg
  unsure (1)..(491): unsure at all n locations
atggagaatccaagctcaaacatagaaaaactgcaacaagattgttataacgaatggatgagtttacaagccaaacgcatgacggagcttaaagaagccatatccaccggtgaaaaagacgataacaagcttctagatttgatacgaacggcgatcagagattttggagactacgcccgaaaacggtcagaacattcccggcgatttagttcaaactatttcgctccgacatggaacacttgtcttgaaaacgcacttctttggatgggaggttgtcgtccttcttcgtttatacgactcgtatacgccatgtgtgggtctcaaaccgaacaccggttaaccaacttcttcaataacaccaatcacgacatcgacagtaagtcagagacgtgctntgtttattattctaaaatattntaaataagaatcattaaaagctgcgaaaatagaccatctgtttctttatatgtagtttgaatatagtcactccc

SEQ ID NO: 169380 - DNA, 661 bp, Arabidopsis thaliana landsberg
gattttacggtggctagacgagcaaccgccaagatctgtagtgttcctctgtttcgggagcatgggaggtttcagtgaggaacaagtgagagaaaccgcattagctctcgatcgaagcggccaccggtttctttggtctctccgtcgtgcatctccgaatatattgagagagcctcccggagaattcacaaacctagaggagattctcccggaagggtttttcgatcggacggctaacagaggaaaggttatcggatgggctgaacaggtggccatattggcgaagccggcgatcggaggttttgtttctcacggcggatggaattcgacgttggagagtttgtggtttggtgttccgatggcgatttggccgctttacgctgaacagaagtttaacgctttcgagatggtggaagagcttggtttgtctgtggagatcaagaagcattggcgaggagatcttttgttggggaggtcggagatggagattgtgacggcagaggagattgagaaaggaatcatgtgtttgatggagcaagacagtgacgtcaggaagagagtgaatgagatcagcgagaagtgccacgtggctttaacggacggtggatcgtcagaaactgctttgaaaagatttattcaagacgtaacggagaatattgct

SEQ ID NO: 169381 - DNA, 1319 bp, Arabidopsis thaliana landsberg
  unsure (1)..(1319): unsure at all n locations
ggttcagaggttttacatatggcgatgaccgtggtggaatgtgaccttctcaaagaaattcaggcgggtacatcactgattcaggtcttcacgatatcattgaggctctgaagaaagatcctactgctaagagacatttttcttggactcaaggtgtgttgcgcaggaaaagcaagatagttgtccctgctgatgtgaaaataaaggataatattttgcaatggttacacggctcaggcgttggtggtcattcaggtcgtnnnnnnnnnnnnnnnnnggtgaagggtctgttttactggaagggtatggtaaaagagattaggcttacattaggagttgtaatgtgtgtcaacagtgtaagccggataacgcagcatatccagggttgcttcaaccattaccaattcctgaaacgatctggagtgatgtttcaatggatttcattgatggattaccagtttcagcgggtaagtctgtgataatggttgtagttgatcgccttagcaaagctgctcattttattgctttggctcatccatatagtgctgcaactgtagctcaagcctatctggataatgtctttaagctccatggaaatcctaattctattgtgagtgatagagacaaagtgttcacaagcgaattttggaaggaattcttttctctccaaggggtcgctctgaagctttctagtgcatatcatccacagagtgatggtcagactgaggtagtcaatcgttgtttggagaactatctcaggtgtatgtgtcatgctagacctcatctctggagtttctggttacctttagcagagttttggtacaacactaactaccacacttcaagccatatgactccttttgaggttgtatatggtcaggcacctccaactcatttaccatatctacccggtgaatctaaggtggcagtagtggctcgttcattgcaggagagagagaatatgctgttatacctgaaatttcacttgatgcgtgcacagcatcagatgaaagtttttgctgatcaacacagaactgagcatgaattcgacattggtgagtatgtctatgtgaagcttcagccctataggcagcagtctgtggttctgcgttctaatcagaaactttcccccaagtactttggcccttatcagataattgacaagtgtggagaggttgcatacaagctgaagctacctgagtactctcaaatccatcccgtgtttcatgtttcccaactgaaggtcttggtgggcaatgtccataccacacaccacttaccttctgttcttccggacgtgtttgagaaggcacctgaaa

SEQ ID NO: 169382 - DNA, 340 bp, Arabidopsis thaliana landsberg
  unsure (1)..(340): unsure at all n locations
aatcgcgaagcttgttatgagaaagcgtgctcgcattgaacgaatgaaagcactcataagattgaaagcagcagagtcttcgtctccttgcgttagcattttctccatgctagtgacggatatagtattagtcatctaattcatactaggtattcaccgtggcaatcaagatcnnnnnnnnnnnnnnnnnnnnnnnnnnnnnnnnnnnnnnnnnnnnnnnnnnnnnnnnnnnnnnnnnnnnnnnnnnnnnnnnnnnnnnnnnnnnnnnnnnnnnnnnnnnnnnnnnnnnnnnnnnnnnnnnnnnnnnnnnnnnnnnnnnnnnnnnnnnnnnnnnnnnnnn

SEQ ID NO: 169383 - DNA, 3345 bp, Arabidopsis thaliana landsberg
  unsure (1)..(3345): unsure at all n locations
caaaacgacgaattgaggcaaatccaaaccaaattaatgcctttctcaacatgctcatctccaagaaatttcaaggaagtacagcggttaaccagtcggattgcggcattgaatcattttatttcaagatcgaccgataaatcattgccttttattcaaattttaaaagggaacaaggagttcctttgggatgtgaagtgcgaggaagcattcggacagcttaaagcatatctgaccactctacctatattgtctaaatcggaagcggatgagaagctttatctatacgtctcggtctcaggtcatgcagttagcggagtcttgatccgagaagaccgaggagagcaaaaaccaatttactacataagcaaatccatgacggatccggagaccaggtatacgatgatggagaagcttgtactcgcagtagtaacctcagctcggaagcttcgctcgtattttcaatctcacccagtcgaggtgttaacaaattagccgcttcgaacaattcttcatagtccgaatcaatctgggagattggcaaaatgagcagtggaattaagtgagtatgatatagagtacaagaggcgagtcgccatgaaagcttaagttctggctgattttttaccagaattgccggtacattggcgtgcaagaataaccagataatcaaacttggaagttgtatgtagatggatcttcatcaaaacaaggatccggagtgggaataaagttggaatctacaacattggaaattcttgaacaatcattccgtttattatttagtgcttctaacaacgaggcagagtatgaagctctaatcaccgaactgaggttagcacaaggaattggagctgaagaaatgattgcttattgtgattcgcaactagttgttaatcagttcaatggagattatgaagccaaatattcaagaatggaagtatacctcaaagtagtgaaagatttggctaagaacatcaaaaaatttgaactcattcgcaaacctcgaagagaaaatacgactgggatgcacttgctgcgctaacatcaacgtcggatcctgaggtaaaaagagtcatcctggtggaatgtatttcagaacggaggattaaagaggagaaagaaacacccgtcattacaaggtcccaagctgcggcacgtgatcatggagaacctgagatagaattgccacctgtcaaacgatgaaagtcaaagggttcaaccatacccgagcccgacgtgtcaaaagaaaatagtagcgcagagcttgtcaatttgacagtagacgcagttccagaaacagttatagaaaccgagccactaatcgaggagaatatccttgaaccaaatgagcatcccaaaccggaaccacggatattccacgagatcgaccaaatttcggctatagattggggggctgattggagggagccaataaaacattacattgtgacacgcgagctcccaaaaataagtggcaaaccagaaaaatgagaatcgttagcgcgaaattttgtttatcaaaagacacgttgtatagacgaggtgtcagcgacccttacctcttatgcacctatgggcccgaagtcgaaattgtcatgagtgaagtgcatgaaggtttgtgtggtagttatttgtcaggaagggcaatggcttttaagattaaaagaatgggatattattggcccactctgatcacggattgtgttaagtactctcagcggtgtaaacgttgccaacttcatgcacctctaacccaccaaccgtcggagtaattctcctccatttccgccccatacctgtttatgaggtggtcgatggatatctttggaccattgcacaggtcaacccgcggtgtgcaatatcttttggtcttaactgactacttcccgaaatggattaaggccgaagcatttgtgagcatcaaggactcggtggtaaaaactttcatttggaaaaacattatatgtcgacacggtgtcccatacgagatttttattgacaatggaccacaattcatttcgcacaagtttgaagctttttgctcggagtggggaatctaagtcaactactccaccccgcggtacccacaaggaaatggccaagccaaggctgcaaacaagactatattgagcaatctcaagaaacatctaagttatttaaagggaggatggtatgatgagctccaacctgttcactaggcttatcgtacgactcctaggcgatctactggggaaacactattttccttggtatacagaatagagggagtggttccggccgaactcaatgttcccgaactccgccgaacagaggcacctttgaatgaagcagaaaactcagcaatgctagaggattcacaggataccatcaatgaaaaacgggatcaagctttattacaaacccaaaactatcagcaagcgacagcccaatattagaacaccaagattaaaagtagacctttttcgtaggagactatgtcttgaaacgagttttcgacattacaagggaagaagaagcagacaagctcggaattaattgggaagggccttatatcgttacttaagtggtgcttataggttaaaggacttagagggcaggccagtccaacgaccttggaatgttattaacttaaagaaattttatgtttaagaaaaaggacacgcattttttgtacatgaactacggtgtggcttgatctcgaaatgggtacgtaggcagctcggaaacgagttcagctattaataaaatttgttttattcatattgaaggagagttcgattatacgaacgaatgaaaacaagaagttcgactatacgaacatacaaagcaagaagcaaagataaatttattcaaagataaacacaaagaaaaaatgccggaatcttagacacacttcggactaggaaatccttctcgtcttgcagaacacttcgaccccttgactggcgaggtcaagaatgggcatcatacaatctgggatgtgggcaaattctgcaattccaagttcgatccaatctctagggtaggagttgaggttgtgtaactcccttgatatcacagtgaccctccgcagcatttggttgatcttctttcgaagcttcttctttttcgttgagcttttttgtgttgagctgcgagagctttgataaaggccatcgcgatatctttatctctgttcaaaaggtccttgattaatgcacacggagctcggatctgggatctgaagttgcgaagtggggagcgccctctgtctggtacattcgnnnnnnnnnnnnnnnnnnngccgatcctcgaaaagtctgacatggattccgaacattcgagcgtaaaggacataactgc

SEQ ID NO: 169384 - DNA, 533 bp, Arabidopsis thaliana landsberg
  unsure (1)..(533): unsure at all n locations
gcgcgtcgtcgnttcgaccggcgccagcctgcacgcggcggcctgtgccggcctggcggcgctgtccggcccgcaacacggcggtgccaccgcgcgcgcccacgcgctgatccagcaaaccctgctcgaacgcgaccctgccggttatgtgcgcgaacgcctgcgccgtggcgaagagcttcccggctttggccacccgctgtatccggacggcgatccgcgcgcagcactgctgctgcgcatgctggccgacgcgcgcccgcgccccgccgaatcggcgcgcatacagcgcctggtcgatgccgtcaacgacaacgatggccgcgcgcccagcctggatttcgcgctggcggcgattgcctcggtgtacgccttgggcgcggatgcggcgttgtcgctgtttgccgccggacgcatggccggctggctggcgcatgcactggagcaacaggaaaatggtggattgatccgcccccgcgcgaactatgccggcaccatgccggcgcgacgcgactgaggcgcatcgccgcacg

SEQ ID NO: 169385 - DNA, 587 bp, Arabidopsis thaliana landsberg
acaaagttgctcttcgatcttccacaggatgtgatagaagagatattctctaaggttccggtgacatgtctaagaagaatacgatctacttgcaaaagattgtacgctttactcaaagatcgtggattcatcagaaaacattttgctaaatcagcaaggcagtaccatgctcttatgctaaagaattttaggttttattcagtgagcttcaatcctaatggaactgagatggacgtggcttccttgtttaatggtgaacgtagcctaatcgacccctatagtagttcagaagctattatatctcaagcctttcactgtgatggtttattgctatgcaccaccaaggaaaaccgattagtggttttgaacccgttttcagggcaaaccaaatggttgcaaccacaaaatcgttgtaagatagatgaggcctaggttcttggatacgacaacagtgacttgtgccatagctacaaagtcttgagttttccggatctatacgaacaagaattggaaactatcaagaatgcagggagggatcttgatgtcactccccgaggcgacttagattgaaaaccgatgattttagc

SEQ ID NO: 169386 - DNA, 339 bp, Arabidopsis thaliana landsberg
  unsure (1)..(339): unsure at all n locations
tccccggtcaccatagtcttgaccggtagtcttctcttcatcattttcacggggttcttctccttcttcttctgtggatgtntatttaggaaactcatgaggatttggaataaccatcgaaaccgaaaccgtcctagtaacctaatccaaccgtctaatccacctgaaaacctcggtctcgactccaagatcattgaatcattccctgagtatccttattcggtgaaagatcatgggacggntcaatgttccatttgtttaacagagtttatggatgatgacactattaggctcatttctacttgtaatcactccttccacancgattgcattgatctt

SEQ ID NO: 169387 - DNA, 512 bp, Arabidopsis thaliana landsberg
  unsure (1)..(512): unsure at all n locations
tttgttagcagcctaggtcgtttgtttgtcgtcagcaacttcggtgaaagtcatggccccgccattggttgcgtggtggatggctgcccacccggtttgcccttgtgcgaggccgatcttcaggctgatcttgatcgacgaaagccgggtacatcccggcatgtcacccagcgtcaagaaggtgaccaggtagaaattctctctggggtctttgagggggtcactacaggggcacccatcggtttgctgattcgtaaccaggaccagcgaagcaaagactatggcaacatcatggacagctttcgccccggtcatgccgactacacctactggcacaaatacggcattcgtgatcatcggggaggtggcaggtcttcggcccggatgacggctcccatggtggctgccggcgccattgacaagaaatggctggcgacgcagtttggtgtccttgttcgcggttgcatgacccagatcgnngaggttgaaattccattccagtcctgggatga

SEQ ID NO: 169388 - DNA, 611 bp, Arabidopsis thaliana landsberg
tatagtctggatgaaagaagataaaagtatatttgtgctttttgcgtgctctgaaatgattacttgtcatttcagagcatttttgttaatcgcataagttttcttttgtatgccttgagtagtcccctattcaaggtatattttttggaggtagtgagatgagcgattcaaaatatatgaaattagcaataaaactggcacaaaaaggggctggttacgtcaaccccaatcctatggtcggcgcagttattgtaaaagataatcacatcatcggacaaggttatcatgagttttttggtggcccacatgctgagagaaatgctcttaaaaactgtagagaatcccctgtcggagcgacgctttatgtaacacttgaaccctgttgtcacttcgggaaaacacctccctgtatagatgctataatcgatagtggtattacaagagtagtcattggaagcctagactgtaatcctattgtatctggaaaaggagtaaagatacttgaggaaaataatcttcaagttactgttggaattttagaaaatgagtgtcttacttaataaaaagttttagaaagtatattactagcatgtaccctatgtttatgaata

SEQ ID NO: 169389 - DNA, 409 bp, Arabidopsis thaliana landsberg
ggcatttacatgcagaagtggaatatacaagccgatatctcatgtaaattctgcattaaacgggtcgaaactagaaaccacctctttttcaatgctgttattcaagggaaatatgagaaaagctagttaaaagattacttcgtagtgggattgggatcaactctcactgctcatcacaaatccgactgttgaaaggaaggtgttgctgcttctgcaatacgcactgtcaatcacagtccacaccatgtgacgagagagaaataacagatggcatagagaagagtcggtcactgcaactaccctagagagaaccatcgacaaaaacattcgcaaccaaattacactacttcgaaaaaccgggaacccgaagtatgataaccttttcatattttggctttccactaggcat

SEQ ID NO: 169390 - DNA, 768 bp, Arabidopsis thaliana landsberg; identical to SEQ ID NO: 26294
  unsure (1)..(768): unsure at all n locations

SEQ ID NO: 169391 - DNA, 732 bp, Arabidopsis thaliana landsberg
attacatacaactctaatggagaaagtgaggatctttttaacatctttcataaagccttgatgcaaccaagtacgaggttttgaaacccagtcatgataagttcctcagggacttcacaataggtttcatggcagctgggagagattccacggccactacactcacttggttcttttggaatttatctgaaaaccctaacgtcttaaccaagattctccaagagatcaacacaaatctaccaagaaccggaagtgaccaagacatgtcatcgtacttgaacaagttagtgtacttacatggtgcattgagtgaatcaatgaggctttacccaccaataccattccaacgcaagtctccaatcaaagaagatgtgcttccaagtggacataaagtcaaatcaaatatcaatattatgatctttatctacacgatggggagaatgaaaaccatatggggagaagacgcaatggagttcaagccagagagatggatttcagagacaggaggggtgagacatgagccttcttacaagttcttatccttcaatgccggcccaagaacttgtctcggtaagaatttagctatgaatttgatgaagacggtgatcatggagatattacaaaactatgagattaaggttctccaaggacagaagattgaggcaaaacctggttttatattgtcacatgaaacatggtcttcaaatcacaatgactaagaaatgttccagc

SEQ ID NO: 169392 - DNA, 892 bp, Arabidopsis thaliana landsberg
acgatgatcatccatcacatgacgtctcggaaggccaaaagctcgtgaaagaagttaacgaggccttgagatcgagtcctcaatggaatgagattttattcattataacatatgacgaacacggtggattctacgaccatgtccctactcccctcgacggagttcctaatccggatggtatcttgggacctccaccgtacaattttgaatttaaccggctcggcgttagggttccgactttcttcatctccccttggattgagcctggcacaggtaagtatgttgtagacaataatttaattatactataatgtgttaattaaatgacaatttttggtaaaatgtgtagttcttcatgggtcaaatgggccgtacctaatgtcacaatatgagcattcgtcaattcccgcaacggtcaagaaaattttcaaactcaaagattttttgacaaagagagattcgtgggctggcacttttgaatctgttattacgagaaactcaccaagacaagattgccctggtaattacattttttcatttctaataaattctatcaacatttgtgattattttgaataaatacttcgttttaaaaaaaaaaatagaaacattgtcaaatccggtcaaaatgagagggacggtggcaaaagaaaatgcagaattgagcgactttcaagaagagcttgtaatagttgctgcgggtttaaaaggagactacaaaaacgaagaattgctatacaaactatgcaaaaaaacttgcgtttcagatgcttctaaatacgttacgaaagcgtttgataagtttgtagaagagtctaaaaaggcaagagaaaggggaggtgatgagaacgacatcgttttttgcgttgatgatgatgatgatcataatgtt

SEQ ID NO: 169393 - DNA, 384 bp, Arabidopsis thaliana landsberg
attgcagatactaaatttgtatctggaaactgtagaaccgagctggttaaattcattgctgataggcatgccaaactcatgaaacaagcctctcgatattattccgcaattaaaggttagtacaacaacctgttttacaaactattaccgcctatgcacctagtctttgtcatgtgtacaagttcagaaattctgatcctcaccattgaatatattatacgtaagatgtgaaagatgaagcattcatgtcaacaccttcttatcactgtgaactaagtaaaagacactgtctctgttttttggtagatactatggctcgtgggaaaagaagatatacacttgtaaaagatgtagatgacatggaaacaggagcatatgacaaac

SEQ ID NO: 169394 - DNA, 957 bp, Arabidopsis thaliana landsberg
agagaagatgtttgggacggcaaagaaatgaaagattaacttgaagaagaggaagctattcaaccattcacgataatcgatgaaaacacaataaaacatgtcagccataaagagcataacctaagacttgacaagtctggtatttttattgaggagaggatttgtgaggcatgtgtttatcctatctatcaccactccttctatagctgcatgagttgtagtttcattctccacgagagttgcgcctatctgcctctatggaaacgacatgtggtaagcaacgaacgacatgagtataaatattgggattattttattagatgttcggcttgtagattgctttccaatggttttagatacgaaacaacgcaaacttcattggatttgcgatgtgcttcaactactgagccatttttccataaaactcatcctcatcccttattttacacatcgccacaaggaatctgcagtgtttgcaagaaagatcatcttcatgtgctcagatgcgttgaagatggttgtgaatacatcatggactataagtgcgctctattaccatatgaggtaaagcatagtgtcgaccaacattttctctctttatgctatggtgaagaaattgcaagtggtaaacattggtgtgatatttgtgagaaagaaatggatccaaaaacatggtttcacacctctaaggattgtgagcttactttgcatacagactgcgtgctcggtgatcgtcgaggtctcaagccagaaagcgaagaatcgatgaacatcgacgactacgaaatgtatgttaaggcggtctcgcaacagcagtatgtctcgaccactttgcaaacacagcaagtcttcgttgcatatttccagtcatcttggaaaaatggaatgaaagctgcctccgcaaagaatattattgctctgaagcttgcttctattcctaagtttattatatatgct

SEQ ID NO: 169395 - DNA, 314 bp, Arabidopsis thaliana landsberg
tccttccggtgaagaaaatcttgattcgttagctaatgaagtcgaagttctaatgaaagaagtgattaggttatcaaatagattgaatggtaaggctgagaaaagaagttcaagatctaaggaggaatcagtttccgacgccgttttcgttcttcgtcggaagtacgtttgaaggagctcctagagagcagcaagcgttgcttgagcttgaagatacggcggctaggttaaaaagagaaagagagactttgaggaatacacttaattatttgactgcagcttctgctgttaaagatgtgtttccttcatcatca

SEQ ID NO: 169396 - DNA, 749 bp, Arabidopsis thaliana landsberg
attcgtgccgtttgcgatcgccgcggttgaactcgataccgaaaagatgatcgtgctcggtccggtcgtgaatggcatcggcgtcgagtcgctgaaggccggcatgaaaatggaactggcactcgaagcgctcgccgacggcaaactcacgtggaagtggaaaatcgccggagctggtgcatgagcaaggacatcgccatcctcggcgtcggcatgcaccgagatcaacatgcggccgcaggccgcgcttttgcccctcgcccgcttgcgggagaggggagggccgtccgcggagcgggtggcggggtgagggcgggtgcatgagtaactccggtgatatcgccatcctcggcgtcggcatgcacccgtggggcaaatggggcaagaattttgtcgattacggcgtcgtggctgcgcgtgcggcgctcgccgatgccggcgtcaactggcgcgacgtgcgctttgtctccggcgccgcgacgattcgtaacggctatccgggccaggttgccggcgcgacgttcgcgcaggcgctcggttggcagggcgcacaagtcaacacttcgtatgcggcctgtgcctcggggtcgcaggcactggctgccgcgcgctcgaagattctctccggcgaatgcgaagtcgcgctggtgatcggcgccgacaccacgcccaagggttttctcaaaccgcagccgggtgatcgcccggatgatccggattgggtgcgcttccgcgtcggtatcaccaac

SEQ ID NO: 169397 - DNA, 794 bp, Arabidopsis thaliana landsberg
ttttaagcaattcgaggttggatggtgggctagtgaagaatatttctgttaaggaagatgacggaagagggaataagtcgaaacgtgtatgtggatcagaagatagtatatcaaaggctgggctaaaagagtttttgctgtcctcagaagatgaagaatttcttgcagaactcgaaaactgttgaaggagttattggttgtgaacagggtcctgttgtgagtgaaattatatctgaagatccggatgaagaagatatattgaatgaaggaagcgaagatcttacttgggatgagattgaagaagtaaaaccccaaatcttatgatgtcgagttttggagccctttcttggatgaggacatgggtggttcaaatgcattggatataatggttgtcggggaagaagatgttgatgttagaatgggatttgcgtcaccaacagtagacacaaaattagtggctagtatggaaggtgcaagttcgaacagggaaattgatgatttgctaacgtcttcaattaagcatcccattgatctacttgcaaacggcagtggaacaggaaatgttgttaacaatagaacaggtgattgtaatacaaacgaaactgcaagagaaactagaaagctatcagaggtagataatgaagagtttgatattcctcctctgtttgatgacacagagtatgaagctgccataatgccggatatagataaggctgacggagaagatggttataaaggaaaagtttatgctagcaagtcggattgccaaattggattggctatttatgctatcg

SEQ ID NO: 169398 - DNA, 499 bp, Arabidopsis thaliana landsberg
  unsure (1)..(499): unsure at all n locations
aaccccaaaggcaacagacagctcccatncatcagggccgcaacaaagttcattcaggccaccagctccaagaggcatagagggcagaagcttcggaggaagatacaaagaccagcccaggagactgttttgtctattctgcggcgaagacaaaggtcacaccacaannnnnnnnnnnnnnnnnnnnnnnnnnnnnnnnnnnnnnnnnnnnnnnnaagcacagcagaatcagccgaagcaggtcctacatactgcttcatgctattctccctacgtcccagagtatgtaggtaatcaacatcctacgacctcttttgctttggtaagccattctcaggcttcctgggcccagctcccaccaccaccaccgctaccacctactctagcccgaagccaatagctagaagggcaccaacaccctcagcagcagcgcgattttcgagaggagtctaaagctcgcacagtcaatagcactgtgcccgaatccaagcacatctac

SEQ ID NO: 169399 - DNA, 691 bp, Arabidopsis thaliana landsberg
attcaagcatctatagctcaagtatcgcaacgacaatctaaggcccttgtaaaaagaaagtctgttggtaaaggcacagcgatcttatcgagatcacgacgtagtggtggcggctccagaagaagaaggaactgcagaaacattgaacaggatacatcagaagccaatgatgatgatgatcaaaacaaaagaggcaaagattcttcttcagatgagccttgtgagaggcaacgaaaaaagcgttcagcaactcagccttcttcttcaaatgcaaacaacaacgataactgcgcaggtaatggcacagagcagacgcatcagagggacagcagagtaatatcacctgtgcttgtgtggaactcggaactaattgcatggggaagaggcggtacaaggagtaacacaaggcaaggaaataataaccaaggagctattagtaagagaaatgctcgcttgaaaagacttgtggaatatctcgggagcttagagggtaatagtgtcgaggtaacaaaagaaaatgatctttgttgaccattatttatgatttacaattttggttttaagaaacataaatctattctgcagttggatattcatcttaagcttgtctcgctggatacagaaggtttactaaacttacatgagccaaatctttgtttccggcccactttgctagttaaacaactgcgcg

SEQ ID NO: 169400 - DNA, 916 bp, Arabidopsis thaliana landsberg
tttcgatactgactcactgtacttagactgtgaaccatgtgattgaaatagaatctaattagtctgatggtgattgtttgtcagtactctctgatttaaccactgttcttccatgtttatgccattcaagtcttgataaattgctcatgtgtttcagaaagtccagaagatgcacccatgcctgtatgatgatagtgctggagctagttacaatctaagagagagactgagttacgaggattacaagaggggaaagactgggaatggctcggatataggcagttcagatgaggaggatagaccatgtgctctagttgggtcaaagtttcaagctaaagtaccggagtggactggcataacccctgaaagtgattcaaagtggttgggcactcggatctggccactgaccaaagaacaaaccaaggctaatcttcttatcgaaagagatcgtattggaaaaggaagacaagatccttgtggctgccataatccaggatctattgaatgtgtcaagtttcatatcactgcaaaacgggataaactgaaacttgaacttggtccagctttctacatgtggtgttttgatgtcatgggtgaatgtactctccagtattggacagacttagaactgaagaagataaagtctttgatgagttctccaccgtcacttagcccagccttcatccatcaggccaagatgattcttccttcgaagagcagaggaaaaattgtgagctacttctacaacgtgacccttttgcagtacagagcaagtcagagtagaataacacctcacgatatagacagtgatactgatcaaatattcctccgcgcaacagagaatgaaaatccagcccccgaagcaaacacatttcagaaacccgccctgctttcgcctaataaaaaaagatgtcga

SEQ ID NO: 169401 - DNA, 557 bp, Arabidopsis thaliana landsberg; identical to SEQ ID NO: 67397

SEQ ID NO: 169402 - DNA, 574 bp, Arabidopsis thaliana landsberg
cgacatgataatgcatcattaaacattatggcaatatgcgatttgaatatgttatttacagatatttggaatggagcaccgggatcatgccacgatacaactgttttgcaaatggcacacaaagtgattctgagtttcctttgcctccgtccaaaaaatattatctcgttgattctagctatccaaacaaataagaatttctggctccttatagatcatcacgaaaccgcgttgtgagatatcatatgtctcaattctattatggtcctcctcctaggaatacacatgaattattcaaccaatgtcatacatctttacgttctgttatcgagagaacttttggagtttggaagaaaaaaaggagaattatttctgattttccaagatataatgttcacattcaaaaaagagtgataatggctacaatgagattacataattttatcagaagttcaaattttttagattcagattttgtagatgtaatgacagaaacaaatataaacaaccgagattttgagcataatgtaagcaacatggatgcagcatagtagcagatggagaacatatacgc

SEQ ID NO: 169403 - DNA, 864 bp, Arabidopsis thaliana landsberg; identical to SEQ ID NO: 19351

SEQ ID NO: 169404 - DNA, 1697 bp, Arabidopsis thaliana landsberg; identical to SEQ ID NO: 34351

SEQ ID NO: 169405 - DNA, 473 bp, Arabidopsis thaliana landsberg
atggccaaagacccagttcgcgttttcgtcactggtgctgcagggcaaattgggtatgctcttgtccctatgattgctaggggagtgatgttgggtcctgaccagcccgtgatcctccacatgcttgacattcctccggcagcagagtcattgaatggggttaaaatggaattggtggatgctgcattccctcttcttaaaggtgttgttgccacaactgatgtggttgaggcatgcactggggtcaatattgccgtgatggttggtggattcccaagaaaagaaggtttggagaggaaggatgtgatgactaagaacgtcttcatttacaagtcccaggcctttgcccttgaaaagcatgctgctgccaactgcaaggttcttgttgttgctaacccaacaacaacaatgcattgatcttgaaagaatttgttccattattcccgagagaacattttttgttgactagattg

SEQ ID NO: 169406 - DNA, 476 bp, Arabidopsis thaliana landsberg; identical to SEQ ID NO: 73353

SEQ ID NO: 169407 - DNA, 465 bp, Arabidopsis thaliana landsberg
gagaatcgcgttgtgatttatacgacgtcgttgcgcggtgttcgacggacgtttgaggcgtgtaacgccgtgagagctgcgattgagagttttggtgtagtggtttgtgagagagatgtgtcaatggatagaggatttagagaagagttatccaatctaatggcggtagaatcgacggcggcggtgttgccgcctcgggtttttgtgaaggggaagtacattggtggagcagaggaagtgatgagattggtggaagaaggattgcttggtgaattgcttaaagagattccgaggaagaaagatcggtgtggcggcggttgcggtggttgcggcggattagcgtttttgccgtgttcgggttgtaatggaagctgtaaagtggtggaaggatgggggaatgatgcagtggtggtgaagtgtaaggagtgtaatgagaatggtcttgttcgttgtccaatatgcagc

SEQ ID NO: 169408 - DNA, 467 bp, Arabidopsis thaliana landsberg
gtgtcgctggaaaccgtgaccgatgccttcaagcacgccgcggcttgttccgcgcgcgcaagctgcagattccgccgctgtacctggccgacaccatgggctgggccagccccgaggaggtcaagcgccgcatcggcgcggtgcgcgagttggcgccgaaagccaggatcggcctgcacctgcacgatacccgcggcctgggcggcgccaacgtctacgccgcgctgtcgatgggcgtcaccttgttcgacgcctcggtcgccggcttgggcggctgccccttcgctggccacaaggcgcgccagacctcgggcaacgtgtgcacggaggacatggtgtttctgtgccatgaactgggcatcgagaccgggatcgacctggaaaagctcatcgaggcctcgcgtatggccgaggagatcatcggccggccgctgatgggccgcgtgatgcacagcggctcgctcaag

SEQ ID NO: 169409 - DNA, 339 bp, Arabidopsis thaliana landsberg
ccttggcacatctttctggctttttacccatgatcgagttcggacacggaacgcacgtcggactgcggcgcccatgcaacgaagacacgtattgcgccgatggttcgaccggcctgttcctggtggccgatggcatgggcggccatacccacggtgatctggctgccgccttggcacgcgacatggtttcatccgaagtgcgccacggacagtcgctgaccaccgccttgcgcgtggccagcctgggcatcgatgcccggcgccagcacaacggggatgcatcccccatgggcacgacggtggcggcgctgcggatcgccgaccaccacttcgaagccg

SEQ ID NO: 169410 - DNA, 406 bp, Arabidopsis thaliana landsberg
atgatttttatactcttgttcccggcagccggttacggggcccggggtctgtccgctaccaaagccatgcccaaggaaatgctgctcggtggtcaacaagccactgatccagtatggcgtttaagaggtactggatgccggtctgaacgagatctccatcgttaccgggcgcggctagcgtgctttggaagaccacttttacattagctacgagctggaaaatcagatcaagggcaccgacaaggaaaaatacctggttggtatccgttcgtctgctccaacgagtgctcgttctcctacacccgtcataccgaattgaaaggcctgggccactccattctgactggccgtccgttgatcggtgacgagccttttcgcctggtgctggcggacgacctgtgcttga

SEQ ID NO: 169411 - DNA, 321 bp, Arabidopsis thaliana landsberg
tatctactgatactattggatagcggcaagaacattactaatgcaaaacaatccaaaattctacatataacaaaggacatgatctctttgcttttcgtttcttgtttttcaacagatcattgacgagtggacaatgcaagttagatccagaacaggtactgctcgtgtaaatgaaactgtgatatgtatttaaaactgttgtagtgttgtgttatattcctaaattatgctttttttgtttctgatacagtgggagaaacagaggacgcagataaagaagacatcaataagatgcttttctcagctatttgtcataccaat

SEQ ID NO: 169412 - DNA, 491 bp, Arabidopsis thaliana landsberg
caccggcacccgccagccgctgaacggggtgatcgtggcgatctcggtggccgacatgaccgccgccccgccgcccgagcgtctggcgcatgcgcgggcgatccggacccgggtgaaggagctgaccgaccggctgacggtgaaggtgccggtctacgcgatgttcaccaaggccgacctgctggccggcttcaccgaatttttcgacgacctcgaccgcgagcgccgcaaccaggtctggggcaccaccttcaccctgccggcccgggtgcgcgatgtgccggaagacggcgtgctcggcagtttcgctgccgaattccaggccctggtgcaacgcctcaacgaccggctgctggaccgcctgcaagccgagcgcagccccgagcgccgggcgatgatcgccggcttaaaggcccagttcgccacgctggagcagccgctctcggccttcctgcaggacgcgttcggcggcaaccggctggaccggcttt

SEQ ID NO: 169413 - DNA, 451 bp, Arabidopsis thaliana landsberg
ggtgtgacacttaactccggtttctcttggtgactgtcgacaggcaaaatataaaaaaaagaaaatgatcttgatgaaagttttcgaaggtagctatagagtggagccactatatgtagattcagaacgcttgtgcaataacatggagccgaagagtccggcagaatacaaaagatgtagcggtggacaaggaaggattgcatcaaaggtgacaatgaaccaatactttaagccatatcctccttttaatctgccgccactatcttggtacattcgaaaggtcaccatcaagaacaccaaaactgcgctgaaaacacttcaaacttggggtataacccttcgaaatcctggtgcagtgacttcaacagacaaatatggaaacgtaacaatatcaccaagaaaaaaaagaaaaacaacaaacattgaaaacactaggctaaatgaatataca

SEQ ID NO: 169414 - DNA, 636 bp, Arabidopsis thaliana landsberg; identical to SEQ ID NO: 5490
  unsure (1)..(636): unsure at all n locations

SEQ ID NO: 169415 - DNA, 764 bp, Arabidopsis thaliana landsberg; identical to SEQ ID NO: 14924

SEQ ID NO: 169416 - DNA, 1692 bp, Arabidopsis thaliana landsberg
  unsure (1)..(1692): unsure at all n locations
ccactgtcaatcagctttcatgccaggccgccttttattatttaatatcctccttgctacagagagggttcagggttataacaagaaaaacatttcgcctagggcaatgctcaaannnnnnnnnnnnnnnnnnnttgacacagtcagctgggatttcattttatccactttgagagccataaactgccctgacatcttcattggatggatttatcaatgtctcacaacagcaagcttctcaatctctgtcaatggacacactgggggctttttcagaagctctcatggccttagacagggcgaccctatgtctccgtatctctttgtgttggtgatggaggttttctcaggtcttctgcgctcaaggtacacttctggctacatcgcctaccaccccagaacttctcaggttgagatttctcatctgatgttcgcagacgatgtaatggttttctttgatggagcttcttcttctttgcatggaatttatgaaactttggacgactttgcgggttggtctggtttgcatatgaacagagaaaagactaagctcttccacgcaggcttgagccatcatgaatccactgccataactagctatggattcaaagttgggtctttgcctattaagtacttgggcttaccacttatgtcccgaaagcttaaaatatctgaatatgcgcctctgattgagaagatttcttcgagattcacctcgtgggcagttagatccctttcttttgctggaagagttcagttgttggcttcagttatctcgggaattgtcaatttctggatttctgcgtttattttgcctcttgggtgtatccgacagattgagtccctctgctctcggttcttatggtctggaagcattgatactaaaggaatggcaaaggttaaatggtctcagatctgtttgccacgaaatgaaggaggtctcggcttaaggagattcggcacatggaatagaactctctgcctgaggatgatttggcttctgttttcgaacagtggatctctgtgggtggcctggcacaagtaccacaattgtagcatctctactagcttctggatccagccggagaagtcttctgactcttggaactggaggtgtatcttaaggctgcggtgcttagcagaaaactttgtcagatgtaagattggtgatgggaagacggctagtttctggtttgatcattggactccttttggtcccctaatcaagcttcttggaactgatggccctcgcagtctcagagccccgttgaatgcgaaagttgcggatttgtgtaactcagttggttggactcttgcggctcctagaactgattcagcttgtaatctgatgatctacctcacctctattgatctacctactctatccggggagttggatgtttatgattgggtggtggaagacaagctatgcaacggcttttcctctgcgaaaacttgggcagccctgagaccaagatcggatgtggttagctgggcaaaaacggtgtggtttaaaggtgcaactcctaaacatgctttccatatgtgggtaacaaatcttgaccgcctacccactaaaactaggcttgcctcttggggtatgcaattacaaacgacttgcgggctttgctctttggacatcgaggacagagaccatttgtttttgacttgtgaatttgcgtgttttctttg

SEQ ID NO: 169417 - DNA, 3110 bp, Arabidopsis thaliana landsberg
cctgttagagaatgttctcctggctacagagattatttagggctactctaagaagtccactgctcctagtgcaatgcttaaagttgacctgcgaaaagcgtttgattctattagatgggactttattattgcctgcctcagagcattgaacttccctagattactcatttgttggattgagcagtgtatctctacagcgagcttctctattgtggttaattggcagtcaggaggctatttcagaagcacccagggcctaaggcaaggtgaccctatgtccccatatctttttgtcttagccatggaggtcttttctggtctgctgcagtccaggtattcttcggggtatatctcttaccaccctagaacttctgaattagaaatctcccatcttatgttcgccgatgatgtcatgatattctttgatggtgggggctcctctcttcaaggcatttatgaaacattggatgacttcgctggctggtcagggctccatatgaacagagacaagacgcagctcttctacgcaggtctgagccaaactgaatccaatgctttggcaagctatggattcactgttgggtcgttacctattagatacttggggctcccgttgatgagtagaaagctgaaagtttcagagtatgagcctctcatagggaaaattactgcaaggtttaacgcttgggctgtgaagtctctgtccttcgcggggagagctcagctgattggctcagttatttcaggcactgtcaacttctggatatctacttttgtgttgcctaagggatgcattagacggattgaatctctctgttcccgtttcctgtggtcggggggaactgaaaaaagaggtttggttaaagtggcttgggctcatgtctgtttacctaagaaagaaggtggtttgggtctgaggcggtttgcggattggaataggaccatgtgtttgcgtctggtttggctactcttctcaaacagtggctctctgtgggttgcttggcataagcatcataatatcagcacttctaccaacttttggaaccaagttgaaagtacaggtgactcatggagttggaaatctattctgaggttgagagaacctgcttcagttttcattaagtgcagtcttgggaatgggaggcgcgccagcttctggttcgatagctggactcctttgggaccgctctacaactgctttggctcctctggtcctagctccttgcgtgttccattaaatgcgacggtttcagatgtgtgcaaccatcagggctggattattgcaaacccgagatctgaccagggggtgtctctgcaaattcacttatccaccattgccttaccttcggatgacagtgggccggatgagttcgattgggtggtcgaaaacaagatctgcaaaggcttctcctctgctaaaacttgggcagtcactcggcctagagctgccatagttgattggtgggactcagtttggttcaaagaccacattcctaagcatgctttcaacatgtggatagctactttggaccgtctcccaaccaaaaccaggctctcttcttgggggcttcagattcaggatacttgtggcctctgctctctctccccggagagtagagatcacttatttctgtcttgtgatttcgccctctacttgtggaatgcggttagtttgaagttaaatatgcagggtatccacttcactttgtgggctgagcttctttcctggctgaagtcgggtaacagaaggtcgcctcctactctcagaaagctcattgcccaatcggtcatctatgcaatctggaagcaacggaacaatctgctacacaatcttgtctatgtccttccctcggtggtctttcgcgaagtggaccgcgaagtgaagaactgcatcactgcccggcgactcaacaagcgcttctccaggctaatgagtctttggttgcactaatccgttgcctctcataacctctcttttgctttcttgtttttaagcttttttgccaagaaaccaacctttaggtttgctctgtaaaccaactctttcattattatgatatttacaagttagcaaaaaaaaaaaaaaaaacgatcatgttgttgggatgccagtttagttttggtaaaccgacttatatatttgttattgctagtttagctttgttaactaacgttatgactttgattatgctttagtgcccatgtaaaggtatcctatcgtacagaagaaaaaaaaacatgagaatatgtctgacatataaaaaaatcaatccactgaaatagtggttgcatgcatacccaaatcacatgtgtgtgcaaatatgaattatgctggttagaagataattacaagattaagcattttactacaattgcgttttttattttgtatgtagagtttgtgaaagtctatagacaacaacatatcacagagttcgccacgcatgtgtgcctccaaacttccacttactattcatatagttcaagaagagatttcacaactcattcttgttgattctgaagtacattatccgagatgtaacttttgtcatatatttttgttgttgttggttgttttcatttgattatcctaatgtattttgatcaaagacaactagaccgtcaagtcgtcaacaatagtgaatagttgatcgtaacataattcacatgccgtatttaaatttatataaaagtaccgaaatggagaatctggtgtgcaaatggtcgtacatttgaataaaaggacagtaataagattcatatgattaattaattttacccaaaaagatacgggcggtcgcagtagctaatggccccgatagttaagccgttcatgtctctggatttatactttttttgtatttacttcttgccttaatcttctcgcaaagccaccatatttagatgaatctatgtagatgtgtcattcatcttcatagccgtactgaaaacaagaggctcacatttgagactgaaatgatcagtcaggcgaaatgatactgacgtactgttctctatcttttccctcgttgtcattgcttggatttatggatttgtaggcagtaggtttaatgaattgtacaaatgagtatcttttccaaatctcaact

SEQ ID NO: 169418 - DNA, 439 bp, Arabidopsis thaliana landsberg
aaattctgtcaaagtaggaatgatgtggctcaacatcagcataataggcttaagctcgtagttcatcggaaagaaagcccttccaaggaatctcaatgttgagcttaccaagcctaagagattagtgttcatcaatatcctcaaccaccaatgtttcaacctcatcacaagcctctttcaataggctatgactattcattggctcttctaccaagagaaagcgagtaccaacaagcgtgtcagccatcaggggttgaggttggcacgtgcaaggcagtaagtgaatggggaatagtgaattgtaacatggtgagtcatgaggactcgtctagagcgatgaggtttgaagatgacggtaacaacacttcttccacggtccagccaccttctaatctgctttcattgcgcggtgaaaatggatttcttgggttgttttaaa

SEQ ID NO: 169419 - DNA, 1221 bp, Arabidopsis thaliana landsberg
agcaatgtcaagcatgcatccttccgatcaactctcatgatttctacaattgcatggaatgtgattttttcctccatgaggtatgtgcttgtcttcttcgaaagctgaaccatgcgttacacaaacacactcttatcttagatacctctcctcaaaaccactatgatctcatcaattgttcagtttgttccagaaagtccactggtttcatgtacagatgttccgaaactgattgtagattattaaaagatcaagttcttcagatagatgttcgatgtattttagttcttgattatttcacccatgaaagtcatgaacatcctctattcatctgcacatcctccaaaggtgaaaacaagatttgttgcgagggttgcaaggagatttgccagcagccttacctacagtgtacaacgtgcaaatttgctatgtgttatcaatgcactaccgttccaactgaagtatgctacaaatacgacaagcatcctctctctctttgctatggagaacaagcagatgatatgtattggtgtgaaatatgtgagaaagaggttaatccagcggactggttctacacatgcaacatatgttgtatcactatccaccttcattgcatattcggaaattctgtttatatgaagcctggtttaacatttgaatatggcttcactagtaaagtggaagttcttcgcaatagtaacagcactcgaccgctttgcgttagatgtggtaatcattgtccaggttacagctattattgccatataggcagctacggtcaatggacacttaaaagtgttacttgttcgttgaaatgtttggagccttatttgtattaattttgtacagataaaaccgttcgataaaacggttacatgatgaactttctttgtttttttgaatttgcattgttgttttttccgggacttgtatcattaccacttctaaagaataaaatctcttctaattcgacgattttctccatctttgcttctctatacgatttaattccgtttggtaaaataactacaaggtatcatctattaaattaaaatcgccacacttatgtgtttgataagtgaaactaagaggttgccaagttttcccgtaggtattactaaataaatctcttaaaaaatatataaaaataataataataaagaaatttcattctcattaattcaacaaagattacaatcatacgattatgtacaaaagact

SEQ ID NO: 169420 - DNA, 558 bp, Arabidopsis thaliana landsberg; identical to SEQ ID NO: 7359
  unsure (1)..(558): unsure at all n locations

SEQ ID NO: 169421 - DNA, 524 bp, Arabidopsis thaliana landsberg
  unsure (1)..(524): unsure at all n locations
catgggtcaccatcntacaagccacctcagttacccatgtatgatgggcattcggatccaaagtagtttctgatgagttacaaggcaacaatatcctcgtatgggcaacgctgctgtcatggcagtcagaagcgtggctcagacatggtatnnnnnnnnnnnnnnnnnnnnnnnnnnnnnnnnnnnnnnnnnnnnnnnnnnnnnnnnnnnnnnnnnnnnnnnnnnnnnnnnnnnnnnnnnnnnnnnnnaggccctgtttcaatgcacgcaagatcatgaggagtacctacaggcgtacgtctgaaggttcctgcatctgagagctcaagcgcctacaatgcccaatgagattgttattaaggccatgatcaaggggcttcgactaggacccacaacccaatattttgcaaggaagccaccacagaccttggagaaactctttcagannnnnnnnnnnnnnnnnnnagttgataatgatttctgccaaagaagggaggaagcataaaggtattctaaaatgaata

SEQ ID NO: 169422 - DNA, 380 bp, Arabidopsis thaliana landsberg; identical to SEQ ID NO: 63788
  unsure (1)..(380): unsure at all n locations

SEQ ID NO: 169423 - DNA, 591 bp, Arabidopsis thaliana landsberg; identical to SEQ ID NO: 11780
  unsure (1)..(591): unsure at all n locations

SEQ ID NO: 169424 - DNA, 406 bp, Arabidopsis thaliana landsberg
tgtaagctcagtttcagaatctgatcgatatatcaaaaagtttacttccttctaaaggttttagtcttgacctttttcattattctaattctctgattgaatcttgatggtttattttatacagtctggttgctgcaagccctctaatgactgtgacttcacctacataacttcaacaacttggaataaaacatcaggaacacataaaaactcagattgccaactttgggacaacgaaaagcataagctttgctacaattgcaaagcctgcaaggccggttttctcgacaacctcaaggccgcatggaaaagagttgctattgtcaacatcattttccttgtactcctcgttgtcgtctacgctatgggatgttgcgctttccgaaacaacaaagaagatagatat

SEQ ID NO: 169425 - DNA, 777 bp, Arabidopsis thaliana landsberg; identical to SEQ ID NO: 12965

SEQ ID NO: 169426 - DNA, 433 bp, Arabidopsis thaliana landsberg
tctggcgcggcccgcaccgtttcccgagacgatgatcgtacactaccctgtcttctttctcgaatatctgctgtggcaatggacggccgccaaggatctctccgctttcgatgcccgtgcactcgacgattaccgccggagcttttccaaacccgaggtgatccatgcgagttgcgaggattatcgcgcaggcgcctcgtgcgatccgcggatcgacgcggaagaccgcacggcaggacggcagatcgactgtccgatgctggcgctttggggcgcctccaggaagcacggcttcttgaacaagccgttggaaacatggcggccgaggtgtccgcacgtgaagggtggacccatcgagtccggccacttcctgcccgaggaggcggccggcgacacgcttgcagccgtgctgccgattctaacggaaggacgt

SEQ ID NO: 169427 - DNA, 1062 bp, Arabidopsis thaliana landsberg; identical to SEQ ID NO: 33437

SEQ ID NO: 169428 - DNA, 870 bp, Arabidopsis thaliana landsberg
atgggagcatatagagcagaagacgattatgattacctcttcaaggtggtcttaaccggagattccggcgtcgggaaatctaatttgttatctcgtttcaccagaaatgatttcagccacgactcacgtgcaaccatcggtgtcgaattcgccacacgaagcatccaatgcgatgataagatcgtcaaggctcagatatgggacaccgccggccaagaaaggtatgatactactataacggacttgatgatgaagacatgatcaaaatttctgtatttaacgttggactaatatttttgcacagaaaaagaaaacgtaaataaatgaactcacttccattaattgatttttcattgaccatgaacaaaaatgcttgttttgtaagagtttttttatttgtataacttctaacgtaacaaaccaagacgtcaaacttgttaaattttcgatagttatttttgtgtctaaatgttaaggtaaatatgctagataaataacaaaaaaataatgaatgaaatttgggattggaatgatgattaggaaaatagatcacgcgcagaagaaaatctttataagcaatcgatgtcacacggacctaatctttgttaaatgtcacgaccatttcttctttttgtttttcttactaaaattatatttatttcgacaaattttatctttcatttagaattgtgaatttctttaataatttatgtgtttttacttatcttaaatataatactgttttattttttatttttgcatgggaggaaaaaagatttagagcaataacgagttcgtattaccgtggagccttgggagctttactaatctacgacatcacaagacgaatcactttcaaaaacattgaga

SEQ ID NO: 169429 - DNA, 455 bp, Arabidopsis thaliana landsberg
ctcggcgctgcagcgattcaatccggcagcgtgacatattcaaatgcatcgttcgttggcatcccgatccttacgccgctttttgagagtccgcgctcctcacgattgcggtcgcagcgctgatgttcaatatcatgatcgttccgctgacggtaacgatgctcgaatacgatcgtcagcgcgctgccggtgcagcgacgctgcgcgtctggacgctgctcggccggagcattttgtacagcttcaagcggccgttcgtgtgggcaccgttgctggcgacgattctcgtgctgttggatgtgcgcgtgccaacggagatccagagcatgttcgatctcatcggctcggcgaccgcgggtgtcgccctgtttgtggccgggctcattctgacagcataccggatcgcggtgacgccggaaagactcggaaacgtgctgaccaagatactcgtccac

SEQ ID NO: 169430 - DNA, 547 bp, Arabidopsis thaliana landsberg
  unsure (1)..(547): unsure at all n locations
ccgggcgctgcggaattaccgggtgctgctgctgaaccacggaggcaccgaccggtcgtcgcggatcaccgcgcgctcgctagaggggctcaagcnccaggcgcaggcggactacatggcgctgttccgcgccgacagcatcgtcctggacgccgagctgatccgccgggaggtcacgggcggggcgccgtggagcgtgctcgggcagagcttcggcggattctgcacggtcacgtacctgtcctacgccccgcatggcctccgcgaggctttcctgaccggcgggctgccgggcctggacacgcgccccgaggacgtctaccggctcacctaccagaccgtcaagcgccggaccgccgcgcactacgagcgctatcccgaggacgtggcgcgggcccgcgacatcgccgagtacctcaccgcgcacgagacgcggctgccggacggcaccccgctgaccgtcgcggcgttccagtcgatcggcatcatgttcggccagggcacgggcagccaccagcagcactaccagctggagaacgccttcgac

SEQ ID NO: 169431 - DNA, 253 bp, Arabidopsis thaliana landsberg
cttgagtgtaactcagccgtaacaatatattttgccggaaaactcagccgtgacctaaaactttttcgacaaacggtcagacacgaacctttcgtattcctttacgtctctttgtcttttcttctatatctctgctacttcatctcatcatttacacgtctcatcctctcttcctaacgacatagatgttcctcacattgacggacaatttataagagatgtcgaagccgtactcaccgatcctgagcgggcg

SEQ ID NO: 169432 - DNA, 614 bp, Arabidopsis thaliana landsberg
gtgataaatttgggaacacagttaaacaacttcaaagatgttgaaaagagcttgagatctgaactaggagatgcagaaaccaaaagggttttctcaagagctgtttatctgtttcatatcggagccaacgactatttttatcctttctctgcaaactcctcaactttccaatccaattccaaagagaaattcgtcgattttgttatcggcaacactacattcgtgatcgaggtaaacataaaatcggaaaataatttcaaatatttatttttgttctaaaactgatatatgtgatcttaggaagtgtataaaatgggaggaagaaagtttggatttttgaacgtgggaccgtacgaatgttcaccaaattcattgataagagaccgaacaaagataggatcttgtttcaaacctgccgctgagcttatcgatatgcacaacaagaagtttccggatgttttaaggcggctacaacgccaattatcgggatttagatacgcccttcatgactatcacacttctctttccgaaagaatcaacagtcctgcaaaatatggttactaaacttggtatatacatatatgttagagatcgatctatagtttacctttaag

SEQ ID NO: 169433 - DNA, 657 bp, Arabidopsis thaliana landsberg
tctgacaatttttctttgatttggtttttcttttctatattttcagagtattgaactctggacagagttaaccaaagacatatttgacgaccagcctaaccaagacttgaccggacagccagataatggtggatctggtgatgaacattcctctcaatatcctgtctctgaggtcaaagaaagaccgattcaacactggtataagtgcctttctgacgtaaaagaaaaaccgcttcaacactggtctatgtgcattgctgaggtcaaagaaaaaccgagccaacactgggctatgcgtggtatgtgttttatatatagtatatattacattatagttattgtaaataccattaaattaaagtagctagaacatcagcacttttttggtttcttgactgacaagtatcatattgattttcttggcagcttcaaaattcccagagagtttcactcaagcacaaggtggtgatgattgttatgaaaattatggtgatggtgctgatggtattgatgatgatgattatgatgaagagaatagtgtaagtttgaagcacttttcccattttcatatcaaagctcattaactagaataagtaaatcaccatggattttgtataacggaattttggtcaatttaattagttgcttctgggttta

SEQ ID NO: 169434 - DNA, 2478 bp, Arabidopsis thaliana landsberg
  unsure (1)..(2478): unsure at all n locations
ccatcttggtataccggaaaacggtgatccccctaggcctacgcctcacgttgacatccttcgggagctagctgtggtcctagtccctgcggggggtcaggacacacagctcgagcaaatccgcgagatgcaggccaggctcgatgagggagcaggaacgcttgagtcgttccggcggaacatcgggcaggaatgggcagaccaagctccggccggagaagcgcgtcatctaccccagggcatccagcaccaaattgccgacgacgtcagggcaaggccgccatcgacttctagtggggtcggccagaacctggctgcagcggcaatacttctccacgcgatgccggagccatcaaccaccgaaggacggcgtatccagggagagctcaagaatctcctggaggatgccgcggtccgacaggccgaaagctctgcctcccgcaggcagggctacccctcggagcatcgcgctgcgacttcccgattcatgcgggaagcctcggtccataccgggcgcacgcgaacacagcgcctgcgccccgggtcgcctcggcaacgaacaccctcaccgcaaccgtcgaacccacctcgacgagagggtgcaccgaggctaccaccccgagcgtgggggacgctacgacagcggggaggatcggagtccctcgcccgaaccacccggtccgcaggccttcagtcgggccatccgacgggcgccattcccgacccggttccgacccccgactactatcacgaagtactcgggggaaacgagaccggaaccgtggctcgcggactaccgccttgcctgccaactgggtggaacggacgacgacaacctcatcatccgtaacctccccctgttcctctccgacactgctcgcgcctggttggagcacctccctccggggcagatctccaactgggacgacttggtccaagccttcgctggcaatttccagggcacatacgtgcgccccgggaattcctgggaccttcgaagctgccggcaacagccgggggagtcgctccgggactacatccggcgattctcgaagcagcgcaccgagctgcccaacatcaccgactcggatgtcatcggcgcgttcctcgccggcaccacttgccgcgacctggtgagcaagctgggtcgcaagacccccaccagggcgagcgagttgatggacatcgccaccaagttcgcctctggtcaggaggcggttgaggctatcttccggaaggacaagcagccccagggccgccagccggaagacgtccccgaggcgtccactcagcgcggcacgaggaagaagggcaagaagaagtcacaagcgaaacgcgacgccgccaacgaagaccttgtcgccgccgctgagtacaagaaccctcagaaatcttccggaggcgccaacctgttcgacaagatgctcaaggagtcgtgccccnnnnnnnnnnnnnnnnnnnnnnnnnnnnttgaggagtgcgtcatgcttcggcaccactttcacaaggccgggccacctgcgaaaggtggcagggccacaacaacgacaagaaggaggatcacaaggcagaggagttccccgaggtccacgactgcttcatgatctacggtgggcaagtggcgaacacctcggctcggcaccacaagcaagagcgccgggaggtctgctcggtgaaggctgcggcgccagtctacctagactggtccgacaagcccatcaccttcgaccggggcgaccaccacgactgcgtgccgagcccgggaaagtacccgctcgttgtcgatcccgtcatcggcaacgtcaggcttaccaaggtcctcatggacggaggcagcagcctcaacatcatctacgccgagaccctcgggctcctgcagatcgatctgtcctcgatccgggctggcgcggcgccctttcacgggatcatccctaggaaacgcgtccaaccccttgggcaactcgatctgcccgtctgcttcgggaatccctacaacttccgaaaggaaaccctcacgttcgaggtggttgggttccggggaacctaccacgcagtcattggggaggccatgctacgccaagttcatggtcgtccccaactaaacctacctcaagctcaagatgccgggccccaacggtgtctcatcgtcggccccacgtaccggcacgcgtacgaatgcgacgtagagtgcgtggagtacgccgaggccctcaccgaatccgaggccctcatcgccgacctggagagcctctccaaggaggcgccagacgtgaagcgccatgccggcaacttcgagccagcggagacggttaagtccgtccctctcgaccccagcaacgacgcctccaagcagatccggatcggcttcaagttcgatcccaaataagaagcagtgctcgtcgactttctccgcgcaaacgccgacgttttcgcgtggagtcctcggacatgcccagcataccgagggatgtcccgagc

SEQ ID NO: 169435 - DNA, 515 bp, Arabidopsis thaliana landsberg; identical to SEQ ID NO: 68789

SEQ ID NO: 169436 - DNA, 1194 bp, Arabidopsis thaliana landsberg
atctcaccaatctgtgggtagtttgacagatgaagtggctatggactgtgaaatggttggtgtcagtcaaggaaccaaaagtgcccttggacgagttaccttggtacacattgcctttccaacttttgtgtttttcttttttaagtatcatgaggcgaaattttcagtttgtttcagttctgagcgcttgaataaagagttgatgtcatttcattatcgctttctctttatccatattttgaggtgtatatctgtctcttcttctacatgaaggtcactgattatttcaccatttattgacaggtaaataaatggggaaatgttctatatgatgagtttgtccgtccagtggaacatgttgttgactttcgtacttctattagcgggattcgacctcgagatttgagaaagggttggttttactttcaacattccgtaccttttttcttgaatctgtcaacattcttgctttttaggctgcaaaatgaattggatcatttactaaacagtttggaacttcgatcttaatttagctttcttttaaccacagccaaagatttccgcgttgctcaaaccaaagtagcagagttgataaagggaaagattctcgtgggacacgccttgcataatgatctcaaggtctgtaggtttcacgaatctaggatctggttacaatatcaattcagagttttaacagaaatacactttgtaacaggctttgctgctaactcacccgaaaaaaggacatacgggacacaggagaatatcagccctttctcaaagtattcacactctaacccctctctttctctatctgatacttgtcatactttcttttcccaaagtgacttcaaacctttgaatagagtcctaatgaaaatggtaatattccaaacaggggcaaaacaaaaaagtctctgaaacatctcgcatttgaaattgtaggggatgacattcaaaatggagagcactgccctgtaagtgtgtacatataaatataaaacaaacagcttcatgttttggagctgcaaatctataacaattcttcaatggcagattgataatgcaagagctgggatgatgctttaccaaaagaacagaaaagagtgggagaaaaatgtgaaagaccagagggggatgtggctgaaacaaaagaagagtaaccctacaaagaaagctaaatatgggaacaac

SEQ ID NO: 169437 - DNA, 1984 bp, Arabidopsis thaliana landsberg; identical to SEQ ID NO: 21719

SEQ ID NO: 169438 - DNA, 456 bp, Arabidopsis thaliana landsberg
atgcccagcctgatctgtggctccgttgcctacgacaccatcatgacgttcgacgggcgcttccgcgaacacatcctgccggaccagatccacatgctgaacgtgtcgttcctggtgccgggcatacggcgcgaattcggcggctgcgccggcaacatcgcctatacgctcaagatgctcggcggcgagccgctgatcatgggcaccgtgggcgaggacgccggtccgtacctggattacctgcgcagcctcggcatcgtcacggatcacatccgcacgctgccggagacgttcaccgcgcaggcgatgatcaccaccgatctcgacaacaaccagatcaccgccttccacccgggcgcgatgagccagtcgcagctgaacagcgcgcaggacgcgctgacgggcggccgccagaaaaccctaaatatcgtggcgccggacagccgcgagggcatg

SEQ ID NO: 169439 - DNA, 553 bp, Arabidopsis thaliana landsberg
tgtgagagatagattgtcacagctagaggcggaacttctgctgtgtctgatggcacttcacgacctcgggagctgacaaatgaggagtgcacaaccatcattctcgagataaaatgctgcagtctaaacctcttgactttgagtttatggttattctgtcactaatctcttctttatttcttttcagtccaccgaaagggattccagaggcaatctttatagacttggcagtctcaaagatacattaggctgttccaaccgcaatctccctggagaatcatcatcatccttcctagatttagaagaacggctgaaggaagcgcaacgcaagattgaggagcaggctgcctacaatgagaagcgagattctgagattgctgcgcgtgaagctgagacagcccgaatcacggttgagcaaaaggacaagctcgaacacttgtccttagtggagaagtatctccgacaaacagatccgcaattccttgacttcatggcctctcaatcttcgacaaccacagagcctctaccagctactccacagaatgatcaatag

SEQ ID NO: 169440 - DNA, 970 bp, Arabidopsis thaliana landsberg; identical to SEQ ID NO: 50267

SEQ ID NO: 169441 - DNA, 1378 bp, Arabidopsis thaliana landsberg
  unsure (1)..(1378): unsure at all n locations
atggttggaagaagtgtatcacaggagcctactatggctgatgctgtttcatacattgaatctgtgaaggaagaatttcatgatgaacctgcaaaatttgacgagtttaaaatgcgcttgaatgaagttcgtgatgataggtatgtattgttatgtttggttttggtcttaaattcaactgcgagtctacacaacaaaacaagcatcttgtcgattttttttctgatgttgttagttctctttgtagagttgagaaagataggatcactgcaagaatcaacgaacttattagtgggaaccccaagctgcatcttggttcaaaaatcttctttcccgaggctgagataaccatccctcccaaggttgagcaacgccatgagtctgttgatgccaaaaagaaacgtgctaatcgtgagaatcataggaagaagaagcttaaggtatagaatcgctaaagatgatgaatactcctatggaaatatcattttgacatttcctcttttcctagcttgtgttttgtattaagcaaatctatatatatctgcagtgccttgatagtcttgtatttcccccaatgacgaaaaagattgatgaggggaagaagtcggtaaagaaggtgcacaagaagtttctcgtcttatccaaggttgatagaaccatccctcctaatgcgaacaaagagttaaggaaatctcgaaccatgtttggaaaaagtgtaccactagagaaaactctcgatgatgcacgttcatacatagattctgtgaaggaagcatttcatgatgagcctgcaaaatatgccgagtttctcaagctcttgaatgattataaagctcgtaggtgtggattattttctccatgtacatttgattttctcttaatttcatgtctcaatctacacaacaacacaccatgtaactgattctgatgttactaatttctttgtagactcgatgccgatagtgtcattgcaagagtggacgaactcacgaaagatcaccggaatctgcttcttggtttaagggccatcctcctgcctgcggccaaatcaacaattcctcacaaggctaagggtaacagaaccgcccgtcccgaggctagcagaaccatccctgtgaagcttaagataaccattattccaccaaaggctagaagaaccatcccttccgaggctgagaaacctacacacactgatgaattgaactttatgaacannnnnnnnnnnnnnnnnnnnnnnnnnnnnnnnnnngaggctgagaaaccgacacacactgatgaattgaactttatgaacaagcttccaacaaagcgtagaagagccatcccttccgaggctgagaaacctacacacactgatgaattgaacttataaacaagc

SEQ ID NO: 169442 - DNA, 1787 bp, Arabidopsis thaliana landsberg
gtcaatgtgcgggagggcaacgatttttaaatcgagatttcttcatcgtcccgccgtctgttcatcgatgtgactggcggcactgtataatctcggatgtgtgtggttcagattgcgtagggtttaagtttttggtggacctgttcatgtgtaacctaataatgaagaaattatatagtacttgtggtgcgacgtacactggtaagaattttgcgccttttgcaagaactttcatcatctgttggatttccgaaagagaaatgagtcaaaagtgttatggaaccgcatgtaaatgctacattgcctatgtcctttttatggaattttgtcgctggtcttccatttcttgtttatgttatagctatatagcatgtctcgtcttcctctgtatattgctatatttgaatgtgtttgggttatgtttggcttactgtccctgtatagaacgaatgaagatgcgtttgtgttatgtttggtttattgtccctgtcttagcgatatagtatgtctcgtctaccttttgtatattgctttatttctatcaacttggatgtgtttgggttatgtttgttttgttttcgctgtcttaccatatagtatgtgtcttcttcttcttggccttaagaacgttgattaatggctatgcaactactaactgtctttgtcacaacttgtgtttattcaggggaagtgcatgtctctgtcatgctggtaactgagaattctatgaaagggtatatgggatttctacatttcaacgaatgttatgcctgtagtatatctatgacttgtgatatgagctaagagaagctgctattgcgtgtgcgaactgagtttgagctagatggacttggtataaagcctaaaataagttactggctaccgtgtcagctgtctgtatttgtagtgaattcaagacctccagtaatgatcacaagcaacattagcatacaaaatttcttgactgtaaaggaaactgcaatgcatctgaatctgttgttgtcttttaaacatgaacgcgttgaggatgttggcatgcggatgagacagctttgttctgtcccagcagcaaaggctaacaacattggtggagatgacattggtgctgtttttgctactttggtgccaaatgttccaaccttgccgcaaaaaccgaacttagatgagaacaagttcagtagagttaggagaaggctatttggggacaatgaagcttcatgttcgaatgctacaatcgggtttttatctgttgaaactactgcgccaggcacttgtatggagagcgataatattaaagaatctggcgcgaatcatgtggctgcaactgatcagtgtggcattatcaaactagaagatgctgatacaccatcattgtctcatcattctaaagacatcaatacgtctggtcttgagtttgtgcaacaaattctatctgatgaggatgatgatttcttaagagaggttgaagcagttgagaaccgtgagaatcatgttcgtatgtttaagggaaaaggcaaatgcaaagagtgtgtggatgatattgtcaagaatgctagtgatgattcttacactaatggggtgggttgtagtggttcagatgtggatatctttgatgaagatatttggaccctagcttttgatagagagtatcctatcgatttcagcccatcgggttaagatatggctcatgccgtaggagctgagagctctccaattgttgtggagccagtttatgctgctagaggtgaggatattggcacatcagttttgttgtacctaggtagtga

SEQ ID NO: 169443 - DNA, 599 bp, Arabidopsis thaliana landsberg; identical to SEQ ID NO: 65812

SEQ ID NO: 169444 - DNA, 523 bp, Arabidopsis thaliana landsberg
aaaagggttaaaataggactggatgataatacaaagacgcaggtgctggacggcctgtcgtccgatgacagggtgataacgggagaggtgcaggtaagttcaaaagaagcgaaagcacaggcttccagtccttttatgcctcacagaccttcccggggtaaaaagaagaaataaattttgagaaaatggctaaaaagatcctggaaatagagaatctcaaacgtgaatttatcatgggtggggaaaccgttcacgcattgagggggatatccttttctgtagatgcgggtgaatttcttaccattatgggaagcagcggatcaggtaaaaccactttgctgaatatactgggatgcctggatgcccctactgatggcgattattttttagatgaagtgaacataaagaaactgaccagaaatgagttagccggcttacgaaataccaaaatctgctttgtatttcagtcctattacctgctggcacggacctttggattggaaaatgtggatttacctttgtt

SEQ ID NO: 169445 - DNA, 707 bp, Arabidopsis thaliana landsberg; identical to SEQ ID NO: 24735

SEQ ID NO: 169446 - DNA, 3236 bp, Arabidopsis thaliana landsberg
gaacagatgaatcgacctccagcatttttgttctaacctgagtctgaggaagacgctgtatttctgacctatgatcaccagccgctcatacgggattcttggctttccatcaacaaaagtgcttattactgaatcctcaggttcaaaaccccatgggatctctggagcactactgactctctgtgtatattggatccattgtcatataggaacgccctgatggggataatgtgtgaacagaggcatttttcacacattatgttttacaagcactttgatgttcccttggaaaaataactgcgcgatatgtttaatcaggttcgactccggtgcacttgtaaattttaaataaaatgctgttttgctcatttgccaaggttcatatgtgtttgtggctcaaatttgtttatggaactgttcatgatgcagagaaatctatgccaaacgtgtgttgaatttccagaagcacatctttactattatgctcatcaaaataagcaactaacaatccaaatcaagcgaattccagtagcaaaaggtttggctggtgaggcaaaaggaaaaatctggatgtggagtcgttgtggaaagtgtaaaacaaagaatgcgtcccggaaatccacaaaacgagtgctgatatcaactgctgctcgtagcttgtcatttggaaagtttttggagctcagcttttctcagcaaacttttctgaacagatcgtctagctgtgggcactctttcgacagtgacttccttcacttctttgggtatttttttttttttttaatctattttgctctgcatattgcttcatatgttctaactaagtaattaactatagttttagtaactctataatatggcctttcgagatagtgacattcacttattctaagagaatagtggttaggcgtagtttttttttaatgtcccatcttggttctagtgctacaacgtaaaattcatgaaaattttgggaacttagtgactcattagctttaatcatatatcttaaattgtacacaactgcagattaggctccatggttgctatgctcagttactcccaagtcgcatcctacacagtgtctctaccacccatgaagctggaatctagcattttaataaaagcaggttggcttgagaaagaatttcaaacagtaagtttctattctgagtaaacagtattgtagctgtattttctcatacatgatgctagaaacaattgtcgcccaccatcagctttcttttcagtttacattttctgccaaatagtatgtcttgcttgggtcaagggctggcaaaaaaattgcaaaatgaatacgcaagatgatcaatttttgtgctgattgtttatattttcttgttcaggtattcactaaagggatctccttgttcgaggacgctgctggttttcttaagagactaagatcacaattcacaaattcagatctcagatatcagcgtgcacgcaaactcctttctaacattgaggagttgctgaagcacgagcgttgcatatttgaggttagctttgtgacagttccatatggtatacaactatctttattaagtgttagagacaggcttattaatatttaatgcctacaaataggaaaacatcaagaactcgttggacaaggctaaaaccatagatgatgtttcgcacagactgctccgcttaaaccgcatgaggtgggaacttctgcttcaagctctcatctggaactaccggttgcagtcgctggttttatctgatcgtttgctaccttcaagtgatgagacgaagatatatgaacaaggtttgaagactgtttccgaggctggaatgaccagatatgaaaatgataacaaagtttctgattctggtagcaatggaggcatagacactccacttgttgaacacaaggatataccaatcgctggagcgtctgttggggacaatgatcagatggcagaatcctatgtgcctgaagataatgaatcgcaaactttgtgcagctccagtcccgatacaacctctcccatcaacaatcattttgacactcatttggctgttaatgtacattcaaccaatggacaagaagcggacaaatcaattccagttactggagagtctttggatgatgaggtttctacctctaatgggccacacatcttaggttgggatgaatggttttggctgccatttgaggaactacgctcgaagcggattgttgatattgagaaggaatacttgttgaaattcgagtatgttaacaactttacccaagaaaacctacagacggtgaaccagataatcaccgaggaaagttctcgtctgcgcatctcgttgagggatgatgattttattgtgtcagactatgaagacgagctgtccagcctaattgcttgtgcacttgcccatctgaacaatgaagagagcaaaaagcctctttcaaggtgtatacatggatctcttcaagggttcttagataataatcaggattctaagcaaactgaccgagacgtttcccgtttctcgagtgagagtacaaatcggttggaaacactaccccctccagaggtcctcgttacttttgggtcagtcaaatcagttggaaaacccaagtactctatcgtgtccctgtatgcagatgatttccgtgacctcagaaaacgctgttgttcatcagagcttgactatatagcttcactaagccgctgtaagccatgggatgccaaaggtgggaagagcaaatccgtgttcgctaagactttggatgataggttcatcgtaaaagagatcaagaagacagagtacgaatcatttgtgacttttgctacggagtatttcaaatacatgaaggactcgtatgatttaggcaaccagacttgtcttgccaaagttcttgggatccatcaggtatttagaatcatcttttgatcatatgaccatgagcattttacctaatcattgttataaaatggattggtcttagttctaaggatctttgattcctattttcaggtaactgtaaggcagccaaagggtggcgggaaagagatacggcacgacctgatggtcatggagaatctgagttttagcagaaaagttactcgccagtatgatctcaaaggcgctctacatgctcgtttcacagccacttctgctaatggcgaagacgatgttctattggatcagaactttgtcaacgacatgaacagatccccgctttacgttagcaaaacatcaaaaca

SEQ ID NO: 169447 - DNA, 847 bp, Arabidopsis thaliana landsberg
ctatatacgatctatttcccagcataaggtgactcatatgggaggtgcgccgacgatattgaatatgatcatcaatgcgcctgaatctgagcagaaaccgcttcccgggaaggtgtcttttataaccggtgctgcaccgccaccagctcatgtgattttcaagatggaagagttggggttttctatgtttcattcctatgggttaactgaaacttatggaccaggcacgatctgtacatggaagcctgagtgggactctttgcctagagaagaacaggcgaaaatgaaagctcgacaaggcgtgaatcatttagggctcgaggaaatacaagttaaagaccctgtaaccatgagaactttgccagctgatggtgtgactatgggtgaagttgtcttcagaggaaacacggtgatgaatggttacttaaaggaccctgaagcaaccaaggaagcttttaaaggaggttggttttggagtggcgacttaggtgttaaacaccctgacggatacatagagctgaaagacagatcgaaagacattataatctctggaggagaaaacattagctcgattgaagtcgagtctactctgttcactcacccttgtgttcttgaagcagctgtagttgcgaggcctgatgagtattggggtgagactgcttgtgcatttgtgaaacttaaagacgggtctaaggccagtgcggaggagcttattagctattgcagggaccggcttccacattatatggctccgaggagtattgtgtttgaggatcttcctaaaacatcgactggaaaagtccagaagtttgttctgaggaccaaggctaaggctttggtaagctta

SEQ ID NO: 169448 - DNA, 615 bp, Arabidopsis thaliana landsberg
  unsure (1)..(615): unsure at all n locations
gcgctgaactggaaagcggaccaaaagggtgacaaatacattctgancggctcgaaactttggatcaccaacggaaaagaagcgaatgtctttatcgttttcgccaacatcgaccacgcgaaaggctacaaaggcatcaccgccttcatcgtcgagaaatccttccccggattcaaggtcggcaaaaaagaagacaagctcgggatccgcgcctccagcacctgcgaactgctgtttgaaaactgcgaggttccggccgcgaacgtcctcggagaagtcggcaagggctacaaaatcgcgatcgagactttgaacgaaggccgcatcgggatcggcgcgcagatggtgggaatcgcgcagggcgcctacgaagccgctttgaattatatcaaaagccgcgagcagttcggaaagtccctggctcagtttcagggcgtccaatttcaactggcggaaatgcgcaccgagctcgaagccgctcgtctgatggtgttcaatgcggctcgcttgaaagacgccggtcaggactttatcgagtacgcggcgatggcgaaactttttgcctcgagagcggcggaaaacatcacctcgaccgcgatcgacctcttcgcggct

SEQ ID NO: 169449 - DNA, 491 bp, Arabidopsis thaliana landsberg
  unsure (1)..(491): unsure at all n locations
cgtgctgacccgcatcactgcgcaagccatggcccccgggctgggccagcagatcgtcatcgacaaccgcggcggcgccggcggcatgatcggcgccgacaacgtcgccaaatcaccggcggacggttattccatcgtcaatgtccaggcatccttcactgccaacgccgcgctgcgcacgaaaatggcctatgacccgatcgccgatttcgcttacatcggcatgatggcgcgcggcccgctgctggttgtggtccnnnnnnnnnnnnnnnnnnnnnnnatccgtgaactgatcgctctggccaaggccaagccggggcagatcaattacggttcgaccggcaccggcnnnnnnnnnnnnnnnnnnnnnnnnnnnnnnnnnnnnnnnnnnnnnntcaacatcgtgcatgtaccgtacaagggcgtcgcaccggcacagaccgatctgatgggcgggcacacgcagatggtgatgaccagcctgccctcgg

SEQ ID NO: 169450 - DNA, 714 bp, Arabidopsis thaliana landsberg
atggattctactgatgatgatttcggtgacttgtacgttgatgatgccaagtttcaggcgactgatgctttcgaatcggagtgtgctacgaactccggcgaggataagggttttgaagagacggtaaagtctgattcggaaggtgaagtgaagaaatttgatgttgttgctaaggattcgagtccgtgtgacgacgacgattgtgctatgaatctgactgaggccgatgaagaatcggaatttagtgatagtgatgatgatttgaatatagtgctcaaagacgacgactctaaagcccttcctgcttcttgtgtgtttaacaccaactttggcggatacgaagcatccaaagcttcctcgtttcagagacggtggactagaaacgcttcagctaataatgcttgcatcgatccttctttaggaatgtctcaatatagatatagtttcccaaacccttggtccaggttagtcacagtggtgtttagatgataaatgtgtgttttaggtttattgaatgtgattgatatgagtaatggtttatgtgtttgaagatcatgatgtgtgtttctcttattctcaggacaccttttgatgtaaatctcgatgtgttagagaagaagccatggagggatcctggtacggataccagtgacttttttaattttgggcttaacgagcagagctggaaagattactgtaaaccgttggtaagta

SEQ ID NO: 169451 - DNA, 558 bp, Arabidopsis thaliana landsberg
  unsure (1)..(558): unsure at all n locations
ttgcacttgagctgcatatggttcacgaaggcaggaatagaagaatggctgttgtgactgtgttgtacaagatcggaagagcagatacttttatcagatcggtacaaataccaaaaacttaatatctattattaactgcatcgatatgtaatattggaaccaacagtaattgttgattaatttgtttttgaaaatttgggttggttttagttggagaaagaattagagggcattgctgaaatggaggaggctgannnnnnnnnnnnnnnnnnnnnnnnnnncaaaattaagatcggaagcagaaaatattacagatacactggttcacttaccactcctccttgcactcaaaacgttacttggagcgtcgttagaaaggtatttatttatctattttcacttcattttggtcttaattacctaattaatagcaatgtttaattcctttaataaaatttcaggttaggaccgtgacaagaaaacaagtgaagctcctccgcgtggcagtgcacgatgaaagtaagattccttatggtcaatggaatattcatcccatat

SEQ ID NO: 169452 - DNA, 476 bp, Arabidopsis thaliana landsberg
tctcattaaggtattttagattcatatcaattttatgataatcccttaaagctaaacagaaactcgtgtctcatgtgggaaatcaagatcccaagcatgtggaacatgttctgagctactggagagttagcttagaaaatcccaagcatgttcttttcatgagatgcgaggaaatgaaagaagagcctcgggtccaaatcaagagacttgcggacttcttggggtgtccttttactaaggaagaagaagagagtggatccgtggacgagatcttagatatatctttgctctttgcgtaacctaagtggtttggactttggaggttatatattaaaacccgaaaatatataaataacgtggatcacaaggattatttccgaaaaggggaagtcagtgactggaagaattatcatgaaatggataacaagatagacatcatcatccaagagcaactccaaggttctggtttgaaattc

SEQ ID NO: 169453 - DNA, 3120 bp, Arabidopsis thaliana landsberg
ctcaatcgaaaactgaatttaggagctgcgatgggttccagatctcgtaatgataatttccagtccggcgatggcgctagtcctgggtacgtttacttctcctacctcttgcatgtttgattccacaggattaagggaaatatctcataatctgttggctttgtaactctttttatattgttggttaaggtttaatttatgttttgcttggaatttttgtgttgcaggaaaatattcattggaggattgcacaaagacacgactaatagtaagtttcttcctcttgttttgttctagaaattgcgtttttaagttttgttatgttatggattcttgtgtgtgtttctgatgttagacctgttggaatgttgattctacttgctcactttggttttgattgcagctgtgttcaataagcactttggcaagtacggggagattacagattctgtcattatgcgagatcgacatactggacaacctaggggtttcggtttcatcaccttcgctgaccattctgttgttgacaaagttatcgaagatactcatgtcatcaatggcaaacaggtcggccacttctcttttcttccttcactagcttatagtgttcatttttagtagggtgttgggtcttgatcaatacttttttccttgttttgatggaacaggttgagatcaaaaggactattccgaaaggtgctggtggcaatcagtcaaaggacatcaaaacaaagaagattttcgttggtggtataccctcaacggttacagaaggtagacctccctcttggcatgatatttttttgctttccatgagaatgctggtttcctgtccttattgaagttggtttctttttgtgttgatcagatgaacttaaggacttcttccccaagtatgggaacgtggtggagcaccaggttattcgagaccatgaaacaaacaggtccagaggttttggttttgtaatttttgatagcgaagaagtcgtagatgaattattgtccaaaggaaacatgatcgatatggcagacactcaggtaagcttgtacaaatggggattagaattttggttcatgatgacatatttatcttggtttcaatttgatattttctccttgttcctttcattatacacgtttaacttagttagaattctacccactagcttaccaaatgtaaggagcttgtcacagtaagataggaaatccctgctatagtttgggtccttagcatagctaggttaattaagttgctttgttgtaggtggagatcaagaaagctgaaccaaagaaatctctaaaccgttcacctccttcttacggtagtcaccctagaggtcgttcttctaacgatagttatgcaagttatggtggaccttacggaggttttgatggaggttctgagatttctcgacttatgcatttttgtatatacacagacacatacgagaattttaaattgatgagaagaaacacataatatatattaatcatcacttgggagaattagagtctccaccagccaacatggaaaggttagagggaacggatgtgccacgagacatcccgagtccagcgttacgacggtggtaacggcacctgaaggagccagggtgtgtagttggtgcgcataaacagttttgcctcacgctcgatgacttgctcatacctaccgagccaccgccaccaccaccaccacgacgtacgcgtggagacatgttgtaagcttcttgtcttttaatgtcgtcttggcttacgtctgcttctgtctccttaagtttgatcttcatcatcatcctcctctttgcttcttcctctttcccttccatttgtgttttttctttttccttctccttcttctgtgtttctttctctacctttttacgaatagagaaaactctaaaaaatagtcggaattgtgaaactggtgaaagaaaaaaagatttgtagagttataaaagagaagttaatgtaaacattatgtatctaaaaatagtgattttcctttgtgtcctttctttgcgagcctgaatatccgagattgtcgttttctttgcagtaaaatcgtcaattaaatagagagatttggtatcgaccaaacaaaatatatggagattttggaaaatcgtttttgcatttcaaaaatagatagaatggatttcagaacttaaaattctaggtgtaaaaacaatacgttcgtttacactttactctactgctaagatcggccttaaagcattgagattaaaatcatgtttacactttacaccttcgttttaatcactaattaagattatcaactatgattgggtagaccttttatgtattatgtatttttgtcaactctttttaatgtgtcgtacgtgtgacacattcgtcgtcataaatttttgaaaactttgtcttagaattgtctctttgctgtttgtatcattcaatccttgcacttaaaacgtaaaagagtttggatttcaattaacttataaaagcatgtacaataagtgatattcatttaatgatacagtacatcattttgacgagaaattacagataacaaaacccacattattagaaccaatgtctaaccaattatccgtggcccttacccgaaaaaataaggaaacaagaaccaaataaccatgcttgtatagatgattttcaaaaacatttataattgattttacgttttcaaacacatacaattccaatttgtagctagaacctacgtatgcagctgacaaaaatatgcctacttacacatgcactaactaactgccgtcaaacctttgttcagcacaacaaaatgtacagagatacaagagaccacataaagcattcaacttgagctctaaagaatagatgagtgcacattttgcagagcttcttaagctaattcgtatgattgtgaaaactaagctaagcgagtaattgatcatctaacaagactaccaaatgataaatcattcttgtgccagtgagaaacaaactccaagcccaaatatgctaaagtctacataacacaatctaagttatagagataagacaacacttaaattaggtaaacacacaactaaaagatgctaataaaagctttttgatgctcttcctgtccttagcaac

SEQ ID NO: 169454 - DNA, 411 bp, Arabidopsis thaliana landsberg
  unsure (1)..(411): unsure at all n locations
atcatcggcatcaaggaagcagtcggcacgcctgaacgcatcaaggcgctggcggaacttgcgcggcccgatttcgtctatctctccggtgacgactacacggccacgcaggccatgctggccggtgccgctggcacggtgtcggtggtggccaacgtggcgccgcggcatttccgccaactggtggacgcggcgcgcacgggcgatgccgatgcgacggttgctccgctggcggcgctggacgaattgctggatgccctgacgtgtgcgcccaacccgattccggtcaaggccggaaccagcttgctgggcttcggcgacggcagtttgcgctcgccgttggtggcactggacaatggggccgaactcgaccgcctgcgtgcggccttgtcggccatgttnnnnnnnnnn

SEQ ID NO: 169455 - DNA, 1968 bp, Arabidopsis thaliana landsberg
  unsure (1)..(1968): unsure at all n locations
agcgttttcgctcggagtggttttcgttttggttccccgccagttcgcgacttggctgcggggaaccctccttgacccggatcgacatatgcggctaggttaatgagctcagagaaagagaatcgcataaaagatcttttaccatgaaaccaacctcaaataaagaggcggtgctctgtatgcatcaggatagtaaaccttttggttatggactatgtgaagactgctacaaagatgtaggtcaccggttaatttcctgatttttctaatcacgtcttctgtttacgtagttgcgagtcgttgacaaatggttcccagagttaacaatcaaatgttttcttttgcaatttttaatgcagttcataaatgtttctggtggacttgttggtgggtccaatcctcctgctttccagcgcgcagagaaagagcgaatggaaaaagcagctagagaagaaaacgagggaggaattagtagcctaaaccacgatgaacaactatatgtaagttttggtgctcttttatttgaggattgcagtttagatattttcctccctacccaaagcacctgtattgggagcttgttcacttctgcttgtatgatattatactaaaatctttcttgtgccgaacttttaacagtcagactattgcagtatgagcaaaaggggaaaacaatgttctggtgagtgcaattgttttctatcagattaaagttcttcactatcgtttgagcacttgagaatctatttgggctgtgtcgcagagaaaggtgaaaaagataaagatggggctgaagaacatgctgatacttcggatgaatcagacaacttttctgacatcagtgatgatgaggtcggtaattgtttagtagtaaatgctatgtcaaatttccaacctcgaatatggaacatgaaataaagaagaattctcaacagtttcaaagtcttgttttctcactacagtttcacttgttatatttgatcgtcagtcatagtattttactgttgctcaggtaaatgggtatatcaacaacgaggaggaaacgcactataagacgatcacatggacagaaatgaacaaagattatcttgaggtgatttcagaggctatataacatgtatcttctcttgaattccttttgatttatcacctaggagatcaaatcacatacaaaattatgttgtttgtaggagcaagctgctaaggaagcagctctgaaggcggctagtgaagctttaaaagctagcaactctaattgcccagaagatgcaagaaaggctttcgaagctgccaaagctgatgcggcaaaatctagaaaggtgactcagtttgaactttgaaattatgttcctgatcaagcatctgacttttggagaataacatgatacccattgatgacatatgatttctcaatcaatttctgattcttttttctctctcttcatataggaaaagcaacaaaaaaaagctgaggaagcaaagaacgcggctcctccagccacagcagtggaggcggtacgccgaacgcttgataaaaaggttagaatgtcagcttctttgataccttgatacttgaaaacgaatatgcaaaaaaagataaaccgagtatgccatgtatcatnnnnnnnnnnnnnnnnnnnnnagtacatagtcaacaacatggctgtcgaaattattagcattgaagaaactttagagtctgtgtttcttccttttttctgattttgagtgttgactcttacagagacttagttcggtgatcaactacgatgttttggagtcgctatttgatacatccgtaagtttttgattacctcttcttgtatcctcaattctcatcactttttgaggtctttacaatttcgcttctcttttcttctttcaggcacctgagaaatcacccaagaggtcgaaaacagagacagacattgagaagaagaaggaagagaacaaggaagtgaaaagtaa

SEQ ID NO: 169456 - DNA, 519 bp, Arabidopsis thaliana landsberg; identical to SEQ ID NO: 74368

SEQ ID NO: 169457 - DNA, 525 bp, Arabidopsis thaliana landsberg
  unsure (1)..(525): unsure at all n locations
ttttaaattgatcaattttgacgtgactacgtacaataggatctagatattnntactcaatgcatttttgtatacaagtactagtttgagtttaaaatgttgcgtatattaaaaacgattttcctttgtattgtccagaaaattacgctagtagatagttggggaatctatgaagcaaatgatacaaaaggagaaacaaaaataccaaagtgcccaacctggtacatgaggaagaacttaaagatgaatattctgagcaccaaatccgacattttggcatacgtatattcaggatcgttcgataagaagaattcatacatcatcaaaggatcgtatagatgtaaatcgtgtaaaatagtgcacgtcccattgaacaagacagtggtggagatcaaaaggaaagaggtcagaaccaaaggagtccggttcggttcagatgtttttgatctggttgttaatcccggttttgacaccggtttggcaatggctttggttttgttattagatcaaatgttctcttaatta

SEQ ID NO: 169458 - DNA, 1044 bp, Arabidopsis thaliana landsberg
gacaaatccaactcgatgctaaccagacgaaaggacagttactgttgcttaagcagcatgtatcaagtcttcaaatgaaagaagaagaagctatgaataaagatactgaagttgagaggaagcttaaagctgtacaggatttggaagtgcaagttatggaactcaagagaaaaaatagagagcttcaacatgagaagagagagttatccattaaactcgattcagcggaagcaagaattgcaactctttcaaacatgactgaggtaagtgtaatgattccttcataatcagtttattcttcctttcttggattgtaatgttctgtcttttttcgtagagcgataaagtggcgaaagttagagaagaggttaacaatttgaagcataacaatgaggatttgttaaagcaagtggaagggcttcaaatgaataggtttagtgaagttgaggaattggtttatgtacgaaaggtcaatgcatgtttacggtatgagttaagaaactaccagacaccagctggtaaaatctcagctcgtgacttaagcaagaacctaagccccaagtcccaagcaaaagcaaaacggttaatgttagagtatgctggttcagagcgtggccaaggagataccgacttagaaagcaactattctcaaccttcatctccgggaagcgatgatttcgataatgcttcaatggatagttccacaagtaggtttagtagttttagcaagaagccaggattgattcagaaacttaagaaatggggcaaaagcaaggatgattcaagcgttcaatcatcgccttcaagatcattttacggaggatcaccgggaagacttagctcgagtatgaataaacagagaggtcctttagaatctttgatgattagaaacgcaggtgaatccgtagccataacaacatttggtcaagtggatcaagaatctcctggtacccctgaaacaccgaatcttccaagaatcagaacacaacaacaagcttcttctccgggtgagggtttgaattccgttgcagcatcgttccacgt

SEQ ID NO: 169459 - DNA, 2100 bp, Arabidopsis thaliana landsberg; identical to SEQ ID NO: 7854

SEQ ID NO: 169460 - DNA, 1469 bp, Arabidopsis thaliana landsberg
gatgattcaaagttcttagtaatataagagtgtatcctttgattttgcagctggtattacgactctacacttccaacaactcgattttaagacaattgaagttgcaactgaaaattttgcaaagacgaacaagctaggtcaaggtggatttggagaagtttacaaggtatagatatagtctttagttctctagctacctggttcattacagagttagggtaaactgatcatatcatcatccgtgtttagggcacgttagttaatggaacagaagttgcagtgaagaggctatcgaaaacatccgaacaaggtgcacaagagttcaagaacgaggttgttcttgtcgccaaacttcagcataggaatcttgttaagcttcttgggtattgtctggaaggagaagagaaaatacttgtttacgagtttgtccccaacaagagcctagactacttcctttttggtatgtggcattaccatatacatattaacctgagattctgagtagacttatatgattataaaatctaagtggctcatgactacttgtgtacgtgcagatcctacaaagcaagggctgttagactggacaaaacgatacaacattatcgagggaatcactcgaggaattctctatcttcatcaagattcacgactcacaatcatacaccgtgacctcaaagccagcaacattctcttagatgccgagatgaatccaaaaatagctgattttggtctggctaggaatttcagagttaatcaaaccgaagcaaatacaggaagagtagttggcacattgtaagtaattggcatttagatataatatgaaacttgatggccctttgagagtaggtgataaaactaaaattgatatgcggtgtattttgcagcggttacatgccacctgagtatgtggcaaatggacagttctcaacgaaatgtgatgtgtatagctttggagtattaattctggagattattggtggcaagaagaatagtagcttccatcagatagatggttcagtaagcaacttggtcacacatgtaagttttaaaacgccaatgcaatcacaaatattttttactccttttaactgtgatcatgactttgaacattagtttcttgacaaatgaataaataggtttggaggcttaggaataatggatcgttgttggaacttgtagatccagccattggggagaattatgataaagatgaagtcattagatgcattcacattgggttattatgcgttcaagaaaatcctgacgatcgtccaagcatgtccacaatatttcgaatgctaactaatgtttcaattactctgcctgtgcctcaaccacctggatttttcttcagggaaagatccgagccgaacccattagccgagagattactgcctggtccgtctactagcatgtcttttacttgttcggtagatgatgcatcgatcacgagtgttagacctcgt

SEQ ID NO: 169461 - DNA, 475 bp, Arabidopsis thaliana landsberg
agccatatttctactacttatcgcagccatcaatttcattaacctgtcgacagcgcagtccatacaacgcactcgggatatcggcatattgaaggtattgggcagcgggcgcggcggcatccttatccaatttttaacggaaacatttatcctggctttgctggccgtggttatagccgttgttgccatcaggcctttactggggatgtttgctgaatacgttccggcgggcgtaaaattcaatttcacagattataccgcctggatatttttgatcggcattgcaattttcaccacgctgcttgccggcttttacccggccagggtactgtcagcatttaaggctgtggccagtctgaaaggcgaaaccggcgttaaaacggcgaataaaggctacctgcgtaaaagtctcattgttttccagtttacgatatcgcttattttcattaccggcactataatggttaaccggcag

SEQ ID NO: 169462 - DNA, 1485 bp, Arabidopsis thaliana landsberg
gttgttatgcctatcatcttataaagtgagaatgatacggattttgggtccgtctggggttggacagccccccattgccagagtcttatttatccagtttaatgacagttttgaactaagtgcttttgtgtagtatatcaaaaagttgatgtatagaccattgtgttcccaggactacagtacaaagttgtccatacagagacagtttattgttcagctagccaaccacaaagatatcgagattcctcacctaggagttgtagaagatagattgaaagacaagaaggtgcttgttgttcttgataatatcgaccagtcaatacaactagatgctattgcaaaagaaagtcgatggtttggtcatggaagtcggattatcatcacaacacaagaccggaaacttttgaaggcacatgatggcatcaaccatatttacaacgtaaattttccatcagcatatgaagcttgccaaatattttgtatgtatgcttttggacaaaaatttcctaaagatggtttcgaagagcttgcatgggaagttgcaaaacttttaggtggactaccattgggtttaagagttatgggctctcattttcggggaatgtctaaacatgagtggataaatgccctaccgaggttaaggactcgccttgatgccaatattcaaagcatcttaaagtttagttacaatgccttgtgtgaagaagataaagacttatttctttatatagcatgccttttcaacaataaaaggattgaaaaagtggaagagcatcttgcagagaagtccctgaatgtgaagcaaggacttcacgttttaactgaaaaatctctcatatctattgaagggggaagaataaagatgcataatttgctagaacaattgggtaaagaaattgttcgtcatgggctcgggcatcaacccattcgtgaacctgggaagcgtcaatttttggttgatactagagatatttgtgaactactcactaatgacacggttagttctatgattagtctatctttgcattggtgcttcctacaaattaaatttagtttgataagtaaccatcgttagttctctaccttttatggtctttttttcagggtagtaaaagtgttataggcatacatttctactcatctgagctattaggcgaattaaatataagtgagagagctttcgaaggaatgcctaaccttaaattcttaagattctactaccgctatggtgacgagagtgataaattgtacttaccacaaggtttgaattatctatctcaaaaacttaaaatactagaatgggatcattttccgttgacatgtatgccttccaatttttgtacggagtaccttgttgaactaaacatgcggtacagcaaacttcataagctgtgggaaggaaaccgggtaagaaaaagtaaaaagttctctttaattttcaactttttttgttaagttcatctgtatagatatatgattttcctt

SEQ ID NO: 169463 - DNA, 1110 bp, Arabidopsis thaliana landsberg
ttcaaactatataaagcagttatctattcctgaggacaagattcttgatctggcgcgtcttatacagaactggtcattgcctcctgagttatatttatcgacgaatgagcagaagcttcctagccgtgtgtgtgtcatgtctattctgattgtagctatacggatgctttataacataaatggtttaggtgtgtgggaacggagtttggggtttgtcaatgctagtgagggtgtttcagagacaaattcaggtacgccagaggaagcaactgaattcgataccctggagcttctgaagaaccttgaagctaaatatcatgaggtcgctgcagaaacccttgaatccgagaaggatctggtttcatatctatctctcgggaaaaacgagttctttgctggtttagaagaagattcacctgacgatacatacagaattgtcgataacttgtggaatggttatccaaaagacgaggtaagaacctgcttcaaattcttattaagataatctgaagaactaagttcttccaaggttcaatataaagtgtctcttttacatgtatgttgtaggatattgaacgtctacccaagagggggagagactgggacgatgatgtatcacttaaccaactttcattatacgatagcagatttagcgatggaaacaatccttgtagtagctcttcaaggagaaacgaaagtgtatcaataggtcttgatttatcttcttcagaacaccgagaatcatcatcaccagagaaattaaaggagatagcgataaaaagactaattacagacatgggagatgacttgttctgttacataccacctcgtgtgaaggtaaagagactagactatcttcagtacgtgaggaaaaaagaagatggagcattgatatacgcggctcacgcagattactacattcttttgcgggtttgtgctaaggtagctgagattgatgtgaggaatatgcatagaggtgtgttgagctttgagaggagattggcttggattgagaaaaggatagatcaggttttgcatctaactcgacctcttatgacatgtaaacactgttgtgatgatgggaatattggagaagatcaagatgattga

SEQ ID NO: 169464 - DNA, 750 bp, Arabidopsis thaliana landsberg
gagggtcaacggatccaaagacatttgagtcagttttcaaaatatcaaggaagacatttgactacatttgctctcttgtgaaagccgatttcacagcaaagcctgcaaatttcagcgactcaaatgggaaccctttatctctcaatgaccgtgtagctgtggcgcttaggaggcttggctctggtgaatctctctctgtcattggagagacctttgggatgaaccagtcaacagtctcccaaatcacgtggcgctttgttgaatcaatggaagagagagcaatacaccatctctcatggccttcgaaactcgatgaaataaaatcaaagtttgagaaaatctcaggtcttcctaactgctgtggcgctatcgacattacacatattgttatgaaccttcctgctgtggaaccgtcaaacaaagtttggttggacggagaaaagaacttcagcatgactttgcaggccgtagtagacccggacatgagattcctcgatgtaatagctggttggcctgggagtttaaatgatgatgttgtcctcaagaactcaggattctacaaactagttgagaaagggaagagactgaacggggaaaagttaccgctctcagaaagaaccgagctaagagaatacatagtaggtgattcaggttttcctcttcttccatggcttcacactccataccaaggcaaacccacgtcgcttcctcaaaccgagttcaacaaaagacactccgaggcaacgaaag

SEQ ID NO: 169465 - DNA, 2212 bp, Arabidopsis thaliana landsberg
cgccggaaaatgaaccgtgacggcgccggagaaggcgactctgtttcacacgaacattcaacatctaaaaccgatgaaaaggccaagacagttcctctctacaagctatttgcgtttgcagattccttcgatgtgtttttgatgatatgtggctcacttggagctattgggaatggagtgtgtttacctcttatgacattgttgtttggtgatctcatcgattcctttggaaaaaatcagaacaacaaagacattgttgatgttgtctcaaaggtaaaaatccaaactttttttgaactttttgattgtgttcttagatcacattttagtactaatactgtgtcttcttatataggtttgtcttaaattcgtctaccttggacttggaagacttggagcagcctttcttcgtaagtaataagttaactttagtttcttttttgtaagtaaaagcacttttgattatctttaaaaattcttttttggttatagaggtggcttgttggatgattactggggaaagacaagctgcaaggataaggagtttgtatctgaaaacgattctaagacaagacattggattcttcgatgtcaaaacgagcaccggagaagttgttggtcgaatgtccggtgatactgttcttatactagaagctatgggtgagaaggtaaagaaacaaacacagcaaaaaaataaaatgaataaactgaagttactaaagatttgaaactttctgcaggttgggaagtttatccagttgattgcaacattcttgggtggatttgttttaccgtttgtgaaaggatggttacttacacttgttatgttagtttcaattcctcttctagctatagctggtgcagctatgccgattatagttactagagcttcttctcaagaacaagctgcttatgcaaaagcatcaaatgttgttgaacaaactttggggtccattcgaaccgtaaaaatgcttcctattcccttttctgttttgtgtagcgtttatactaaactttctaacataaaactataaccaagtgtttgtgtgttttatctaggttgcttctttcacgggagagaagcaagcgatgagtagctacaaagagttgataaatttggcctataaatcgaatgttaagcaaggtttcgttacgggtttaggtcttggagtaatgttcttggtgttcttttccacctatgctttgggtacatggtttggtggtgaaatgatactgagaaaagggtatacaggtggtgcagtgatcaatgttatggtcactgtggtctcgagttcgatgtgagtatattatatattttttctaataggtcttaagacagtttgaaacggttattttgtgattaatctattttattttccttgtacagagctttagggcaagcatcaccttgtctaactgcatttacggctggtaaagctgcagcttataagatgtttgaaacaatcgaaagagagcctttgattgatacttttgacctaaatgggaaggttttagaagatattcgaggcgaaatcgagctgagagatgtgtgttttagttaccctgcaaggcctaaagaagaggtttttggcggattctctctgttgattccgagtggcacaaccactgctttggtaggagaaagtgggagtgggaagtctactgtgatcagtttgatcgaaaggttttatgatccgaattccggacaagtgcttattgatggtgttgatttaaaggagtttcagttgaaatggattaggggaaagattggattggttagtcaagaacctgttctgttttcttcaagtataatggagaatatcggatacgggaaagagggggcaacggttgaagagatacaagcagcgtcgaagctagcaaacgcggctaaattcatcgataagttgcctctaggtttagagacattggtaggggagcatggaactcaactctcaggaggacagaaacagaggattgctatcgcgagggcgatacttaaagatccgcggatcttgctgttagatgaagcaacaagcgcacttgatgcggaatccgaaagagtggttcaagaggctttagataggataatggtgaaccggactacagtgattgtcgcgcatcggttaagcacggttagaaacgctgatatcatcgctgtgattcatcgtggaaagattgggaagaaggtaaataacataaaccttttgattca

SEQ ID NO: 169466 - DNA, 549 bp, Arabidopsis thaliana landsberg; identical to SEQ ID NO: 78692
  unsure (1)..(549): unsure at all n locations

SEQ ID NO: 169467 - DNA, 340 bp, Arabidopsis thaliana landsberg
tttctttcaggtaatagaggaactactggaggacagcactgacctaacttctcatctgaaaaaattcataattttgttgcttttcaaatatcagtatgtctataatcaagtaattgaagagcttcaacacttgaatgtgcctgaggtgtctaaccttccattcttgcgtgacagtgagtctggcgatgaatttgtcattcgaaagtatgaagattctacgggcacatatttgtcaacaactaagactaaggaaatagcagaaggaagacttaatcctgaaacccacgaaaaatttacacacgtggaagtggaagaaacagatgacgaagaaactacttag

SEQ ID NO: 169468 - DNA, 1022 bp, Arabidopsis thaliana landsberg
tttcataagaacggagtgcagccacaagtaatgtcatgaacgtaaggtgtattaagtttcattactataaccgcgcagttgcagtgcgtcaacacgggtggaatagtatagtagaagaagacggagaaaaagaggttatagatcccgcaaactcaaaatatattcatggactataagatatatatattgataagtatcttatacaaattccttactccactgcagttcgagcttgactatccaaatgaattgatcacatctgtggaggggactatgaaaagctttagtcgtagcgaaataagaatttcgtcattgacatttaaaacatcaaaagggagaacctctacaacaattggaatcgcgtctggtaccaaatttctgttagcaagcaaaggatgtgctgtggttgggttctatggaagacatgatgatcgtgatcttgttgctattggagcatatttttctccattgcctcctcctactgcggagaaactacaagcacaaggtggtaatcaaggagattcatgggacgatggtgttttcgaaggtgttagaaagttgtacgtaggacaaagtaaaaattgtgtcgcattccttaaggttgtgtacgatagcaacactcaggttgttattggagaagatcatggaaacaaaacactatttgaagtcaaggaggtgattaactattactttggatgtttttattttattttttgggtttgagtttattatcttgacattttacattgattcattaatttttttggcagtacgagcttgaatatccaagtgaatacattacagccgtggatggttgttacaataaagtaaatggaactgaagtcgaagttataaccatgctcaggattcaaacgaacaaacgaacatctatacccgttggatgtgaatctaactctagctttgtactaaaaaaagaaggttacaaaattgttggattccatgggaaagcaagtaacatgattaatcagcttggagtccatgtcgtgcccttgactgagtga

SEQ ID NO: 169469 - DNA, 317 bp, Arabidopsis thaliana landsberg
gcgccgggcaggccaaggcggcccgcgccctcggtctgacgttccgacagaacctgacgctgatcgtgctcccccaggccgggcgctcggcggtgccgccgatcaccaatgtgctgatcgcgctcgtccgcaacaccgccgtggccgaggcgttcggggttcccgaggccgggtacgtgatgtccgggctgctccgcgaccatgccgccgatctctactggatcttcttcggcatcgccgcgggctacatggtcatcgtgttcgtggtgaccgcgagctcggccctgctcgaacgcaagcagacggtcgtccgatga

SEQ ID NO: 169470 - DNA, 1002 bp, Arabidopsis thaliana landsberg
tctcaacctctattggtgagagaaatgaagataccagaggaagaagttgcactcttagaagattacgttagcgattccgtcgaccaccgtggatttcccgccggaaaatcttccaccggcggatggagatcggcctggttcattataggtaaaacacatcagaaacaatccaattttttttctttttctagttaaacttctaagtcccagtcttaaatgatttgtttaggtgtggaagttgcagagaggtttgcttactttgggattgcctgcaatttgattacttacctcaccggacctctcggacaatcgacggcgaaagcagccgtgaacgtgaacacgtggtcgggaactgcctctatacttcctattttaggagctttcgtagctgacgcttatcttggtcgttaccgtactattgtcgtagcttccctcatctacatattggttagtacttttgtcttcttctagttaaaccggtttgatctttgtatgatttaaaccgggattttagctgaatttggaggattattattattacaggggctaggactattgacgttatcagcttctttaatcataatgggattatctaagcaacgtaacgacgcttctgctaaaccatctatttgggttaatacacttttcttctgttctctgtatttggtggcgatcggacaaggtggacacaaaccgtgtgttcaagcgtttggtgcggaccagtttgatgctgaagatccgaagaggtaatagcgagagggtcgtttttcaattggtggttcttgagtttatctgcgggaataagcatatcgattattgtggtcgcttatgttcaagaaaatgttaattgggcgtttgggtttgggattccttgtttgtttatggttatggctcttgctatcttcttgctcgggaggaagatatatagatacccaaagggacatcatgaggaggttaatagtagtaacacttttgcaagaatcggtagagtttttgttattg

SEQ ID NO: 169471 - DNA, 493 bp, Arabidopsis thaliana landsberg
ttgatattttgccttgtttatttacatgaagggctagcattgaatatgagaaaggtgctaccgtttttgtgaatgaatcagcacaaaaattgggtaatcctgaagaattattgtgtccatgcattgactgtcggaatgtttgccatcatctattagaaatcgtgttagagcatctggtgattagagggatagatgagaaatataagattaaggcatgttggaataaccatggagagagaagggaacataacatggctagtgttgaatcttcagagaatgatgcttatgacttgattaggactgcatttttcagtggtggagaagagcagcaaattcagaatgacaatgatgcttatgatgaagaactaagcaaagaagaagctgagtttagagagaagttattggaagctgaaactcccccatactccactagttctaagtataccaaggagggtgaaataatggctctctatcgcatcaaggtgaaaagtgg

SEQ ID NO: 169472 - DNA, 1334 bp, Arabidopsis thaliana landsberg
atgaagaacaagcacacattcatacaatttgacaatgggtattattcagaagagcatgagtggatttcaaacaattctttaagcggtgtattgttgagaacgtcaaaggtaacatactctatgttagtagaaaagatatgcaagaagattggaatagatgaaacctcaaggaaggtgaaattgagttatgttctatgcacatcttagagagatacatctattgtagatgatgatgactttttaggttatctaacggtagtgaatgctaagggaattagaccaactttgaacgtggaggtagtaaataaagaatctgagagggtggacacaaaattcaagggtagagggaaaaagttcagttggtattaattctgaggagttgaatgcatttgatgtggagaatggtggagtagtgacgatttttagaggagaaactgcaggaggtaattgtgtgaatgatgaaccgattattgaagaggctaatagtgtagaagaggctattgagaatgcggataaccgggtttttgaagaggctatggagaatgtagttattgaagatagagagcatgtggatagccgtatggatgttgctgaagataatggtgttgatggtagaattgagtactatgagcttccatgtgttggtgaagtaagtcagagtagtgagaaaagtcagagtgttaaggaatgggaagatggaacggggattgaattgaaccaagaatttgtttctaaggaggtcgtgcaagatttggttaacatagttgcaaataaatattgttttgcgtccgcatctatagtgttagatccgcagcgactcatgttgcgatgtcgacaatctaaaacaacaggttgtcaatggtatatacgatgtgcaaaagtaaagagttcagattgttttagtgttagagttcacaggaagatgcacacatgcaagcggtctgataagaactcaagcaattgtaaacataccggcacaccacgattaatcgcgtctattttgcatgaggattatccaggtgagtttcaaactccaccacctaaaagcataatgagtattgttcggggaagaatgggtttgcattgctcgtatgctaccgcatggagagggaaaagacaacacgttagtgatgtgcgtggtagtcctgaaaaaagctacaccgacttgtactcttatctgcacgtattaaaggaggtgaatcccgggacaatatcatatgtggaagtggatgcaaaatacttattcgttgctttgggtgcttgcattgaagggttcaaagttatgaggaaagttgttataatgtaacccccttttcttaggtccgtatttggca

SEQ ID NO: 169473 - DNA, 1157 bp, Arabidopsis thaliana landsberg
atggattccatcggtggatttcatgagatagaaactgatgataaactataccagcagcttgtatatcatcacccaaaatacaaacccaaaccacaaacaaaatataaacccaaaccacaaacagccagccatgacctcccttttcaaccactttttttatgtcctattccacgaattttaaaagttgagttcgattctctcacttctccaattaataattcccctgaatacatcgtctctgcaacaaaaagtgatgaagagtataaagatcattcactactccctttgttttggtgcaacaataaagaattcgatgtcgatggtgggtgtgacatatgcagcggctcaaattttggcacagactattatttatgtgtccactgtgataatatataccacaaagaatgcgtccaatctccattcaaaatcgagcacccataccatccagagcattctctcctactttcctttcgtaaccctaatgctcccgttatagtgtgtttttgttgtggaagaacaacaacatgtctggtatatttctgtaccatatgtgatgttgtaatgcatacagtttgtgcgatgaagtcgatactcttgggtggattccatgaggttgaaaacgatggtaaactattttttgtatatcatcacccaaaataccaacccataccacaaacacaaaacctaacctcctccgacaaagctgccaaccatgaccactcttttcaaccacttttttttatgtccttttcgacgtattcatccaaaatactctgattctctcatttacccgatcagatattcccccctatacgtcagctctacactacaaagtgatcagcaagatgaagatcattcagtacttcctctattttggtgtaacaataaagaaccggatgttgatggtgggtgcgccgcatgtagagactcatattttggcacaggctattatttatgtgtcctctgtgataaaattttccacacagaatgcgtgcagtctccattgacaatcaaacacccttaccatcctgagcatttttttcaactttcctgtcgcggatctaatgctccccataaagagtgttcatgttgtggaaatatagctaaaaatatggtatactgatgtaccatatgtgaagcctttatgcatacaacat

SEQ ID NO: 169474 - DNA, 349 bp, Arabidopsis thaliana landsberg
  unsure (1)..(349): unsure at all n locations
gtaatggatcagatatggttctgatttgtgtggccgtgattacctgctactgtgttcataaaatgatcttctctgattttcttctaccaatctcaattgccaaatactttntgttcttcttcttcaacaatgatatatgatgtttttctaaatttcagtgggaagacgtccgtggaactttcctcaaccactttttcaaagagctagaacggaaatcgatcattgctttcaaagacaacgagagcgagagaagccagaatctaagtcccgagcttacacatgcaattagggagtccagaatcgcggtggtcgtgttctccaaaaattactcctcttcaacctggtgtct

SEQ ID NO: 169475 - DNA, 1931 bp, Arabidopsis thaliana landsberg; identical to SEQ ID NO: 6489

SEQ ID NO: 169476 - DNA, 1074 bp, Arabidopsis thaliana landsberg; identical to SEQ ID NO: 20949

SEQ ID NO: 169477 - DNA, 717 bp, Arabidopsis thaliana landsberg
caaaagtctcttgtaataagctaaatggcgatcttcaagattcttgtattgttgttgagtttgtgttgtttcagtcaagcacaactttctcctactttctacgaccaaacttgtcaaaacgctctctccaccatccgatcttcaatccgaaccgcaatcagccgtgaacgtagaatggctgcttctctcatccgtctccatttccacgactgcttcgttaatgtatgtacttaaaacatttgattcaacatgtgtgtgtgtgtccatacatatatgtgttttatggactgctctaaactttatattttttttttttttttttttaatttgaagggctgtgatgcatcggtcatgctcgtggcaactcccaccatggagagtgagagagattcattggcaaattttcaatcggcaagaggatttgaagttatcgatcaatccaaatcagctgtagagagtgtttgtcccggcgttgtttcttgcgctgatattattgccgttgctgctagagatgcttttgaatatgttagtctctatatccatctttatatacatatatcttgattattaatccaaacatgtacatatttatatgttcagctactactttaaactttttcaagttgtataatatttacttctctgacgtaaaatgtcatgtaaatgatatacgtttacgggtgcaaattttgattaatcataagtgctaatgaattc

SEQ ID NO: 169478 - DNA, 517 bp, Arabidopsis thaliana landsberg
  unsure (1)..(517): unsure at all n locations
atggcagatgagttgtgggatgagatacaaaatctagaattaggacaagaggatccagcccttttcattccccatgaagcttatgtgatggttgaagcttcaaataacttaagtctgatagcgagacctctgaacccaagagttcaaaatcttaactctgtcgtggtagcacttccaagatcatggggactaacgactcaggtgcatggaagagttcttgatgcaacgtatgtccagttcctttttgcaaatgaaattgatctgatgatggtgcaaagaagggaaccgtggcttttcaacaattggtttgtggcagcaactcgatggcaggtggctccagctcacaaccttgtcactaccattgatctctgggtgcagattagaggtatttccttaccttatgtttctgaagagacggttttggagatagctcaagatctangagagatcattcactagacttcatgaggctacctctcctcagatggttntattagagtaagagtcgtttggaata

SEQ ID NO: 169479 - DNA, 583 bp, Arabidopsis thaliana landsberg; identical to SEQ ID NO: 54220

SEQ ID NO: 169480 - DNA, 587 bp, Arabidopsis thaliana landsberg
gcacgggcaacagcgccaagacggtttttacgccggacggcgcgatcgagctgtccatccccagagatcgccatggccgcttcgatccggcactgatcgccaagtaccggcgccgcttccccggcttcgacgacaagatcatcgcgctctacgcccgcggcatgagcacgcgtgacatccaaggccacgtgcgcgagctgtacggcatcgaggtatcgccggacctggtctcgtcggtgaccgattcggtgatcgacgaggtgagtgcctggcagagtcggccgctggacccgacctacgcgatcgtcttcttcgacgcgctacgggtcaaaatccgtgacgaaggactggttcggaataaggcggtgtatctggccatcggcatccgcccgtccgggcacaaggaagtgctcggcctgtggatcgaacagaccgaaggtgccaagttctggctgcgcgtgatgaacgagatcaaggcgcgcggtacaaatgacatcctgatcgctgtcgtcgacggactgaagggatttccagaaggggggaccgggtctttcccgaaaccgaacaaagacaagctggtgcgtctg

SEQ ID NO: 169481 - DNA, 5217 bp, Arabidopsis thaliana landsberg
aagaaggaaacttacaatttacaaagaacgagcttcaataaaaatttccaaagaaattaccgtcggcgaatcgttaggctcgagaagaatcaccaaattccaaggggagagagactgaattttcttttgattcacgtaacaacaacgctcagagactatgtcgtcggaggtgaaacagctgatcgtcgttgctgaaggcaccgccgctttgggtccttattggcaaaccatcgtctccgactatctcgagaaaatcatcaggtttttctttttaggaaccttgtatctcttttaatcctcgttatttgattttcattcggagttagggtttagctgataccgttcgaatcaggctttaatttcaattggttagatcaaacctttgtttatcctctgattccacaatgttttgttgttcgttgttagtactgtgtttatgtatttgattgttctgtgtttcatattgagcaatcactttacgttaccttatggttcctacattctttttttgtgttaggacattgttttcgatacaacgcattcataaagcaatgaatttgtagtttctcacttcgatcacgtaaaattgatattaatatgtgattacagagaatttagtatataattgcctgtatagtttgtaactaatcacattgttggctattcttaatatccactcaacatattattgtatttcaaagtagcgtttttgtatgttaaaatttcaattacataatctgtctatgcattctttgcatttgtccaggtctttctgtggcagtgagttaaatggagaggtactatatctgacttatcctcgtttttaagtttactcaagttttcattcttgagcaaacagttaatcaatgtttttgagcaaactcatatacattcgttatctgtcaaatcattgcgacacaaaaaataacagagcaaattggtagtttgatgtgtctgatcgagtctttatatattcactaaacttgcagaggaaccctgtttctactgttgagctatcactggtgatcttcaattctcatggttcatattgtggtacgtgttgtgcttcatcttgtgatatccaaatacaaatattatttgggtgctttctcatggccctggttacattagcttttgttttagtaatgttgttcttatctttcattcttcttagcttgcttggtacaacggagtggctggacaagggatgttgatattttcttgcattggctttcttccatacaatttggtggtggtggtttcaatgaggttgccacagctgaagggcttgccgaagcattgatggtgggaaacttgatctcttttcatctgtgacacaactataagacatatgtttgggccactttctttcaagctacttttgactaatttactttctcaataaaattaacttttttctttccatggcttcattttatgtggtggtgcttctgtcagcgattttctcgatccttaaacctcacaattttctctgacttcatgacacagatgttttctcctccttcaggccaagctcaaccaagtaacgatctgaaaagacactgtatcctaatcacagccagcaatcctcacatattgccaacacctgtatatcgtccacgattgcaaaatgtggaacggaatgagaatggtgatgcgcaagctgagagtcgattatcagatgccgagacagtggcttcatattttgctaaggtactttttttaactgattcccccaggtattacaactagctataattactccttttaatgggaaattactaacctgccatattggtgtgcagtgttctgtttctttgtctgttgtatgtccaaagcagcttccaaaaattagagcactatacaatgcggtgagactgcgtgtctatttgctattcactagatgtacatctatcaaaagtctttcttttgtcagacagctctttcaaaggctgtctttattctcaatgctataaactggtgtaatctttgttttatactgttttaaatgcagggaaagcccaatcaacaaagtgcggacttgtcaattgacacggctaagaacacattctatcttgtcctgatctcggagaattttgtggaggcacgtgctgccttaagtcattctgctacaaatttgccacagactcagagccctgtgaaagtggacagggccactgttgctccatctcttccagtcactgggcaacctccagctcctgtgtcatcaggttcttctactgacaacatccatttttcttagtccaactatcttgatttttctttgtgcttctttggattctatcctgcttctctatatgaagatctctttttgtatgattttcagccaatggacctattcagaatcggcaaccagtttctgttggaccagttccaactgctactgtgaaagttgtaagtctatttgatctttttagtcagttggaggagtcagctctatcttttggcaaccgactcttgtatgttttataagaattatttactagatattagccgaaaatgaattgtaaatttattctctggtgcttgataagacattacaaatttttatgtgttaatcaactagatttaatgttaagttcatatgaatatcccatttgtgaaataatattgtatactcaatcagcttattagataacatatcttcacattagtagaagcctgttaatcagatttttggaatgaaattgcaggagcctagcaccgtaacttctatggcaccagttcctagttttccccatatcccggctgtagctcggcctgctacacaagcaattccttcgattcaaacatcttcagcatcaccagtttctcaggatatggtcagcaacgccgagaatgcaccagatattaagcctgtggtggtcagtggaatgacgccaccattgcgtactggtcctcctggtggagccaatgtaaatctgcttaataatctttctcaagtccgacaagtcatgagctctgcagctctggcaggtgcagcctcatcggttgggcaaagtgcggttgcaatgcatatgtcaaatatgatatcaacaggaatggctacatctttgcctccttcacaaactgtgttttcaactggacagcagggaattacttcaatggctggttcgggtgcactaatggttctgcacaaacgggacaaagcccgggtcctaataatgcctttagtcctcaaacaacgtcaaatgtcgcttcaaaccttggtgtttcacaaccaatgcaagggatgaaccaaggaagtcattctggagcaatgatgcaaggtggaatttccatgaaccaaaacatgatgagtggtcttggtcaaggaaatgtctcctctggaacaggtggaatgatgcctactccaggagttggccaacaagcgcaatcaggaatacaacaacttggtggcagtaacagctcagctcctaatatgcagctatcacagccatcatcgggggctatgcagacttcacaatccaaatatgtgaaagtctgggaggtaatgtcagtttatcttgtctaaaataacggtgatcttgtgctaacttttacttacattttcaaattcatgcagggaaatttatctgggcaaaggcaagggcagcctgttcttatcaccagacttgaggtgtgtttaggggcacttactatgcacttttctttccccttttgtgaatttactgggatcacatgcttaagcacatcttcctctgtagaactttgttgaattgttccaagtagatattaactaacgtctttgtttatatttgacagggttaccgaagtgcttctgcctctgattcgtaagtttataactaattgaaatatgaaaactgcttccttactaaaccttgtcaggagagcagtcgactccttaagaaatgattgtagctgctaaactaatttttgctttctctttttgtgcatctccccaggttggcagcaaactggccaccaactatgcagattgttcgtctcatatcccaggaccatatgaataacaagtaatatcttcgtgctatatccttccttattccaaatggctcatgggtggatgttgatttcataccactaaatatttcacctgactttgcatcaggcaatatgttggcaaagctgacttccttgtgtttcgagccatgagtcaacatgggttcttaggacaacttcaggataaaaagcttgtgagtattgttgataatttatgccacttgtctccttttccttattgtttcactacaaatttaataacaaaatgatgaatggtgtttactggtttattagatattaggatgaattagatgttaagaatgaaaatctttgaaaaaatatatgtacttacatctgtaaacatgttctcggtgaatctatcaatctcttgctatgttcaccatacacttaacgatgcctacgcttgtatgtagccttgttttgattagcctaatcgtgtgccatactattgtcattttcacgcttagcttttgtggagttgtatatgataactttgtcatcctccgtattgcagtgtgcagtcatccagttgccatcacagacgcttcttctctctgtctctgacaaggcttgccgcttgattggaatgcttttcccaggggtaaggaagtactaagtttaaggtgtctatatatgttttgcttcacattagtgactcttgagggttgttttgtttactcctaggatatggttgtgtttaaaccacaaattccaaatcagcaacagcagcagcaacaacaactccaccagcaacaacaacaacaacagcagatccagcagcagcagcagcagcaacaacaacaacacctccaacagcaacagatgccacaactccagcaacaacaacaacaacaccagcagcaacagcaacagcagcatcaattgtcacagctccaacatcatcagcagcaacaacaacaacagcagcaacaacagcagcagcatcaattgacacagcttcaacaccatcatcagcagcagcagcaggcgtcgccgctgaatcagatgcagcagcagacttcgccgctcaatcagatgcagcaacagacttcgcctctgaatcagatgcagcagcaacagcagcctcaacagatggtaatgggtggtcaagcttttgcacaagcccctggaagatcacaacaaggtggtggtggagggcagcctaacatgcctggagctggcttcatgggataa

SEQ ID NO: 169482 - DNA, 589 bp, Arabidopsis thaliana landsberg
  unsure (1)..(589): unsure at all n locations
ttccccaagatgatgatcacattattatgagganaaagattgtaactcaggtacgttaaagtatttggaaattcttgatttagataaagacaaacccgtattattagtcacatgttgtctatttttcttatggtgttagatattggaattggggattgtggttcattcagtgataataggaatatctctaggagcatctccaagtgtgagcacaataaagcctctcatagctgcaattactttccatcaattgtttgaaggttttggccttggtggttgcatctctgaggcaaagtttagagtaaagaaaatttgggttatgttgatgttctttgcactcacggcaccaatagggataggaattggtattggagtggcggagatttacaacgagaatagcccaatggccctaaaagtttccggttttcttaatgccacggcctctggaatcttgatttacatggcgcttgttgatttggtagctccactttttatgaaccaaaaacctcagagtagcccgaagatacaagtagcttagaagtgtatctaaagatgttggtgctgagtttgatgtctcttttaggtattt

SEQ ID NO: 169483 - DNA, 3293 bp, Arabidopsis thaliana landsberg
aaattgggaatggcttcctcggaagctgattcccgattgagtcgagtcgtaacaccagctttagagaagatcgtcaagaacgcgtcgtggcgtaaacactcgaagctagctaacgaatgcaaagctgttatcgagcggctaaattcgctgcagaaatcaccacctccttcgtcctctgctgctactgactccgagtctgaatcctctgttcccggtccacttaacgacggtggttcgatcgagtactcgctcgccgattcggaactcatcttcagccctctgatcaatgcctgtggcactggcctcgccaagatcatcgaacctgctattgactgcattcagaaacttatcgcgcatggttacattcgtggtgaatcggacccgtccggtggagcggagtcccttctcctttttaaattgatcgattccgtttgtaaatgccatgatttgggagatgaatccattgaattacctgtgctacagactctggttatctgccattaactccatctcgctgaggatccatggcaaatgcttgctcctagttgttcgtacttgctacgacatttacttgggaacaaaaacgtggtgaatcagacgactgccaaggcttcgctgatccagattctggtgattgttttccggagaatggaggcggattcgtcaacggttccaattcagccgattgtagtggctgagctcatggagccactcgaaaaatcagatgcggatgggacaatgacgcagtttgttcagggtttcatcaccaaaatcatgcaagatattgacggagtgttgaacccgacaatgtcaggatcaggatcaggatcagggtcaggaggccaagatggggcatatgggactaccacagtggagactacgaatcctacggatttgttggactccactgataaggacatgttggacgctaagtactgggagatcagtatgtacaagtcagctctagagggaaggaagggggagctaactgatggagacgctgagagagatgatgatttagaagttcagatagagaataagctgcggagagatgcctgcctggttttcagggcgctttgtaagctctccatgaaggcgccgccaaaggagtcttcggcagatccgcagtcgatgagagggaagattctggctcttgagctgttaaagatcttgttggaaaatgctggagctgtctttagaacaagcgagaagtatgttaaatacctctttagctcctttttcttttttgaatataagggtggatccaccgtatcaagaaaaattagattttgtattcttctgatgaatttccatctctgctgaacaggttttcagctgatatcaaacagtttttgtgtttgtcgttgttgaagaacagtgcttctactcttatgattatcttccagctttcttgctctattttcatcagtctggttgcaagattccgggctggattaaaggccgaaattggagtgttttttcctatgattgttcttagagtcgtggagaatgtagctcaacctaattttcaacaaaagatgattgttcttcggtttcttgacaaactttgtttggattcacaaatcctagttgatatattcttgaactacgattgcgatgtcaattcatcaaatatctttgagaggtatgttatgtcccttgatgcttcgctgtttaaagtttaagtttcgttcaggtggaagttctttgcgtaatttatgtttcctctgtatgatcatgtttaggatggtcaatggtctccttaaaacggctcaaggggttcctcctggtacagctacaacattgatgccaccacaggaggcagctatgaaacttgaagccatgaaatgcttagtggccatattgaaatcaatgggagattggttgaacaagcagttgcgcctgccagtttctaattcattgaataaatctgacgtaattgagattgatttgggacccggaagtccccagttggcaaatggaaatgctgatgagtctgctgacggatcagatacttattctgaatcttcaggaggtacatctgatgctctagctatcgagcagcgccgggcttacaaactcgagcttcaggtaagaacttaaagatgtttgtgtattatgcagattattgtagaaagtgacattttataatttttctgtggtcgttaatgctattttaaatgtttgtcccaggaaggtatttctctttttaatcggaagccaactaaaggtattgagtttctcatcaatgcgggtaaggtgggtgaatctcctgaagaaatagcaggttttctcaaagacgcgtcagggttaaataaaactttgataggcgactatcttggagaaagagaagatttagctctcaaggtgatgcatgcatatgtggattcttttgatttccgaggcatggaatttgatgaggcaattagaacctttcttgaaggttttaggctgccaggagaagcacaaaagattgaccgaatcatggaaaagtttgctgaacgttactgcaagtgtaatcctaaggtgtttactagcgcagatacagcttatgttcttgcatattctgtgatcatgctcaatactgatgcccacaaccccatggtgaagaacaaggtttgcttcattcattgtctaggataatacagttattgtggaagttttaggtaaaatgttagtgacgttctttgtgccttttttttttctcttggaacatatagatgtctgctgatgactttatcagaaacaatcgtggaatagacgacggaaaagatttacctgcggactacatgagatcgctgtatgaaaggataacaaagcatgagataaagatgaaagaagatgatttacctttgcaacagaaacagtacgcaaactcaaacagaatgcttggtttggatggtatattaaacatagtgatccgtaagcagtggggagattcatatgcggaaacaagtgatgatctgatgaagcatatgcaagagcaatttaaggaaaaagctcgtaaatcagagtaagatcactctctcttacttgcatcatatgttgataacaaccatttctctgtagacttagtattcatttcaactcagaactactctcctgaactgtttcatctcttgggaaacttttagctgatgcagtatttgaattgactcgagttttcaggtcaacctactatgctgctacagatgtggttattctcagatttatgattgaggcttgttgggctcctatgcttgctgcaatcagtgcgccgatagaccagagtgatgatttgattgtgatcaaca

SEQ ID NO: 169484 - DNA, 926 bp, Arabidopsis thaliana landsberg
tcaatacttccaattttttaacatcaaatttacgggtgaaatcgaaattaactctaaatactttagcacaagtctagtaaacacgaggctttcacgtgcatatcaaagttatgttcttttctttccgtgtacgtgaatccaaactgacccggttaagaaccaaaccggtatcataactgataaaattggtggtttgatttaatttcggtacaggaagttattgaaggaaatatgtacaacttagaggcgtacaaagcatcagcagagagcttcatgtgtagtctggtcccggaatcttcgggaccgcatgttgagtatacttccgctggtctactttacaagcccggcggtagccagctccaacatgcgaccaccatatctttcctcctcctcgtatacgctcaatatctttcaagaagctctctctccctcaattgcggcacccttaccgtccctcctgattatctccgccgtcttgccaagaaacaggttagaccggtttgagttggtttggtttaagtttataagtgaataacatataatttgtttttggcatccagcaaaactaatcatgtatttattggaaaatgaaggtggactatatattgggggataatccgatgggattatcgtacatggtcggatacggagagagatatccaaagaggatccatcaccgtggttcatcattgccatcgatcgtggatcatccagaagccatcagatgcaaagacgggtcggtttatttcaattctaccgaaccgaacccgaacgttttgattggagcggtggtgggtgggcctggagaggacgatatgtacgatgatgatcggtctgatttccgcaagtccgagcccactacttacatcaatgctcctttcgttggcgttttggcgtactttgcagccaatcctggttctagctaa

SEQ ID NO: 169485 - DNA, 545 bp, Arabidopsis thaliana landsberg
  unsure (1)..(545): unsure at all n locations
ccgatcccacatcggagcgacagagccttgcccgtacgtgtgcatgtggttacccaaagaacatcgctggttcaccctagccgagattgagggtaaactaagtttagaaccggtaaggctctcttcctcttatcctcgtactcgagtaaactgtagctgctggtaccgaaatctacaaaatcggcggaactgtcaagggcaagcgatccagagctgtttttgtacttgattgttggactcacaggtggcgtcgtgctcctaacatgagagtgtcaagggtaggcgccaagtcttgttttttagacggaaatatatatgtaataggaggatgcagaaagagtgaggaagaatccatgaattgtggtgaagttttcgacctaaagactcagacttggaatccgctgcctagccctagtgataattannnnnnnnnnnnnnnnnnnnnnnnnnnnnnnnnnnnnnnnccgctatacgtaatcaccaagcgtaacaacaaagcatatgatccgaatgaaggaagatggctaccagacgtggggtctgtg

SEQ ID NO: 169486 - DNA, 410 bp, Arabidopsis thaliana landsberg; identical to SEQ ID NO: 74234

SEQ ID NO: 169487 - DNA, 1322 bp, Arabidopsis thaliana landsberg; identical to SEQ ID NO: 3856

SEQ ID NO: 169488 - DNA, 1106 bp, Arabidopsis thaliana landsberg
tgtttgcctcggctaagatcctaaccgtcaccattacatcatagcgtttgccgtactcgaaggtgagaatgatgctagttgggagtactttttcgagaagctaaaaacggttgtacccgatacttcagaattggttttcatgacggacagaaatgcaagcctcataaaggccatacggaacgtgtataccacgactcatcacgggtattgtatttggcatttgtcccaaaatgtgaaaggtcatgctactcacaccaaccgagacgtactcgcatggaagtttcaggagttaagttgggtctacgtcatggcggacttcaaccgagcgtatgacgggtttaagttgagatatcctaaggcgaccaagtatttagaagatacaaccgtgaaagaaaaatgggcaaggtgttgtgttcccggagaaagatacaacttagatacaagcaattgtgtggaatctttgaacaatgtgtttaaaaacgcaaggaaatactcgttaataccaatgcttgatgcgatcatcaaaaaaatctccgtttggtttaatgaaaatcggatggaagccgcgtctggatccttagaaaataagatagtgcctttggtcgagaattatttgcatgatttgtggagttttgccgagaagctgaaagtggtggagctaaactcattcgagcgtgaatatgtagtcacatgcgacaaaggaatagattatacggtgagcttgcttttgaaaacttgcagttgtaaggttttcgatatccaaaaatatccttgtattcatgcattagccgctttcattaacattatggatgatgaagatcggagaagaggtttggagttacatgatttggttacaaaatattattgggcagagttgtgggcattggcctatttatcttgttccggataggtcgcagtgggaagtaccagatgaagtaaaggcgttgaagatagtttcgctgtctaaaaaaccgaagaaaggaaggaaaaatatgctaaggtttccatcaaccggggaaaagcggccaaaacgacaaaggacgttaaacaaaaggcgtccaaggcaatcgtgtcaatggttattatttgggaatacgcctatctga

SEQ ID NO: 169489 - DNA, 1088 bp, Arabidopsis thaliana landsberg
atgattcttcgtaggcttgtaaagacaactacatcgaattcaaatcccagaagaagccaatcactttcatcttctggtgttcgtattctctcatcatcatcttcagatagatatacgtcgtcctcgcaacgatattccggtgacgatagactcgccaggctaaggcacaaggactggttagccccaaacgaagttttgaaaatcttcgacaatgtcaaagatccgagcttcctgctgccagcttaccagcattactctaaacggaaagactatcaaccaacggaatctctctacgcccttatgatcaacaagtttggccaagctaaaatgtacgatgaaatcgaagaagtaatgagaactataaagcttgagaaaagatgtcgtttctcagaggagtttttctacaatttgatgaggatttacgggaacttagccggaagaatcaaccgagcgatcgagatattgttcggtatgccggattttggatgctggccaagttctaagagtttcaatttcatactgaatttacttgtttccgcgaagttgttcgatgagattcataagatctttgtgagtgctcctaagctaggtgttgagatcgatgcttgttgcttgaatatactcatcaaaggactctgtgagagtgggaatttagaagctgcactccaactgctcgacgaattttctcaacaaaaatcacggcctaatgtgatgacgttttctcctttgattcgtggtttctgtaataagggaaagttcgaagaagcttttaaattgttggagaggatggagaaggaacgaatcgaaccagatactatcacgtttaacattttgatttcagggcttaggaagaaaggtagagttgaagaagggattgatcttttagagagaatgaaggtaaaggggtgtgaaccaaatcctgggacttatcaggaggtgttgtatggcctcttggataaaaagaggaacttggaagctaaagagatgatgagtcagatgatttcatggggtatgagacccagttttctgtcttacaagaagatggtttttgggctttgtgaaacgaagtcggctgcggaaatggactg

SEQ ID NO: 169490 - DNA, 922 bp, Arabidopsis thaliana landsberg; identical to SEQ ID NO: 1533

SEQ ID NO: 169491 - DNA, 809 bp, Arabidopsis thaliana landsberg
aagtttttaagaaactgtgtagagttatattctgctccaactaaagctgttgactcaaatggtcttgagtttcctatcaaacatctcaacatagttgatcctctaaaatacagcaacaacctcggcaaaagtgttacacaaggtactctattgataaaagttatacaaccaatatagcagttgtcaaatattaattattttaaaaacattttgttaggaaatgtccaacgaataagacatgcttttacacttggagctcgaaagctaagagatgttctttcactacctggtgacaccatgggatggagattggagaagttctttcgtaactctttggagagaaatggtaagggacaaaggcaagatgtgaatgatcccgttactgctttcggtactggaagatcagaattatctgaacttagtggagatttcgatagttcctttggaagacttgtgtatgggcaaatgtatcatgggcatagcttacctggaacatttcagcatggctatatcccggttagttctcacctgaatggttgggatattgttcgtcaccttgtgacttaccgaaagaacgagttccatcttagaagtctcaatgtatcaacctctatgcagccttttcctttgcattctttacctaatggctgtcaaaacatgagaaagacgagaggaaccggcacttatattcctgacatggtatgcgattaacccctttgacggacattttggcttaaaaattaacttattgctgcaagcttctgaattgcttctcaatggttgttgcagagtcaacaggtatactctga

SEQ ID NO: 169492 - DNA, 487 bp, Arabidopsis thaliana landsberg
tcagcaaaccttcgtagacacatattccaaagttgccttctgtaagctttatacaacgaagacccctattatcggcagccgatttactaaatgagcgtgtattgccgttctttgaggcgcaagacgttgctatcttgcgaatgcttaccgatcgtgggacagagttttgtggcaaagcagaacagcatgattatgaactgtacttagcgattaatgacatagatcacactaaaacaaaagctcaccatccgtagaccaatggcatctgcgagcgtttccataaaacaatcctagatgagttttataaaattgcatttcgtaagaagatttattctacgcttgacgaaatgcaaaaagatctggatgattggctggctcattataataatgagcgaacacatcaggataaaatgtgctgcggcagaacgccgatcgatacattcctagatggcaaacaagttggaaggaaagagaagagttgacactt

SEQ ID NO: 169493 - DNA, 832 bp, Arabidopsis thaliana landsberg
aaacaggttctcgaccaaggctttcctttataattacatttagatatttgcttaccaatcaaagcttaaagtacttttatcaaccgtataccattaggtacatgaattgtatgttggcatgggcggccgagaaagatttggattgggcggtttgggcggttacgggagtttattatttccgcgaaggcaaacgtggtgtagttgaagcttacggtatgttagatgcgaattggcataatgttcataactatacttatctccgtaggctctccgtcattcaaccaccgcacacaggtattcatcaatcttgcttgtaatttaaccagattattattacatatagtttgatgtaaatttaataaacaggacccggtgtaaagcacaatcatcacaagaaaatatttcatccgttaaccggactctgcctagtgagaaagtcacactgccatgagtccgagctcacgttaggtccatgcacaaaggacgaaccgtggagctattctcatggaggcatacttgagatcagacgcggtcacaaatcttgcttagaaggagaaacagcggtcggaaaaagtgtgaaacttggcaggatatgcacaaagattgagcaaatatcggccacaaagatgcatttgtcgttcaacactagtgacggttcgttggtatgcttagacgtggattcggataacaatgttgttgctaattcttgcaactgtttgaccggagatactacttgtgaacctgcaagccaatggttcaaaatcttctgaggtttatttgttgatttaagctaagagagaataattgtctaattaggattagtgaattgtta

SEQ ID NO: 169494 - DNA, 2786 bp, Arabidopsis thaliana landsberg
atggccgcaatgctaggacgagatgaagatccggtcggagcattgagtgggagagtgagtttggcctccaccagtcacaggagtttggtcggagcttccaaaagctttcgagatgtgttcatgcctcaaactgacgaggtgtttgggaggagcgaacgtcgggaggaagatgacatggagctccgatgggcggcgattgagagattgccgacgtttgatcggctacgtaaagggatgttgccgcaaacgtcggctaacgggaagattgagcttgaggatattgacctaacaaggctcgaacctaaggataagaaacaccttatggaaatgattttgagtttcgttgaagaagacaatgaaaagtttctacgtgatttgagagaaagaacagataggtaagataaaaagcaaacaaaaatttattaaattgttttccaaaatttccaaaaaagaagaaaaaaaatccctttaaatctttatttttcttaattttgttgttccgacaattttgcaatttattttgcgagaacagagtgggaattgaagttccaaaaattgaagtaaggtatgagaatatttcagtggaaggagatgtgcgtagtgcaagtagagcgcttcctactctcttcaacgtcaccttgaatactatggaggttgaattttttttttcattattttgatcttgttttgtttatttttggtagctttcttttgttcaatatcgtcgacaaaataagatctaagtaaagaagataaaacctaactttgtaaatattcttttgttgttgttgattttgaagcatattaagctcttatttaaataaacaatgatgaagctttacttaagagtctttctgttatttgtatatagagcattcttggattcttccacctccttccatctaaaaggaaaaagattcagatactaaaagatatcagcggcattgtcaaaccatcaaggtaattaaagctaatgagacaacggtgtctttgctatattatatctcaacatggaaacttttagatgaaaggagaatatatttgagtttagttacattgttgttgagcatttccaggatgactttattacttggtccaccaagctcaggaaaaacaactttgttacaagctttggctgggaagctcgatgacactctccaggtttgtttttttattagagtaacaagtaagaataatcattcattatctaacccgataatggaaaacagatgtcggggaggataacatattgcggtcatgagtttcgcgagtttgtacctcaaaagacgtgtgcatacatcagtcaacatgaccttcactttggagaaatgacggtgagagagatactggatttttcgggacgatgtctaggtgttggaagtcggtaccagttgatgtctgagctttcaaggagggagaaagaagagggaataaagccagaccctaaaattgatgcattcatgaaatccattgctatatcagggcaagaaactagcttggttacagattatgtacttaaggtactttactttacttgtgctttttctaacaaagtgaaagaacaatgttttgagcttatccctggttaatttcacttgacagatacttggtctagacatttgtgctgacatacttgctggagacgtaatgagaagaggtatttctgggggacagaagaagcgtctaacaacaggtaagactttgagtattagtgtatgtaatacatatcttcacttttctagatgattcgttacactatatgatcatgtctcttgttttaactagcaggagagatgttggttggaccagcaacagctcttttcatggatgaaatatcaacagggttagacagttccacaacattccaaatttgcaagttcatgaggcaactagttcatatcgcggatgtcacaatggtcatttcgcttctacaacctgcgccagagacatttgagcttttcgacgacattatcctactctcagagggccaaattgtctaccaggggtcacgagacaacgttcttgagttctttgagtacatgggtttcaaatgtcctgaaaggaaaggtattgcagattttctgcaagaagttacgtctaagaaggaccaagaacagtattggaacaggagagaacatccttacagctatgtatcagtgcatgacttctcaagcggcttcaattcttttcacgcagggcaacaacttgcttcagaattcagggttccttatgacaaagctaaaactcattctgctgcactagtcacacaaaagtatggtatatcaaactgggagctcttcaaagcatgctttgatagggaatggttgcttatgaaacgcaactcctttgtgtatgtgttcaagaccgtccagataacaatcatgtctttgattaccatgacggtctatcttaggacagaaatgcatgttggtaccgtgcgagatggtcaaaagttttatggtgctatgtttttcagcttgatcaatgttatgtttaatggactagctgaactagcattcacagtgatgaggctcccggtgttctacaagcagagggacttcttgttctaccctccatgggcttttgccttacctgcttggcttctgaagattccattatctcttatcgaatcaggaatatggattggtcttacgtattatactatcggttttgctccttccgctgcaaggtacagtttcttgcttctagtgaagatcactaaagaacttttcttaatcgtcttctattttcattttcttgaactaactaaacttgtgttactaggt

SEQ ID NO: 169495 - DNA, 381 bp, Arabidopsis thaliana landsberg
  unsure (1)..(381): unsure at all n locations
aatctgatgccccctaccgtcatgacgttcgccgcgaccgaccccagcagcggcgccggtttgcaggccgatatcctgaccctggccagtatcggctgtcatccgctttcggtcgtcaccgccgtcacggtgcaagacactgtgggcgttgataacgtcatnnnnnnnnnnnnnnnnnnnnnnnnnnnncaggcacgcaccatactggaggacatgcaggtctccgccttcaagctaggcatgctgggcagcgtcgagaacatcgccgtgatcgcggagatcatggccgattacccggatacccccctgctcatcgacccggtactggcctccggccgtggcgatgagctggccaacgacgagatgcangcagcgatgatc

SEQ ID NO: 169496 - DNA, 800 bp, Arabidopsis thaliana landsberg
gctcacagccaagaacaagtggggttttgcagctgttgacttagtcaacaaatatgaacatcgttatctatcgagcttgctcaagcttgatgcagaccaaattcgaaatcctcaagcccggagtaaattaggaactaaaccccaaactcatacagtgatacaaacatatgatccccaacttctgtatatgatgaatagtgtcaagaagcaaatcaagacagatcttccaaacagggaacgtgagatgcacgcagaggcattacagagcgcaaggaacacaatcacaatagtagcggtcttgattgcaacagttgctttcacatgcagtattaatcctcccggtggcgtctatcaagaaggacctgccataggaaaatcgactgtgggaagaacgttggccttcaaaatcttttcgataagcaacaacatcgcgttattcacatcgctatgcattgtcattcttctggtcagcatcataccttacaggacgaaaccactcatgaaattcttggttataacacataggatgatgtggatagttgttacatccatggttacttcttatgtttcatccgcttgaataactgtagcgcctcttggagtccaaaagtggttgttttacgtcattcctgctatctctagctcgacattggtaggcttgtttgtctatctgggtatatatactggtcacacacatgtctaagaagcccgagtgcaagacaaacatgtcctctgttcctgtagttcctacgactagtgtagttccaaagactagtggaggagacaattggactagtgca

SEQ ID NO: 169497 - DNA, 350 bp, Arabidopsis thaliana landsberg
ttagtacttgccaaaagtgtaattagagaggtagtaactagtaacgagtggattatataaaaaaacagggatatggtatgacggaggcaggaccagtgttgtcaatgagccttgggttcgctaaagaaccgataccgacaaaatcaggttcatgtgggactgtggtccgaaacgcagagcttaaagtggttcaccttgagacacgtctctctcttggatacaaccaacctggtgagatttgtatccgcggtcaacagatcatgaaaggttcgtttttgttttgtctctttaaacacttttgaggacatttaaaagttgtgacaatgaaagctttatactcataaataaaa

SEQ ID NO: 169498 - DNA, 660 bp, Arabidopsis thaliana landsberg; identical to SEQ ID NO: 50788
  unsure (1)..(660): unsure at all n locations

SEQ ID NO: 169499 - DNA, 351 bp, Arabidopsis thaliana landsberg
aggtatggagagcatgagtagaacgggaaagtccgttatggtctttggagacaattcaaaggtatcaaagccaatgcaaagggaaagagaaagaagaagcaacatcaatagtaagaagcagagacccatatacaaccattgtaagtaacaacaagtttcaatcactttttttatttacttgaaacagatactcttatgtaatcgatacttatgcacttgccaacagatgcaaatggttcaggatggtgggactgtgatatggaaggtgttgactcggaacaactcgcacatagagaagtgtgggaaggagttggaacgacaacattcggagatatagttgattggcactaa

SEQ ID NO: 169500 - DNA, 2629 bp, Arabidopsis thaliana landsberg
  unsure (1)..(2629): unsure at all n locations
atgtcttctacatgttcttctccnnnnnnnnnnnnnnnnnnnnnnnnnnnnttccgtattgatttagattggacggcaggcgattcggaggatcaggtagcgttgcgattggaatcgcagctgatggtggctttgcctgcaccgcatgatacagtagtggttgcattgaagggaattggagatgacgatgaaggtggtatagagaatgttggattagagatgagagttgagaaacggagagagccattacgagcagttacgttgatgaaagcggttggttcgggtcagcagtacgacggtgttggcgttttgactaggctaatgcggtctgatatgatgcctgcagccattcctgcgccggctatcgacgttgcttcttcttgtggggtgcattggaagactgtgacttcgttgagtctatctggttgtggtttattggtatgttacttttagcatttcttgaatccaaggaagaaaatttgattaggaattgggttatgctgatccgtctttaatgctttgcaatgttgggcaggtaatgccagttgaagtgactgagttacctctgcttgagaagctatgccttgagcacaataaactgtcagttttgccacctgagatagggaagctgaagaaccttaagatacttagggttgacaataacatgcttatttctgtcccaggtgaccgttatcgcatcttaatgataaaaaaaaaacatattggaatcattagatttttcagctgatgttggttgaaactcttgtgtagtggaactaagacagtgtgtaggtcttgttgaattgtcgttggaacacaataaacttgtccggcctcttcttgatttcaggtcattggggcagagagctgatattactgttttaatttcttcttgaagttagttaggatgctgattaagtatacgattgaaatgcagggcgatggctgggttacgaattctacggctttttggtaatccccttgaattccttccggaaattttacctttgcatcagcttcgtcacttgtctcttgtaaatatcagaattgtgtctgatgagaatctaagatcagtaaatgtacagatagaggtaagaagaaaactcatcagactatctgctgctacttttcattctctaggtcactaagtttatgctaaggataagttttcatgattgcagacagaaaacacttcctattttggggcatctaggcacaagctcagtgccttctctccccttatattccgttcgtcgtcttgtcatcatcctcttctagcatctacattggtgaagataatgcaagatgaaggaaatcgttctgttattggtaaagatgaaaatgcggtgaggcagcttataagtatgataactagtgacaatcaacacgtggtatgttggtttttgttctgtgctatggtttgaaaaaacttctactttcttttgggaacaattaccataactacaggtttgataggttgagcaagcttgtgttgctttatcatctcttgctcgagatgttggctagcaatgcagctgatgaagtgtgatataatgaagccgactgaaacagttctgaaatcttcgtccccagacgaagtgatatccgttttacaagtcgtggtcaccttagcttttgtatctgattccgtttctcagaagatgctcaccaaggatatgctaaaagctttaaaatccttgtgtgcccataagaatcctgaagtaagtttgttgcatttttgctctccttataagaaaaccctatagtttcttcgactgagtatcctttcccttaggttcaaagacaagccttattagcagttgggaacttggccttctgtttagaaaatcgtcgtattctgattacttcagagagtttgagagagttattgatgcggttaattgtcacacctgaaccacgagtcaacaaagctgcggctcgagctttggcaattcttggtgtgtttcttgtgtatcaaatcatcattttgcttgatactctggttgggcattacatagaacgtttttcttctgatgacaggagaaaatgaaattctgcgacgttccataaaaggcaggcaagtaccaaaacagggactgcggatactcaccatggatggaggaggaatgaaaggtcttgcaacggtgcagattcttaaggagattgagaagggaagtggcaagcctattcatgaactattcgaccttatatgtggcacatcaacaggaggaatgctagctattgcccttggtgtcaagcttatgacattggaacaatgtgaagaaatttacaagaatctaggtgtgtaaaattccctttacagcttcgttgacttattggttctggactttactttggatgtttttctataggaaagcttgtttttgctgaatctgtcccaaaggacaatgaagctgcaagctggcgggaaaagttggatcagctatataaaagttcatcgcaaagttttagagttgttatccatggatctaaggtatacacaacgctgttggtctattcacagttgatttcttctcccccgatatagaatcaaagatctagacatttgagaaatgtttttaaggacttatcattttgatattatttagcgtcttggagttttaatgta

SEQ ID NO: 169501 - DNA, 801 bp, Arabidopsis thaliana landsberg
cgtggtcttaatgcagatgattatgatatctgtacttctccaaggcagtatagttatgaaggtccattccgaagaacaagattgggccgcaaacagatatttaaaaaagggagctttcccaagttatcaggccttatatccagaaagacttgactagttaatcaatggttcatagtgctcgtgtcaaagatgatcttggaactgtaaactcaagtagtttatcaatggttcatagtgctcgtgtcaatgatgatgttggaactgtaaactcaagtagtttatcaatggttcatcatgctagtatgaaagatgatgtcggaactgtaaagtcaagtgattctcctccaggtgaagtagaaaaactcatctccaaaaaaaaatgtcagaaagacgataaagccaaaaatcaacagagtctgacagtggttaattctgttaaaagtaatgattcagaggttatagtcgataatgaacacggtctttcggcagataagtctgttagaagtcaagatttggagattcaaccatctctggccactagcttacctgcagaatctgatggtaacatttctgcattctgatttttctctcttttgaaactattgattcttaaactagatcctgttacatcatatccagtaccacaacctatatgttctgtatcatttggtttagtttcatgattatgcgattgcttagcgttgtttgctacttgcattgagaatagaatgcaaaagagagaaagtagctcatgatttgaagcaaattcacttaaacttggttaggttcttagagaacggg

SEQ ID NO: 169502 - DNA, 1401 bp, Arabidopsis thaliana landsberg
atggctgctggtggtaagggaaaatcaagtagaggtagaggtagaggtagaggtcgagttcgcgaatcgtcaaccggagtccaagtcttcagggtaaaaatccagtgttaggttcgagttgtcacggagcctcttctaactcgtcgacccataatttggcgacacattctgctacacaataccataggagccgatcttcatagtatctgccggctattgtaccaaagacgacgccaccccaaatgacactaaccccgactaattcttgttaacccttgatctctggttctcaacaaccgcctcccgttcatcgcaatctgcatcctactcgtcaacgtcaggctcctacgagcgaccaacaacctcctactcgtcaacaaaaggctcctgctcggcaacatcaatcttcgggtcttcaacaacatcctcgtcaaacggagcaacaaaaccctaataatcatgaagaggaagatggggtagaagattgggaagaagatggggaagaagacaaggaagaagaagaagaccctaattcccccgaagaagaagaccctaatgtcgactatcaagatctgttggattctttactagcccttccaggtcgacaacatcttccacttctgtctgaaaagcctatccctggggtcgagactctctggtaatctctatcttttcaccttttttagatatcattttgagttggtgattgagcttagtaaccggttgtgtttttatagatatcattttgagttggtgattgagcttagtaaccggttgtgtttgtatagttatcattttgagttagtgattgaccttagtaaccggttgtgtttgtatagatatcattttgagttggtgattgagattagtacccggttgtgtttgtgaatgaccatctgttttgagagcgtttttcattaagttgttaattctctgttggttgctgataacgttcaaattaccctaagaactactctctcaaataagagatcagttgcagtatttaaggatcgaattcacaaagttcttttgttcaaacaaatagttgaatgtcgagatttagctagtaggtgatgattgaaataaaatgagagcaaagtaaaaagacagcagattgattgtgtggtaaacgattaaataaagagctagaaacagggtattctcaggaaactattggttagtagatctaatgaaagctaggttgttatcgaaccattcttaaactcaaactctaattatggaataaccgatggtgttccgcgaaactccctatatctatagctaagaataaccggagaagccaagagattattaacctaaatatgcattcttatcaagtttgattgttcaccttagtagataagccgatttttattacacacctataaaccaggctcatca

SEQ ID NO: 169503 - DNA, 1748 bp, Arabidopsis thaliana landsberg
ctgacatcatggctaggtgatacttcacctgcttctggatcttttgtctttgggatgaatgctaatgttacaaaccgtttgaccatcttatggcgtggaaacttgttttgggcaagtgggctctggttcaagggtcaatttctcatggatgaggtttataacaagctgggtttcggcgtttcctttgtttcaaccaagagtgaacaatattttatctactcaggtgatcagaactatggtggaacgttatttcccaggataaggatagaccaacatggcactttgcagacaacaatcgatcttaacagtgtgaaacgacatgtccgttgttctcctgtatttggtggcgagcttgactatggttgttacctaaaaaattctatgaactgtgtgcacaaagtttacggagatgtagacaagaatgggaattgtccgcagcataggaattgttggagctttgatgataatttcagagatacagtatttccttccttgggaaatggatttattattagtgagactgatggaagattaagctcatatgattgctatgttaaatgtctccaaaattgttcttgtcttgcctatgcttcaacccgtgccgatggttccggctgcgaaatctggaatactgatccaacaactacaaacaatgggtcgtcctttcatacacctagaactgtaaatgtccgtgtaaaaggtactaaccttgtggatatatgtttatctgccttttataaagtgtctctataactccataatttctgtttggacacaaagatttctggtataaaggagaccactataacgagaaggcggcaacttggctagttgttgtggcatcactattcctaattatacctctgacttgtttgatcatgtatcttgttctgaggaaatttaaactgaaaggtacaaatttctatcagaatcactcaaacttttttacccaatcgtgttcttactaacaagttcaccattttttttgtatttgattcagtaacggttatatttcacgaaatgttctactttttacggggaaaagtcattccacaaagtaagtctcagctgaataacttttgtataagcatgtatgaacaatgtttgctacttttatttagtgatggttgcatacaagttcaccacttcttttgtgtttgatccagtggctgttatatttcgcggaatgttctactttttatggggaaaagtcattccacaaagtaaggctcagctgaatcactttcgtataagcaaacatgtatgcaaaaaatccatgttgaattaagaactgtgtttgtgatgtttggtattttatttagttattggatgcatacggaggaggctttcaacacagagagttggttcaacaatagaccaagaaatgctactacgtgagttgggaattgacaggagacgccgaggcaagagaagtgcaaggaataataataatgagcttcagatctttagctttgaaactgttgcttttgcaacagattacttctctgatgtaaacaagctcggtgaaggaggttttggtcctgtatataaggtagttcagattcttcagattttgatattaacttaagcagattttgatgtaactgctactcccttgaaggggagactaatagatggggaggaagtggctatcaaaagactatcattagcatccgggcaaggattagtcgagttcaagaacgaagctatgcttatgcaaaacttcaacacacaaatcttggtatgtg

SEQ ID NO: 169504 - DNA, 736 bp, Arabidopsis thaliana landsberg
gctgggcaaaattggattgaaggaacacaatggaactaatagatcctgttcttggtgcaaacgtcacgacaagaaagaatcaatgcaatgcttagaaagtgctctgtcttgtgttcaagagaatcctacagaaagaccaactatggattcagttgtttcaatgcttagctctgattatgagtatagtcagcttccaaaaccatcgcagcctggtttcttcagaagatcagcgtcgttttcgatttctttaaatgatgtttctctcacagatttgtctgcacgttaggtttttgcagtcacacaatggaggaagattcaatttttaaaccctaaatttacttttataggaatgtttatgtattctgctaaagtttaatgcttttttagttgggagaaaaataaagtttcgagctttaaaatacgaacttgttttttaaattcgtcttctccattcctgtgactatggcggctactctttggagattatactccaaatctatatgtaattctcttcaaggaatcatcttgaacaaaccctttatccagaaacagcttcttctttcttcgagaactcgaagtttatctttttcctcagattctcagtttggctctgcgacagctgaggtttgttcaaatacaggtgagtttagtttcgaaattcccgctataattcgagttctgttggaatttagttcgaagaatgtattggaccaccaagtgtttgggaaaggccact

SEQ ID NO: 169505 - DNA, 402 bp, Arabidopsis thaliana landsberg
  unsure (1)..(402): unsure at all n locations
atgcacagcgaaaacttcaacatttccacctatttcaaacgcataaactataccggaccggcgggtgccgatacggtcactctgcatgctcttatgcgtcatcagctcttttccgttccctttgaaaatctggatgtacaggcgggcaaagttgtctcgctggcgccagacgacattgccgataaggtgctaacgcaggggcgcggcggctactgctatgaggttaacgggctttttgccatggcgctggaagcgttggggataccttaccgtttcgtggcggcgcgcccgatgttctaccccgcgcggcggccgaaaacccatatggcgttgattgccgaggtagagagccgacagtggctttgcgacctcgggtnnnnnnnnnnnnnnnnncgcgctccg

SEQ ID NO: 169506 - DNA, 1392 bp, Arabidopsis thaliana landsberg
agaaccttcttctcaaaccttttccttgaattcgttaccactgttgctcgctgattcctgatctttgcgaataatatgccatgtatacaaaaacaattggcgtcgatctttccggcttttgggatctgaaatagtatcagagatgcttataagctagcaagggaagcaatagtttctgaaattagcaggcttgtgaatcgtactcgccaagccaaggctacccgcaaaaggacttgcagtatctgtttagatgatgatattagtgctaatcagatgttttgtgttgataagtgtcgtcatcatttttgttccgagtgtatgaaacaacatatagaggtgaggctactctagggaagtgtgattagatgtcctcgttaccactgcaagtctaagctgacttttggaagctgtgttaatcttttgtcacctaaacaaataaagatatggcaacaaaggatcaaagaggattcgattcccataaagaaaataatttaatgcccaaacccgaggtgttcggccttaatgtcggtaaacgagctctctaaatatactaagaacatccacaatggttgactcttagcaaacaaacaataaaaaatttatatgatttaaatattagatgagtaaacttaagccaattgtctcttagttaagaaacaattggtctagatttcaccaaatttaagaaacctataattaaaaaatattatttatctatatttacactttagttttgtttaagagacttaggcttagagactaccattgaggatactctagagaagctggagttaggagaaacttctctaaatctactaaagaagatactagtgtaaggagataatgcttagaatgcagtcaaatattttgcatcaactgtaaagttacatggcatagtaacttgtcgtgcgacgattacaggagattgggtccaaatgctacagctgatgatataacgcttaaagctttagcaaataaaaaaatgtggcatcaatgtgaaaagtgcaactacatgatcgaactttctaaaggatgcatcaaagtaacttgcatgtatatcatcaaagcaacattaaatggaagttccatacccatattagcatctctatttatctctattaataacattcaaagcaacaatagttatatatgtttatcattgcatttttatagtagatgtggacataagttttgctacaaatttggagccaaggctggaggttgccatcatgctcgttcccatacgtatctctcagtgcaaacagtcgccattaccgcctaggccaccaatgtttcctttaccgccaatggaacatccaccagtgtggtgtaccatcttgtgctttcttctcatttgttgcttattttatactttttttttttttttgaaat

SEQ ID NO: 169507 - DNA, 408 bp, Arabidopsis thaliana landsberg
  unsure (1)..(408): unsure at all n locations
gtgatcaaggtgctgtcagatgcgtatcgcacgggctcggttgaccgcgtctacgtagtcggcaataccttcgtcaacaccatgacgcagaaggccgaagcgcagcagttgttgccggtggtcgcgtcgcagagtgaaggtctgcttgagcactgggactacatctacgagcccgacgcagaagaattgctggatgctgtgttgcagcgttatgtcgaatcgcaggtctatcaggccgtgatcgaaaacgccgcgtccgagcagtcggcgcgcatggtggcgatgaaggcggcgaccgacaacgccnnnnnnnnnnnnnnnnnnnnncagttgcagtacaacaaggcgcgtcaggccagcatcaccaaggaactggcggaaatcgtcggcggcgcagccgctgtctga

SEQ ID NO: 169508 - DNA, 1511 bp, Arabidopsis thaliana landsberg
ttgcaggtttatgcatccgggggttcaagctggattattgacagcggatgacaaaccatatgacgggggagaagaagatgttcacctcctacgtcaagaataaggattcccaagattcaataatattcggtgatgggaatcaaggcaaggtaaaagggttaggtaaaattgcaatctcaaatgagcactctatctctaatgtgtttttagtagagtctcttggatataatttgctatctgttagtcaattatgcaatatgggatataactgtttgtttacaaatgtagatgtgtctgtctttagaagatgtgatggttcactagcttttaagggtgtattagacggcaaactttacctagttgattttgcaaaagaagaggccggtctagatgcatgcttaatggctaagacttgcatgggctggctgtggcatcgccgcttagcacatgtggggatgaagaacctccacaagcttctaaagggagaacacgtgataggtctaaccaatgttcatttcgaaaaagatagaccttgtgcagcttgtcaagcagggaaacaggtgggaggagcgcatcacagcaagaatgtgatgaccacttcaagacccctggagctgctgcatatggacctcttcggacccgtcgcctatctaagcatagggggaagtaagtatggtctagttattgttgatgacttttcccgcttcacttgggtgttctttttgcaggataagtctgaaacccaagggaccctcaagcgcttcctcaggagggctcaaaatgagtttgagctcaaggtgaagaagataaggagcgacaacgggtccgagttcaagaactttcaagtggaggagttccttgaggaggaagggatcaagcacgagttctccgctccctacacaccacagcaaaatggtgtggtagagaggaagaacaggacgctcatcgatatggcgaggacgatgcttggagaattcaagacccccgagtgcttttggtcggaagcgtgaacacggcttgccatgccatcaacagggtctaccttcatcgcctcctcaagaagacttcgtatgagctactaaccggtaacaaacccaatgtatcttactttcgtgtatttgggagcaagtgctacgttctagtgaagaaaggtagaaattctaagtttgctcccaaagcagtagaagggtttttattaggttatgactcaaatacaaaggcgtatagagtcttcaacaaatcatcgggtttggttgaagtttctagcgacgttgtatttgatgagactaatggctctccaaaagagcaagttgttgattatgatgatgtagatgaagaagatgttccgacggccgctatacgatccatggcgattggagaagtgcggccacaggaacaagatcaaccatcttcctcaactatggtgcaacccccaactcaagacgatgaacaggttcatcaaaaggaggcgtgtgatcaagggggagcacaagatgatcacataatggagg

SEQ ID NO: 169509 - DNA, 691 bp, Arabidopsis thaliana landsberg
  unsure (1)..(691): unsure at all n locations
ctctaaatggatggctcctaaggtagtgatcattttgagcttagttttctatttcgaaacatataaactaaatattttctgtttcgtaaccacaggtgtatagccttgagccgctgagagttggggagaagaaggaatatgaccataaggctgatatttacagctttgccatagtattatggcagctggttacgaacgaagaaccattccctgacgtgcctaatagcctctttgttccctatcttgttagccaagtaaagtcaaacatcaacttttttttgataaaaacacatcatcctttttaacttaaaaggaataaggttttaaaatgttggatatctttttattacagggtcggagaccaatacttacgaagactcccgacgtgtttgtcccaatcgttgaatcatgttgggcacaagacccggatgcgcgtccggagtttaaagagatttcggtantgatgacaaacttgctaaaaagaatgagctcagacagtagcattggcaaaacaataccggatgggaaagcttatgaaggtgagatggaggaatcagagaattatcttctgcttcaacagcatttatgcaaggtgaagaaacctaaggagaagaagaagaagaagaaattggtgaagatgagatttcctttctttaagaagttcaaggtttggttgtaaaattacaagcca

SEQ ID NO: 169510 - DNA, 3251 bp, Arabidopsis thaliana landsberg
atgccgttcacggataggatcgctcgctttcgcctccgagacgtcgggagactttgtttcccggagtgcgacggaacgagcgacccaaaggctcatctgagatccttccgtttcgctataacacgagcgtacctgacagacgaagaaaacgaagcaggtcattgccgtttcttcgcagaaaacctcgtaggtcacgccctcgaatggtttgctagtcttgaagggaactccattgataccttcgaccagctcgccgccgctttcttaaaacagtattcggtacttatcgaacagaggacgtccgaagccgaccattggagtctcactcaacttcagaacgaatccctgcgatcttacgtcaaaaaattcaaagcaatcaaatcgaaaattgcaaacctaaacgaagaggtagccatagcagcccttcgtaacggcctttggttctcctctaggttccgtgaggaactcactgttaggcaaccagtctctttagacgatgcccttcacaaagctctccacttcgccaaagccgaagaggagctcattgtgctggccttacgattcaaagaatctaaaacgcaaaacgctccccttgcaattaagaaacccttcaaaaaggagaaccacacgcaggggcagcataccttattcgcaattaagagaatgcttcaaaatcctaaacaaattcgaaatgaaattaaaccccgagaaatgctctttcggagttccctcaggagaattcctcggatacctagtaaccgaaagaggcatcaaggccaatcctaagcagattgcagcattgatcgacatgccatcgccaaaaacggcacgggaggtccaacgactaaccggccgtatcgccgccctcaacaggttcatatccagatctaccgataaatgcgtccctttctatcagctcctccgaaaggataaaaagtttgattggaacgaggactacgagcaagccttcaaataattgaaagcgtacctgtccgaaacacccatactcgcaaaacccgaagaaggagaaccgttgtacctgtacacggcagtctcccgaaccgcgataagcggcgtcctggtgagagaagatcacgaaggacagaaactgatctattacgttagtaaaacattgatagacgccgaaactcattatcccgcaatggaaaaactggcactggccgtagtcatgtccgctcaaaaactgagaccatattttcaatcacatcccatcgtagtgatgacgtctcaaccaatcagaactattctgcacagtctgactcaatcaggtcgacttgcaaaatgggctatagaattaagtgagtacgatatagaatatcgcaccagaactagcctgaaagcacaggtcctagccgactttgtaatcgagctcccgttagcggacctggatggaaccaattccaataagaaatggctcctctacgtcgatggctcctccaaccgacagggatccggagtaggaatacaactcacctcccccaccgtggaagtcatcgaacaatcgttccgactcggattcaacgcatcaaataacgagtctcagtacaaagccctcattgctggcattaagctagctcaaggaatgggaatctgcgatatacacgcccatggaagctaaagacgagcgcatggaagcgtacctcaaactagtcaaaaccttgatcaaacagttcgaatagtttgaactgaccaggatccccagaggggaaaacacctctgtagacgccttggcaactcttgcctccacgtcagatcctttcgtcaaaagaattatcccagttgaaggaatagaacacccgagcatcgacctaacggtcaaacacgctgggacggaaacctcgacaacttgcaacttcacgcgagtaacctgaagcaccaccgccgcagctagagctctcgtagcagccgcggaggtaagtgcagcggagctcgaaacccccgaacaacctgccccatatgaacctgaaccgtacaacgactggaaaatcccaatcatcgattacatcgaacgagggatcacacctcccgacaagtgggaggccaaaaaactcaaagcccagagtgcaaggtactgcatcatggaagggagacttatgaaacgcagcgtcgcaggaccctatatggtgtgtacctatgggcaacaaacaaaagacctcatgaaaagcatgcacgaaggacaatgtggtagccactgtagtggacgtaccctcgccctcagaatcaaaaagcaaggctacttctggccaacaatgctagccgattgcgtagctcattcactcaggtgcgataaatgccaacgacacgcacctactcttcatcaacctcccgaggaaatgtcctcgatatcttccccttacccatttatgaagtggtccatggacgtcgtaggtcccatggaagcctccggtaggaagaagagactaaaaaacctgctggtcctcaccgactattctaccaaatggattgaggctaaagccttccaacaggtaaccaagaaacaagtcgaggacttcctatgggaaaatatcgtatgccgacacggcataccttatgagatcgtcaccgataacgggactaacctcacctcgggcaaaatcaacgcattttgcgacaagtggaagataaatcttacaacatccaccccccgttacccacaaggtaacggacaggcagaggccgctaacaaagctatacttagcaacatcaagaaaagacttgattccaaaaaatcaatgtggtccgacgtactccatagagtcctctgggcctaccgaattacacctcgcaaatcaacgcaagaaacactgttctctctcccctatggcttagaagcagtaatccctgttgaaaccatagtaccaagcgtgagaaggaccgccagtcctgctaactcggacctaaacacgcaaatgttacaggaaaacatggacttcatcgatgaacgcagagatcaggcaatgatccgagttcaaaactattaacaagctgccgcccgcaactataaccacaatatcaaaattcggagattcgaagtgggagagctcgttctacgaaaagtgttcagcaacaccatagagctaaacgccggaaagttggaaaccaactgggcaggtcccaatcgaatcaccgaggtggtacgtgacgacgtctataagcttgtaaaagttatcatcggagtacctgagttacggccttgtaacgccatgcatctcaagaaataccacgaatag

SEQ ID NO: 169511 - DNA, 1249 bp, Arabidopsis thaliana landsberg
cttttgcaatgaaactgttaatgatagaagaggtttatgatgaaaagaccgagtctttgtcaaaatcagaagatggggaagtcacagtagaagttcaggagagtgacagagaaatccctcagcaaccagatgtgaatgaaacaggtgaatttaggatgttttggattatgtttctgtatcactaaactagcattttttaggttttggataacaaacttgaagagtttactagttatggttgatgtaaaatggaatctcgttttgtttcaggaaatggaatgaagtctggggagtttagattcattcaaggtggtactttgagcaaagttccaaacgattccttacataaaggtgaacacttttgctaacatgactgtagagaacacacatgtggttcaactataattttttatggttatgaattattgatcaaactcatttcctcctacttagatacattaatgctggtggttttgattgctagttttgctacatgttcacaggaccaacatttagcaatcggattcatagtgataagctaaagtaccgaccaaagtcaagcatcaggcctataacgagaagctcaacattgatgaaacctactgctagcgttttagcaaaacaagataatgccaggtgattaggagaagatataattcttggtatatatgtcttttcgcaacttaattcaatgaacttaatacttggtttgttttgttgatctcctagactgcatatgcaagtggatgaaattaagtgtctttcatctgaaatccaatctgctaaaagacagaagctcgatggtggtctacttcgtaaggtggagtttctaatagccacgagtttcgttgtatcaaattccttttaagaattacatgattaaagcatttgaatagtggtagtaatagattttgcgcttatttatctaatcgtagaccttcaaatacttttgtttcaggttgctgaaccggctcaagaaacaaatttggtccataaggcactcaagaaggtttctatctgtttctttagttctccttccacctccttcaaccttcttgttgttaatcattcaattggttgttatatggttttgcaggatcttgataaagactctctacataccaggatgaagcatactatcccacaggagcctgattctgcgacagctaataaatcgtatacgacacatatagacactcctcctagaatagctgttaatgtgtatggcagaaatctctcttatatccat

SEQ ID NO: 169512 - DNA, 592 bp, Arabidopsis thaliana landsberg; identical to SEQ ID NO: 68466
  unsure (1)..(592): unsure at all n locations

SEQ ID NO: 169513 - DNA, 1518 bp, Arabidopsis thaliana landsberg
gtagtggtagaaggtaccttatatcgatggcacaactcgcagagatcacggtcccgccacttccgattgtacaaccagacaatgaagaaggctggacagttcaagtcttccggtcgatagatgatggtgcagttgaagggttcccagaggatccacgtgaagctgcaagcataggacttataagcggaaaagataacgtgatcgaaagaagcattcaagacgcttacgttaatgccataaggagagccaaaaacttcatctacattgagaaccaatattttctaggaagctcctttggatggaactctagagacataaatttaaatgagatcaatgcactacaactcattcctaaagagatttctctaaaaatcgtgagtaaaatcgaggcaggcaagcggttttcggtgtatatagtgattccgttatggcctgaaggtaaacctggttccgcatcggttcaagcaatactagactggcaaaggagaacaatggagatgatgtatactgatataatcattgcactacgtaaaaaaggtttagatgcaaaccctagagactacctaacgtttttctgcctcgggaaccgggaaaagggcaaggtgggtgaatacttgcctccggaaaaaccggaggctaattctgattacgcaagagctcaaaaatctcgtcggttcatgatctatgtccactctaaaatgatgattggtaagtctaaatttacctttcataactcatcatttttatttggctttaaggaatgtggcgtttatcagagacaacaactaggattagtggtgggtcatgtcgggctgaagaccgaatgagtctagttaatttcgttaggcccattttttccgaatatagtgttaaattataataaaagataaaaaaaagtagcggttttacaataagtgcatcgtttgtttgataaaaaaaattaaacgtaaaaagtttataaaaatttaacttactgatttaaaccaaaatttttaaattttgtttggccaattgctacaaacgtattaagaacaatcaaaaagctcttaacatggttcatatttctatgcagttgatgatgagtacataataataggatcagccaatataaaccaaaggtcaatggatggaggtcgagacacagagatcgccatgggagcatatcaacctagccatctcctatctactaataatatgaggccggttggccaaatatttagcttcaggatatcactatggcttgaacacctacgagtaacaaccaatgcatttcagtgccccgaaagcgaagagtgtataagaatggttaatgcaacggcagacgagctatggggactatactcagcacaagagtatcctcgaaatgacgatttaccggggcatttgcttagttatccgattagcattggtagcaatggggaagtaacaaatcttgctgggactgaattctttcctgattctaacgcaaaggttgtaggcgaaaaatctaattatcttcctccaatccttacttcttag

SEQ ID NO: 169514 - DNA, 1578 bp, Arabidopsis thaliana landsberg
gggcgtctttatctggtattgagcggattagaaaaaaacatcctgcaaagtgcaagtgtacatgagtccaatgcccttgagcaggcactagcagcccaatctgttttccagttaggttttctgatggttctaccaatggttatggaaattggcctagaaaaagggtttcgcacagccttgggtgatttcatcataatgcagctgcagcttgcctctgttttcttcacgtttcaactgggaacgaaagcgcattactttggaaggacgattttgcatggaggctctaagtaccgagcaactggtcgaggttttgttgttttccatgcgaagtttgcagaaaactatagactatattcgcgaagccattttgttaagggactggagttggtcatactactagttgtgtatcaagtttatggaacttcgtaccgtagctcaagtacttatatgtacatcacattttcaatgtggttcctggtgacttcttggttgtttgctccatttatattcaacccatctgggtttgagtggcaaaagacggtggacgattggactgactggaaacgttggatgggaaaccgcggtggcataggaattgttcttgacaaaagttgggaatcatggtgggatatagagcaagaacatctcaagcacacaaatttaagaggaagggttctagagatacttctcgctctgcgttttctcctttaccagtatggaattgtctaccacctcaacatcgctcgccgccacacaacatttctggtaaagtatttcggcatataagccatgatacttccctcttcgatagctttgaaaattttaacaactttgcccttttcttctctaaggtttatggactctcttgggctatcttgttgtcagttcttctcgtgctaaaggtaaggccctgaaactaatctgttttaagcttttacccacatcaaaaccagaaaagaatcttcagccaactctattagatagtctttgaggttttaggaaaaggttttgtttgtctcttgacatttatgattgtgtcgtttaatcatttgacagatggtatcaatgggtagacggaagtttggtacagattttcaggttatgttcaggattctcaaggcacttctcttccttggtttcttgtcagtcatgactgtattatttgtcgtctgcggcctcacgatctcggatctctttgcctccatcctcgctttcttacctactggctgggctattcttcttgtaagcccacacaactttcttaactgcccataaataatctgttctttccatgagaaaaataagtttgtaatccgttgctatgttttgaagatcgggcaagcgctgcgtagcgtgttcaaaggattaggattctgggactcggtgaaagagctagggagagcttacgagtatataatggggcttgtgatattcacacccattgctgtcttatcgtggttcccatttgtgtctgagttccaaactagattactgtttaatcaagccttcagtcgcggtctgcagatctctatgattctcgccggaaagaaagacaaagagacaccttccaccaagtag

SEQ ID NO: 169515 - DNA, 3234 bp, Arabidopsis thaliana landsberg
gaagcgacctccaaaacggtccaaccaatccccgagcaccgatcgatccgcgtaacgtcgtggatatggaaacattccgcaactatgcagcacaaacaaacgcgaacatggctcaaatgcattcacgaatgcatctaacagtgagcgatgctcccaacatagatcgagtgatcgaagaaaccaagcgcaccccattcacggtcacaaaacgagcgacccaaaggctcatctgagagccttccgtctggctataacacgagcgtaccagacagacgaagaaaacgaagcaggtcatttccgtttcttcgcagagaacctcgtaggtcacgccctcgaatggtttgctagtcttgaagggaactttattgataccttcgaccagctcgccgccgccttcttaaaacagtactcgatactcatcgtaaacaggacgtctaaagccgacctctggggtctcacccaacttcagaacgaatcccaacgatcttacgtcaaaaaattcaaagcaatcaaatcaaagattgcgaacctaaacgaggaggttgccatagccgcccttcgcaacggcttgtggttttcctctaggttccttgaggaactcaccgttagataaccggtctctttagacgatgcccttcacaaagctctctacttcgccaaagccgaagaggagctcgctgtgctggccttaagattcaaagaatctaaaacgcaaaacgctccccttgcaattaaaaaacccttcaaaaaggaaaaccaaacgcaagggcagcataccttactcgcaatagaagaggcagctgaggacgagagtccagaacttgacctcgaaaaatattgcaagtaccacaaaaaaaaggacattccaccgaggagtgtcgcgccgttaaaaaattaatcgcaactgggggcaaaactaaaaaaggttcaaaccccaaagttgaaacccctcctcccgacgaacaggaggaggagcaaactcccaagcaaaaaaaacgggaatgaacaccggagggaagtgactctcccccacctgttaggagagaatgcatagacctagtctttgtagaactcgatctaggtcgcaggacaggaaggtcagtcaccacacctccccccgccccgcataagaaaaacatgaggtttccattatgtctctcgaaattctgcagaagcgcaaccgagcacctctcccctaaacgcatcgattttatcatgggagggtctcagctctacaacgactcaatcaattcgatcaaaactcataagaggaaagcagattcttacacaaaaggtaagagcccgatgatgggacctgaccaccagatcacattctgggaaagcgaaaacaccgaccttcgataaacctcacgatgacgctctcgttattcgaatcgatgtaggcaactacgaactctcccgtataatgatcgacacgggaagctcagttgacgtactcttttacgacgccttcaaaagaatggggcacctcgattccgagctgcagggtaggaaaacgccacttaccgggttcgctgcagttacgacctctcctctaggaaccatccagctcccaacacgtcgcacggggagtaagacaactcacgaacttcctcgtggtcgataagaaagctcctttcaacgtaatactgggaagaccatggctacacgccatgaaagccgtcccatcgacctactaccaatacattaaattcccctccgacaaggggatagcagtcgtatacggcagccagcgcagctcccgaaaatgctatatgggtggttacgagcatatcaaaaaagccgaccccgtggtactaatgatagaggacaaactcgtagaaatgaaaacagtcaggtcctccgacccttctcaacgtggacctcaaaaatcgctgataacgcaggtctgcatagacgaatcagatcctaaacgatgcgttaggataggtcacgacctcgaccaaacaatatgagaggatctcgtaacctttctcaaggaaaacaaagacagctttgcctggtcaagcgcaaacatccgaggaataagcctcgtggtaacctcacacgaactcaacgtcgatccgacctaccgacctataaagcagaaacgtcgcaagctaggtcctgaaagggctaaggctgtgaacgatgatgtcgactgattgctcaaaattggatcgataagggaagtaaaataccctgactggcttgccaacccagtcgtcgttaaaaagaaaaacgggaagtggagagtatgcatcgactttacggacctgaataaagcatgtcctaaagacagtttcccattcccgcatatcgaccgactcgtcgaagccattgtaggacacgaactactgtccttcatggacgcattctccgggtataaccaaatacttatgcgcctagatgaccaagaaaaaacagcttttattactgaccgaggcacctacttttttaaagtaatgccctttggtttaaaaaatgctggagccacctaccaacgattggtgaacagaatgttcgctgaccagataggtaaaacgatggaggtctacatcgacgacatgctggacaaatcatgtcagctcgcaaactaagaccatatttccaactaagaccatatttccaatcacaccccataatagtgatgacgtcccaaccaatccaaaccattttgcaaagcccgacctaatcaggacaacttgcaaaatggccatagaattagcttaacgtctttgaaccatattttataaactttctcagattgttatgtgttgttggaaatcgttattatcccaacagagaaaaaaagaactatatttatttatacttttatagtgtttgacacattaactttttcattagagctttttgggtatgtcctttttaattttatcagttaaatatctttgaaccatgttttatgttttgtttttccaggttaccgtaggcattgatattattgaaaaaaaaagacaaagtgaattatcatgattcataatatttaggaaaaaattaactatatctatttgttgacaaaaaaaaagaactatatttactaatggtgtttagcacaacacttttttcattggagctttgtgtgtatgtattttcttattttattatctaaatatccttaaaccatgttttatattttcattaggttacgtgtttcttaatggtgttaatactattgcaacacaaattcctctttttgtttaggtagtgaag

SEQ ID NO: 169516 - DNA, 779 bp, Arabidopsis thaliana landsberg
gctcacatatattaaactgcttttccaaatcaaaatcttttgtagtttcaacgcttcctatgaagacttgctcacatcggagactccggtcaacaagccgatccctctagctgtgagttcctacacttctccaaaaacatttactctctgcttaagttggtttttgtcgtctgtttcctttgagaataatctcttgtcatagctatcaaacatctctttcaaccctcactggtgtggtgttaactttgttgcaatcttctttgtaggaaatggtggattttctgttcgatatctggcacggggatggtcttttcgagtaggtaacagagaggggattctcagtattcttggtacagaaatttagttgcaggatggctctaatccatttaggtttaaaggatcaaagtcctttatctttagaagaaactcttgttttttccattgacttaccatgaagatatataactaaattaggttcttttgagattctcttccatgataaattcaccaaacctgtatcatgcttctgatgccatttggttcttttctttaagattgacactttagtagtggaatttaaaagaaacggtagagacgaactttgggattgggttaagaaaaacgtgtatgatcttgataagtgcgactgcgtttggtgattgcttgcgattgtgtatttaggaggtgtcgaaactcgaaacgcactcactcaaaaatttcccattgaaaagtcaaaaagaaattcgttgaccgtgactcgtgaaaataaagcgtcttaa

SEQ ID NO: 169517 - DNA, 1736 bp, Arabidopsis thaliana landsberg; identical to SEQ ID NO: 33017
  unsure (1)..(1736): unsure at all n locations

SEQ ID NO: 169518 - DNA, 891 bp, Arabidopsis thaliana landsberg
acgacatggttcatgcatgtgtttcatcaaattctatcaagcatcctttcaaggaaattctaaatatacgccatattcctcagcttgttatggcgattctcttgccaacgtttcagatcctcactggcgtaaactgcgttctcttctacgcgcctattttgttcattacaatgggatttggaggaaatgctttactctactcatctgtccttgtaggagctgtacttgttctctcaactttgatttccattgcattagtggaccgactaggacgacgagctttgctcattagtggcggattacaaatgatcatttgtcaggtaaaaatgttaccaccatatggatactatagataaaaaacttttagtgcaagtctaaagggttttggtttttgaattagtttcttaactataacacataatgtatttcatggtctcattgttatttgtaaaacaggtcatagtctcagtgatcttgggattgaaatttggagacaacaaagagctatcaaaagagtactccatactcttggtcatctttgtttgcctctttattctcggctatggatggtcatggggtccgcttggctacaccataccgagcgaaatatttcccttggaaacccgttccgcggggcagagtatcaccgttgctgtcaatctcctcatgtccttcatcatttcccaaactttcttatatttcctatgtgctctaaagtttggaattttccttctctttgctggttcggtttcggtgatgaccatctttgtttacttgcttttgcctgagactaaaggagtgccaatcgaagagatgacagtcagggaacattggttctggaagaaaatattacctacaaatcttgaagctgagagcagccatgcacaatag

SEQ ID NO: 169519 - DNA, 543 bp, Arabidopsis thaliana landsberg
atcctttttaactcgtttgatatttcaacatacaagtagctaggcatgtaagcttttaaagttgtttctgccatgagctttgtcgctgtggagctgaacttatattatgtgtcgcaatgtctatagtcaatggcgtctctgcttactcgattttaattggttttggggtttggttagcacatatcatactgacacatatatgaatttttcattactcgactgtcactttgttttgtttgtattagaagattaaggctgtctactgttttttcaagtaactgtttcttgtgtaggagaggagatgagtgatcttgcggctgagtattcgatttgtccttccaaaaaggacggtggtatacttggatgggtaaaactgggtcaaatggtatgctctcttttttataatattctctatttattttggttatattgttgcatagacaccttcagatctataggacccttgctgtcaataaccttgatatttcacaaacaattgggtgatgtaacagtccctggtgaataaagtttcagtaatgacat

SEQ ID NO: 169520 - DNA, 493 bp, Arabidopsis thaliana landsberg; identical to SEQ ID NO: 43366

SEQ ID NO: 169521 - DNA, 574 bp, Arabidopsis thaliana landsberg
gcattgaggttcactgagagagctagagctaggatccaccaggctggtgaagagtgcctcactttgatcagctcgctcttccgtgccccatcttggtcagaacacggtatatcccattcttgtttcactcttagttcagttgtcgaaatgtgaaaacttgtgctaatcgtttacttgttcgtgacgtatgtagcttagttcagttactatgtctcgtttcatgatgattggaatttgaggttactgtcctaactttcaaaatctagtggcttgtaagcctttgtttaaaaggctatctcgatgaaaattagagaatatctatctcgaggaccacttgtactcagtttacaagggttatattttcactttttattattgcagtagcgattgatgtagcattccgtaacgattgcaggttctgcttagaggtcctaagaacgcacgtgaagcagtgaagcactttggaccagctcctggtgtgcctcacagccacaccaaacaagatatgtacgtcaaactggtaaaaaaattgagatagcaagaggaagaagaaggagcagaggtattcaaggtc

SEQ ID NO: 169522 - DNA, 552 bp, Arabidopsis thaliana landsberg
ccaactaatgttttagtcaataccgctgccaggtttattttcaagagcttggatgccacccccgaggactggaatgatattctttctgtaaacattaaggggacctcactggtgacaaaatatctggtggaacagatcaaagaaagtggcggcggaagtatcattaatttttcttcggtaagcggtttcgttggccagtcaaattttgccacctacaatgctactaagtttgccatcagggggcttacaaaatgctgggcacaagacctggcggcttttaatatccgcgtcaatactatttgtcccgggtatatttataccaaggcctttgtggagtcttgccaaaaattagggctggaccttgaacaggaagataaaagggcgtctgctatgcatttgctgaaccggcagggtaggccggatgaaggggtgcatcccagattgtcgcgtctaagctactttttttaatttattttttcgaaagttggttttaaccaattggataaaattaacccatttttcattctcataagtaactctaaggttgagcat

SEQ ID NO: 169523 - DNA, 457 bp, Arabidopsis thaliana landsberg
atgtctgttgttgttggcgtcgatgtagccaagcgatctttcgatattgcaactccacttcccaatgggaaagtccgtaccaaagccaagctggccaataatccgagtggttttgagcaattcgcaacctggcttgagcaacatgccgaaccacgtgcctgggttatcatggaggccactggcacttatcacgaagcgcttgctgagtgctttcatgccaagggttaccgggtgtgtattctgaatcccgccgtgattgccaagtttgccggagcggaccttcgacgcgtcaaaactgataaggctgatgccaaggttattgctgcttacggtcagcagaaaaaagatttgcttcgtcagtggaagcctgagccgccagctcagcggaacttgcgggccttggtgcggcgtctggacgacctgaaagagatgcagcagatggagcagaaccgtctga

SEQ ID NO: 169524 - DNA, 1400 bp, Arabidopsis thaliana landsberg
aaagcatgtagactgtgcaaaaaagcagtcaaatcacaatgaatcagtggccgtctcgagaagtttgtaaggaactctcattattgtatatagttgatcgaaatttaacatgatgatatcattctagcagattcagatattgtttagccaaaaaggacattcctttacttcaggtttgaaactaaatggatatctttagtttattttgttcttcacaggttggatagtatggattctaggtactcgcagacttctgatactggtctaaacagatgcactctcaatttacaaggagccaacacgtggtggtggtgctcagggaaacaatgtatcttctggttcctttaagaaagggtttagaaaaggttctaaaggtctttggtctataggaagatcaattggtttaggggtttcacgagcagtttttcctgaagatcttaaagtatcagagaagaagatttttgatccacaggacaagtttcttttgctctgtaacaaactgtttgttacttcttgcattctcgctgtgtctgtggatccgctcttcttgtatcttccgtttgttaaggataatgagaaatgtatcggtatagaccggaagttggctattatagcaacaacgctgcggacagtaattgatgcgttttatctttttcacatggctcttcggtttagaacagcttttgtcgccccttcttctcgggtttttggtcgaggcgaacttgtgattgaccctgcacagatagcaaaacgttatttgcagcagtatttcatcattgactttctctctgtgcttccacttccacaggtaataacagaaatgcctctcccagtgttctcttatcttccattgtttctttgttctctaaatttttatgactagtttatgttattctttggatttttcagattgtagtttggagatttctttacatctctaaaggtgcaagtgtgctagcaacaaagcgggcattgcgatctatcattttagttcaatatattccaagattcattcggttgtatcctttgagctcagagttaaagagaacagctggtgtttttgctgaaactgcttgggctggtgcagcttattacttgctactctacatgctcgcaagccatgtcagtacatactatctttggtagctttcctcttatattctcaaaagatccattcatcactctctcttttttcccttatgtttttatcagattgttggggctatatggtacttattggccttggaacgttataatggatgctggaccaaggtttgcagtaatagcagcttggactgtcacagaaacttcctgttttgtggtaatgaaaaaatggatggttatgcagcttggactaccatcaaagaaattctggttctggcaattaaaattgcccccag

SEQ ID NO: 169525 - DNA, 892 bp, Arabidopsis thaliana landsberg
tactgtggtttaataagcactagtttgattctaggtttggtaagaacaaaggtaagctaactcggaagatcacaagtgtttttacaaacaagtttgttgggccatattacagttgaagatgtgtgccatctgaaagaagagaaagatacttcctcgaattcgcggtaaaaatctaactcctctcaatcttcttttttgttttttataaatgtgtaactaacatcaactctcattattttttagaaaactcacacttggatccgtctctgaatagtgtgattgaccaaaagttctataagatttgtcaaatgcgtatgaaaagaatatgtggattgagaccacattgtggggagaaatgtgtgactattgggacacagaagaagccaaaacaaagagttcaatcacatcatcagctcaaatgtctaatcataatggtcttggtcctcataagcatgtatcggacccaaagtcgttcttacaaacctagcaagagatggtaagttcttttgactatgaacatttgttttctttacttataaaatgttagagcatctacaatggtagtttcttatcaaagtctctcaccaacaaaaataatagcaaaataataaataatactttttaattaagacagtttttttaaaaaaatgtgctagagtttatcatttaagagatcatgaaagacttttccaactattttaagaaactcttcaaattaaataatattattttttattttattattactttagtaggtgagaaactttgttaagaaaccaccaattttcttgttcttaacaatttgacttgttttgttttcaacatttcaggaaagtgaactaggaagaccgcctactattggtgaaagttttttcaaaaacttaaacccaaa

SEQ ID NO: 169526 - DNA, 534 bp, Arabidopsis thaliana landsberg
  unsure (1)..(534): unsure at all n locations
cctgctgcttgagaaaggatttaaggtaaagctcaattttgtggttttcgcggggaaaaataccgaagacagggtttcttgggtggccttgacgcaggttcacgacttatcggtacgcttcctggaggaaatgccttttaacgggagcgctgcctttacgccatcctggaactatcaacagatctacgaatatatccatcaacattattcgcccattgaaaagctggaagatggaaaaaacgccacttcggtgaattataaaatacgaggttatcgcggttcattcggcatcattccggcgttcagccgtaccttttgcggtacttgcaatcgaattaggttgtcggccaccggagaactcagaacctgcttgtacggtcctgcagtagccaacttgcgtgatctgctgcgtagcggagtaaactcagccggattaaccgaggaaatccagcgcgcggtcagacagcgagaaaaggacngatttgcagacgaacttggaacctgaatccccgtcccatgcctctatgtcggtcc

SEQ ID NO: 169527 - DNA, 1553 bp, Arabidopsis thaliana landsberg
gttgcggccatgctccgttgccggtgatgtatggattcgacgaagagagtaataataatgtatgttgttgttgttgttgatgagatgatgagattcgttagggttttgagacagaagctaccgattaaggatcgtttgatgaagatgaagatcgttaagaactgtttctccggcgccgagatgatcgagattctcattgattacttggattgcgggaggaagaaggtacgtgtgatattcaaaacttatgatcctgtgttacgcacctatgttaactttacgtagacgttgaccacgtttgtctcaaattaatattattcgattaattcaaatcttaaaagattttctttccaatggataattgattgaccaattaattatatttagttttggttaatttagtttttattttttggcaccatattcaaatatcaagtaattagatttatattttcggttattatgcaggctgttgaaataggcaagaggttagccgagaaacacttttttcaccatgtttttgggtacgtccgtacatatataaatcgtgtcctttttttttctttggtaatatacataattaaatattcttgatttagtgaaatgttcataaactttatgtttgttgtatagagagaacgagtttgaagatggaaatcattactaccgtttcctagagcacgagccgtttgtttcaaaatgttacaattttagaggttctaccaacgacatggagccccaaagtgcagccattgttgggcagaagctattcaaaatcatgacagctattctcgagtcttattcttccaatgaccacactagtgttgattacatgagaatcagccagagtgaagaattccgaaggtagaatttggactcaagagtgcataaacggattttagtctaggaatgcttactttagttctatcgacattaatttggttatgctttaattgtgtataaacaaaggtacttgaatttggctcaagacttccaccgtttgaatcttgtggaactctcaacggaagagaagttagcattttttttgaatttgtacaacgcaatggtgattcatgctttgatcagtatcggacgtcccgaggggttgatcgcaagaaggtcattctttacggattttcagtatgttgtaggaggctactcttattcacttagctccatccgaaatgacatccttcgtcacggtcgaaaaccctcttatccatttatcaggccaccttttaataacggcaagacacggcatgaggtaattttagcgttccatgtttgtttgtaatttactcatatcggtgattttcggattatcctatagctctaattctatggtttaatgtcagcttggtcttctaaaactgaatccattagtacattttggcttatgcgatgggaccaaatcaagtcctgtggtgaggtttttcacaccgcaaggagtcgaggctgagctcaaacgagcagctagagagttttttcaaaatggtggaattgaggttgtcttggacaagaggaccatacatctatcaagaatcatcaagtgg

SEQ ID NO: 169528 - DNA, 632 bp, Arabidopsis thaliana landsberg
  unsure (1)..(632): unsure at all n locations
cttcgacctgtgcttcctcgacctgcgcctggcgaaggacaacggcctggacgtgctggcccagatgcgcctgcaggcgccctggatgcgcgtggtgatcgtcaccgcgcattccgccgtggacaccgccgtgaacgccatgcaggccggcgccgccgactacctggtcaagccctgcagccccgagcagctgcgcctggccgcggccaagcagttggaggtgcgccagctcaccgcacgcctgaaggccctggagggcgcccaggccagccaggccgagcagctcgaatcccacagcccggcgatgaccacggtgctggagaccgcgcgccagnnnnnnnnnnnnnnnnnnnnnnnnnnnnnnnnnnnnnnnnnnnnnnnnnnnnnnnnnnnnnnnnnnnnnnnnnnnnnnnnnnnnnnnnnnnnnnnnnnnnnnnnnnnnnnnnnnnnnnnnnnnnnnnnnnnnnnnnnnnnnnnnnnnnnnnnnnnnnnnnnnnnnnnnnnnnnnnnnnnnnnnnnnnnnnnnnnnnnnnnnnnnnnnnnnnnnnnnnnnnnnnnnnnnnnnnnnnnnnnnnnnnnnnnnnnnnnnnnnnnnnnnnnnnnnnnnnnnnnnnnnnnnnnnnnncgcttca

SEQ ID NO: 169529 - DNA, 3053 bp, Arabidopsis thaliana landsberg
tcattgagaagtctctgggttataggaaattacgccctacgacgaggagaaataccaaaaagaatgaagaggtaaagaagaaatccgtcaaagagcaaatcatcaaagagccaaccgtgaaaggtaagagaggtagaaaacctgtaaggcgaaaaagttgaccatataactatatcctgctcttgttattaatgagaagggagaagctgatgaaacaaaattacctgctcttaatgtgaagagagtgtgttgttgtctctaaaaaagctgaggaagtcaacgaaaacactgtcaatgatggttagaaggaaggtgacagtgacgtatgagatgtcacataccagtttatcggtgaaaacggaagcacgttccctgagtctgatgatgatgaggaggaaaagatgaggattgatataatcaaagctttaaagacgcagaatattaagctgtctacggatgggagtgcattgaatccactctttaatctctcaacacgggtttttccttatactggagacaacagactgaagtgcatgaggaagaattgtgtgccttcagctggaatatatgatcctctatcaccggctgatacagccaaattgtagaaacttaaggattacttatccccattctagtatgaccctttataccatattaagttgttaattacagcttgttaacattatttctgtatattaacttgtgtttatctgttaggaatctcccattgggcagggcaacagacgatgttgatttctacagggttatcatctctgaaagaaagcactgaccaaccagagaatatggatggttgttcgatagtgtaagtattacattagcaaagttattagtgtgttttgtcagagttttactacattatggctgagttattggtgtgttatgctacattatggctgagttattagtgtcttttgtctaagttatgttatattgtgtctgggttattattttgttttgtctgagttgtttttttttgtacaacatgtggctgcgttatatagagtccttaggaataggtacaagcgaaatccctgcccattccacaacaaacgcattgcatttatggaaatggtttgcttccagataatcaacagacaaatatgaagtgaatagaagatgtgaatcacttgtatttgattcaccaaacaagaggcgatcactaggtggcactacacatggaccagattaaggggcacattgattgctatgatatcattgtgggatacgttacaagaaactgaatagaattgattagaatgttgtaggccgtttacgagaatgattccagcaatgatgaacgtgctaattcctactacaatcggtgaacataggtttgagcagtttacattcaaaaggagtagtgtctgcagggtccctcaaaacttacaagttggagatgcgtcgtgtactcgtgttaattttttgaatgtctaacgcttggtataactttcaatgacatatgtgatttcaacctatacaggttaagatggcagcatatatctacaataaggcacctaatctgcttggacagtttaggattttgacttgggatcattatattaacttttgaatcgtatttttttcaacaatccacaagaccaatgaattttgttttctttataatggtttgatttcaaactaattttcatatcttggccttttcagataattaaattggaattttacattacaattattcttctcatagaatcaaaatgataaatctatattaaatatattactatattccaaacttttttggtttagttttatggacttactatattgtgcataactcaaattaaattaagaaattttcacttgggatcactatattaacttttgaaccgtatttttttcaacaaactataaggccaatgaattttgttttcttgtaatggtttgattttaaactaattttcatatcttggcctttttagataattttatattagaactattcttctcataaaatccaaatgataaatctaaattaaatatattgcaaatcttccgaacttttgtttggtttagttttatagacttactatattgtgcataactcaaattacattttaaaactccatttgtcaaacattaggttttaacaaatacctccataatccccatgtggctttctagtacaattatttgtcaaacctacgatctatcttcattttaaaatttctgagatttctctcacagcctataaatcaactacaacattaggtttgtagcatgatctccaacattaagaataatcaagtttttaccatttgttgttatttccaacttaacatgatcaaaactaaatgcgtggagtctttatgtcctccgacataacattatgtaaatactatttgactaaaaatattccattctctcttctaactctatgtcaatttgactacaaaaacattttgacaaaaaaatgaacgattacaaattacactgatggaaaatatacttagtcgaataaccaccaacggttgaatgtaaatgtggagttccaattattaatcatttttttcggcactcacttaattcacgaatgtgaatcaccactaacgcatctaggaatatatatagtaaggtatacaacttattttttaatcaaaacaaaaaaatatttgtggatttttgggacctttgattttccttaaaatagataagggaatattggaggatagatatgaatcaatatgaattaggatttaaggtcttaaatccctttgtgataaggtttgggatacctatattttaggatctgtgtttatctcctgtggagactctcttgtataaatacgaacgcgagttcatcaataaaagaaagccagtttgataaccaattctacgcgtttcatcttcaattaagaaaaaatatataatttactattattatcatttagtaggaaagtatgtccatgcttattccatacgccaacatcatgcggctgtcttccatcctttttttttttttttttttttttggttttaggttgtcttccattttatatgtttctcctcgctaa

SEQ ID NO: 169530 - DNA, 3017 bp, Arabidopsis thaliana landsberg
  unsure (1)..(3017): unsure at all n locations
tacaagaaagctaaagttaggcccaaatagctccagtaaacttgtcctcttcattgcattacaatatagtgggttaaataaacctcttcttagatgggcctcttgtagggtttaatttcactttgcaactcaatagcaaatccggtaacaacaaaattggccgaaattacataacttaaaaagtatttctttttctgggtcaaattgggctaattttttttttttttttttaattgatgtgtaagtgaacttctaaaaaatttggccaatcatttgacgcatctagccaaatagtcgaagtatacctgaagtagaatccattctttctacacaggcatactatatttcctgtatatatcctctatttatagtatgtgtcttggatttctatatttctcaacctagctcccttattattctctctctctctcagtttgttttcctattaagtcacataaattttcgaccaaaacaaaagtcacataaataaacttctctttttgtatatcatacatcatttattaatttcggttctttcacgtatcatcaaaagctactaattaacgagttgttttcacactttttggttttattacacgaagtgatatagttttatttacaaaataaaaaaaattaaaatagcaatgttataaaaagagaacagaaccttcagcttcatagaagaggacataaccttccatggaagctgaagcagaaaacgaacaagaatcaggtgaagaagaaagtttatatatgccctgagaagagttgcgtccatcatgatccagctcgagccctaggagaccttactggaataaagaagcactttagcaggaaacatggagagaagaagtggaaatgcgataagtgttccaagaaatatgctgtgatatccgattggaaagctcataacaagatttgtggtagcagagagtttagatgtgactgtggtactcttttctccaggtatgtattacaacacccttttttaagtcaaatttttttgttaaagagcgaaatttaaatttcatgaaaaacaatgtcatacaacatttagtttaatttaaattcaattggctttaactaaaatcagctaagatctctttattgaattagtatatattggatgattggattggaacaggaaagatagtttcatcacacatagagcattctgtgacgctttagctgaagagagtgctagatttgtctcagttccaccagcacccgcacccgcacccgcatatttgaacaatgccccggatgtggaagtcaaccatggaaatatcaaccaaaatcatcaacaacgacagcttaatactacttcgtcacaattggaccaacctggttttaataccaatcgcaataacattgcctttttgggacaaaccttaccaaccaacgtttttgcgtcctcatcatcgccatcacctcgtagtgcatccgactcccttcaaaatctatggcacttacaaggacaatcatctcaccaatggcttctcaacgaaaacaacaacaacaacaacattctccaaaggggaatctccaaaaatcaagaagaacatgagatgaagaatgtgattagtaatggttctttgttctcttcggaagcacgaaacaacactaataattataaccaaaacggtggacaaatagcatcaatgtcagccacggcattgctacaaaaggcagctcaaatgggatcaaagagatcatcatcaagctcaagcaatagcaagacttttggtctaatgacctctatcttcaacaacaaacaagcagagaatatcaaaattaaggaagttgatgaaagaggtttcacaaaagactttcttggtgtgggaagtcaaacaccgttcttggccgttattaatggtcagccatactcttccatacgtggcccccgcaggcctccacggacgggcactccaaccaaaaacataaaccagtaatcttgtattgtccatgtatactataaggtaaattacattatgttatatgagttttgagaaatatcgagattcctctgtttatgatattctctaagtgcagagacgtgaagtatgagattcaagtgacgagaggatggtttaagcacggcgaagaaaacggtgaaatatgagacttttgactcaggagagaatctctgagtcaactcggtgttgcagatgggtccactcggttgatgaagatgggaagctattcgggtccacttctgcnnnnnnnnnnnnnnnnnnnnnnnnnnnnnnnnnncaaaacatacgctatgtcttttcttattcttcttattcttctttttctttttcttgtaattatttcatgttttaattttgaaagaccctaaaagaaactatgaaaagttcgtagtttgttactttttattttttcatcgtagaaaggttaaacctttttttgaaactttgatatctaaaatggtttttttttttttttttaataaaatttaaaatttattcaaaaaacttttgtacaacaagtgcatcgtttgagtagaaagtttgtatttaaaacatagaaatcaaaagaatagagactaatgagctacgactctattatgatttatcttgaggagaaccatgcgctcatgcatgcatcgtaggtgcgattcccttgctctcttattgatgagatgcggttttgaacttgcttgccaagatttcggactagatggactgatggtgtttcagcttcaccatgtttccgacaatttctttctttccaaattgagtagatcgccaactgaaagacataccttattaagaagaggttgatttttccaatggttttgtctatgagtgtcttgtggacttcactccatcttgttgtgaattttgtgccaagaagagtacgacttagcccggaccacacctcctcagagtacttgcatctaaagaaaagatgatctcggtcttctaatggtgcttgacagagaacgcataatgggttcactccaatccgccaacgtagcattctgtcacctgtggccaatctgttccttg

SEQ ID NO: 169531 - DNA, 1201 bp, Arabidopsis thaliana landsberg
atcacatttcaatctctgaaaataaaaatgtgaactttaaatggtttcttcaaagttgttgtctttattgcgagagtgtgccaataccaccaagtctctaagacaagccaagcttgttcatcagagaatattcacgttggggttacgaagagacgtcgttttatgcaaaagtctcatcaatgtctactttacttgtaaagaccattgctcagcgaaacacgtcttcgagagcttcgatatacgatcggatgtttacatatggaactctttagtgtctggttattcaaagaactcaatgtttcatgagactcttgaggttttcaagaggttgttgaattgcccaagttgtgtccctgattcgtttacttacccgaatgtgattaaggcttatggtgcgttgggtagagagtttcctggtaggatgattcatactcttgtggtgaagagtggttaatgtttgtgatgtggttgtggcgagttctttggttggtatgtatgcaaagtttaacttgtttgagaattcactacaagtgttcgacgaaatgcctgagagagatgttgcgtcttggaacacggttatttcgtgtttttatcaaagtggagagacagagaaggctttggagttgtttgaaagaatggaaagttctggttttgaaccaaattcaatttcaattacggtagctttatcggcctgttcgaggctgttgtatttggagagagggaaggagatccatagaaagtatgtgaagaaagggtttgagttagatgagtatgtaaactctgcccttgttgatatgtatgggaaatgtgactgcttggagatggctagagaggtttttcagcaaatgactagaaagagtttggttgcttggaattctatgatcaaaggttatgtcgctaaaggagatagtaagtcatgtgttgagttttttaatagaatgattgtagaaggaactcgaccgagtcagacaaccttgaccagtattttgatggcttgctctcgctcacggaatctctcacatggaaaatttgttcacggttatgtggttaggagcgttgtagatgcagatatctatttgaactgttccttgattgatctctacttcaagtgtggtgaagcaaatttggctgaaaccgtcttttcaaagacacaaaaggaagttgttgagtcatggaatgttatgatctctggttatgtcgg

SEQ ID NO: 169532 - DNA, 2130 bp, Arabidopsis thaliana landsberg
acaatcgtgatcgcgtattctctttatatcatggtatataacaatctcctcttaaaaacatctctactaaaacatgttattgttgtttcttgaaatgatttaatgaaacaagcagggacttgggttgctgtctttttcagccatgacttcttctaactctaaagatccaaatcaactccaagtgattctcttcttctgctctctgtatcttatagcaataggacaaggcggttacaaaccatgtattaaggtatttggagcagatcaatttgatggaaatgatataaaagatgcaaaagacaagagttcttactttaattggttgatgtttggaagttgtgttagcatattgacctttcgtttggtctctagctacatacaagaggacctaagttggtccttaggatttggtattccaagtgttttcatgctacttgctctgtttctcttccttctcggcactaagacttaccgttttagcactgcaagagaagggaagaaaaatccttttgctagaatcagtcatgttttcatggcggctttaaagaatagaacacaaccagattcatatatagctaaccccaacgagacccttctcactcatcagagttccaagcagttcaggtaacataattacttatcttgaaaatctttcaagccacaattgttctataccatcttggttcgtgtccttatgtattgttgcagattcctcaacaaggcagcgatttcttgtagttttgctgaaattgaagaagcaaaagcggtgcttaagcttgtcccatgtggctgacttgcttagtctatgctattgtatgtgcacaatctcatactttcttcacaaagcaaggagccaaaatggacaggttaatgtgaccagggcaatgttaaataacaactcgagcgatacactgagactaacgcgacagcaagcactgttgattaacatttagcgctgaattttttcagcgaatatggcagctcaatttttggttgctgcgcctttatttttgaagtagaattttgaaacagctttacttatgactgttggtgtaggaaagcatttgggcctttcagtttcctagtcgctgtcgtttggttgaactactagaaaagaacaaccccacactataggggtaaaccaggctagcatgttatacaaaatggcataagctagctagaaaacacatatatttaaataaagtttagtaataaacggaaactttaaagatgagtaggttctctagttgccccccaaaaaaaatttaaaaaaatatgagtaggtctttcggatatatacacagcttgcccaaaaattgattgtctcacacagaacaacaccatgcacgttctctgccagctggacccgaaattaactacgtagcagcttactctctgtaactttcaaagttgattacatatttaagtaaccacacaaggcatgctgagtctctacctgaccatcaccgttgtctgagtgatattaatttccgttttattaaaaagcttagatattactctacgataaaaccttattttataaaggttattagattgatctattaaccttggtgaaaagttcatattactttatagtaacaatttaaatataaaaaaatgacaatttttgactttttaaaaggtttgaaatcgacatatctatcaaatttgataacttttccagggtattattattatttatattttaatttttttttggaaaacgggtttaattaacaagaaataattaatcaaacaaaaaggttcaatacgtctacaatgaaaacaaaaaaaaaaacagagcaaaacaaatcaaaatttctacttaaatgataacatgcgaagatgacaatcatgtaacgtctaagatgaatcttgaataagtcctttaggccagccatgcatggatgggagatcggccgtatcatcaacagaatcgaaatctaatctttcatttatttttattaattatcttaaccaaccgattgtgacaatttctccttgttgccaaccactaagatacggtgtcattcctgacaacgaagacttttatcgcgatcacattaatcaatcgattactcaatagcgttctcacttctcgtcgtgactcacgtgttaaatctgacatat

SEQ ID NO: 169533 - DNA, 475 bp, Arabidopsis thaliana landsberg; identical to SEQ ID NO: 50915

SEQ ID NO: 169534 - DNA, 716 bp, Arabidopsis thaliana landsberg
gaacaacttctgcaagtacgataaccagttcttgcaactgttcacctcgtctctttaccaagctgcactcgtggccagtttcgtagcgtccgccacctgttctaaacttggacgcaggcctacaatgcagtttgcttccatcttcttcttgattggtgtcggtctcactgcaggagccgttaacctagtcatgttgatcattggaagactctttcttggctttggtgtcggatttggcaatcaggcagtgcctcttttcctgtctgagattgctccagcacagctccgaggaggtctcaacattgtattccaactcatggttacaatcggaatcctaattgccaacattgtcaactacttcactgccacggttcatccttacggatggaggattgctctcggtggagctggaattcccgctgttatcctcctcttcggttcactacttatcattgagactcccacaagtctcatcgagcgcaacaagaacgaagaaggaaaagaagccctaaggaagatcagaggagttgatgatatcaatgacgagtatgagtctatcgtccatgcatgtgacatcgcgagtcaagtcaaggacccttacaggaaactgttgaagcccgcgagtcgcccaccgttcatcatcggaatgcttctccagcttttccaacaatttaccggaatcaatgcgattatgttctatgcgccggtcttattcc

SEQ ID NO: 169535 - DNA, 1303 bp, Arabidopsis thaliana landsberg
aaccccaatgccaaatgctcttcaggttaccttattcatgcgactaatcgggcatatccccaatttcagaatgcaaaatttcatctaaagtttagagatttctcgattatggtgaaatcgacggacggtggtggtgggtcttcttcttcttcttcagtggcgccgttcttgagaaaatgttacgatatggttgatgattctactactgactctataatctcatggagtccaagtgcagataatagcttcgttatcttggacaccaccgtcttctctgttcaactcttgcctaaatactttaaacacagcaatttctctagcttcattcgtcagctcaatatctacgttagtcctctcttctcctctctcttttcaattttgtacaattggatcttctttgttatgtctcttactcttacatggtgtgattgtatttagcaaagtttcattttttctctgcttttacaacgtgtggataggttttagagaagattgattatgaatttggtttatgaagcatgaagaaagatgttttgttcaacttctattatctggaacagtgtttagaactagtactagtcacaatcttgaagactctatgatagtataagttggttgatctagggtaaatctggctcattggatctttgagtagacttgtgcctgattcgtggatgtgtttgtttacagggttttagaaaagttgatgcagatcgatgggagtttgcgaatgacgggtttgtgagaggtcaaaaggatttgctgaagaatgttatcaggaggaagaatgttcaaagtagtgagcagagcaaacatgagagtacaagtacaacatatgctcaggaaaagagtggattgtggaaggaagttgatattttgaaaggtgataagcaggtattggggcaggagttgatcaaagttaggcagtatcaggaggtgacggatactaagatgttacatttagaagacagagttcaaggtatggaagagagtcagcaggacatgctttcgcttttggttatggctatgaagaatccaagtcttttatgtcatgtactttagccaaaggagaaaaacacttggcgaaaagcgggggaaggagcgaatattgtggaagaagtgactgatgaaggagaatcaaactcatatggacttcctttagtgacataccatgcaccatgggacaacaatggaactgtaaagtaaaacttgaacgacgtaaatgatttcgtgagaaacgccgatatgttgaagatctgcttacatgaaaaccatgtgccattgatcatacctgatatatacg

SEQ ID NO: 169536 - DNA, 1312 bp, Arabidopsis thaliana landsberg
  unsure (1)..(1312): unsure at all n locations
agcaaagcaaaccttatgaccgaacttctcaaaaaggacaataagtttgcgtggactccaaaatgtgaggaaggtattcagatcatcaaggaaaagcttannnnnnnnnnnnnnnnnncactgccagatatacaccaggatttcgtcatcttttgtgatgattcaaggcaaggcttagggtgtgtcttgatgcaaaatgagaaagttattgcctatgcatcccgcttactcaagccccacgagcagaactaccctacccacgacttggaattggcagccatagttcatgccctgaaaatatggaggcattatctgatcgggaacaaatgccacatcttcactgatcacaagagtctgaagtacatcnnnnnnnnnnnnnnnnnnnacatgaggcaaaggaggtggttagagttaatcaaggactatgatttggaggtgcattaccatcctggcaaagccaatgttgtggcagatgccttgagcagaaaggcccagtgcaattgcatgagcatggatgcaagagttaccaccctgtgtgatgaattgtgcaagctgaacctagaagttgtttctccgggtgacataagctatatcgcggtggacccacattgcaagagcaaatagttcacgcacagattcgggataagggtgttcaggttatcaaagatatgctcaagcaaaaggcagaaaaatacaagtgttttcgacaggatagcaagggaattttatggtttggagatcgattggttgatcccaaggaccctgagatcagaaagcaaatactggatgaagctcacctttccaaattctctatgcaccctggtagcaacaagatgtaccatgatctcagatctctatattggtggactagaatgaaaatggaaattgccaagtacatatccgagtgtgacacctgccagagaattaaagctagtcacttgaaggcagcaggccctttgcaaccccttcccatcccatcttggaaatgggaggacatttgcatggacttcataataggattacccaataccgccaggcaccatgattctatttgggttattgtggacaggttgaccaagactgctcatttcttgccagtgcacaccacccacaagacagagaagtacgctgaaatttatgttgatcagatagtaagattgcatggtattccaaagaccattatatctgaccggggagcactgtttgtggcacgcttttgggagaaactgcaagaaacacttgggacccaggtaatccgaagctcagcatatcacccacaaaccgatggccagacagaaagggtgaatcagat

SEQ ID NO: 169537 - DNA, 720 bp, Arabidopsis thaliana landsberg
  unsure (1)..(720): unsure at all n locations
atgggcgtcttgtaatgagccacacgaccgagatgagcaaatgcatgaggacaatgatatgacaaacgaagagtttgaaacacctacttctagaaaggcaaacaagggcaaagagaaaaacaatgaaggggcagggaatagtggttctacggaaaacaagagggcaaggtcttgggtttggatcatctaaccaaacatacaaatgatgctgacaaatgtaattgcaattattgtggaaaagagctggcgtgtccaaccaagtctggaacctctactctaaagaagcatcttcaaaatacatgcaaggcataccaagtttggaaatgtgatcatgtacataatagtcaaacctcatgatggtcctggtggttgtatgagtactagtaaagttagtgaatcagttggagagaagcaactaatgagttgttagttttagatgagttgtcattagcttttggaagtgcttagcttggagaaatgtttgctcaagagttcaaatgtataagcctcattcccgaagaacagctacaagagacgttgntgaggcttatgttagtaagaaagcagcctgaaaagatatcgaaacaataactgagatgtcattggcgacaatattgggttgtccaatattgcacctagtatatgatagcaacactcacttgttgagccaatgggagttgaggagatgatatagtattcagctatatggacatagggtcg

SEQ ID NO: 169538 - DNA, 2526 bp, Arabidopsis thaliana landsberg
  unsure (1)..(2526): unsure at all n locations
aacgcgaatatttccaggagcttaacctctacaactccaaatttaacccagccaaatgtcgcttcggagaaaggtctggtgaattcctcggatatcggtcatgcatcgcagcatcgaggcaaatccaaagcaaatcgaggcgttattcggaatggcatcgcctaaaaaaaaacacgaaggacaatgtctgactggaagagttgcagcccttaaccgattcatctcccagtctaccgacaagtgcttggctttttacgacgtgcttcggggaaacaaaaaattcgaatggacaacctgatgcgaggaagctttccaggaactcaagaaatacctggcaactccaccgttccgcgcgaaacctgtaatcagagaaccactcttcttgtttgtcgtcgtatcggatactatggttagctgagttttagtccgagaagacaaaggcgaacaaaagccgatcttttacgtctcacaaacatttaccggcacggaatgtcattacgcgcanatggaaaaacttgctttagcggtcgtaatgtcggctcggaagctacgaccctattttcaatcccattccatcgtagtaatgggatccatgccactccgcgccatcttacacagtccaagccaatcaggacgtctagctaagtgggcaatcgagctcagtgaatacgacatcgaatatcggaacaaaacatgcgcaaaatcgcaggtcctagctgattttatcgtcgaattacccaccaaagaagctcgggaaaacccactcgacacaacttggctcctacatgtagacggctcgtcatcaaaataaggctcgggtgtaggcatccgcctcacctcgccaacgggtgaaatcctcgagcagtcattcaggttaaacttcgaagctaccaataatgtggccgagtacgaagcacttgttgccggacttaatctagctcgggggttaaagattgaaaaaatccacgctttttgcgattctcagctcgtcgcgaatcaattcaacggggaatatacagctcgggacgaaaaaatggaagcctacctgattcatgttcaaaagttagcaaaacatttcgacgaattcaagataacaaggattccaagaggagaaaattcatcggtcgacgccctagctgctctggcctcaacctccgacccgaacctgagaagaatcatcccagtggaattcattgaaaaaccaagtattgagctcggcgaagaagaccacgtcctcccgatacaaatcagcacggatcaagatgacccgaacgaatgcagcccaaagtggatggaacccatcataagctatatatccgaagggaaattgccctcggataaatggagggctcgtaaactcaaagctcaggctgcacgtttcgtcttaatagggaaaaaactttacaagtggcgattatccggaccattgctgacctgcgcggaaggaaaagcgacttgcaagatcatgaaggaaattcacggcggttcgtgcggaaaccactctggggaagggctttagccgtcaaaataaaacgccacggattcttctggccaacgatggtcaaggattgcgaaaaaatttcaaaacgatgtgaaaaatgtcaaaggcatgcgccgacaatccatcaaccagccgagctcttgtcatcaatctcctcgccatatcccttcatgcgatggtcgatggatataatcggacctatgcatccctcgaagcaaaaaaagttagtcctcgttctaaccgactatttctctaaatggatagaagccaaatcttacgccagcataaaggacgctcaagtcgaaaacttcgtgtggaaacatatctaatgtcgccacggaataccgtatgagattgttacggataacggctcgcagtttatatctacccgtttccaaggcttttgtgataaatggggaattcgacttagcaaatcaacgccacgatatccccaagggaacggtcaagccgaggccgcaaacaaaacgatcctcgacggcttaaagaaacggcttgatgctaaaaagggctcgtggtccgacgaactcgaaggcatgatttggtcgcatcggacaactcctcgccgagccataggagaaacccctttcgccttagtatacgggacagagtgcataattccggccgagatgatagttccaagcctacaacgaagcctatcccccgagaacactcctgataactctcaaaggctcctcgacgaactcgatctgattgacaaacgaagagattcggccctagttcgaatacaaaattaccagaatgaaacggctcgtcattacaattcaaatgttcggcaacgaagattccacgaaggagatcgggtcctccgaaaagttttccagaacactgccgaatcgaacgctggaaaactcgggacgaactgggaaggaccatacttaatttctaaagtcatccgacccggagtatatgagctcgctgacttaaacggtaaagccgttccaagatcatggaacacaatgcacataaggaaatactacaactaa

SEQ ID NO: 169539 - DNA, 1235 bp, Arabidopsis thaliana landsberg
gagcacatctatctttcatgtacctctcagattccgaagcacgcgagaaatgggaatctccaagaagctgaagttattttcagacagatgtcaaatagaagtattgcctcttggattgcgatgatttctgcttacgcagagaatggtaagatgagtaaagcatggcaagtgttcgatgaactgcctgtgagagttacaacttcttataatgcgatgattacggctatgattaaaaacaagtgtgatttgggtaaagcttatgaattgttctgtgatataccggagaagaatgcggattcttatgcgacgatgattaccggttttgtacgggctgggcggtttgatgaggcggaatgcttgtatgctgagacacctgtgaagttccgtgattctgttgcttccaatgctttgctaagcgggtatttgagagcagggaaatggaacgaggctgttcgtgtttttcagggtatggctgtgaaagaagtggtatcgtgtagctcaatggttcatgggtattgcaaaatggggagaattgttgatgcgagaagtctttttgatagaatgactgagagaaatgtgattacttggactgctatgattgatgggtattttaaagctgggttttttgaagatgggtttggtctgtttctgagaatgagacaggagggagatgtcaaggttaattctaatactttggctgtcatgtttaaagcttgtcgagattttgtcagataccgagagggaagtcagattcatgggttagtttcacgaatgcctctggagtttgatctgtttctagggaattcattgatttcaatgtactctaagcttggttatatgggtgaggctaaagcggtgtttggtgtaatgaaaaataaagacagtgtttcttggaattccttgatcacgggtcttgttcagcgcgaacatatttctgaagcttatgaacttttcgagaagatgccgggtaaagatatggtatcctggacagatatgatcaaaggattttctgggaaaggagaaatctctaaatgtgtagagttgtttggaatgatgcctgagaaggacgagataacatggactgctatgatatctgcttttgtgagcaatggatattatgaggtggcgctttgctggtttcataagatgctccggaaagaggtttgtcctaattcctatactttcagtagagtcctcagcgcaacagctagtatagcggatttaattgaaggatt

SEQ ID NO: 169540 - DNA, 528 bp, Arabidopsis thaliana landsberg; identical to SEQ ID NO: 81220

SEQ ID NO: 169541 - DNA, 2157 bp, Arabidopsis thaliana landsberg
tcgaccgctcttcaaaccgccactgtttcccggagaagtttactcgacctcgccagacgcaccgcaaacactcgaccatagtccttctaggaacaaaagaccgaagccacaatttcactgtactcgaccgtattactcgaccgcgtacttgaccggtttagtgtttgcgttttatttagactaacatattgatatttggctttgagttacattctttttcaggaaatcaatatgagtaactacagtggcgaatcctccatggatgcggattacaacgtcgatgtagctgaattttggtcaactggaccagagagagagcgacaggcttatgagagcttcagagctgagacccaacgctcagtagctcgacgcaatgagaggacaactgagattgctagaggaaagagagcaatgaccagcagataggagttgatcgacgaagatattgacgtcgagtatgagcctaagtcatggcacagagagacgaagctgttgaacaggcctgatgaagttacagtggaggagtacatcaaacttttcggggtgaactacttctggggaacgaggtacccctgttatcagactttggcccagctggagttattggaggacgtgcagcatgtgttcgagaagtgtcatctggagacgctgatgtcttacccttaccatgcctataagggggagacaatcgagtttctttccacgctgcaagtggagatgtatgaagcactcacagactttgagctggataccatgggattaggcttcttgacgttctcagtgaatgaacagcggtatcagctttcgatcaagaagttagaaggactgtttggtttccctagtggaaagggaaccaaacccagatttgacagagaggagcttaaggatttatgggccactatagggaacaatctaccgctaaactcggcgcggtccaagagcaaccaaatccgaagtcctgtgatccgctacttccagcgatcggtcgccaacgttttttactccagggagtctacaggcaccgtgtctaacacggacatggagatgatagattatgcgcttacagggattctccgccggacgaagggaaagaatgtcttgagcggcgatctcaacaacgcaccaccagtaatgcctctgttgatccatctgtgtggatgcagcaagtgcgcgttgacgaacggaaagaagaaggtgagaggagcactatgcgtgggtggcgttgtgacgccaattctgtaagcttgtggagtaccgctcaaggaaccaggtttagcaccgaggatgatggacttggatcatttgcgcagatgtgagttcttggagtttgacatggctggcgactttcaccgctacaggttcgagcattcatcgattaaaatcgccaacattcttctctcctgcattgacgctactaggattcttgagggcaggaacattggcttcaagctttcgcttgaagaactttatttcccgggtagtccgccaactgaggagatcagtcatacctaaggagctacaacagaagatattgatgagacgaatgatatagatgaggcggaatttgacacgagcatgtatcatttcagtgagcatatacctcctgcgagggaaagcaggagtttaagcgaagctcacaggaacaacagcaagctgcagaagtggtgcatgaaacaggacaagttactcgccaagtgcttcagggctatcaagtttctgaaggacaagatcatctgctcctcttccactacagctattccgcagggacatctccctcatgacatgccttcgaggagatatgacgcgcccgagccaagtcggcgcaggcctgagcctagagagcaggagattccgcatgtccctgcgaggcattcatcattcgagcctcgtgaatctgggaggaagaggaggaccacactcactcgatctagcagcaggagcggacgacttctgcagtctcgtagtttacgcaaccgcggtgctggccgcagcagaaggagagaggtcgagtttcctcagagcggtgctggccgccacagagctgatgaggtcgagtacccacctgctggagctgatacagaacaaggaggttcgtctatggcctgggagcaatcgcaggcagccattgacgagcaactacgttcattcttcgactga

SEQ ID NO: 169542 - DNA, 3085 bp, Arabidopsis thaliana landsberg
atgaattttctgcctttgtcagattctgccttggctagggtctcgtcggtggttgttctcggttctgtggccatgggttcttggtatcttctggtcagttttgctgaccttctagtcgttttctttctttgactagatagggttagttgtttagtttttgtgtgcagaatttgtggccatcgattaggaagtcttttggtttgtttcgattttgattttgggtttgtggaagcggtcgttgcggtaatttcttttgggttttgtgacctcagagaagatgttagtaattccggatttggttgatctacgctatggctcggagaatgaggtctcttctatgctctttcctgccttaaagtttgttgctgctcttgagcctttcaacgtttctttgccgtcaagtttacttggttttggattgtagtttatctgctaatcctttgcctttcctcgctccctttgatttctcgctcagcctttggctccctttgggatcgcttcctttctaagcagaagtttcgtgtttattggttggttatggtagtcttcatagtttacagagttttcttctccttggtgtttgcggtgtttgttaactgtctcaatcctttgtcgctctcattcggagaatggtgatttttgagaggttttgcctcactccttgtccctgctttcaagatctgtttagatctgtcgctttttttaggattctagctagacgttaagtgacgcttcggtcttcgtcgcatccagaagtgttttcgaggttcaatgagtttctatgaattctctttgcttgccgggttctgatatccttggttctcgagagattgactctcaacttgataggaggtggtagatattatttctggtttggccgtgggcagccgtgataagtcgcatttgctggtctttcaaaagaagaagaggcttctctgttctcttagttctatcagttttcttaaggtttttgccttgttgcctctgcttttagttttaggagtcgtcctctttcgattgtgtttagatcatttctgcattgtatttccagtttcattttactctggttcccttcgatagggttttgttttccggggaatttcttttttgccccggcaatgtcttcggagacttttagttgtctgccgacttgagtttcccttatttgggcatatgacttgagtttcccataatatcataatactatcaccatcattatcatactattttcatcatgatgataacattttcataaactcgtaattttcccgccaaaaacatactcttaattttttcgccaaaaaagtaaacccgtcattttttcgccaaaaacgtaaacacataattttccgccaaaaaacgtaaaacccgtaatttccctgcgagaaaaacgtaaacctgtaactttctcaccaaaaaagtaaactcgtaatttttctgccaaaaacgtaaatccgtaattttcccaccaaaaatagaaatccgtaattttcttatcctaaacgtaaatccgttaaccagtcataaagctctcaaaaatgcaccaatttttaactgctaaatgagtcgttcaaaatgttttataacgcttgaatatgaaaccgtccaatcccgtaaactcatgcagtcgcaactgtaactgctgtgtttcaaccagtcaggcctttagataaggtttcttagtcatgggcattcggttatccattcagttttgattcgtatccatacggttatcggttctttcagttataaagtttagtatccattcaattattttaaaattttggttcggttttggttccgtttcggttctttcggttttaaaatttaatatacattcagctatttttctttgaatattttcggatatttcagttatttttgatattttcatatgtttttggtattttgagtatttttactattttatatatattctcaagtatttttaattatttagtttagaaataactaatacttttaaaaatatataattatatttcagatattttcggttacctaaaatatttcgatttgtatccattcggttttggttctttcggttatagaatttaatatccgtttgattattttcaaattttcagtttggttcagttttttttgcatcggtttcggttcggtacattcggttcggtttatttgcctaggtctaagttttatatttaagaattttaggcccatgtttttatataaattttagttttgaaagtagtttggttgggttaggcctatatcaaattttaattttgttaagttgatgagatgacatggaaaaatagtaagtttttattggtcaacataaatgaagtgtattaatcgaaatgttctgattggttgttgattttaatgaggtgtcatgctgagaacacttgaaaaaactgatgtgtcagcacaggagagacttttagagtttttatggtgttgaatgagttagtcattttatttagtgttggtgtgtcacataatatgtgtataactaaaacaaaaaagtttctctctagacaaggttgccctagccgccgcccaaaaatctccagatttcagatcgccctctccggtgaacggcgctcctcgtcgtagccgtgagagggcccctgctgcttctttcttttttgttgtagacttgtctccctcttctagttctggtgttcgatgttgaaggtagtttgcttggcgagttagacgggtcttcacagtgaggtttgttcggtgttcttctcttcaagagcgtccttctccctcccccaacgggttgtagaagatgaattttctgcctttgtcagattctgccttggctagggtctcgtcggtggttgttctcggttctgtggccatgggttcttggtatcttctggtcggttttgctgaccttctagtcgttttctttctttgactagatagggttagttgtttagtttttgtgtgcagaatttgtggccatcgattaggaagtcttttggtttgtttcgattttgattttgggtttgtggaagcggtcgttgcggtaatttcttttgggttttgtgacctcagagaagatgttagtaattccggatttggttga

SEQ ID NO: 169543 - DNA, 2845 bp, Arabidopsis thaliana landsberg
aaaaaactgaagagacaccgtaacccgaagaaagtcgaagagaataacgcttacaaagtagaaactcatctggatcgatttataagcaccgtcccgtaagcaccgtcccatttggagccggtggatttctcattaaaaggtattgattggatttcaattcggcttgggtagggtttttgtcgctgctgtcgaccgcgcttacaccattgttttgtttccagatggacgacgttgaattaccgaaccggttggttgcgtttggagaagagccgcttggcaaaagggttaatgtgtaccacaaaatcaaaacactgtcggggattataaacgcgcttgatgaacaagagcgatctttcattctcaacagttctttggggggcttttagatttcccgaataaaccggcgttttcggcgagttttgggctctttttactgagtaggcaattggaagttgccaacccccatgagatatgggttgttttcgccagtactccggtccaattttcgttaagggagtttaagattgttaccggtcttccttgtggcaaatatccaaaagttcaaaagaagaagaagagaagaaccggtggtaagcagatgccctactacagtactttgttcggtcttgaagaagatgttacagttgagagggttattacaatgcttatgaaaagggtggtaacggatcgcgatattaggttgcggtatgcttgtttggctcttgttgatggcttcttattgcctacatcacactacccaaaaataatcaaaaaccacgccgagatgtctgaggatctccaaggttttctgtcatacccttgggggcggctatcattcgagatgatgatgacttccattaaagagagggaagttgagcagcttgcgactacgtgtgtggcggttcaaggtcttttattcgccttgcagctcgttgtccttgaagcaccccccgcaattgaggaagggcctccaattgatgaggtgtttcgttctgactcagatgaagaagcagccgctggagtaggttcgcgtcagggagttgccctcaagctcgggaacgctaaagatgttgatgctaaatgcgaggtaatgatttcggacgatcaatcgataacaaatttgttatcacattaactgtttctttattttagggtcacagcttatgttatcccggtaagatttcatattattatccggtaaataaattaatcattggtaaatggttatcattacaattatagtataactggttatcgtcggaaagttaacattacaagttatagtatatgttacacgctaataccccaatgattactgcaggttcatgtagatcctataattttcccggattcccggatgaatcctgccgaagacttaacatggtcggacgacgaagatgatgttagagtcgagaacatcgtgaggatggccgaggaaggcaagcctttttctaatgatatgtttggtggcggttgtattccatttgaagttgttgttgcgtcaaaaaaaataaaagagagatggtatagctaaggtagtccgtggtcgaaaaacacaacccaatgccagaccagctgctggtctgagaaggaaaaacaaaagtcccatcgaagaggaaggtgagcggtctggtggtattgatatcaatgctttgacccgaatgattgatgaaaaactgaagtctcaagctgagaagattatcaaaggggtgattcgttggttttcggaaaatttgagcgttgatgccgggaattcaaaaggttcggtgtctgaggaacagggtactcaggctgaacaggcggctgccgatgctgatgaaaattccaaccctgccaatgttgaccaaacggttgcggatgctgagaaaaataccaatcatgtatcttctccggacctacccaacgaaaatgctgaagcggatgttaacactattccccagccgcgtcatcccgttcctatggagactgatttcacccttccatcgtttcagggtgaccaagcggtagcagccgtagatgacgtagtttctttctataactccgttgatgtaccgacctgctctccacgcggcggtaccaatgtaaatggaaagaacgatgttcaggatagcggataactttaatatatgctaatattggttgtagccgatatttttacaatttggatttattttggatattctctaattctcgccgatctgtagggcgaagcgttaatggatgatgattcaactaccgtcgaggatgagctggtattatgttagtgggtaccactgttataccttaactgttagattatctgttagattatctgatactctgtatattacctactaactaattgccttcacacgttagtctatggaggtcaatgctgatgttcacgatcatattggcgaagacgcggatcgccaggttaggttttaccatgtgtgtaggaataatatttgtataatacctactaactacttcctcttcacgttaggctatggatgtcgatgctgaggtgcacgtgcattctagcaaagacgcggatcgccaggttaggttcaaccatttgtgtaggattaatttatgttcggttttttacatataacgctagttaagatcatgatcacccaccttgcataattgacacaaatattggaaagtaaattaaaatttatcaagtaaacaaaccgttaactgttacaatttttggtgctggtatatacctggctatattttttacatatagactgacgaatgatttcatgttttagggcgacgctgtcatgggagttgacctaacgacgataattaacgatcaggttagttggtaacgtagatcaataaatagttatag

SEQ ID NO: 169544 - DNA, 882 bp, Arabidopsis thaliana landsberg
tcagattcgattagagttcaagcggcggagatattatcgagattagcggaagcggcaagagggatattatcggaatttgaaaacgccgttcttcgtgaaccttctagagtacctgttcctggaggtacgatacatccattgacgaggtatgtcatgaactacataagcttgatctcagagtatagaccaacgttgatcgatctcatcatgtcgaaaccatcgagaaacgcaacggattcaaacactccagatttcgatttctccgagttagagaacaacaaaggtccattagcattacatctgatttggatcatagtgatcttacaattcaatcttgaaggcaaatcaaaatactataaaaacgcagctttatcgcatctctttatcatgaacaacgcacattacattgttcagaagattaaagggtcaccggagctacgggaaatgattggtgatctttacttgagaaagctaacgggtaagttcaggcaagctgcgacgtattaccaaagagctgcttgggttaaagtcttgtattgtttaagagatgaaggtttacatacgaaaggaagtttctcatcaggtgtttcgagaagtgcgttgagagagaggtttaaatcttttaatgctttgtttgaggaagttcatagggttcaatcacaatggttggttccggattctcagctgagggaagagttgaagatttcgatattggagaagcttagtcccgcttatagatcgtttcttgggaggttcaggagtcatatagatatcgggcaacgtccgtaggatggcatcaagctgtcagtcgacgatctagaggccgaggttcttcgtctgttcgaggggtattctgcacctcagcatctgagaagacgatcc

SEQ ID NO: 169545 - DNA, 1685 bp, Arabidopsis thaliana landsberg; identical to SEQ ID NO: 35739

SEQ ID NO: 169546 - DNA, 1060 bp, Arabidopsis thaliana landsberg
atgcaaatctcatcttcatcgtcttcaaatttcttctcttctctttatgctgatgaaccggcactaatcacgttaacaattgttgtagtagtagtagtagtgttactatttaaatggtggttgcactggaaagagcaaagactacggctacctcctggctccatggggttgccttacatcggagagacactccgcctctacacagaaaatcccaattccttcttcgccactcgccaaaacaagtactattttcttctcctatgttgttacatacataaaatatgcatgaattattgatatattcacttaaggtttattgctcattgtatttttttaaccaatatattggatggtaaaaattaaacttatatattcgagcgaactatggaccgcaaagcaatacttttgttgttacaaaaaacgtaattttgaaaaaaatataaccaattcatggtagtctagtagttaaacggttcacattatcaatccaactaaagttagtccttacactatgattttaatcataacaatcactttttaaatgttttacacgatcaaaatttgcttttacacaaattccgaaaaatagtcttaagtgtgaaatatccgatccgcaggtacggggatatattcaagacgcacatattaggatgtccatgtgtgatgataagtagtccagaggcggctcgaatggtgttagtgagcaaagctcacttgttcaagccaacttatcctccaagcaaagagcgtatgattggaccagaggctcttttcttccaccaaggtccataccattctacccttaagcggctggtccagtcttctttcatgccttctgctctcagaccaaccgtctctcacatcgagctccttgtcctccaaaccctttcctcttggacgtcccaaaagtccatcaacaccctcgaatacatgaaacgagtatgtctctttgatctattttgggttatatgcatggatgctccttgaggcatgccaaaagaaatattgaccaaaaaactccaaattttgcgggcctcacttctttcaaagaaaatatgaa

SEQ ID NO: 169547 - DNA, 513 bp, Arabidopsis thaliana landsberg
  unsure (1)..(513): unsure at all n locations
aagatggtgctccgaacgagacactgggacacgaaagcgtcggcgtcgtggagaaggtcgctcaactgggcgaagtaaaggtaggagatcgcgttgtcgcgatgccgctatccgcttgtggaacctgccggttatgtctggccggtgactatatctactgccagaaggggcgcgacgtgctggcggatacaggatcgacctcgggcgtggcgacctacgcgcaatatctgctcaagccggactggatgctcctgccgattcccgacgatgtcgaggacattcatgctggtatggcgtgctgtgggttgggcgcgaccttcggggcgatgcaggccctctccgtcgatcgcttcgacactgtgctgatcaccggcatgggtccggtgggattaggcggcatcgtcaacgcgacctttcggggtgctcgcgtcatcgccgtcgaatcccatccctaccgccagcaannnnnnnnnnnnnnnnnnnnnnnnnnnnnnnnnnnnccccgcgacgaag

SEQ ID NO: 169548 - DNA, 138 bp, Arabidopsis thaliana landsberg
atggtgacactgttggtgctgaggatgattagcgctataacaaggaaaactcctgttaaaaccctaagtaaaaggagtaaaaccttcaacgaaacagctggtggcgaaggaggtggtggtgccataaaattgatcagt

SEQ ID NO: 169549 - DNA, 508 bp, Arabidopsis thaliana landsberg; identical to SEQ ID NO: 39598

SEQ ID NO: 169550 - DNA, 1503 bp, Arabidopsis thaliana landsberg
ttaactttaactttaaatcagttttatttgctcaaattttcttattattaattggtttttcattttggttagtactcttccttttaccactgtatgagtagcttaaaaaggaacgaaacgaaaataaacaattatctgttcttgaatcttgtttttaattattggacagcatcatcaagaagatctgaaaaaattggggaaaattttgacggaagcagcgacggaggataagacggtgataataaccaccttaaacaaggcttggtctgagccgaactccacgtttgatttgtttctccacagttttcatgtcggaaaagggactaagccattactccgccaccttgtggtggcgtgcctcgacgaggaggcctattctcggtgctcagaggtccatccccatcgctgttatttcatgaaaacgccaggaattgatttcgctggcgataagatgttcatgacgccggactatctcaagatgatgtggcgtcgtatagagcttttgggtactttgtaaaagctgagatataactttatcttcacggtacctatctctcactctatttgtacttcatctttaatatgtcgttgattttggtttgtcaacatttgcatattgttgattagtgtgacaaaaccagatgatatatataggctttgaatcaaattaggaggattattgtgtaaccccgtgggtaatattaaaatcattagtagttgatgacttcatctaattatggttagggaagtagggttcttcaagtctctgtgacaatgattttaatattggttggtcactgttaacgttcattaaatggaaatatacatgcgtcttttatagaccctaggtagcaattagtcaaaatttggtgcaagtaaacacgaatgaattggtagaagatgtagaatttgatgattcataatgttttattaacatatggttaatgtgtgtaggacatagatataatgtggtttcgagatccatttcctcgtctatctaaagaagtcgatttccaaatcgcttgtgatcgttatagtggagatgataaagacatccacaacgctgtcaacggtggtttcacttttgttaaagccaatcaacgaaccatcgatttctacaactattggtacatgtcgaggctgcgatatccggatcggcacgatcaagacgtgctggatcaaattaaaggtggtgggtaccctgcaaaaattggactcaaaatgaggtttctcgacacaaagtacttcggaggattttgtgagccaagtcgggacttggataaagtttgtacaatgcatgccaattgttgtgtaggattagagaataaaattaaggatttgagacaagtgattgtggactgggagaattatgtgtctgcagcgaagacaactgatggtcaaataatgacatggcgagatccggagaattgcatgaagcaatggtggtggaaaaaccaaaacaaaacaagtattggggtgaaaaatcaaaagaacactatataa

SEQ ID NO: 169551 - DNA, 913 bp, Arabidopsis thaliana landsberg; identical to SEQ ID NO: 49001

SEQ ID NO: 169552 - DNA, 1699 bp, Arabidopsis thaliana landsberg
ctactgaagcgggttgtgatattagattgagagaagactatctgactctacacgatcgtgatggaaacttactagtaaggcgacaaagagcaagaaatcgtttatacaaggttgatttaaaggttgaaaacactaagtgtctgcagcttatggcattaagtaattcaacaaagtggcatgctcgtcttggacatatcaatcttgaaaccataaagtcgatggtaacaaaggaactagtggttggaattccgagtgtaccaaaggagaaagaaatctgtgcatcatgcttactagggaagcaagcaaggcaagcgtttccaaaggcaacaacatatcgtgcttcacaaatactagagctaatccatggagacctatgtggacctatctcaccacctacagctgctcaaagacggtatattcttgtcctgattgatgatcactctcgattcatgtggtcatacctgctgaaagagaagagtgaggcatttgaaaaattcaagggattcaagacactggttgagcaagaaaccagagagaagatcaagacattcaggacagatagaggaggagagttcctatctcaagaattccaagcttactgtgaaaaagaaggtatcattagacactacactgcgccatacactccgcagcaaaacggcgtgacgaaacaggacacttttgggaatgactagaagcatcatgaagcatatgaacattccaaactacttatggggagaagcggtgagacatgcgacctatcttatcaacagagttggaacaagatcacttggaaaatcaaacaccttatgaagtctttaaacataagaagccaaacgttgaacatttaagagtgtttggttgtgtgagttatgctaaagttgaagttccaaatctgaagaaattggatgataggtctcggatgcttgtttatcttggtacagaacctggttctaaagcgtatcgactacttgatccaacaaaaagaagaatctttgtgagcagagatgtcgtctttgatgaaaacagaagctggatgtggcaagaatcaagctcagaaactgacaaggaatcagggacattcacaattaccttaagcgagtttggaaataatggagtcacagagaatgatatctctacagaaccagaagaaacagaagaaactgagataaatggagaagatgagaatatcattgaagaagcagaaactgaagagcatgatcaatctcaagaagaacatcaacccgtaagaagatcacaaagacaagtaatccgacctaactacttgaaagactacgtgttatgtgcagaaatcgaagcagaacaccttttacttgctgtcaatgatgaaccgtgggacttcaaagaagcaaacaagtcaaaagaatggagagatgcttgtaaagaggaaattcaatcaatagagaagaatcacacttggagtttggtcgatctccctgttggaagcaaagcaataggagtcaagtgggtttttaaactgaagcataactctgatggcagcataaataaatataaagcaagactagtggcaaaaggatacgttcaacgacatggtgtagactttgaagaagtatttgctccggtggctcgtattgaaatagttcgtctcataattgctttagcagcctcaaattgttgggagatacatcatttggatgtaaaaactgcatttcctcatggg

SEQ ID NO: 169553 - DNA, 2412 bp, Arabidopsis thaliana landsberg
  unsure (1)..(2412): unsure at all n locations
gtgcataacgttcatattcatctattctaagtccactctccggaataccgtagattattctggacaggagaagctttttggaaattcacctatgtgcgaaccgtccgggcccttgtggcggacggtccgcgacactagggtgagcctcggacaggaacactgcaaaacacgagttaacactatggactatccgaagangaagcgagcaccgttcgggaccaagctcggactgtcgggctcaggcgcggaccgtctggtcgttgaaaaaccagaaaaacccgaaggtgacaggttcagtaaaatgcattcttagcatcctcgcggaccgtccggggtgcacgaccggaccatccgcgactgctttatctgacatctaacgacgcattaaatgcactatagccattgatatagccgttactgctgacagttgcgatttcagccgttgatgtgcatgggcggaccgtctggaccaggggcacggaccgtcagcggttggtaggaagaagcaacagctaggaagtggttggtggctataaatacaaccccaaccacctccattcacttcatccaagcattccaaccttcaacattcaatacaagagctagcattccattccaagacacattcaaagcctccatctctccaagtttcacaattgagaaaagagatcattagtgattagtgacttgagagagaaagtgatccgtgtgttattcgtcgctcttgtcgcttggcctttttgcaatcgtgctttcttgattctttcattacgatcaagcactcacttgtaatcgaggcaagaggcaccaattgtgtggtggccnnnnnnnnnnnnnnnnnnnnnnnntgattgagaagagaaagctcactcgatccgtgggatcgtttgagagagggaagggttgaaagagacccgcccctttgtggcctcctcaacggggagtaggtttgcaagaaccgaacctcggtaagacaaatcaccgtgtcactctcttcatttgcttgtgatttgtttttgccctctctttcggacctgactttatttctaacgctaaccccggcttgtagttgtgctttaagtttataaatttcagattcgcctattcaccccccctctaggcgattttcaattggtgtccggagcccgatacttcattagagcctaatcgctctaagtgatgtcgggagctcacgccaaaaaggagatggtgaccggcgagaacccgccacaagccatgggaaagctccatcgggggagtccggcaataagaagagggaggaatcacctccccgcgtcaagtcgcaccggagtggtgataagaagaagaaaatgaagaaagtagtctactacgagaccgattcttcatcgccatccacctccggctccgacacactgtccgtaacttctaagcgccatgagcgcaagaagtttagtaagattcccctacgctatcctcgtatttccaaacgtactccattactttccgtcccattaggcaaaccacctatgtttgatggtgaagattataatatgtggagtgataaaatgaggcatcatctaacctcactccacactagcatttgggatgttgttgagattggagtacaagtaccatcaccgggggaggaagactatgattcggacgaggtcgcccaaatccgacacttcaactcccaagccaccaccatactcctcgcctctctaagtagggaggagtacaacaaggtgcaaggattaaagagcgccaaggaagtttgggatgtgctcaagaccgcgcacgagggagatgagctaaccaagatcaccaagtgggagacgatcgatggggagctcggtcgcttccgcgttcgcaaaggggaagagccacaagacatgtacaaccggctcaaaaccttggtgaaccaagtgcgcaacctcgggagcaaaaagtgggatgaccacgagatggttaaggttattcttagatcacttattttccttaaccctactcaagttcaattaattcatggtaatcctagatatacactaatgactcccgaggaagtaatcgggaattttgtgagctttgagtatatgatcaagggctcaaagtaaatcaatgagctcgacggtccttccacgtccgaagctcaaccggtcgcattcaaagcgacggaggaaaaggaggagtctacaccgagtagaacacccatcgacgcctccaagctcgacaacgaggagatggcgcttgtcatcaaanagtttcgccaaatcctcaagcaaaggagggggaaggattacaaaccccgctccaagaaggtttgctacaagtgtggtaagcccggtcactttattgcaaaatgtcatatttctagtgacagtgacaatggcgatgacaagaaggggagaagaaaggagaagaagaggtact

SEQ ID NO: 169554 - DNA, 1649 bp, Arabidopsis thaliana landsberg
gaggtcataacaagccttttgttccctacaagcaagattttgtttccaagcagtaatttcaggggaacaaccagcagcaaccgccacctaggtttgcacctcaacaacaccaaggtcctcccgctcctgacgctaacatgaaacaaatggcacaacagctgctacaagaacaagcatctagctcaatggactgcaggtacaatgacctgaatgccaaagtggaagcattgaataccaaagtcagatatttggaaggccaatcagcatctacctctgcgccaaaagatacaggacttccagggaagcccatatagaatcaaaaggagtatgtaactactcacgccatcaccatctgccattatcgagagctgccaactcgacatgtccctgatttaatcactggggacagtgatgttcaagaaggagaggcttctactcagattcaagagtctgttgttgaatttaaccattctgctggttctcgccatctcattcaatccacctcggaagagaaggccgccataatggagagaatggggaaacgattcaaacctactccattaccctcacgtgctcttccgtggacattcaggaaagcgtggatggagagatacaagtctgttgtagcgaagcagctggacgagattgaagcagtaatgccactgatggaagttctgaaaggccccgatccggacgatcgcgggcgttacaagttctcaacctgattcctgatcctcacaaagacgtgataaatttaatactagaaaggatcaagaggtatcacgattcagatgatgaatatgatgccactctgtttcaagctgctcgtgaaaaaattgttcaagaaaagttggaagattctggatccttcactctgccatgctctatcatgcatttagctttcaacaattatctatgtgatcttggagcttcagtcagcttaatgccactctctatggtaaagaagcttggattccttcagtatatgccttgtgacctaaccttgatttggtgataggagttcaaggagaccttttggcctgttagaagatctgcctataatgatcaatgaagtagaagtacctactgactttgttgttctggatatggaagaagaacataaggatcctctagtcctgagaagacctttcttagccttagtgggagtagtgatagatgtcagggaagggaaaataagtctcaaccttgaaaagcacatcaagctgcaatttgacatcaacaaaactccacaaaggtcaacagaagatggaaaaacctctgaggacgatagagtgatctcaggagaaggatatgagactgaaagagtaaaagagcttaaaaagaggtctgatatggaagaagaaactatagggacgctagcccacactgtggaggaacttagggataaagtgagtcagatgcaaagagaagctattcaacctcaacttagcattgaagctatcccacggaaaacgttcggttctgaatggtttgaagaagaagactacccactagaagaaaaagaagcttacaaggaaagggccattgagtactcaactacagacctgtcaagagagcatgctgaatacaatgttgtatctaacatggaagaagaggagacctcaattcctctctatcacccttcttaa

SEQ ID NO: 169555 - DNA, 473 bp, Arabidopsis thaliana landsberg
gtggagcttctccatttcactgattcttcgtcttctcaacaagcggcagtgacagggatcggtggagagattcctccgccgcttcactctttcggtgggacattggcttttccttctaactcagttctcatggagcgagcagctcgtttctcggtgattgccactgagcaacaaaacggaaatatctccggggagactccgacgagctctgtaccttccaattcaagtgcttatctggacagagtcaagacggaccctgctgtgaccgattcatcttatgaggtgagctttgatccagcgattgagaatcaaagccatcgccctaaccagaacaatataaatgggaagaggaaagatttttaagagaccgctagagtgagagcacacagtttttacttgtgtacatgtgagccttcgtgtcatcagattgatcctttatagggtcaaagcttgaccaaaaagaactaaagctc

SEQ ID NO: 169556 - DNA, 1329 bp, Arabidopsis thaliana landsberg
tcaaacaaaacaaatgatttgtttgtgtacgtgaaggtacttcatgactctaatattgttcgtcttcctcgcaaagaaagttaatttgattccaccaaacttcggggatttgcagtttggaagattccttaaaaatggtacgtatggatgcatatttattaaaagttgtggttcttgcaataatattttttttttaaaaacaagatccgtcgtaggagctaatgcacagagtccaaaaataaattaacaaaaaatttatctatataataatagaattcaatcaaataaggtctatatttaaaatattgaatattttgaaatatatagttaagaaaatgagaaatgtggatatatgtctaacaagtatagtattaaaaatgaaagggctactattgctggcgaggaccatagcagtgacgttttgtcagaccttagcagcagcaatggcggcgcggctgggtacaacaccaatggctgcttttcagatttgtttacaagtatggttaacttcttctcttctcaatgatggtcttgccgttgctggtcaggtaatcatgttttctcgttgtattaatatatgtatagtttatatggttgatcaagttgtatgtagaaaatgatcattcaatacgttgcaggcgattctggcttgttcgtttgctgagaaggactataacaaagtgactgctgttgcatcccgtgttctacaggttcggtccaaaaatcacattaccaaacctttctttaaaaataaaataattgtgtaactaaaacagaaatgaatttgatacgcagatgggttttgtgttaggacttggactgtccgtttttgttggactaggtctctactttggtgacggaattttctccaaggaccctgctgttattcacctcatggccatcggaataccggtaactaataactaaataataattactatagtataaaaatcattttaaaagaattttactaatgagaagaggttatatatatttatgcagtttatagcagcaacgcagccaataaactctctcgcctttgtattggatggagtcaattttggagcatctgattttgcttacactgcatactccatggtatgcacactatatatactatgaaatgattaaaattccttcttttttttttaaatgacttaaactttgtctatctttttttcttgtaatccaattatgataaatcaggtgggagtggcggccataagcattgcagcagtaatatatatggcaaagaccaatggtttcataggaatatggatagctcttacaatctatatggctctccgggctattactggaattgccagg

SEQ ID NO: 169557 - DNA, 507 bp, Arabidopsis thaliana landsberg; identical to SEQ ID NO: 4844

SEQ ID NO: 169558 - DNA, 1505 bp, Arabidopsis thaliana landsberg; identical to SEQ ID NO: 9367

SEQ ID NO: 169559 - DNA, 809 bp, Arabidopsis thaliana landsberg
aggtgaattgatgttttagactgcatgcctaggtcaaatgtttatgtaaggtttgcatatatatatatagataatctctttctgtaatctgtatgacatgcttactcttgtcttcattccctcagttcccgattctttgtggccttccgtttcttgaaagaacagcatcccaaactgcacatttggctgctgggaggaccggaaagcatttgtttctggtggacaacgatgatggaaatgctccacttcttatccggatggctacagattctgatgacttgaaattcatgtaaatgctctagcttctgggtgttttcattggtgacttgcagattgatatgctcatcatctcttcttatgacctcaacagatcagctttaaatgctttcaagcgtcgtgtggcatatgcaaacgtgaattttgattgtatccttccctgaaaaaaacatgtttttaaagagactgtcaatggtttttgattatttctatcatttacaagagtttgccttaactaatgagaaagctatggttggatggaggacatcttcaattcgccgtccaaatgaactcccaaaggtatgtctttacttattatattttgtgcacatctttaatgacgttgtgggatttatcaataactattatccctgctcatcttccagccaaatcttctagcaacggatccaaactatccacacattgtatacgtagaacgtggaaatgtggacaatggtagttgccagtcaacttctacagtagtaacagagcaagatactgatcttgaaggttttgctttatttctcacttga

SEQ ID NO: 169560 - DNA, 709 bp, Arabidopsis thaliana landsberg
gtttgtgatgatttgagtgatggtcgtgttagtcagatcgctgatgcgttttatcacaagaacttgtctcccatccaggtattgttctggatcgattttctgtatgaacatatttctttgttgatatttttggataaatatagtaaagggaagaccaatcaaagcttttgctttctttagtatatatatgtaaagacaaatcaataaaaaatagtttaggttcatttcatcgttcttagtatgattaaatttcattgttaagtttttgcatatagtaacaaaagcaagacaatttttagccgaactaagataacacttatatgttaagccgttaaatttattgttcataatgggttgtgtaactcaagtattggttgtgtatgagcagtcaggttgttgtaagccaccatcggattgcaacttcgagttcagaaacgcgacgttctggataccgccgagcaaaaacgaaacggcagttgcggccgaaaacggggactgtggtacgtggagcaacgtgcaaacagagttatgtttcaactgcaacgcatgcaaagcgggtgtgttagcgaacataagagagaagtggaggaatcttcttgttttcaacatttgtctcctcattctcctcataaccgtctattcctgcggttgctgtgctcgtcgtaacaatcggacggctaggaaaagtgattctgtctgatcaacaact

SEQ ID NO: 169561 - DNA, 228 bp, Arabidopsis thaliana landsberg
aaatttcgctaaaagtattttcagaaaaaaaaaatagaaaaaaagaaaaaaagtattagtggacttggtttttaatatttttcattatcaatcatggaatttttactttacaccgaagtcgaaactctactctggacgataaagtgtatgattggtgccgacaaccaagatgtagccttttttatatactgttcagacctgatgaagatggttttttcctcaaccgaa

SEQ ID NO: 169562 - DNA, 603 bp, Arabidopsis thaliana landsberg
taccttgatgaggcagacgagagttggacagccgatttatttgattttgacttcgtaatcatctcttgtggccactggcattaccggccatcagtctactacgaaaaccggacaatcaccggttgccattattgtcaattaccaaacataaccgacctcacaatgttttacgggtatagaaaagcttttagaactgcgtttaaagcgatcttggagtcggaaagcttcaaaggcgtaatgtacttacgaagttttgcaccgtcacattttgaaggcgggttgtggaatgaaggaggagattgtttgaggaaacaaccttataggagcaatgagactcaagacgaaacgacaatgaagctacacaagattcagttggaagaattttggagagctgaagaagaagcgaagaagaaagggaaaaggttacgattactagatacgacccaagctatgtggcttagacccgacggtcacccaagccgctacggccatattccagaggccaatgtcacgttgtacaacgactgtgtccactggtgcttgcccggtcctatcgacaacctcaatgacttcttgctggctatgctaaagagagaagaagac

SEQ ID NO: 169563 - DNA, 1969 bp, Arabidopsis thaliana landsberg
atggctttcgttgttaggttgatcctaggagaatggaaacaagatgaaaatgggtttttcgaacacgtcggcgagttggaagggtttagcgtgggcgtacgactgagggagcaggatgggtacgcaagcttggtgaatgttgtgaaagaaaaatccagggctggtcgagaagataaagtcgaactgagttatcagtggccacactggatgatggggccagattggaaacaagctaacccgatctacataacaatcgacgaagatatgacattgagcagggcaattagggcggatccgaaggaaggtcatctaaaggtgaagattatatgggacgagactgagcacaactttaattcctatcggagtaacatggatttgggagcgttaacatcagagaaattatccatcttcttgcgcattcccaagcttgaaagggacagactctcgggtggccacttcaacatcgtcttcggcaccttcagaatcagactcaatagtctcgtcgataacaagaccttcttgaatagacggagctgcctataatacgaccaattgcaaagcgtacaacaaaccctgaacaacaaaacacgtgctggctaattgatcaatttccctctctttaatcgacttcatcatcatatcgaaagtgaaacggcccatggataagctaaaaatgcgctaaggtcctcagccatttcagcgtgagccttaacaattttaggatagtgagaggtatggacaaggaaaccgtcgacgatagctaagcaagcacatcagatcctcatactgggatccgagacaacccttctcttcaacatcgtaataaccctgtccacgatgacatcatgttcaagcccaaacaacttgctgtaaactgggatcgtcttccccgtcgtgcctttcttcttcttcaacttcaaactcggatacttcccacacggtaaatcagtaacgatcttaaactctcgcaaagaaaaacgaataggggtacccgcgaatagaacccaaatctcgttaggcttcacgacatacaactgcctatcccatatgaatatcccaaaactcgcggacaaggagggtagtttaggaaactccaacaggcgaccgaaagaagtccgagctatgaactcccgttcaccatcgtcgagtgcgttgaggttaccacacaacgttttcatcttctgatatacattgaccctctcgccgccagattcttccccaaaggcaatcagacgttgaggtagaggaatcagagacatcgttgctgtaaaaaatcgtaaaccctaatgagactactaaaaatgtgaagccaaaatcataaacaaaaaaaaaacattgtcattgcataccagggaaaaaacggcgaaaaaaacccagatctgtagatgaactactgctcgaaaacagaaggaaaaaaggtattttggagaagacggtacttcttttcttccacttgagaacgccgtctctcaccatcttatatccacggaaaaagacgattgttcgataactgagtaatgcaaaaaaaaccgtaaacaaaaaaacacaactccccaagcataatatatacataaaatctattcctatgctatagccataatatcgccctagaccctataacactcgatatcaatattgtaggggtacatgagtaaatatttttgcaatagtagttatcgaacattgtaaaaggaaggcagtgaattaacgagtatttttagtatatggatttataatatcccattttttagtcgcttaaatcttaaaatatttagggaccgctctgaatccttctaccactgagtcaccattaattaatatttttacgatcgttttcattaggaactttttcactaattttctactagtttggattttcgtcaaaaaatataggttgaaggaagaaaatatttcttacaaaacttttgtagaaatattcatagtaattcatgttattttcttgtaataa

SEQ ID NO: 169564 - DNA, 397 bp, Arabidopsis thaliana landsberg
gacgagagttaagatactacttgtgtcttttgtcagatccggaggagacgagagaccactttttctttttatgcccatacacgtttcagatatgggatgagctcacaagagggctgcttctagacaagttcacggcagcttggaaagagattctaaagctaatcatggaacgaaacagagaccaaacatagacattcatcattcggtacgtgtttcaaaacaccattcactcattgtggcgggaaagaaacaacaggaggcatgggagcaaccattaccaactgcaacactagtcaagatgatcgataagaacatccgaaaccggctcagcacacttcaaaagggaggcaattcaaagtatgaagaaggcatagtcctttggtttgcaacaagaaga

SEQ ID NO: 169565 - DNA, 446 bp, Arabidopsis thaliana landsberg
ctcactgcagccatcacctgtgttggcggatatgttcccgaaacaaaacttaccaatttcgaccttgaaaaaatagtggataccaatgatgaatggatccgtacccgtaccggcattgaagagagaaggatactgcgcgagcccggtaaaggcagtagtgccatggccatacctgcggtacaggaactgttgcgaaaaaggaacctggaccccaaagagatcgattgcctgatctgtgccacagtaacacccgatatggtatttcccgccacagccaacctgatctgcgatgccataggcgccaccaatgcctgggggtacgatatgagcgcagcctgcagcggttttctctacgcacttaccaccggcgccataacattgaaagcggccgttataaaaaagtgattgtggtaggggattgataaaatgagttccaacgttgacta

SEQ ID NO: 169566 - DNA, 900 bp, Arabidopsis thaliana landsberg
ggttgtaggttaaaagcgagctaccaagccaatttaaggcctttcgattccaacagcatcggtggtcttgtggtccagccaatcttattaggaaaatgacgatggaaattattcacaataaggtctttttaccatttactatatttcattttcagacacacatttcccacgtgccaactacatttttgtttggctcatccttagcgacaattttaagaggggcaagttttctaaccattggcaaccaaacaaaatacataacgacatttgtttttggctcatttatcaataactaccttgaaaaaaatcttataaatcacttataattaactcatattaatccagaattcaggttggttgaaccaagtgacattgaaattttattttatatctaaacgcacataagatgcgtatgatatatatatagtaaccataaactaattaaaaacttatgataagcagagagtgaagatttggaagaagttttacgtgatctacagcttctttttcctacggaagatcgtagtccacttcttcacttatttcttttactgtgttattcttcctacaagtgtcttccttcccgaagtaaatataccgaactggtcaactatatatgttccttctgtcatcaccctcttgagtgccattgccactccaaggttagtactatacatcctataacgacctcatttattcactctatatattaccttacttacatttttactattattggcagatcattctacctcgtgattttttgggtcttattcgaaaatgtaatggctatgcaccggaccaagggaactttgattggcttatttgaaggaggaagagtcaatgaatgggttgtcacagagaaattaggagatactcttaacactaagctacttcccc

SEQ ID NO: 169567 - DNA, 1491 bp, Arabidopsis thaliana landsberg
ttgcaggtttatgcatccgggggttcaagctggattatcgacagcggatgacaaaccatatgacgggggagaagaagatgttcacctcctacgtcaagaataaagattcccaagattcaattatattcggtgatgggaatcaaggcaaggtaaaaggtttaggtaaaattgcaatttctaatgagcactccatatctaatgtgtttttagttgagtctcttggatataatctgctatctgtgagtcaattatgcaatatgggatataactgtctatttacaaatgtagatgtgtctgtctttagaagaagtgatggttcactagcttttaagggtgtattagacggcaaactttatttagttgattttgcaaaagaagaggccggtctagatgcatgcttaattgctaagactagcatgggctggctgtggcatcgccgcttagcacatgtggggatgaagaaccttcacaagcttctaaagggagaacacgtgataggtttgactaacgtacaattcgaaaaagatagaccttgtgcagcttgtcaggcaggtaaacaggtgggaggagcgcatcacagcaagaatgtgatgaccacatcaagacccctggagctgctacatatggacctcttcggacccgtcgcctatctaagcataggaggaagtaagtatggtttagttattgttgatgacttttcccgcttcacttgggtgttctttttgcaggataagtctgaaaaccaagggaccctcaagcacttcctcaggagagctcaaaatgagtttgagctcaaggtgaagaagataaggagcgacaacgggtccgagttcaagaaccttcaagtggaggagttccttgaggaggaagggatcaagcacgagttctccgctccctacacaccacagcaaaatggtgtggtagagaggaagaacaggacgcttattgacatggcgagaacgatgcttggagagttcaagacgcccgagcggttttggtcggaagctatgaacacagcctgccacaccataaaccggctctatccgcatcgcctcctcaagaagacctcctatgaacttcttactggtaacaaacccaatgtttcttacttgtgtgtatttgggagcaaagctacattttggtgaagaaaggtagacattctaaatttgctcccaaggctgtagaagagtttttactagggtatgaatcaaatacaaaggcatatagggtcttcaacaaatcatcaggattagttgaagtctctagcaacgttgtatttgatgagactaatggctctccaagagagcaagttgatcttgatggtatagatgaagatgaagttccaacagctgcaatgcgcacgatggcgataggtgatgtgcgaccacaggaactacaggaacaagatcagccttcttcctcgacgctggtgcatccccaactcaagatgatggataggtcctcaagaagaggagcgtgatcaagggggag

SEQ ID NO: 169568 - DNA, 522 bp, Arabidopsis thaliana landsberg
gaaagctacactttacaaagtacattttatgacgaagactctgtttgcaaccttctatgtggttgtcctagtcttcgggatttggtagtacatagaaagagaggatgtatggtaactttcactatcgtcgtgccatcattacagagattaaccataaaggattctggatttgggtatggatgctgctatgtgataaatgccccttctttgaaatacttgaacataagaaggttcaagtatcttaactcttttctgattgagaaagcgccaaagctggaggaggcaaaagtcagtgacgtttttggtataaaaaatgagaacattttggaatctctaactgcagccaaacgtctttccttacacttatcacccttagaggtaatctttagattttagtttttcgacatattttctatgcaattgagccagaaatgttttgtgtcctcactaatgttacctcatgcacagatcaagtaacatagtggtagcatcttccatcagcttttatctttggaactacag

SEQ ID NO: 169569 - DNA, 316 bp, Arabidopsis thaliana landsberg
  unsure (1)..(316): unsure at all n locations
gaacccatactgtgcgttgaagacgatccggacatcgggcacctgctgacggccatcctcggcgaagccggttacgcggtacgctgggttaccgatggcgaacaggccctgacctgttggccgcaggcggcgctggtcgtgctcgacttgatgctgcccggtatcgacgggnnnnnnnnnnnnnnnnnnnnnnnnnnnnnnnncgccaccattccgctgatcatgctcaccgccaaagccgccacgcaggatgtcgagcgcgaactggaaatcggcgccgacgactacctcaccaagccgtttgaagcgacgtcct

SEQ ID NO: 169570 - DNA, 438 bp, Arabidopsis thaliana landsberg
  unsure (1)..(438): unsure at all n locations
tatctttttgtttttagttttgcttaaaagtttactctgcttcatcggaaccagatcggagatggaaaacgacgatatcaccgtggcggagatgaagccgaagaagcgtgcaggacggaggattttcaaggagacacgtcacccaatctacagaggcgtgcggcgtagggacggcgacaaatgggtatgcgaagtccgtgaaccgattcatcagcgtcgagtctggctcggaacttatccgacggcggatatggccgcacgtgctcacgacgtggcggttcttgctctgcgcgggannnnnnnnnnnnnnnnnnnnnnnnnnnnnnnnnggaggttgccggtgccggcatccactgatccggaccccctcaggcgcacggcggccgaagcagcgaaaaaaatcaggccgccggagtttagtacaggaattacggtttt

SEQ ID NO: 169571 - DNA, 272 bp, Arabidopsis thaliana landsberg
ccatcaaccttttgaacagcaaagaaacggacgaagtgtttaaagcgaatatccaccgagatgtgcctcgtttcggtgtggttggtgcagctggtggatctatcttgggttgtgtaattcctccggtggccaatggtggaggtatacaaatccgtctggggcttctctcttgcggcaatgctttggcgattcataccgtgctggtgcttgtggtattggtctcttctgctctcagtgtgtatatcttcacagtgttctactctttcaggaaa

SEQ ID NO: 169572 - DNA, 1959 bp, Arabidopsis thaliana landsberg
  unsure (1)..(1959): unsure at all n locations
agtcttcattgggtcattcttctaactctttcagctgttgggtcttgggccttcttttatattgctatagaataggtgggtgttgggtctcaatacgtaacactttactggctgaagaccagtctatctcatgtagagtannnnnnnnnnnnnnnnnnnnnntatttgttgtgtttaaagttttatctttttatctccatatgtctatatattgttttgtgtgtatggatttaacaaatctagaccaatggataaagtttttttttataattttttgttttgttttgatagatgaattttggctcctatttccagtctatctcaggcaaaggtagagtagaggccagcaccaaagatccggtatttgttgtgtttaaagttttatctttttatctccaaaggtttatatattaaacttatataaatggtgaatctggataggttgatgatcaaggtccatcagatgaaattcattcccataatggccccttatatataaatgatgaggagggagcgaatgaaacggtttgtcattctcaataatgcaaatgaatttggttttgtaacatatattctaggatattaggaaactaaatataaataactagcaggaaagaagctatcctcgacctcttcttaaaagaggaagagacggaatacttagaagtgaaggaaaattaaaacaaaggttatatttactccatcttctcgcaccagaaaaatgcaggggaacaagaaacaaaaataccgcttgatagcctcgattttgaaggaaacgaagccaaaaggaaaagaaaatacaaatcaaccttcttcaatagtttagtttttcttatgttcttgttacgtttttattcagatctttgctgaatttattcagttaagaaacaaattctatggagtctttaattagttttatcaatatattaattatccaatttataacttcgtatccaaattcctaaagaatacatacatgaaattatcacaaaaaatcatacgtacctgttccattatcaaaatcagtgacttgcctgatgaattgctggtggagatattaacgtttcttccaacaaaagttgttgtttaccttaaacatgcaaattccttttacatataccaatcaattttgagtgtctgatgggtgcattgatctctatggcattatcaaagtcacataaggctatgagaaatctggtaacatgatctccttctgaagctttataagcttttataacgcttcttctgaagggtttataagcttttataacgcttaacgcttcgtcagttcgtctgaagtttggccatggggaccccctctccatcgtggattctctctccggcatggagagctcaagctctcggggacactccgaaggattcctctgtggagactgaggacgatttatccgccaccacctcatttgggtctaactctaactcttttccaaccggtttctcttctccagagaatgtcatacctgacacatatggaaggtaaaaaaaatcttcctactaaatcgacatgttagaattcaattattttcgttcaaggtataaattattcttttcagttatacacactttaaaattatgaaagactagatggtgagcaaaatgattcttgataacaatggatttcttactatctagtggtagttaaaaaacatattttgtgtttgtttttccacatattgtgtttgttttccaaaaccgctcaattgcgaaagcttaaatgttgtgtatagggaggctgagaacaaggaggaggtaacaaattacttagatgcaattcttgaggagcttattcttgagatgactgagcatagcttagatgtggttttggaggctaagcaagatatctgtaggatatatggatttgatcctcaaagttctccaatgcacatagtgagccaaggtgagtcactaattcggatggtatttctgagccataacaat

SEQ ID NO: 169573 - DNA, 1076 bp, Arabidopsis thaliana landsberg
acttacttaatgatctttgttttgattttatgcaaactcatttctcataagttttcttgccattttttttggggttaaaggttgttgattgtcgtatgtgcggtgactataagtccattcttcgtttcgccttcattgagttcaccgatgcaggtactcaattatgcgccaattttcttatgagttgaaatgttcttgctgttttttttaattaatcagtgaagtgatgtctcagagggagctaggtctgctttacgaaaatcgggtactatgtttggttctcatcctattagggtttttatgtccaaaacagctattgcgcctgttaacccgtctttccttccacaggtaagttgagataatcatgtctaaaccaatcttagctaggcttgactagataattttgaatcaatcttgttcttatcaataacgtggtatatatatgcataacgttgttttcttcctttagtccaaggacgagctagagaagtgtggaaagactgtttattgtaccaacattgacaaggaggtcacttattatgtcatttgttagacactgttgaaatttaacttttttatccatctaattttttggtttttaattgcaggtcactaagatggagttggaaaatttctttaaaacagtttgtggggaggtatagatttggttttgactgtcgctgattgtttatacttataaagatgttgtgttttgtcattttacaccatcttttcatttcgttttaggttcgccatctgaggttgcttggagacttttaccaccaaacccgcattgcttttgtcgaatttaagctggtgattttctattgccctgtttgcatatacatgaattttcataatagtattgattcttgataagcaaggactagctatagctattcaatctttgataagttacaccatgcggcgaggaaaaaaaaattcgtatattcttgtaatatttttgttagtcaatcgctaattaacaacagtatctatgtgattgaaattaaaatgttaataaaatagtttaaagccaaggacttaggaaaaataaaatatctacgatgaaacta

SEQ ID NO: 169574 - DNA, 1763 bp, Arabidopsis thaliana landsberg
aggatttaaaccaaattccgtcacttacggtatcagaattgatgggttctgcaaaaaacgaaactttggggaagctttgaggctctttgaagatatggatcgtctagattttgatatcacggtacagatactcactacattgatccatgggtctggtgtagctaggaacaagatcaaagcacgccaactgttcgatgaaatttccaagagaggtttaacacctgattgcggagcttataatgctttgatgagtagtctaatgaagtgtggagatgtgagtggtgcaattaaggtgatgaaggagatggaagagaaaggaattgagcctgacagtgtaactttccactcgatgtttatcggaatgatgaaatcaaaagagtttggattcaatggcgtatgtgagtattaccagaaaatgaaggaaagatctctggttccgaaaacaccaaccgtagtgatgctgatgaagctgttctgtcacaacggtgaagtaaatttaggattagacctgtggaagtatatgttggagaaagggtattgccctcatggccacgctttggaactccttaccactgcattgtgtgctcgaagaagagccaatgatgcatttgagtgctcatggcaaacagtggagagaggaaggtgtgtgagcgaaccagtctatcggatgttggagacctcattatcaagcaacaacgagttgaagaaactagaagaactcaagggggagatacaaaaactgcatagctttttgcctcctgaaacacagctaatttagaaagtagcttcactgtaatcactcttgtttgcagaccaaccacattgtgagattattatgttcattcgtatacctttttttgtcacccaattttgagataaagaatagggggttgttgtttatgaatcaggattacagtgttgtgtgtggttttagacaagcttgtgattttacatgaacaacagaaacagtatatgttgtttacaaggaccacgatttttgagcaaagagaaaagtagagagagctagacattatatggctacagatttacagctaataacatctatatcatcattctaagtctttggtatagaagaacacaccattactccattcatcttcttcttcctcacattctcaacatcaattaccacagtagagcaatccttaccaatcacaaagatactattcccaacagatacaagccgacaaggctgcttcatcaccaattgagatagcttcccgatacgaatccacattctcgtttccttgcaccacattgttagcttagctccaaaagtctgatccaaaacatagagatcatctgccacaacaactgctggacctcgccatcctgatgccatatcatcatccatacgttcccaagtcccgctagatgcactatagactgcagtggaagatcctccaacaccaccccgaatataaatccttccgtccattacaaatgaatcttctatttcagggacaatattcacatcagaacaagatttgcttgttctggtcaaaggatcatagatgtcccaagttcgtttagcgtttggattcaatcctaacccaccaattgcaataatttttccatccagcgtttcacaagcaaagtagcatctgcatatgcaatcgaaatatcaagggctggaaagaacaatatcgagctggttgctgctaatggcaagattaagaatcctaagagaaaaatataagtaccttttagttgaaagaggaggtactacgtcaaaccaagtg

SEQ ID NO: 169575 - DNA, 1252 bp, Arabidopsis thaliana landsberg; identical to SEQ ID NO: 18654

SEQ ID NO: 169576 - DNA, 1328 bp, Arabidopsis thaliana landsberg
atgccgcctaagacgcgtggaggaggtcaagggaaaagaaaggagatagaagcgccggtgccagcgaagacagagaaagttaaggcgccggctgagaaagtgaaggagaaggtgccggcgaaaaaagcgaaggttcaggcgccggcgaagaaagagaaggttcaggcgtcggcgaagaaagagaaggttcaggcgccggcgaagaaagcgaaggttcaggcgccggcgaagtcgactgcgacggcacaaacgactgcgacggcgatggcaacgacagcggctccaacgacagcggctccagcgacatctgctccaacgacggagagcccgatgcttgatgattctacgttttatgatgctctgaagcatattccggctgaagaaactcaagagaatatgcaaactgatgaggtggaagatgaaaatgaaaaagaagaaggaagtgaagaagaagaatcagggagtagtagccaaaccttgggctccgattccgattcagaggagacggagacaaacaaagaactcgcgtgtgctaatcccgtggaagaggcggagagacaagatgacggcctagccgttatcgaggaggaggaggagaggagctccgcgagcgacgaggacgtcaatgtggaaaagtctgtggaggatgagggacacgaggacgagagagacgaggacgtgatagtccaagtggaaaaacccgtggaggagaggaccatagacgaggacatcgcaaatgtggtaagtattccatttcgtaataccgatctaattgggtaataatgcaattgtgaactgtggacagtactagtaacattgggaaatgctatgttgatatttaggtaatattggcggatgtggctaataccttagagtaatactacaattgtgatttatcgatagttagtactagtaactttgagaaatactacatagtaaaataggagtatctgtgtaatactgataattacggggaatacttctgagaaatacagagtaatactgtggcagtactatttacaattgagtgatatatgaatagtaggatttgtgtaatactggtaatttcgggaaatactttttggaaatacagagtaatactctggcagtactatttacaattgagtgatatatgaatgaatgtttgtttttttcaggatatggaggaagcgatggcaatgcagccacttggtatgtacttcccggcgttggagtataccaagaagatgaagttagcaactaggtgttatatctcggaggtgttgaagaccttcgctgacttggaacatcctctaacgaatgttgagaaaaattatgttatggagcat

SEQ ID NO: 169577 - DNA, 657 bp, Arabidopsis thaliana landsberg
  unsure (1)..(657): unsure at all n locations
tgatttagaatttatatatgttctaagtggttgggaaggttcagctttagactcaaaggtgtgagatgatgcctaaacgagaaacacaaataaattaaaagtttctgaaggtatcttgtttagaatatgacaaaatagtttttttttgttattaatttgtattttatcctacttatattttgtgctttaaattacagaaatttttttatttannnnnnnnnnnnnnnnnnnnttgtcgtaattgttttgctccatttcgaagtactcggtatcatctccaagactttagaggacaaggaaaagatcccaacaatcaaaatgagttgttcaaccatcggcattctagcttgcgaaacgtaatagagaggatttttggaatcttcaaattaagatttcttatcttcaaatatgcacctccttttccatataagacacaagcagagttaatatttgcatgtgttgttttacataattatcttcgtaaggaatgtcgttcggatgtgtttttcctaagaaagatgttctcgaagaaaatggcattgatgaaagcggcgatgacgaaaataagcgtatgaagagggtcaaggtactcaagaacaacaaagagtacttgctaataattggagagcaacaatagcagaaaacatgtggacatat

SEQ ID NO: 169578 - DNA, 1196 bp, Arabidopsis thaliana landsberg
tgcagacttatcaatgtcaaactcctttatacccaagttgtgcaaaccatagcaagctttctacaattgtgtcactgtataaaataaagacacaaaatgggtggtcagacaaaagcttcaatgatcttcagaagactttaccaaacattttactagaagataatgttctatatacatcaatgtatgatgtgaagaagttcctgaaatcttttgatataggttattaaaagatattcatgcttgtattaataattattatctattcatgaaaaggctgaagaagcttgacgcatgtcctaaatgcatagcttctagatggaagatggaagataaacatgcacactggtcaaaaaaagaaaaatgtttcaccgaaaaattctaaggtactttccaattatacccatctaaagagaatgtttaggtctgagcaacaagccaatgacctaaggtgccatttcagtaataagacggaaatgtttttcaccctgtagattatgtgactcggaagcaagtaaatgccaaataccctacttttgctgcattaaaaaagaacatataactagttaattataatattactcgagacctgtgtatgaaagaagaaaacataatgctgctaatgcttaccttgttgatttctggctgcattaacctggtaatatcattgatgtttagttataacccgtgaaagaggatcttatccagttgtggagcaacggaaagttaacatatgatgcctacagtaagagtactttcaaccctaaagcaatgctcctatggactatcaatgatttccctctatatggaaatcttgtagtatgcaaagtaaaaggtaagatgggttgtcctttacgtagaaaaaattgacaatatgtggttatgtaaaggtagaaagcatgttgatatgtgtcatcgcaatggtctaccaccaaatcacagttatcaggggaagaaaacatggtttgattgaaaatttgaacatgagagtaaggttaaaatattaactagtcataatatatatgtcctcttaaaaaaaattcaaaattgattttgggaataggaaagagacagagaagaagagagctaggactgaaactgtaattgagacagcctcatgtgatgaaaaagaagaaagtgaatgagatgaagaggaagaggaagaggaagaaaacgacgaggaagtccatcaaggttga

SEQ ID NO: 169579 - DNA, 521 bp, Arabidopsis thaliana landsberg
ggtagaaaatgctagtcatctgatgaatatgtactctctcatctacctcaataaggttctttatcccaatatactctcagtcatagaagcaatgcagaggccggagagaatataaagttagtaggccattagggagaaactgccatagctgaaaccatctgccattatttgttctaaagaacctccatccattgtctcgatatgagatactattgaaaaaaggaaaaagtaggagatagagaaagaaacggttctcaaatgaaaacctctcttttatgcatcgccgaagacaactcgggacttgtggtatggaatccgtatttgtgtcaaaccaaatggattcgacctagaaacacattccacagatatgacgtgtttgctcttggacacgacaacaaccgtaaccacaaaatcttgaggtttctttatgatgccaagaagtacagaaccggtcgcggacgcgacaatgatgtctacgattttagctctgattcatggaggagggttcttgatgttaatcc

SEQ ID NO: 169580 - DNA, 275 bp, Arabidopsis thaliana landsberg
acagcacctaagttaattaaaaaacagatgaccactaataatttgtttatttttgcagacgtaagaaaaaacattatgtgaaagacaatctgatttgctgaacacacaaagttatcctaaaattggaaattttgatttgaacgtggaccctaacattaaactaggggaggtctctggtagtagatatgaacaaagtacatgacatagatctgaatagggatcctaacatataactaggtgaagtgcctggtgtagatataaacaaagtccatgac

SEQ ID NO: 169581 - DNA, 481 bp, Arabidopsis thaliana landsberg
ttttgaacttggtttcatacttcaagctttataaaccttttgaacagtcaagatgacattcacattctcccaccaaatccatggaacttggatcagcaaatgtccctgtgtttagcactgagtggtctgatgatgatccaagtgaagatgaagcaccaattgctgggaagaaagggaagaaagccaagaaaccaaggaggaattggtcatcaactgaagatattgttctcataagtgggtggctgaacacttccaaggatccggtggtgggcaatgagcaaaaaggggcagcgttctaggaacgtatagcagcgtactacaactcaagtcccaagctcaaaggtgtggaaaagagaggccacatatgttgtaaataaaggtggtcaaaagtgaatgacgtcgtgaacaagtttgtaaggagttacttggctgcaagcaaacaacaaacaagtggtcagaatgatgatgatgtggtgtcttt

SEQ ID NO: 169582 - DNA, 474 bp, Arabidopsis thaliana landsberg; identical to SEQ ID NO: 9813

SEQ ID NO: 169583 - DNA, 996 bp, Arabidopsis thaliana landsberg
gtgttcacattatttcgtggagcacgattactcgagggtactctcaggcactcaagccggttttggagaagaaggttttaagtatttctcatggatgagacaatcagggacaaaaccaacagattttgctcttgctagtttgctgagtgtttcaggaaacatggcagttattgagggaggcaggcaagttcacgcgcttgctctttgttttggtttagaacagaactccacggttcgtagtagtctgattaatatgtactcgaaatgtggaagtatcaaagaagcttcaatgatattcggagaaacagatagagatgatattgtttctctgacagctatgatcaatggatatgcagaacatggaaagagcaaagaagctattgatctgtttgagaagagtctaaaggttggtttcagacccgactctgtaactttcatcagcgttctcaccgcctgcactcattcgggacagcttgaccttggttttcactatttcaacatgatgcaagagacgtataatatgagaccagccaaggaacattatggttgtatggttgatctgttatgtagagcaggacggctaagtgatgcagagaagatgatcaatgagatgtcatggaagaaagacgatgtagtctggaccacacttctcattgcgtgtaaggccaaaggagacattgaacgtgggagaagggctgctgagaggattctagagctggatcctacttgtgcaactgcacttgtagcactagacaatatatatgcaagcacagggaacttggaagaagctgcaaatgtaaggaaagtaatgaaatcaagcggcgtgatcaaagtgcctggatggtcatcaactaagatcatggatagggattcaacgtgcagttggtctcattcacaaagtgaagatatatacagtatattggaattagtagtatccggtgcagaagctcataatatgattcttaactctaatatgttaaaacaaacttggccctt

SEQ ID NO: 169584 - DNA, 536 bp, Arabidopsis thaliana landsberg
atggagaagaaccataaccctaatacatggtcggagcttcctctagatctcttgaacttagttttcaaacgcctcagcttagttaatttccaacgagctaaatccgtatgctccacttggtactctgtttcgagacaatgcgtgcccgaacgtcagatcgctttgctgattctcttccccaaagaagacaacaccgataacagtacttgtaagttgttcaatcccgacgaaaaagacaaactttacaagatgcaagatcttggtgtggaatttgcaaagagtgtttgtagggcaacttatggaagttggctcctgatgcaagattcaatgtatcatctatacattttgaatatattcactcgcgagaggatcaatcttcctcctgtggagtcacaacttggcatggtaaagattgaacgaaccatatatgattggtttcacttttcacacggttactatagcttttcgctaagttcccctgtgttttggattgacgaggaatccaaagattatatagttatgtggggactggggtt

SEQ ID NO: 169585 - DNA, 248 bp, Arabidopsis thaliana landsberg
atgcgtttgatgtcataccccgaaggatcaaaaattaaaaaacagacacatattaacaaaacatttggtcacttttggaagaatggcgtaggttgtcctattggtacagttcctatacttttagtcagcaaagaagctcttttgaaaatgaaatcttttgatggtgataattctaatccccaaagttcgtggagtaaaacctataaacctacgtcttttatggaggtcatcatgtaagtgctttctta

SEQ ID NO: 169586 - DNA, 2739 bp, Arabidopsis thaliana landsberg
ccacaggaaaggggtagagggagccctacttcgccagtgccaaccgccacgcaagacaagcctatggacaccaatccaatagaaactatggaagaagcattggatttgggggatcgatctgggtcgccaaggcaaacactttgttcacgagtaacacctattgctcaggtctatattgcgagtagtagattacatacacaaatctgagatacaaatagtttacctaggttgtatgttttgatcctaggttatacccgacacttctattgttgctgtttcacctgcttattttgtgaaggagagaaccaatatacgccagccagtgccgggtaaacgttttccaatacggtctcgcttcctcgacacaactaagtatagcatggatcccaggatcagtgctctgtttaaaagcagaaccaaggaacctgcatacacacctctcccaaagttggatgatgcagagttccagacatttaaaaggctccttgcagatgatccacaaaggtttgatccttgttattctcagttttattagaaacagacacaaatgttttttaaatctaacatccaagctaaacagcgagtacactatctgcactgggcacacagtgactaacaaccacttcttggacattgcaacgaaggagacatgggtaaacactgaggtattatgaggcaaaactaataatatttcatgcgttcatagctaaattgggtttggtgacatgacttactctattatgagctgcagcatatgcagctaattacaggaatgctgatgagacgccggggtaaagcatacagtcaaagaagggtggcaatcattgatacatggtttgcaacgcttctgtccacacactatgaagatttccagaaatgcgaggacaaggcaaagtacgagtggggaaaaacaatcaagggatacgtaacagggaagtcgactgggatacacatgaaatcagaattcctgaaacatgttgatgttgtctacgttccaatgaactgggggtgttctcactgggttggattggtgataaacttgaagcaacgaagcatagatgttctagactcgttcatctccccaactccagaagaagcagtcgaattccaaatgaccccagtcgtcagtagcattccttggctcctgaagaagtattgctgcccaactctcaccgctgatatgacaactgaccctttcagctgtacacgggtaacaggactgtacgacaacaaaggcgatggagactgtgggcctgtggcatgcaagttccttgaaatgcatgctcatggaatggattacactaacatggcgactataacggatgaagtggtgattaggattcggaaggtttatgcgatggatacatatgctgcttttgttgaatgtgaggacgagtactagttacttgttcctaaacttatagtttgtgtgtttctaaactagtacaaggcttatgacttaaaacttatatttaggacttgcgagcgaagtatgcatttgtataattattaaatttaaacttatgtttttgacttataaaaccgaaagaatgttttttgtcaagatgccaactaattaatatgacttataacttattattttgtatatcctcggcggtgtacagattgcttctgtacaccgtgtaaggtgtacggattcttttctgtacatcaaacttagtgtacagtaggtatacggattgttttctgtacagcatacatagtgtacatgaaggtgtacggattgtttcctgtatagtaaacatgttgtttgaatgggtatctgtacagcatgcatgttgtttgaattaattattaaagacctaattattgtttgaatgggttgttaaagaacatattgtttgatttaattatgaaagaactgattattgtttgaattgattattaaagaactaattattatgacatgctggaagagaacatatatagtttgttttctgtacagcaaacgtagtgtacatgaaggtgtacggattgttttctgtacagcatacgtagtgtactataggaacagcatcgtagtgtaccgtaagacagtgtacggacgagtatctgtacagcatacatgttttacggacgggtatctgtacagcgcctttcgtgtacggatgtttgattagtactatagcccagataggtttaggttaaacaatgaaagtcagttttgtttttgtttcctataaatatgtcctcagtggttcgtctactcatccacacctcattttccttactccttttaaacttcataaacctcaaaagtaatgtctttatcagatttaccagatgatatcttccatattattgtgaagaagctgggagatgacgacgcatattacttagctccggtgatactcacaaacaaacgaggaagggacattgcactctcgcgggacattgtaaagtcagcaaatctaactgctctatgtctcgagccaccgaaaatatatcctggtggtgtagctagaagcttcttaaagcgttgttggccgttcagaatcgtcaggctcgtattatgaagctttgggtttggtgacccgtaaaagggatatacaaggttcccttgctttgctaaatgaaatagttcctgatgatgaatcggcgaccgtggcctatgccatgttccaaatgtgtgctggacggggtgatctagcaggggctacattcgacatgatattcgagagcttaggtgataggcttttgttcaatatttagtctgaa

SEQ ID NO: 169587 - DNA, 784 bp, Arabidopsis thaliana landsberg
ataattattttaattaattataaaaaagattattttgttttaacctaaccgctaccgcccgcaaccgcaaacgtttgcggaaaggagcttttgaaatctggcgatttcgagcggtttaaagcgatatctagcggtttttatgattggtgtcaaacgctaacaaccgctaccacccgcaaacgcagcgtttgcgggtgacagagggagaaccaatcaaaacaaaatgcgactggtttcgtcgaaacccaaattgttggctatgtgtgaaattctgggacgcacatttgtgatattgttgtggcttgtgatagtagctaatcgaatacgtagataacatttggtcagggcatttggtactagtcgttcgaaacgataacatacttggtatgcactatttggctttcaaggatccaacgcaaaaagggttgacaagaagtcgacccatgcatttgtaaaaagaagcatcgagcacgtttgcttcaacaaatttgatgttctgactcagttgtcatattttaaaagctatatagttgcgacaagccgacaaggtacctcgcatcacagttcacaaccaagggcggacccacgttggtcttgggtgggacatgtgcccgatattcaattttataaatcttatataagtttgcattatataattaaaaatgtatgtagtgtagtggttttttacttagatggtgccccatcattaatccaaattcaaggcttgctgatgtctttttattgattttttataactgtgccccatataagattatttcgggat

SEQ ID NO: 169588 - DNA, 272 bp, Arabidopsis thaliana landsberg
tgactctcctaccatcgctttagatcagtcgttatcgcgcgcattctctgttcgagagcctagacatcttctcacatgattacgactcgcttgatgataccagttcgtggagagtgaaaaaggataggtcctggtaactatacagccgtccatctgcacgctctcgatcgctcaaatatggatgtgacgcatgagccggatgggccccaggtagcagatgatcttaccaagacgaaaggggatttccatagcggcgtaattccatgagggac

SEQ ID NO: 169589 - DNA, 1016 bp, Arabidopsis thaliana landsberg
cagctttcaaatggctcgaccatcttattcacgacgatagggagacccactttcgaattcgacatctttactctccccacgagccaccgtccaccgtcacccgccgatgagcaccgtctcaccgatggcaaatctattaacttcaacggctatttcgcttctccttctacggcgttaatctcacttctacccaaaagaactcagattcaaccacaagacgtgcatctcatctacgtcactgagagagccggaactcctagcttaaactacgacgtcgttcacagcgataacgttggatctagaattcaggttccgttattttccggcgaggaacaacagagtggtatgaatgtaaattccatgaaagacacgcctgttttaacaaacggctatcttgtccacgtgtcgacacatgagaatccgggtaagcccatggcgagttgggccgctgtttactcgactgagttacgaactaagtcgactcggcggcttacaccactgggtatcgctgacttttctccggctgtgtctccgtctgggaagtggactgccgtggcttcgtttggagagaaaggctggacttggagcatggtagagaaagagattagttcagacgtctacgttttcctgactcaggatggaactcagcgagtcaaggtggtcgagcaaggcgggtggccgagatgggtcgatgactcgactctgtatttccaccggaaaagcgacgacggttggatcagcgtgtaccgagcgattttacccaaaaccggaccggttaccaccaaatcggttacgattcaaagagtcacaccaccgggtcttcacgctttcacacccgccacgtcaccaaacaataacaacttcatcgcggtggctacaaggaggcctggatcagaaatccgccacgtggagcttttcgatttaaagaagaacgagttcctcgagttgactcgtttagtggggtagaagcctcatcactttaaaccgtttctttcccttgactcgtcccgagtcgg

SEQ ID NO: 169590 - DNA, 213 bp, Arabidopsis thaliana landsberg
attgctgcgatggaagcgacgagtacgaaagtagcattcattgtcccaacacttgtataatgggtggtaacgttaactacatctacaaacctagagccaaccttaaatctatacacttgcaactcggtttaacgcctcatccaaaggagttatatactataggaatatttcaggacatggtcaagaatttacaaggttttgcaactttttttg

SEQ ID NO: 169591 - DNA, 593 bp, Arabidopsis thaliana landsberg
agctactagttgctacgaatgaactgcaaatggagcgcatgcgagcgctatgggagcgtactgcagcaaacggacttgagcgccattggctatctgctggagaactccgcgaacgagagccgaatattgtagggcttggtggcatattcgtcccgtcgagcggtatcgtcagctatgcgcaagtaactgcacagatggctaaagagtttcaaaagaaagggggcaccattgaatacgagaccgaagtggttgggcttgccgagctgcctgaatcggttgtaattcaaacaaatcgcgacacttacaccgctaaatatctgatctcatgctcggggttgatggcggaccgcgtggtgcgcatgcttggagtcgagcctggtttcacaatatgtcctttccgcggtgagtactatttattgccgccggaacacaacaggatcgtcaatcacctgatctacccgatacctgatccgtcgatgccgttcctgggtgtgcatctgacgcggatgatagatggcacccttaccgttggccctaacgccgtgcttgcaaaaaagaacgaaggatatcataaataagacgtctccttgatc

SEQ ID NO: 169592 - DNA, 1356 bp, Arabidopsis thaliana landsberg
atgtgcagatcaagcgcacgagatatgaatcaggttgcagatatagttttgtactatggagttatacaagagattatcttgctagactaccacatgttccaagttcccctattcaagtgtaaatgggctaacaaacagaatggtgttaaggaagaagacggctttacgcttgtgaacctacatgttaaccaattagcatatcttcaagatccatatattctgccatcacaagcgaaacaagtgttctactccagaaaagaagactcctcgccttggtatgtggttatgagggcgccacctagagggtatcatgagttagaaacagaagctgagtatgttactgcaccatcaaacatccaagagattgactatgcagagaatcattcttcagatgacgagagtttttgtgttagggatgactgtgaaggattattagtgaatgattaataagttataggaattgtagtcttggagtaataagagataattggtttctaatttttactaatgagttagactgcttttgttaatgttatagttgatcacaagatgactaagaatactgctgcaaagaaagtcccaagacgtagcaagcggtagcaaggctaggaagtgacacctatggaaatgaaaaaaaaccataaagaagaagcaggttcaagaaatttcttagaatgtgcaacatgataatgaggaggctgaaggaagatgtgtgcaacagccaacagaagaagtgaatgaggaggaaggagaagaacaactttaagatgacagtatctctggtcatgttgcagaagagactgagcatcattccactaatcctgttgcggaagagactgagcatcattccactgacaatgttcagaaccaggagtcagaaaccaagaagagaaaaacaagaggaccaacaaagatgaataaagttgctaaaaaccccgaggagaaggttgacgttgagtttacacgccttggagaacatgtagggaaaggatcagtcacactttcgttcttttcttggaccactagtgaaagaacacgtcccatatactcttgaagatatggaggtaccttaatgaacaaacaaaattcgcaatttgggaggcgatccaggtattgttttaaacttacaaaaaatactgcttgttattacaaaaatatttatgttgaatttgaattgtactgtagggacggtttgattggacaaaagattggcaaaaagattgtattttcaaacaaatggggtgtatatggagggcttctaagtctaagctgcttaccaaagtgcattctgcaaagagtaagcaacagatccttagcttgaaaccaagcaatatccaatcagtgacagcttggaca

SEQ ID NO: 169593 - DNA, 1042 bp, Arabidopsis thaliana landsberg
atttctcccagacgtatttgtcaatgctagcatgttattatcacttgacgttagctacaaccggttggagggaaaacttccaaaatccctgatcaattgcactggtatggaacttctgaatgtgggaagcaacataatcaaggacacttttccatcctggctggtttctttgccatcattacgtgtcctcatcctcagatctaatgcattctatgggtcgttatattatgaccacatatcttttgggtttcaacatttgagactcattgatatatcacagaatggcttcagtggaactttgtcacctttatatttctccaattggcgtgagatggtgacatctgtcttagaagaaaacggctctaatataggtacagaggattggtacatgggcgagaaagggcccgagttcagccatagtaattcgatgactatgatatataaaggagtagaaacggacttcttgcggatcccatattccttcagagccattgacttttctggaaacagattttttgggaatatacctgaatccgttggtttgttgaaggaattgcgtcttctcaatttgtcaggtaactcattcacaagcaatatccctcagtcattggcaaatttgacaaatcttgagacattggacctatcccggaatcagctatcaggtcacatccctcgagatcttggtagcctctcttttctgtcgaccatgaatttctcccataaccttctcgaaggtccagttccactaggcactcagtttcaaagccaacattgttctacattcatggacaacctcagactctacggtcttgagaaaatctgtggaaaagctcatgccccgagttctacaccactagaatccgaggaattttcggaacccgaagaacaagtgattaactggttagcagcggcaatagcctacggacctggtgtgttttgtggattagttattggacatatcttctttactgcacacaaacacgagtggttcatggaaaaattccatcgaaacaagcgcagagtagtcaccataagtgctcgt

SEQ ID NO: 169594 - DNA, 528 bp, Arabidopsis thaliana landsberg; identical to SEQ ID NO: 1280

SEQ ID NO: 169595 - DNA, 1843 bp, Arabidopsis thaliana landsberg
atgatcaataaaagcaagtctgctatcacgttttcaacaagtgggcggtttgggaaaatatcttggattacctgaactgtttggccgaaagaagaaagacatgtttaacttgataatcgatcgcatcagacaaagagctaagagttggtcttctagatttctgtccacggcaggaaaagcaaccatgctaaaagcggttctagctgcgatgcccacttacacaatgtcatgctttaagctcccgagctctctctgcaaacgcatccaatcagccttaacacgcttctggtgggactcttcaatgggaaaacagaaaatgagttggattgcttggtcaaaactagctaaaacaaagagagatgggggcattggttttaaggatatacctagcttcaatgatgctctactagccaaggttagttggagattgcttactaaaccatcgggtctgttggcaaagatccttattggcaaatactgtcattcagcctctttcttagactgcaaagtctctaataacgcttcacatgggtggcgtggtatatgcattggaagagaccttctaaagactcaacttggaagagccattggcaccgggaaagacactaggatctggcaggatccatggatttccctctccaaaccagtcactccaatgggaccagcaacgcagacctctcaggagctaacagtggcagaccttatatgtccttcttctaactcctggattaaagagataattcaattgttgttacctgagtatgaagcagagattttggaaatcagaccaagcaagagaggagctcaagatagatacatttggttacttaccaagtccggagaatattctgcaaagacaggctatcttgttgcgaacttgcgggaggagaggccgcttctaaaccctccagttgttgagttcgactggctccgagagatctggaatatcaaaacctctcccaaaattaagttttttctatggaaagctatgaaacaggccctaccaacaggagaaattttgaaatttagaggcatcaatcctacaacagtatgtcctcactgtggagaagatgaaaccgacacgcacctgttttttcattgcagcttcgcaagctcaatttgggacaaatctcccttcaagacttcattctgctcttcccaaatcacgtcgctgaggaaaggtctagaaacttcgaagctcctgaccaatttgcctcctacaggactcggagacgtcccccttttgccatggatactatggacgatttggatctcccgaaataagcgcatctttgagaagagacaaattacagacttcgaagcggtggctcaggctgtttcccaagctcgggaatggtgtgcttctcaacttgtatcaccccaatctcctcaattacgactcccgtaccagatcgaagagattggattagatacaatccgagggttcacagacgccgcttggaaagctgagacaaaagaggcgggatttggttggcacttctctgatttcctctgtaacacagagcgccatggtagatcttctgcttccaacgttcgatctccgttaatggcagaggcgctggcgatgcttcacgcgatccatcaagccagagatcttggttacaaaaaactttcgcttgcttcagattcgcaacagctgatcaaagcactaaatttggagcttcaatcgaaggagctctacgggattctccacgacatcctctccctatctttaacttttgattttatcagattctgttttgtccctagagataaaaatcgaagagcagatgagattgcaaaagaagctttattttctgcattcaatgtaccagtggttata

SEQ ID NO: 169596 - DNA, 189 bp, Arabidopsis thaliana landsberg
  unsure (1)..(189): unsure at all n locations
atgtgtcagagaagtgtggacaaaacgtatcatgcctctcttgctgatgttgctattgaagcccaaacatatgcttactacgtatctgcctctctcttgaggctcnttacaaaatctggagacaactttctaaaggcttggagccacaaagtttaagatatgagaatttttacagaatgtcatttccat

SEQ ID NO: 169597 - DNA, 411 bp, Arabidopsis thaliana landsberg
ggctgaacgctactcggccaagcgcgtcgaatcggagttggccgccgccgagaaagttgccccgaagaatcttagctaccgcatgtccaacgaaaccagttcgcgcgaaattcagccgttgaacgtgtgggacgactaccgtttcacctatttccggttcccggcatatgcccccctgcccacgctgtttgtgatcggccctgacggcaaggaaagcgttaccaacgtctcggtacagggcgagaaccacaacattctggttgcgcatacagtcgcccgccaatggcgtattcgccacgggcaggaagtcgtaggcgtggtgaacgatgggtacaacccttcggtcggcgctaatcccagcggcacggcatccccggccgtaagcgcgtgatcaaggtcaacgcgggagac

SEQ ID NO: 169598 - DNA, 423 bp, Arabidopsis thaliana landsberg
aaagagaccatcctgaaccttcatgcggttcttggcaacaagtaagagcccttctgattcttgatattatctgagatcttttttgctttgtaacttatccacaatgttcctggtgatgatttgtacaaggtggtcaatgattgcaagccactcacctggaagaactgacaatgagatcaagaatttctggaacactcatttgaagaaaaagctgatccagatgggttttgaccccatgactcatcagccaagaaccgatgatatcttctctagcttatctcagctcatgtctctgtctaacctgagaggacttgttgatctgcagcaaccctttccaatggacccccaagcgctacttaatctacaaactgagatggaaaagctccaattgttccaataccttcttcaacggtctcctcctcc

SEQ ID NO: 169599 - DNA, 559 bp, Arabidopsis thaliana landsberg
caaggtatattatactttatatacatttatataaaacaagtaagtatatcatagtttcaaatttgcgtatatattatttgtctcattatcaaacttcgtattcccaaattatatatacatgatcactataaccctatagtctctgtatccattggattaaagcttaacgttatttaattaaatttttgtcttttcttgttattacataaccgaataataaaatttgtttttccttggaaattcggaagggtatggggattgtcatctaaattacctatctgtgaaacaatcaaaaaccggaaaattggttcagaataaaccggagtgggaagtgagagtgacgaacccttgcaacaattgcaaattccagtacacgaagttgtcatgtgtcggtttccaatcggttacacccgtcgctacctcgttgttgtcaaaatccggtgacatttgtctcctcaacgccggtaacttcatctttcctcacgtggacttcgttttcaattacgtttgggacacaagcttcgacctcaaggttatcgacggcgttatcgtttgtcct

SEQ ID NO: 169600 - DNA, 304 bp, Arabidopsis thaliana landsberg
gtaaacgtatttctcgcggttggacaacttcgggcgagcggtcgtattcagtgaacctgggtttgccggctgcgggagtcaaccgtgatgcttccggatttgttcttggcctagagcggtttgggggtgttatagcaggtatatctattatccggaatcaagttctagttagttacactagaactagcattaagaacaactaaagatgaagaattctacaaataacctaacaaaggggcaatctactaaatcatctataaccctaatgagaaactctaaacctaactagaagactaatcaaaca

SEQ ID NO: 169601 - DNA, 431 bp, Arabidopsis thaliana landsberg
  unsure (1)..(431): unsure at all n locations
tcttgtttccttgagctcttaattagctaatcttaaaacatcgaanagtcaacagtttggtatccaaatttttgtctgatctatttgcaaaacttgcattatatttcaggtacatggcatatcaattgttgagaattgcaaatgagcatagttcagtcgtggcagttgtgggtagaggacatcttcaagggatcaagaagaattggaaccaaactataaacgttagtaacctcattaatacacatttggttgaaaacaacacaataaacagagctaattttgtcaccatcactgtgctaatggtattgcagataaaggaactgatggagttaccgacaaatgaatccatttttactgtaaagaatattctgaaatatatggtggttgtagtcgttggaacagccatagtttccggaatgtatcttgctaag

SEQ ID NO: 169602 - DNA, 389 bp, Arabidopsis thaliana landsberg
  unsure (1)..(389): unsure at all n locations
gtgtgccgcgccanccaagcgccccacgtgagcgatntcctcggcccacatcaagcgcccgaanctanccttgnaaccaaagagcntgngtgtaccccgcctccaattgaccaagtaacgaaaataacnttaaaattaatcngatggcacttnctccnaagctccgcacttatcgctacacctctcaactcatttcgcaaagtcnnactacantgagngtcagcagnntgtgcttgcgccgctaattctccaagncccgttcccttagctntacgttcncttgatagtagacantgagagtagtaagctcgttaatccagtcagtgcacgtcactaattaaataactacgcatttcnctagcttaagacactcatacttagtgccgcca

SEQ ID NO: 169603 - DNA, 506 bp, Arabidopsis thaliana landsberg
ctatggaaaaatcgcagaagcaagtcacccgcccaagcaactcccgaagagaatactcgaaggagataccaattgatctgttgattgagattttttcaagattgtctacgggagacattgctaggtgtcgttgcgtgtctaagctctggtcttccgtaccgcgtctgcgagatttcactgaactattcctgaaaatatcttcggctcggccgcgtatattatttaccttcctacataacggtaagcgtatgttctactccatatctcagcatctacattcagacccgagttcatctcctttggttccctactatcatatgtctttttccaaaggtatggttccttcctatgacaatgagattcatgcccctgtacgtgggtttctttgtagcaaagctagtgtctataaccctagcacaggagagtgtgcatacccttacctagagcttctagtaagaggattgagagaacctattttgggtatgatcctatcgacaaactattca

SEQ ID NO: 169604 - DNA, 481 bp, Arabidopsis thaliana landsberg
attggctttgttaaacttgtatctatcttatataattgatatcaaaattcacaaattttaaaaaataattcaaacgacaaatttgagttacttaagttatattacttactgttgtctgttgagttaattttaatatgttaattaatgtatgattaataacattgttatcttttcgaacctgaatagtatgaaaacaatcattgagcggtacaacagagtaaaagaggagccagcatcaacttttgaatcatggcctaaagaataagggatttcatagtaaagaatttttacctttttctctaaatgatagttgatctcattaggatgataaacttctgaatgaacccacattctttttaggtttttcaaatgattgtttttctgtttttttttataatgaaataaatttattaattaaatggaagatttttttaattagcgttctgaaaacatttataaaacatacataaaagaaactaac

SEQ ID NO: 169605 - DNA, 622 bp, Arabidopsis thaliana landsberg
  unsure (1)..(622): unsure at all n locations
tttgacagctctacatacgacngatgcaaaactgaagctactttgacgttgttaacaacttcatagagaatagagaggaagtnnnnnnnnnnnnnnnnnnnnnnnnccatagcatgcactatgagatttacactgactcctgaaggattattacatatatccagatgggatacgatatcatcataatggaacttatttggcgttttaccaaccgagaaatgcgatttgtaccaaatatgtggtcgtgacaattattacgacatgaaaacgtcaccaacatgtaattgtatcaaaggctttgttccaaagaatgtgactggttgagatttgggagatatattcgagggatgtgtgaggaagtcacggctgtatgccacggagatggattttttcttctaatgaagaggatgaggatgccggagacaagcacaccaattgtggaccagacaattgggttgaatgaatgtaaggagaggtgttctaaggattgtaattgtaccaggtttgctaataaggatatccgaaatggtgggtcgggttatgtaatttggaccggagagctcataggtatgaggaattatgtcgccggaggtcaagatctatatgtcaaaataggcctcta

SEQ ID NO: 169606 - DNA, 545 bp, Arabidopsis thaliana landsberg
tggtaataaaagagaaataaatctgaaacaccatggaatgatggttagacaatctcactagcattgatcttatggaatcgcggaaaatagaagaacgaaaaatgtgatttcacaaagaaaaagtctgattggtaaaaacatgcggatcaaatttcagaaatgattttaactttggttctgtaggtggaaggtctaatgcgtttgatggaaggagaccaaaccggaccgataaacataggcaatccaggcgaattcccgatggttgagctcgctgagacggttaaagaggttagcatttttgttatttcatttcacataaatgtgtaacaaataagtaatgtcgtatataatgagaattgatgcagcttattaaaccggacgtggagataaagatggtagagaacacacctgatgatccaaggcagaggaaaccagacataagcaaagctaaagaagatcttggttgggaaccaaaggtgaagctacgtgaggggcttcctcttatggaagaagattttcgtctaaggcttggtgttccgaagaag

SEQ ID NO: 169607 - DNA, 353 bp, Arabidopsis thaliana landsberg
cccgccgcgccgccttggcaacgccccccgcgaaggactagaacccgcggcctatgcgctggatgcccgccctcgcggtgatcgccttcgccgccgtcgcggcggccctcgggatggcctgggagtacgcccccgtggcccaggaagccgccgggggcatcacgcagaagatcttctacttccacgttccgagcgcgtacgtgatgtacatcggcgtgacggcctgcgtgctcgggtcgctcgggtacctcattcagcgccgcccgtgtggggacgcgctcgcccaggccggcgccgaggtcgccgtggtcttcgcgagcatcgtgctcatcaccggcccgctctgggcccgc

SEQ ID NO: 169608 - DNA, 1100 bp, Arabidopsis thaliana landsberg
gaaaaagtgaggttcgacgatgactctcgaatagacatcaaaggaaagggtatgatcgagtttatcgatcgaaacgaagaacaaagaaaaatggttgatgtttattttattcctgaactaaagagtaacataattagtcttggtcaagctacaaaagcaggatgtgatgtgaggatgaaagcagaagacctaactatgcatgatcgagatggaaagctacttgtcaaggcagttagatcaaaaaatcgattatacaaggtgagtatggggatcaaagacacaatgtgtctttattcaacaactccaatcgattcttctagatggcatgcgaggctagttcacattaatcacgagactatgaagtcaatggttaaaagagagcttgtcgtggaaattacacttgctaactttgagtcaaatgtgtgtggctcatgtttacttggaaaacaaacaaggcaagtatttccacaagctaccatgttccgggctaccaaggcattagaattaagtcatggagatctttgtggaccaatcacaccaaacacattggcaggaaacaagtatgtgtttgtactcatcgatgacttcacaagatacatgtggactatcatgttaaaagaaaaaaatgaaaccttcggaaaattcaagaaattcaaaagcgtggtagaacaagtactaaattttaagacggagatggcactaaaatttgagatgagtgaccttggaagagtgacttactatctcgggattgaagtttgtcaaaacaaagaaggaataacactaagtcaacgacggtacgcactaaagatactagaagaagcgggaatggctgaatgtaacttggttcacacgccaatggaagctggtttgaacttgtctaaagccccgaaagagaaagacattgatgctacaagtgacaggaggaatgttggatgtcttcgatatctacttcacacaagaccggacttatctttttgtgtaggtgtattgagaaggtgtatgcaaagtccaaaggagtcacatggagcagcaataaaacagtacttgcgatccttaaaggaaccacaacactcggtctagagtttcggagttaaaatcaa

SEQ ID NO: 169609 - DNA, 102 bp, Arabidopsis thaliana landsberg
cgatgtgtattgacattgagaagtgagaaagcaacaattacgaagatgccaatggattatttgaaagcgaaatcgccaaagagaagcatgaaccatctatta

SEQ ID NO: 169610 - DNA, 614 bp, Arabidopsis thaliana landsberg
atggtagcattagcattccaaggtcatctcaatccaatgctcaaattcgcaaaacatctcgcacgaaccaatctacacttcactctcgccaccactgagcaagcccgtgacctcctctcttccaccgctgacgaacctcatagaccggtggacctcgctttcttctcagacggtctacctaaagacgatccaagagatcccgacactctcgcaaagtcattgaaaaaagatggagccaagaacttgtcaaaaatcatcgaagaaaagagatttgattgcatcatctctgtgccttttactccctgggttccagctgttgcagctgcacataacattccttgtgcaatcctctggatccaagcttgtggagctttttccgtttattaccgttattacatgaagacaaatcctttccccgaccttgaagatctgaatcaaacagtggagttaccagctttaccattgttggaagtcgagatctccgtcattgatgttacttctcaaggagctaatgtcaatacctaatggcggaatttcagattgtttgaaagatgtgaaatgggttttggttactcgttttacgactcgaacagagatcacgagtctagctgatt

SEQ ID NO: 169611 - DNA, 211 bp, Arabidopsis thaliana landsberg
  unsure (1)..(211): unsure at all n locations
atcaacggctctgattgattggatggaatcaaacaactctcatatcttcaagatcaacgttcctggttacaacaaagaagacatcaaagtacagattgaagaagggaatgttttgagtataagaggagaaggaaataaggaagagaagaatgagaatttgtgtggcacgtggcggagagagaagcnttttccggtggtggagtgagttttg

SEQ ID NO: 169612 - DNA, 3011 bp, Arabidopsis thaliana landsberg
gtttgattctattagatgggactttattattgcctgcctcagagcattgaacttccctagattactcatttgttggattgagcagtgtatctctacagcgagcttctctattgtggttaatgggcagtcaggaggctatttcagaagcacccagggcctaaggcaaggtgaccctatgtccccatatctttttgtcttagccatggaggtcttttctggtctgctgcagtccaggtattcttcggggtatatctcttaccaccctagaacttctgaattagaaatctcccatcttatgttcgccgatgatgtcatgatattctttgatggtgggggctcctctcttcaaggcatttatgaaacattggatgacttcgctggctggtcagggctccatatgaacagagacaagacgcagctcttctacgcaggtctgagccaaactgaatccaatgctttggcaagctatggattcactgttgggtcgttacctattagatacttggggctcccgttgatgagtagaaagctgaaagtttcagagtatgagcctctcatagggaaaattactgcaaggtttaacgcttgggctgtgaagtctctgtccttcgcggggagagctcagctgattggctcagttatttcaggcactgtcaacttctggatatctacttttgtgttgcctaagggatgcattagacggattgaatctctctgttcccgtttcctgtggtcggggggaactgaaaaaagaggtttggttaaagtggcttgggctcatgtctgtttacctaagaaagaaggtggtttgggtctgaggcggtttgcggattggaataggaccatgtgtttgcgtctggtttggctactcttctcaaacagtggctctctgtgggttgcttggcataagcatcataatatcagcacttctaccaacttttggaaccaagttgaaagtacaggtgactcatggagttggaaatctattctgaggttgagagaacctgcttcagttttcattaagtgcagtcttgggaatgggaggcgcgccagcttctggttcgatagctggactcctttgggaccgctctacaactgctttggctcctctggtcctagctccttgcgtgttccattaaatgcgacggtttcagatgtgtgcaaccatcagggctggattattgcaaacccgagatctgaccagggggtgtctctgcaaattcacttatccaccattgccttaccttcggatgacagtgggccggatgagttcgattgggtggtcgaaaacaagatctgcaaaggcttctcctctgctaaaacttgggcagtcactcggcctagagctgccatagttgattggtgggactcagtttggttcaaaggccacattcctaagcatgctttcaacatgtggatagctactttggaccgtctcccaaccaaaaccaggctctcttcttgggggcttcagattcaggatacttgtggcctctgctctctctccccggagagtagagatcacttatttctgtcttgtgatttcgccctctacttgtggaatgcggttagtttgaagttaaatatgcagggtatccacttcactttgtgggctgagcttctttcctggctgaagtcgggtaacagaaggtcgcctcctactctcagaaagctcattgcccaatcggtcatctatgcaatctggaagcaacggaacaatctgctacacaatcttgtctatgtccttccctcggtggtctttcgcgaagtggaccgcgaagtgaagaactgcatcactgcccggcgactcaacaagcgcttctccaggctaatgagtctttggttgcactaatccgttgcctctcataacctctcttttgctttcttgtttttaagcttttttgccaagaaaccaacctttaggtttgctctgtaaaccaactctttcattattatgatatttacaagttagcaaaaaaaaaactattcactattgttgacgacttgacggtctagttgtctttgatcaaaatacattaggataatcaaatgaaaacaaccaacaacaacaaaaatatatgacaaaagttacatctcggataatgtacttcagaatcaacaagaatgagttgtgaaatctcttcttgaactatatgaatagtaagtggaagtttggaggcacacatgcgtggcgaactctgtgatatgttgttgtctatagactttcacaaactctacatacaaaataaaaaacgcaattgtagtaaaatgcttaatcttgtaattatcttctaaccagcataattcatatttgcacacacatgtgatttgggtatgcatgcaaccactatttcagtggattgatttttttatatgtcagacatattctcatgtttttttttcttctgtacgataggatacctttacatgggcactaaagcataatcaaagtcataacgttagttaacaaagctaaactagcaataacaaatatataagtcggtttaccaaaactaaactggcatcccaacaacatgatcgttgtaaacttgtaatccataacactctaacatcaaatgccttagcagacacttagctgtcggacactaagtttatgttatcatcaacgtacaagtgaactatgaacattttctattttaaaatttatttataaggacaacagagcaggaccacaagggatcaaccatgagctaggaaggcaagaatcaagaaggatgaaaccactgagcatcgtagaagttgaagttggagagaccgtgaaagcgtttgatggtctttgttataagattgaagacacagatgtcgaggcatgacgattctttgtgacggatacgatcaccacgggtgaaataaatggagttaggctcaataccaagggtatggtcagcaggcacagtaatacccaaatcaagaaagagggcctcatcacctagagaatgcacctcaagaagccaggtgtcgagggttttcgggtcaagatctttaggatc

SEQ ID NO: 169613 - DNA, 964 bp, Arabidopsis thaliana landsberg
  unsure (1)..(964): unsure at all n locations
aagctaggtgaaggaggatttggagcagtttatgaaggaancttgaaagaaatcaaatcaatggttgcggtaaagaaactatccggtgattcaaggcagggaaagaacgagtttttaaacgaaagttaagatcatcagcaaactgagacatcgaaacctcgtgcagctcatcggttggtgtaatgagaaaaatgagttcttgctgatatatgagttagttccaaatggtagcttgaactctcacctctttgggaaaagacccaatttactttcttgggacataaggtacaagataggtcttggtttagcctctgctctgctttatcttcatgaagaatgggatcaatgtgtactgcacagagacatcaaggcaagcaatataatgcttgacagtgaattcaatgtaaagttaggtgatttcgggttggctcggctaatgaaccatgaacttggttcccatacaacggggttggctggaacttttgggtacatggcacctgaatatgtaatgaaaggaagtgcgagtaaagaatctgatatatatagctttggaattgttttactagagattgtcacagggagaaaatcgctggaacgtacacaagaagataacagtgatacagagagtgatgatgagaagagtctagtggagaaagtttgggagctttatggaaaacaagaactgatcacttcatgtgttgatgacaaattgggtgaggatttcgacaagaaagaagctgaatgtcttctggttttagggttatggtgtgctcatcctgataaaaactcgagaccttcgataaaacaagggatccaagtcatgaattttgagtcaccattgcctgatcttccattgaagaggcctgttgctatgtattacatctcgactactacttcttcttcttctccctcagttaactcaaatggagtttctgtaacgttctcaggcatcgagtatggtcgt

SEQ ID NO: 169614 - DNA, 478 bp, Arabidopsis thaliana landsberg; identical to SEQ ID NO: 77401
  unsure (1)..(478): unsure at all n locations

SEQ ID NO: 169615 - DNA, 6384 bp, Arabidopsis thaliana landsberg
  unsure (1)..(6384): unsure at all n locations
atgtcgcaagagacgcagaagtcgccgacctcagacgcactatatctgaaatgagctccaaaatccaccgcgcaacaagtaccgcgcccgagcttgaccgcgttctggaggagactcagcaaaccccctttactcgacgaataactagcatctcgatcagaggcgcccaaaaaatcaagctggaaaattacaacgatagaagcgatccgaaagagttcctaacatcgttcaacgtcgccataaaccgggccaagctcacgattgacaacttcgatgccgggaggtgtcaagtattcatcgagcatctgaccggaccggccctcaactggttttcacgtctaaaacccaactccattaacagcttccatcagctcacctcatccttcctcaaacattacgcgcctctaattgaaaatcaaacatcgaacgccgacctatggtccatctctcaaggagctaaggaatcacttcggtctttcattgatcgtttcaaactggtagtcacaaatatcactgtgcccgacgaagctgcaatagttgcgctatgaaatgcagtatggtacgactccagatttcgggatgacataacgttgcacgccccgaccaccctagaagacgccctgcatcgggcatccaggttcatcgaacttgaagaggagaagctcattctggcgagaaaacacaactcgaccaaaacccccgcgtgtaaagacgcagtggttattaaggtcggaactgacgaatcaaacgagccgcgacaacacctcgatcgcaatcccagcgcgggccagaaaccaacttctttcttagtaagcaccgaaagtcccgaggttaaaccttagaacaaatatattcgcgacaccgattccccatcagcagggccgatgtactgcgaataccacaaaagcagagcgcattcgaccgagaattgccgtttcttgcagggcctcctgatggccaagtataagagcggtggaatagcaatcgagtgcgaccgacccccgataaataacaaaaatcaacgatgtaacgaaactacggcccgacaatatttaaacgatcaaaccaaaccaccgaccccagcagaacaagggataaccacctcggctgacgacccggcagccaaaagacagcgaaacggaaaatctatcgccgcggaaccagtcgtggttagacaagttcacgtaataatgggaggactccagagttgcaacgattcagtgcgctcgattaagcaataccgaaagaaagccgaaatggtggtagcttggccctcatccataggcacgacaagaaatccgaaccaaaacgcgccgatatcatttaccgatgccgatctagaagatttggacaccccgcacaacgatccgctcgttgtcgagctaatcataagcgatagcagagtaacaagagttctgatcgacactgggagctnnnnnnnnnnnnnnnnnnnnnnnnnnnnnnnnnnnntgaacataacggatcgttaaatcaagccagtctccaaacctctcgccggtttcgacggagatttcgtcatgacaatcggcacggttaaattgccaatctttgtcggaggagtaatcgaccgggtgaagttcgtcgtgattgacaaaccagcggtctacaacgttatcctcggtaccctctggattcaccaaatgcaagccatcccgtccacttatcatcagtgcgttaaattcccaacgcacaacggcatcttcactctccggggtaaccaacaggtcgccagaacgtgcttccttattgagcacaaaaatcgaaccgccaaaaagttatagcaattaaccgctccagcgccgaaggaagccaaaaccccgagtaggtcctaccaggagtctgagctgtgtcgcaccgagatgataaacatggatgaatctgacccgacaaggtgcgttggcgtcggcgtaaaaatttctcagtcagttcggcacgaactcattgccctacttaaacgaaactctaaaacgttcacatggagcatcgaggatatgaaaggaatcgacccggcaatcaccgcgcatgagcttaacgtagatccaactttcaagccggtaaaacagaaacgaaggaagctcggcccggaacgcgcacgagcagtgaatgaagaagtggataaactccttaaggcggggcaaatcatcgaggtgaaataccctgagtggctcgtaaatccagttgaagtcaaaaagaaaaacggtaagtggagggtttgcgtcgactacaccgacctgaacaaagcctgcccaaaagacagtttcccattgccgcacatagatcgcctcgtagaatcaacctctggaaacgagcttctgtctttcatggacgcttttgctggttccaatcagatcatgatgaaccccgaggatcaagaaaaaactgcattctacacagaacaaggaatcttttgctaccgagtgatgccattcggactcaaaaacgctggggcaacctatcaacgcttcgtcaataaaatcttcgcattgcagatcgggaagacaatggaagtttacatcgacgacatgttagtgaaatctatggcagagaaagattacataccccatttaagcgaatgtttcaagcagcttaacctctacaacgtcaagctcaatcctgcaaagtgtcgctttggagtaagatccgacgaattcctcaggtacctagtcacgcaccacggcatcgaggcaaatccgaagcaaatcgaggcattgttgggaatgacgtcacctcagaacaagcgagaagtgcaggggatgaagtaagaatcaataccaacattgatcttactagaactgacaaacttgctgatggattcgctgaaggaccaactgaaggtttcgctgaaggactccctgaaggacttgcagaagtacttttcgtacaagattattcgatgccaaataaggaaagggacattacccttattaatgatgcgtctaacagaatcaagaagatactccaaaccgtccataaagttccccacccgagttatgctacacctgacctcacccaagattaagactcgtcttaatcttaaccctaattaaaggtcagccactatcgttgttgttgagtgtgttagtcattgtgaaacgcttttaaaggagaagaaaaaggaatagaaagagaagagatgaaatataatcgtgaggaagatgagagaaagcggagacgaaggacgatacgtggcggaggagaagagatcatcaccaccgcaaaggaaaggcattaagagatggagatttcgtttgtgacagtaaggagaaatgagatgaagcggatcctagtaaattagagaagggggctaggcaaaactagaatcatataaggaagaagatgaaaagaaaagagtagctttaagttgaggttatacaaggatgttttccgtcataccagagagaatcagttgttaaataaaacatctctgcaaagatcacgttgccatgaagccatatcaactgacagagtttcaatcggatttatattcgagaagttatacacgtttttttctggacaagtaactgcagaagctgtccaaatctgtgctaagtataaatccagaacagtgtgtgactactgggtttgtgatgcgtttttcagatgtaccagaaagaattatatcgatatcaagatgtctacggaaagatattgcttcaaggaactcagagtatctgacaccttgtgcatcggatttaagctccatccagaattgaccttagaagtttgcccggaatcatctcaagttgcagaaacctagatatcagttatgatgcagcatcttcagaagaacgtgggagattcatgtgaagtctgatcgagatgaaactttgtggagacgttcatgttactactttctaactgatataggtcaaattgccttaagaccactctctcaaataagagatcgattgtagcacttaagggtcaaattccacaaagctctcggatcacacaatagaccaaggtattgaattaagctaagtaaaatagtaatgaaaattaaaagaatagaagaaagcaataacagattgtgaggttgtaagacaagaaagtaaaaacgtcaggcttaaggtattctcaggaaactattggttagtagatctaattatagctaggttgttatagaaccattcttaaactcaaactctaattatggaataaccggtggcgttccgtgaaactctctatgcctatagctaagaactttaacttaaacatgcattctaaccgagttcaattctttaccttagtagataggctgattcttattacacacctataaactaggctagtcaaataatagatccaactacagatacctatggcgggtatatctattgtctagattcaagatctagttaattactctaaatctagcattaagaacaatcaaagatgaagaattctacaaataacctagcaaagtgggcgatctactaaaccatatgaatccctaatgagaaaccgtattcttaacaagcaaactactcagacatattgattgaaacaagtaacatatttgatatagaaagcataaacacagcaaataagattagagtatgaaaggatctcttcactgtattgaaaatttgaatgaatctctaaagaacaagggatgaatagcttatgtctctcaaagaaaactagatgaaaagcttgataaaacttgatagaaaagaacttaggtctaaacaatgactttaaaaactatatatatgacctaataaacgtttagggactaataatgcaaatagggaagtcttctagagcaaatttctacttctgtaaacttgaaagcgttatggacttctttggacggaaaccagtgtcgatcgaccccaagagtgtgtcgatcgacagtctcactgaatctgaaactgaaatcgtccttaccttctttttccttaggttttgcttcaaaatgtctcctcatctccattgttgtcctatttcatagaatacctggaaagactctaaaaacactaaaaaaataacaaaaagactcaaaatcctatatcaaaaatatagtttaaaacagtaaaaatagggttatatcaactctttcagacttagcttttgcttgactattatcagacaagaattggaacttgaaccaatggagcagcttgtagccgaggagcagcttgtaccggaggagcagcttgtagcggaggaagctttgggggaaccaatcggtcctatgactcgttcgaagattagacttctccaccaagccgttaccggacttcttaaccacttgggcaagcatccaaatgaagtcatacaaaccgtttggaactcgatagcagctcaagacaattggtaatgggctaagtgttacttaggtactctttttcccttataagattttgccccaatgggttttccttagtaggtttttaatgaggcttgagtaacacttccaaatcccccattatcaatccggcccaggcccactaagacaaccaagaatttaaaaggccaagggtctatttttgttcaaactttcatttatgatttctccttttccgagttgtcttatagtttgttctaagactaactcttccccttctcttcttctnctaatnaaactcttgtatttcctcattgtaaactcatctatctttttactctcaaagtcttttaagctacatcaaaggtaaatcaaacgccatccgcatcctttgtgtgaccatttgctccacatcctttggtttgagtgatctcatgatctcttagatgcaaagtctatcctttgctcaacttaagagtgccgagtccttgggaggatctcatcatgtggtatcagagcacactctgaaagttgagttctctatcctttcatcacttcatcatttcgtttcattctattcatcatttcatcacctcatttcattttgtccgttcatcttctcatctgtcttttcatcttcgctgtcatcttgctttaattttcataaataattggcttgggataaaattgcgaaatcaattggatctgaatctaggacgagtctagtattttatacaattgtttctggaatttttgagcatgatttgataatttattttgttcgatctagtttgcctgttcttagaaaaacgtttgatattctccttgaactagtgactggtttagtgttgtttgttggcaggaatggtgacatccaaatcaagctcgggagtgagtgctaatgaccaagccatcatcgatgctatcacgttacaaatggagaaaatatttgatgccaaacataagccgatcaacgaccaactcaaaggaatagagcaatatgagcagatctcgcatcaaaaagaggcaaaacgaaatagaccccaagagaagcataattggaggagtag

SEQ ID NO: 169616 - DNA, 521 bp, Arabidopsis thaliana landsberg
  unsure (1)..(521): unsure at all n locations
gtaggttgcaaacccgatcaaatgattttattttgattcctcgatatgatctgattcttttcatttcagcatgattaaattgctattgctcttgtttcagctttgagtttcatctgagagtctcattggcattagatgggaacctaacactgatatcacgagtcagaaacatcaattcaaagccttttagcttttccattgcttaccacacttacttctccatttccgatattaggtgaaacaccgaatttagcctctactagtctctgctgtcacataatataacgtagaactcaatacattctcttttcttttggtatttatcagtgaagttagacttgaagggctggaaactcttgactatcttgataatatgcatgatagagagcggttcacagagnnnnnnnnnnnnnnnnnnnnnnnnnnnnnnnnnnnnnnnnnnnnnnnnnnnnnnnnnnnnnnnnnnnnnnnnnnnnnnnnnnnnagaaaacgcacattcctcatcaagaaagaaggtctac

SEQ ID NO: 169617 - DNA, 988 bp, Arabidopsis thaliana landsberg; identical to SEQ ID NO: 35233

SEQ ID NO: 169618 - DNA, 2491 bp, Arabidopsis thaliana landsberg
attcggaagtatgttagtcagcacagttgtgactcttcattaaagaatgttagtcgtcgtcaagcatctacaaggacattaggaagattgataagtaatcattttgaaggaggaaagcttctcctcatacttaaacagctgatggaaatatttagaaaaaatcatggagttgggatcaattattcgaaggcttggagagttcaagaacatgcagcagaacttgcgaggggtttacctgatgatagttttgaggttttactgatgtggttcaacatggtacaagtgacgaatccaagttctatcacttttttcaaaaaagagttttctaataagtttaagtatgcgtttctggcttttgatgcatcaattagaggttataagttgatgagaaaagtcatatctattgatggtgcccatatgacatgaaagtttaaagggactttgcttgctgcctcagtttaggatgaaaattttaatttgtatcctattgcttttgcaatagttgattctaaaaatgatgcgtcatgggactggtttttgaagtgtttgcagaatataattcctgatgagaacaatttagtatttgtgtctgactgagctgcttctattgcaagcggacttccagagaattatccacttgctcatcatggactttgcacttttcatttgcaaaaaaacttggaaacctatttcagaggttcttcacttataccagtttactacgcggtttctagagtttacataaagacggaatttgattttttgttctgggaaatcactactagtgatagaaaatttgcacaatatctttgggaggtagatgttaggaaatggtcttggtatatccctatttttactgattttaactatgttttaggtataggttttagagtctaattattatttctacagtcttttctagtctttttcaggtctttacatgtttgggatgcatttggagattatggagcattctggagtaaaacaaacaacttaagctgcaaaagcaatccggagacaaaaatgcacgtaggtgtcgaacgacaccacccctggtgtcgagcgacaccaattcctgacggcaatttcgagacgcaatttattgatgttttaaagattttcaaattcggcctataactttcttctatgtttaatgaaggcccatcacgtgttttagacatataattaggtttttagggtcattgtttagacttaagctttgggggcgattccctttatctcttctgtactttgggagcaaaaccctgtggaactccctttggatctttcttactctattatcttcttgttttattcattgatttctattctaatcatgttgtttgttttattcatcatgcttgagtagttttcttgttaggtttagggtttctcattagagttatagatgatttagtagattgcccccttgctaggttatctgtaggaattcttcattttgattgttcttaatcctatttctagagtagctaactagaacttgattgaataattgaatatcaaagcaacgtttgaaaacatgataacagaaatgatgaaagacttagacgaaaattgaatatcaaatacttgaaagtgcaaaaatacaaagtcgcaagagaaacattgcggctatcaaagttgcgaaatgtaaaagcaagataaataacggatgccctagggaaaaccctaagaggcagtttatataagcgagaaatgaaacaaataaggaaactaaatatatagcgaatcttcacgtcatgatcctgcgaccgaatttatcattggcatctgacgggctgaaatgagtttccttgtgatcgagtatgtcattgatcaaactgggcttcaggggctccgccttgcgatcgagtgagatgtagtgaagtcgagattgaatggtctagcgaccctgtgatcgagtgtgatcgagtggatgtcatgaggtggtgatcgagtggttgcttcaacttctcttctcttcttcgttctcagcttgtttggttgagtgcagaacgagcagataggacttctggtgatcgagtggtgatcgagtggttctgatggggtgattccttcgggcttcgcgcttgagtgaaactgagctgctagcttctccggggttgcgatagagtgatatgcctggcagggccccgaggctgcgatagagtacttttgctgaaggcgtcattgggcattctgacttctcgttctgtttctcctctgtttgaactccaaaagcatccaaagtacctgaaaacaaccaaatatgcaatgcacatgcaatcctaacgcaaaaaattgtcctaagtatgtaaaacacactaaaacgactcctaatgagacgaaatgtggatgaaacaatgataaagtggtgaagaatgattgcctaaatcatgcaaattatagacatatcactggtgcatcatagatagttcgtgatcctaatggccatgtgttgctacatagcagaagatcttattctcaggtg

SEQ ID NO: 169619 - DNA, 311 bp, Arabidopsis thaliana landsberg
gagaagatgtattatacgctgaagcctgattttataggtcgggaccggttcattgaaacgtttatggagctgggattcaggataaaaaggcagaggaattacagaagaacgacctatgcatcatctgtatattatccgaatttgataaagggtcttgaaataggtaggccgtcaaccgtatggcagtcagatattacctacatagcggttggggacaaattctattatgaagtgtttattaatgatgtatataccagaaaaatagtaggttatgaggtatctgaccatatgagagctcggcaagatgtcaa

SEQ ID NO: 169620 - DNA, 528 bp, Arabidopsis thaliana landsberg
atagaaaagagacgagacaattcaatggacgtaacgttacctcatcatgtggtagaagatattcttgaacgacttcctgtaaaaacactccgtaaattcaaatgcgtttgtagcacatggagatccactatagactcacaacgtttcaaggatagacatatgattcatggacaactactcgaagatcccgatatcctccttctcgggcgttgggatcctcccagtctatccaaaaacgcttctctaatgacattgacgtttgactcatcgaccatgccgttttctttcaagattcaaactatacccggaaaagccaacttttacaaagtcactcaaagttgtgacggtctagtgtgcatatacgatcttgagaactttatgtgtgtgatgaatccggcaacgagatggcagagaagtattccacagccagtagtgatccaaaaatctctatcgtttggtagtttgataaacgaattacctacgcttggattcggtaaagacaatatcagaggcatatcaaggtggtag

SEQ ID NO: 169621 - DNA, 531 bp, Arabidopsis thaliana landsberg
atgcttcggctcaccgaccttcagaagaagatcgacgaagctgctgaagaaatgcgtcacctcactcaggatgaccaagtctgaaggccccaacacagggagctttgccaagaaaactcattcaatgatgatgaatggtatggtgactttcatcatggcaattttggttttgatgatgcttctcctctgtctgctgagctgcaggctacaccttggcctccatcctataagccaccccagctccccatgtttgacggccactctgacccgaagcaatttttgatgagctacgaagcaacagtgtcttcgtacgggggcaacgctgcaatcatggcgaagtctttcgtcatggccgtcaggaatgttgctcagacctggtattcctcccttcggccaggaacaatcacttcatggcagaagctgaaggatatgttactgaccagctttcaaggatttcaaacgaagccggttacagctcaagccctcttccagtgtattcaggatcacgaagaataccttcaggcgtagggg

SEQ ID NO: 169622 - DNA, 1486 bp, Arabidopsis thaliana landsberg
  unsure (1)..(1486): unsure at all n locations
tttatngttctcctcctacgagaaaaatgaagatggccaaggagctatcacattcggggatggaaatcaaggtttggtccaaggacttggtaaaattactatatcacctgaccattccatttccagtgttttccttgtagattctttagattacaatttgctttcagtttcttaattatgtaaaatgggctacaactgtctatttacagatgtaggtgttactgtctttagaagaagtgatgattcaatagcatttaagggagtattagagggtcagctatacttagtagattttgatagagctgaactcgatacttgcttaattgctaagactaacatgggttggctctggcatcgccgactagcccatgttgggatgaagaatcttcataagcttctaaagggagagcacattttaggactaacaaatgttcattttgagaaagacaggatttgtagcgcatgccaagcagggaagcaagttggcactcatcatccacacaagaacataatgacgactgacaggccactggagctcctacacatggatctattcggcccgatcgcttacataagcatcggcggagagtaagtactgtctagttattgtggatgattattctcgcttcacttgggtattctttttacaggaaaaatctcatacccaagaaaccttcaagggattcttgagacgggctcaaaatgagttcggcttaaggatcaaaaagataagaagcgacaatagggtccgaattcaagaatcttcaagtggtggagttccttgaggaggaggggatcaagcacgagttctccgctccttacacacctcaacaaaatggtgtggtagagaggaagaacaggacgctcattgatatggcaagaaccatgcttggagagttcaagacaccggaccagtttttgtcggaagcaatcaacactgcttgctactccatcaacagggtctatcttcactgcctcctcaagaaaacatcatatgaactcctcactggtaaaaagcccaatgtttcatattttcgtgtatttgggagcaagtgttatattcttgtgaagaaaggtaaaaaatctaaatttgctcccaaagctgtagaagggtttttattaggttatgactcaaatacaaaggcgtataaagtcttcaacaaatcatcgggtttggttgaagtctctagcgacgttgtatttgatgagactaatggctctccaagagagcaagttgttgatcttgatgatgtagatgaagaagatgttccaacggccgctatgcgcaccatggcgattggtgatgtgcgaccacaggagcacttggagcaagatcaaccttcttcctcaacaacggtgcattccccaactcaagacgatgagcaggttcatcaacaggaggcgtgtgatcaagggggagcacaagatgatcatgtgatggaggaagaagcacaaccggcacctccaacccaagttcgagcgatga

SEQ ID NO: 169623 - DNA, 320 bp, Arabidopsis thaliana landsberg; identical to SEQ ID NO: 72639

SEQ ID NO: 169624 - DNA, 609 bp, Arabidopsis thaliana landsberg
  unsure (1)..(609): unsure at all n locations
cactgtcaactctaacgacgaaggagctgtgtttgttgatgcacgtgccgataattgtcctctctctgaatttctcagatccccagattctgattccctccaactattgcttccgcttgacgctgaggccactcctacatggccattgctgctggtaaaggcgacctacttccaatgcggcggcatggccatcggaatctgcatctcccataagctcgctgatgcaacatctcttgccaatttcattcaggcttggactgccacggctcgaggagagagagactcgatagcannnnnnnnnnnnnnnnnnnnnnnnnnnnnnnnacctgctaatgaggcctacaaatttccgacagtagatcaaaccggtaagagaacaagtgtcaccaagagatttgtttttgcggcatctaagctcgaaaagctcaggaataaagccgctggtgtagatgccatgcctcgaccgacgcgggtccagagtgtggctgcccttctttggagatgcgctgtggctgcaacgccagacacaaatcgtgggaaagtctgcgccactcgcataacttgcgccccaagataccctccacttttgtcggaaaacctaatcggtaa

SEQ ID NO: 169625 - DNA, 459 bp, Arabidopsis thaliana landsberg
tcaagaggtaacccgggtttagccacggctggtggggtcattagagatgcggtggggaactgggtccaaggttttgcttttaatataggggtatgtacggctcctttagcagaactttgggggttctactatgggctttattatgcatgggagaagaagattactcggttaaagttggaagttgattcggagatggttgcggggtttcttaagacggggatatgcgatactcatcccttgtcgtttctaccacgcttgtgctatggctttttatcaaaggattggttggtccaattgtctcatgtgtatagggaggcgaatcaccttgcggatggtttggctaattatgcattttcatgccctttagggttgcatttactagattcttttccggattgtatctcatctttttttgatgaagactctcgtgggatctcgtatccacggcgtatttgtttg

SEQ ID NO: 169626 - DNA, 1289 bp, Arabidopsis thaliana landsberg
aactgggtcattctcgtcaatgttgttaatggcgtttacagtgcccacagttctccagttgcatgatctctatgaagaaatagattctaatgctcatctgcaacacttggttaaagaatgtctatcagctaaacaagggactagtgcctatactgtgaaagaaaaacagataatggaagaaacagagattggtcattcctaaagactcaaagttcttaccactcatacgtgctgaatatcatagtggcctgttgggtggtcattcgggtgtgttgaagacaatgaaacgtattcaacaatcatttcattgggaaggtatgatgaaggatattcagaaatttgttgttaagtgtgaaatgtgtcaacgacagaaatactccaccttatctccggctgggttgttacaacctttaccaattccaacgcaggtttgggaagacatttccttggactttgttgaagggctgcctggttctcacggaaaaaatgtcattttggtggtggtagacagattaagcaaatatggtcatttcattggtctcaaacatcctttcaatgcagttgatgtggctagaatttttattcacgaggtagtgaagctgcacgggttccctgcatcgatagtttctgatagggataacacgtttttgagttccttttggaaagactgcttcaaactatcaggcactaagttgaaatacagcactgctttccatccgcaaacagatggccagacagaggtgttgaatcgcacattggagacttatttgcgatgctttgcttcagctcatcctaagacttggttccaatacttacctagggctgaattgtggtataactcttcttttcatacaactatcaaaacaacaccttttaaggtcttgtatggcagagatcctccaccaattatgcgttttgaagctaattctactaagaattgtgagttagaagggttactcaagcagagggatttgatgttggccgatattaaagagcatttggtgaatgcacagcagttaatgaaaaataacgatgataaacatagaagagaagttgagtttgatacacggaatagggtgttcttgaagctaagaccatatcgtcaaaattctgtgacaaagagagtgtgtcagaagttggcagcgaagtattttggtccgtttgagatcatggaacgcattgggaaagttgcttataggctgaaacttccagagggttctaaaatacaccttgtttttcatgtgtctcagttgaaacaggttttgggtgaccaccatcaagtcattcca

SEQ ID NO: 169627 - DNA, 265 bp, Arabidopsis thaliana landsberg
ttgggtggaagccacaattatttaatttaattaaaaagatttatttttaacctaaccgctaccgcccgcaaccgcaaacgcttgcgggaaggagcttttgaaaacggacgattttgagcggtccaaagcaatgtctagcggtttctatgattggtgtcaatcgctaacaaccgctaacaatcgctaccaaccgtaaacgctgcgtttgcgggtggtagagcgagaaccaatcaagccctaagttctggttttttaccttttttgt

SEQ ID NO: 169628 - DNA, 468 bp, Arabidopsis thaliana landsberg
ctttagtggtgttgtcgacgttctttcatagaggagaatacaacaaatacgagccatttattttaggtacgtacgctatatatatatggttatttagcttttcttgatcatatacaaatatgtaattatccaaacatggtgcatttacaaacagcatctcaagtagaacaagtctgtttgatatccatacacgaagaaaccaaagcgggagtggtcaacgttttaaaagtaaatccaaggagaaacatattaggagaatatgcaaacaaagacgagactctattgcaaaccgaaaatgatgatgatgttttaatgactacaatagaagatcttgtactcgacaatttgacataagattgcagcccaataaatattgactacgatgtctgagatgccgatccagaagatgaattttggtgtaatttatcgccttctgatgatgaagaacaacaaaacgaagaacaatat

SEQ ID NO: 169629 - DNA, 1038 bp, Arabidopsis thaliana landsberg
tgacatgatggatgtgctgttggaagcttatagagatgaaaatacagagtataaaatcacaagaaaccatatcaagtccgtgatcgtggtaaatgctcctctcttaggtggattcgtgagtgaacactattgctttgacctgactaagaaacgtttcggttgtgaattcgggtgaaacctttgaataaatgtttggaatccctaaatgtttctgtttgctactacaggatcttattgttgtaggcactgacaccttaacgcaaacaatacagtggacaatggaggagctcactaacaaccctaacattctggagagattgcgaatcgattgtagggcttaacaacgttaataaaaaaaactgatctaccaaacctctcttactagcaagcggtagtcaaagaagggctaagattgcatccaaagccggccataaggccaagcaagcaaaacacatgcttgcggccgcctagaatatcatttagtttcgggcattttctagttaagttcttgtcgtctaatagtttaaactcaatgagttcgacccttgaaagtgaagtttaaacataaaaatattttacaaccaaatcatgaaattaaatatattatgtggcctattttttttccttagcttgtagcctcgcgaaactcggagacgtgaactcaatgagttttgcataccagagaagacaatatttgttgtcaatgcttatgccatgatgagagatcctgattcttgggaagatcctgacgagaggtttctaagttcttcaagtgggcaagaagacgagaaagagaaaccgtttaagtaccttccttttggcggcgggaggagaggatgtcctggaggtaatctagcttatatatttgttggaactgcaattggagtgatggtgcagtgctttgactggaaaatcaaaggagataaagtcaacatggaagagacttttgaaggaatgaacctaagcatggttcatccacttaaatgcactccagttcttcgaagccaaccttttttttaatcttacttggttacttct

SEQ ID NO: 169630 - DNA, 1307 bp, Arabidopsis thaliana landsberg
ttatttctgctctgaaattttctcgtcttctccggaaggatctgaaatctcttggatctgctcggtgccttcaaaataaaattggcgattcgacgtagtgggttttgtttctgcagctctcttcttgaccctgaagagcttttgaagttctctgcttgaagaagaatctccagacacaaaacaaagcatggtagtttcattattcacagctattgaaatctcttggaaattttgatttgtgttctcttaccttatgtagctactttcaatttgatggatttttctttccgttgaatctctaattattatggagcttgccttctctaagtttttaaggttgatgctaattagttttatctgaggttgagctggctatcttatttttctaatcctaggtttggcattgacttgatggaagtatattcgcttataatggtctcttgatgtgtatgtttttaatcgatttcttaaaagaacagatcttttgaccttttttactgtgcattgacatgttcttgagtttggttcatctgtgttgatgattaatcatgtcatgttcaaataactaatcgtggttgtgaataaacttgttctgtggaaaatatcagtgttacatggactttttgattgtgatttcttatttttgaagtctataaagtttgactctgcttgttcacccattggcttgaggaaaaaataagtcttctctttgatatacttgagttcctttgtgattatcataagctgtcttacaatttaggatgagtatcaaacatgtcttcctcatttttctaatctgttataagcaatcaatacagagatatgatttgtttactcttagggtcaactatatggtgacttttatggttgtttatcaaaaaaaaaattcatgtgatagcttggatcacgctctcaaatgatttcattcttataattaaatgttggtttatctgttatataagggtctgttttgttcacttcctgtgatggtttttttgcctttttatattttctataaattcaaatcaagaattctagatcgtaggcatccaaaatatggtctgacaaagtggattaagcttgtaacagcgataatggcattacacaacttcataaggaatttacatcgagaagatcatgattttttacagtggcaaaacacagaagaatatcgtgttgatgatgatgatgatgaagaagaagaagatgaagaagaacatgttgcatatgagccgaccggtgatagagcgatggaagctttgcgtgacaacatcacgaacgaatgcaatagaggtcgtttaccttat

SEQ ID NO: 169631 - DNA, 481 bp, Arabidopsis thaliana landsberg
cgccgccgcgatccggcgccgggcgcgatcctttccattccacaagcgctgaagctggctcatgagccgatcgccgactgcgcccgctatgacagcctcaggaggacaagcagccatggaacgcaccgaagtgctggaactgatgggaacgctgaagctctacgggatgcgcgcggcctatgacgagatcatgggcgtcgccatcaaacggcagcacgagccgccgaagatcgtcggcgatctgctgcaggccgagatatccgagaagcaggcccgctccatcaaataccagctcactgtcgccaagctgccgctggccaaggacatcgacgacttcgacttcacctgcacgcccgtcaacgatagcctgatccgcgatctcgctggcggagccgtcgctgccgatcagcgcaatgtcgtcctggtcggcggcacaggaaccggcaagtcccatctggccatcgccattgcccgggcgctc

SEQ ID NO: 169632 - DNA, 194 bp, Arabidopsis thaliana landsberg
gttgtcatggatcttttaaagagtaccccatctttttcacagacttgaggtaacaagacgaaaccaaatcatcattggggaatcaacaaagaggtagcttcattcacgtcttttttaagctccgatctgaaatccgccgtctcctccgtccttcctcagactctcttcctctctcttgcaaacatggacagcga

SEQ ID NO: 169633 - DNA, 410 bp, Arabidopsis thaliana landsberg
  unsure (1)..(410): unsure at all n locations
catatgatatcatttgaaaatgaacatgtcacagccatgttttcagttaggggcgtttaattacaaagctttaaaaatannnnnnnnnnnnnnnnnnnnnnnnngagcgacgaccttcagtattgggctagacatagtccggtattatttcccatcgttggcggtctgaaagacaattcttgctatctggatggacagcaataccatttgtcgagacatggttatgcaagggacttcgagttcagcgtacatagggtcagtgatactgaagtcatatttgcgttcagccaggatcaaaatacggtgaaagtagatccattgaatttaatcctcacagttatccataggattgaaggctctccncaatagagtacgagacaggtcactaatccggacaaaagtcctttatt

SEQ ID NO: 169634 - DNA, 432 bp, Arabidopsis thaliana landsberg; identical to SEQ ID NO: 66841

SEQ ID NO: 169635 - DNA, 1126 bp, Arabidopsis thaliana landsberg; identical to SEQ ID NO: 70442

SEQ ID NO: 169636 - DNA, 1224 bp, Arabidopsis thaliana landsberg; identical to SEQ ID NO: 31562

SEQ ID NO: 169637 - DNA, 531 bp, Arabidopsis thaliana landsberg
  unsure (1)..(531): unsure at all n locations
tacccatgaagctctctttaaggttctgttgtttacaatgtcctgatttatggtctaccntgtgttatataggcagcttcatctccctctattgaagatatgttagccggtattgtcctaacatcgcctgcactccgtgtcaaacccgctcatcccattgtcggggtaagtcgtctcctttgcagtatttaagttagatggttttctcattttcggctggagaatttagtaggtatcattaactctatgtttcattgtaggcaatagctccaatcttctcattgctcgcaccaaggttccaattcaaaggagcaaacaagagaggcattccggtctcaagagaccctgaagctctcttagccaagtactctgatccgttagtctacactggtccgattagagtccgaacagggtatgagattcttcgcataacggcttacttgacccggaacttcaaatctgttacagtgcctttctttgttctccatggtacagaggacaaagtcactgatcccctagcttcccaagact

SEQ ID NO: 169638 - DNA, 466 bp, Arabidopsis thaliana landsberg
ataagtataaagttgccagacaagacactagagctcacagcggccaccgcagcctcatggaccaaagtttcaaaaaaagctcataaacatcaaccaatcttcttgcataaccaccacatacccagccttatgcgtccaatcactttccgtctacgcaaatgacatccaaacatttttcaattcaaaaacaaagacaataaattcaacagatctaacaaaaataaatttaaagtgaaggataaaatcataaaattaagaacccataacaaaaaaaaaagtttaaagatttacaatctaaagcctaagctaggatcaacgaatcacatgtaccgttggcctttatgattcaaaaccaaagaaacctattaccaaaaaaaaaaaaaccgaaaccagaaaccgtaagtaagacaagagagaagaacatggaaccagaaaaagagggagattaagggaagagggaattcgg

SEQ ID NO: 169639 - DNA, 649 bp, Arabidopsis thaliana landsberg
caccttcaacgcgctgttcgaatccaagcagcagatcatcctcacctgtgaccgctatccgaaggaagtggacaagctggaaccgcgcttgaagtcgcgattgggctgggggctgtcggtggcgatcgagccaccggacttcgagacgcgcgcggcgatcctgctgtccaaggcgcacgacaagggcgtggatgtgagcgaggacgtggcgatgctgctggccaagcgtatccgctccaacgtgcgcgacctggaaggcgcgctcaacacgctggcggcgcgcgccaacttctatggcaagccgatcaccaccgcgttcgccgaggaaaccctgcgcgacctgctggccacgcacgcgcaggcggtgacgatcccgaacatccagaagatcaccgccgactacttcaacgtgcgcctgcaggagctgctgtccaagcgccgcgtgcgctcgctggcacggccgcggcagatcgcgatggcgctgtccaaggaactgaccgatcacagcctgccggaaatcggcgaggccttcggtggccgcgaccacaccacggtgctgcatgcctgtcgcacgatccgcaagttctgcgaaaccgatccgcgcatgcggaaggactgggaacagctgatccgcatcctcaccgggtga

SEQ ID NO: 169640 - DNA, 894 bp, Arabidopsis thaliana landsberg
atactagtgagaactgacattatatcttttaatgttatagatacatttactagaaataggtgaaaactcaggggccagagtaagtaatgtatattagatccatgagtagtccttcttactattgtaattcctgacttagatttctaatcaactattttgtagagtgtaaacaaaacatcacacccttggttgattggtctgggagtgatgaagacgttggtgaggggcgtattctatcttctgatcctgatgacttagttaatgactgtcgtctaggccctaaagggttggttgaatctgctactaaagcagatgcattcctctggagaccagcaactaagatgtttactatggaggaagctgttggacagattattgcatggccagcgtcaaagtgtgttcttttggacaaggaactccaaatagaagacattgggccttggtaattttttattgttgcttcgttgaactcagactgtttatgagttgctatttgatgtgttgttttctatatgtttttgacaggatctacgagcaaactctccgaataaatgtaaactgctggatttgtctaatgatgatgtgattgttgctgagggttgttggcagacacaagaagaaactgcgttggttaatggactaccacttggaccaaaggcagtaaaagtatttgtggattcagtgcttcaaccagacacattcatatggagaccaacaatggatatgacctatcttgaggactgtttgatggcttttgtttcatggcctgtcaataaagtttgctttgagaatccatcttctagacaggattatgcatccccccctattgggacaaaatctgcagagacaagtaaaaaagcagcgtcaactgcctctaaagcctcaggctcaggt

SEQ ID NO: 169641 - DNA, 605 bp, Arabidopsis thaliana landsberg
tttttttttggtacaaggtccaggttttaaagcattttggtgattaattcgggggttattgtaaaaacacagatgctaagactgagattttgaagaagaagaagaggacaccatcgagacatgttgctgaactatccttagaagagctttcaaaatactttgacctcactatcgtggaagcttctcggaatctcaaggtcggtctcactgttttgaaaaagaaatgcagagagtttgggattccacggtggcctcataggaagatcaaatctctcgactgtctcatccacgatcttcaggtcttctctctctctctctctctttatcaatcctaatacatcaattcactgaaagaagcattgatttgttttggtattgattagagggaagcagagaagcagcaggaaaagaatgaagcagcagcaatggcggtagctaagaaacaggagaaactggagacagagaagagaaatatagtgaagagaccattcatggagatagggatagaaaccaaaaaattcagacaagaaaacttcaagaaaagacacagggcttctagagccaagaagaatcaagaatctcttgtcacttcctcttccacttaa

SEQ ID NO: 169642 - DNA, 419 bp, Arabidopsis thaliana landsberg
  unsure (1)..(419): unsure at all n locations
tgcagtctctacaataacattcatcctccaaccaagtgggtttcgggggcggatctttactgcttcaaagataagattgannnnnnnnnnnnnnnnnnnnnnnnnnnnnnnnnnnnnnaatggagtatgatgttccctaaagctacactagaatgcaattggcttaacgcggtattgtaacttttcaggacttcattgtagtttttcccttggctattttgcttgtttgatgcatctttgtgatgtttcttgtctcctttttttagttacttgcgttggttggtgagcaatttgaccaaggagatgagatgtgtggagcagttttgaacttcagagcgagaggccccaggctctctctatggacaaagaacgctgagaatgaaaaggctcaggtaaaacatggatgccttatattagat

SEQ ID NO: 169643 - DNA, 517 bp, Arabidopsis thaliana landsberg
gcttgggaaacgaggcagaggcattgatttatcaaaggaccacaaacctaactgtacttccgagcggctacgtattgagaagcttggaggtgtgatctacgatggttaccttaacgggcagctatctgtggctcgagccttaggagattggcacattaagggaactaaaggttcactctgcccgctcagctgcgagcctgagctggaagagattgtgctgacggaagaggatgagtatcttataatgggctgtgatggactctgggatgtgatgagtagccagtgtgcagtgacgatggtgaggagggagctgatgcagcataatgatcctgagagatgctctcaagctttggttaaggaggctcttcaacgaaacagctgtgacaatcttactgtagtggttgtctgtttctcgcccgaagcgcctcctcggattgagattcccaagtcgcataagaggaggagcatctctgcagagggattggatctcctcaaaggtgttttgaacgagttgtga

SEQ ID NO: 169644 - DNA, 528 bp, Arabidopsis thaliana landsberg
tgcatacacaaacattttgatgtgtaaaatgttttggtttgaaattttctgaagaagatggttggcgcactacttggtgaaacagacttagaactctcggaagaatctattgaagctatcgtggaacaggtcacgcaacattatacctaattttaatctatttatctttcttattatgacattaatattcctatatatttaatatcttttttttgttaaagatgtatatttaatatcttaatgatgttgaatttgtgaatcgatttttacaaacagacgatgctcgaggttgatacaaacaaagatgggaagattgatgaagaagagtggaaagagctcgttgctaagaatccttcaatcctcaagaacatgactctgccttacctcaagtagacttttatttcaaaaatatttctctttcttgtttttattgacatataaagtaagtacgtcgtcgtttctatgatttatagggaagtgactttagcatttccaagctttgtactcgactctgaagttgaagactag

SEQ ID NO: 169645 - DNA, 873 bp, Arabidopsis thaliana landsberg; identical to SEQ ID NO: 51681
  unsure (1)..(873): unsure at all n locations

SEQ ID NO: 169646 - DNA, 456 bp, Arabidopsis thaliana landsberg
gggtcactctctgctgcaaggcgagcagctggttttgtgagaggagatgatgtccttcacaagattttcacagaactggcacatagatacaagtgagtcttcaaattcttttggcatcattttaacagtccattgcctaagcgctttgcattatctggatatatattatttgttacagagatagagctggtggatacacaagactgctacgtactcgcatacgagttggtgatgctgctcctatggcctatatcgagtaaaactagtttcttttctttatcagtctttctggttttacattcatatctccatgttagatcaaataagaagtgttaatgatttggaagctttctggtgaactaatttggtcgatacttgatactttggataggtttattgacagagagaacgagcttaggcaatcaaaaccagcaacacctcaaccaccgcaacgag

SEQ ID NO: 169647 - DNA, 516 bp, Arabidopsis thaliana landsberg; identical to SEQ ID NO: 13852

SEQ ID NO: 169648 - DNA, 507 bp, Arabidopsis thaliana landsberg
atgtcatcgagcgtggtggccgacaccccgccggtgcggatctctgcggcggcgccctcgatgatccgccaccgagtggcagctcctttgctggtcaatttctggacttgcaggtccattttgataggtgaactatctggactcatgagtccaaacagtacgcggcttgtaggccgcacagcattgatcaccggttctaccgccggactaggggccggtatcgccaccgcgctcgccgagggtggcgcgtcggtcctagttagcgggcgcgatccgaaacgcggcaacgacgtcgtgcagcgcatcgaatcagcgggcggcagggcggcgttcatcggcgccgatctgggcgccggcgaggctgaggtcacccggttggccgccgaggcgacagccgccgctggcggtccgatcgacatcctggtcaacaacgccgccatgatcctgatgccgtcgcccaccgaggaggttcccgagacacagattcgcgacgcattcgcgatcaat

SEQ ID NO: 169649 - DNA, 1284 bp, Arabidopsis thaliana landsberg
  unsure (1)..(1284): unsure at all n locations
tgtacatttttaacagaaaatgtttgtaagaagtatcaaatttgagaccttacacacccaaatttatgtacgtagggacttttcgttgaataaactctctgggaaattacctcagagttttgctaatctcacaagcctcaaaaaactgtaaggaataagaaacaaatcattactttatagtatttttctacgaaggctaaattggaaactgtcttgttattgtgcaagacacttgcaggataatcgattcacaggcgacataaacgttctcaggaaccttgccatcgatgacttgtaagcagcaaaaaccatacttaggctgcgacacaattccgaaaactcaaaacattcatttgcttattatgtgattgcaggaacgtcgaagacaaccagtttgaaggatggatacctaatgagcttaaggacatagacagtttactgtaagagaaacgtttgcaataccagaaacagtttcagcatgaaaaaaaaaacagaggatattaaaagatttcccctgttttctctctgttttgcgtttaataaaggactggaggtaacgactggtcaactgaaactgctccaccaccaccaccgggtgttaaatatggccgaaaatcttcgggttcgaaagacggaggaggtataaccgccggagctggaatggtgatcgctggagcatgtttaggcgttcttgtgttgatcattgttttaattgcgctcgtttccaagaaaaaatcatctctctcacctcatttcatcgacgaagataacagtcatcacaccccaaagttcaaatctctcacctcgcatggatctnnnnnnnnnnnnnnnnnnnnnnnnnnnnnnnnnnnnnnnnnnnnacgacacatttcaacctatcttgtttggcaagtaactgataatgatgagcttatttatggtagatgggaaatctggagattcggatgatgaaaatatccataggataggatcaaagggactaaaacattatgtttcgtcgcgtgtgatgtctttcactgataccgaatttgcgaacaagctcaatgcaaaacgaaccacttcaactcgttccgctgtggaattcgagctctctgatttgcaaagcgcaacagccaatttctcacctggaaatctactaggggaaggctcaatcggacgtgtttacagagccaaatattccgacggacgtgtaagtcaccccacgtgtttattaagaaacagaataaacacaatataatccacaatatattatcaattttctttctcactcagacttgtggcggt

SEQ ID NO: 169650 - DNA, 2098 bp, Arabidopsis thaliana landsberg; identical to SEQ ID NO: 25202

SEQ ID NO: 169651 - DNA, 2538 bp, Arabidopsis thaliana landsberg
  unsure (1)..(2538): unsure at all n locations
atggttctcaaagacgataactccgagaaatctattgagctcttcattagtattggtttggacgagaaaacagctcgtaataccatcaataataacaaggtcaccgccaatctcaccgccgttatccacgaggtctcctctctctcttcttcctcctccttcttcctgtgtgttggctatcgattcttattgtatctgatgaaattggatacaagaggactaagtttttcattttcctttgaaaaagttttgctttctatcaatctgttgacttaaatccaatttttatgtaatctcaattcgaaatgtttagtttgatgattttgaatccgttgcatgtatgattctgttcatgatttgatcaattggattattaaaactttcttttcatgatgttttgtcttgtgtataggctgctgttactgatgggtgcgatcgaaatactggcaatctgttatactcggtgagatatatttctaattaagccaaaattccacagatttttgtttcaatgcttataagaaagttattgaggctatgttttacttaacaggtcgctactaagttccctacaaatgctcttgtgcatcgccctacattgctcaagtacattgttaactctaaggttggtatatggctccttgattttgtcagaaattgggttattttctgttttgtcaatgggaaacgggctaaagtttttatgattctctctgttaatgaatctgcagattaaaactccagcccaattggaagctgcatttgccttttttgccagtaccggtcctgaggactttaagctgaatgagtttgaagaggcatgtggtgttggtaagcacttttgtttatgcgattatgagcatgtattatatttcttacttttaagtgccaatgtttgtagggtttctgtttttctttattaacacaatgctttgaggttacaatttgctgtgtgttttccatggatttggagatgagatcttcatcattgttttggaacagggattgaagtttccccagaagatattgagaaagcagttaaaggaatctttgaagagaataagaaaacaatattnnnnnnnnnnnnnnnnnnnnnnngttagtgtttgctctatacctcctgtctaaggcattcggtttatttgaggcatatctaccattgctctgattctctataatttgtcacataaccggcttattctgtttcttggttgaataatgtatttatgtttgtgtagtgggtgaattatttggacatgtccggaaaagtttgccatgggccgatcctaagattgtaaaggtgcgttaacattttttttagcagcctgtcttcttagcttgtcacaaacgatatcgtagttttcttatccagtcttatgtctgcaatagaaactcatagatgagaaaatgtatgagctgcttggtgagaaaaccgctgctgataatgaaaaacctacaaaaaagaaggagaagaaggagaagcctgccaaagtcgaggtgattggaggtttcattgatttttttttctctgttgtgtatattgtgattttaattcttcatttctgtggcttatctttaggaaaagaaagctgtggtggaaactaccgcagagccatctgaagaggagcttaatccatatactatattccctcagccagaacaaaattttatggtaacatctactgatttattttcctgagattttaaagttcacgttcttcacatctgattcctcgtccatcgataatcattcatctaggtgttgattcagtggtaataatagtagactaagtatgatctgtattgcttcactttttattgtggcgatctggaacaaactttttataatatgtttgttgttacattctcattttttcatgggtgaattcataggcgtccgtaagattttttgttattttatattctcaggttcacacagaagtgtttttcagtgatggctctattctcagatgtagcaatacaaaggaagtacttgacaaacatctcaaggtgactggagggaaagtttatactcggttcccccctgaaccaaatggttatcttcatattggacatgccaaggtaagaaatacatgatatgaggttttgggatgttttgcttgatggtgtatggttcgttagggctatggttttatgttcgtttccaatgcttgtacttccaggctatgtttgttgattttggtcttgcaaaggagcgagggggttgctgttatctaaggtaaaaaaagtttggttgcttttacttgagtttcatacatctttacctttctataacaatccttgtttcttctgtaagcacaatgttcaatattccttgaaaatctggttttcaggtatgatgatacaaatccagaggcagaaaaggaagagtatattaatcatattgaagaaattgttaagtggatgggttgggaacccttcaaggtattttcaatgttttgcacgaatagctcattgttattattattgtgtttgaattcatctgacgtttatcaatgtttttttttagaaaacatc

SEQ ID NO: 169652 - DNA, 320 bp, Arabidopsis thaliana landsberg
  unsure (1)..(320): unsure at all n locations
ccctgatcatagactgccaaactgctcgtgacgtctttggacagttcactcgagggcaatacgactggggtcttaactaccactgtagtcaacagttttccggtgctcaagctgtgtccgatatgcatgtacgcgtggatgaacgagcagagggttgcaatccattctgctatcacaccttgccgtagcttccagaaggaacgcaagctttgtaaaccaatgactttgccggcgctgtcttcgaaggtannnnnnnnnnnnnnnnnnnnnnnnnnnncctcgagaccatgcccactcgtgctgaggtctacgctaagatg

SEQ ID NO: 169653 - DNA, 1508 bp, Arabidopsis thaliana landsberg
atgtcgtggttgagatcggcggtgaacaaagcagttgaagtcggcgggaagaacaatatcacccgcaccgttcgcaattacgctgattccgtcgtccttaccgccggcaatgccgtttccgaaggcgccaaactcatccaggatcgcatcgtacgttataatctctcctcttcttatctaagattgcgattctaatcgccgatgtgtgtgtttaaaatgtagggatcgaggaatgtgaagagctttagtctcgcggtgaagagattagaagaggtttcggtttcttcaagaggaagcgagagagtgcagttgttgaggagatggcttgttgctttgagagagattgagaggatgtcttattcttgtttcgacaataacaatcacaaaaccgatgatcatactcaatccgaagattctcctaaaaacttcagtaccgtgagtaaatccaatccacatgtctttggtcatgatggttcaatcatgttggctaataatttgagaaattgtataggtttattacgttgatcctggtcttcccggtgagccaatgacttttcgtgacgtgtttcttcatagtgaggcacttgaagggatggtcttgtctatggtaagttagtgtaaagacagattctttgtatagcttctgctgttgtgtcagtattgcaatggtgataatggttaactgtttttttttgtgaatcagattttggaagcacctaatgaggaagaagtccagctgcttttggaactgtttgggtgatgctttcacttccattgaaaaaactctgtttcagttactttacaagaacatttcaactcaactggttatggttaatacatacaggctctgtttgtcaggacagaaggaagttcatgaagcagtgattcaaaatgtgcaggacttagcaacggtattttcaaaatacaaggatgaagttctggtaaggatgttgcaagcaaaacaagtgttctgtttcctaaactctgttcttggcttgcaccatgtaatggcttattatgtcattatctaggcaaagcgcgaagaactgcttcaatatgtccaaggtgctattggagggttaaaattgagtgctgatattgcaaggtatacttggatgagaacctttttacaagatatataaatgttcctgtgttgaagctttgtttagcgttttaagaatggtcaagtcttaagattttacttcttttgttttggttctcgtttgtaactggatcagaatagatattgaagcccatactctgatggagaaactagatgagaccaaggtcaaggttgtcgagcatgcttcaagtcaagatgagtcgaggtctagtgcatctacagaggtaatattttctgtcgtacgggactaaggattcagttgttcagtcctgtgaggtccctagaccagtacgatgaacggtggattgttatgcaagaagttcgaggaatggtcgaccagtagttggatcagtccctggggtctgagcataaagtcgctgagagc

SEQ ID NO: 169654 - DNA, 576 bp, Arabidopsis thaliana landsberg
tccaagaacccaaattttcactacatggaagatcgtggatggaaccagtttgtgaatgacaacggtttgggtgaaaacgagtatcttactttcactcatgaggcaaatatgtgctttaatgtaaccatattcgaggcagatggtacggagatgcttagaccaagaaaaaccattacttctagttccggtaagtgttcatcatctatgttattgctttctttatgcttaagaagaagaagaagaagaagaatacagtcattagttacttctgtggttgattttgatgcaaacaggtcggaacaagagagaagagaggaagagcatctacaaagatgtgaagaaggaagaagagatagagtcttggtctgaatcgagccatccttgtcacaaaacagctgaatctacaagtgggagattgacgcagaaacaggagcttaacttgagaaagaaggaagccgataaaaccgaaaaatccaagacgagtaagaagaagaaggtggaaactgttagtaacgactctgaagccggtacttcatctcttattccagaattcaagctcaccataaagaaatcaca

SEQ ID NO: 169655 - DNA, 168 bp, Arabidopsis thaliana landsberg
tggatgtccatgttactcccctagtaacctcatcaaccatgcatttatcgccatgaatctttattaccaagccaatggaagaaactattggaactgcaatttcaagaactccggactcattaccataactaatccgagtgagtttgctctttctctttaattatgcta

SEQ ID NO: 169656 - DNA, 614 bp, Arabidopsis thaliana landsberg
tgtatgatgaactatgaatcaatgaatgtgtgcagatcatggtgaaggacttcaagttcttcactacgaagcagggcaaaagtatgaaccacactatgattattttgttgatgagttcaacactaaaaatggaggtcaacggatggctacaatgcttatgtatctgtaagagttttctaactttacttgattttaaaggttgctatgttcaagtatctactaattttgccttcaaaatccttattctacaggtcggatgttgaggaaggcggtgaaacagtgtttcctgctgccaatatgaattttagttctgtaccatggtataatgagctctctgagtgtgggaaaaagggactttccgtaaagccgagaatgggtgatgcattgcttttctggagcatgaggcctgatgctacactagatcctacaagtttgcatggtaaactaccttcagttttgaaagtcattcgaaacactcttgttatttttttccgataccattgagtttgtggttgctaatatatgtcttcttgtttctaggtggatgtcctgtgattagagggaacaagtggtcatctaccaaatggatgcatgttggcgagtacaaaatctag

SEQ ID NO: 169657 - DNA, 680 bp, Arabidopsis thaliana landsberg
  unsure (1)..(680): unsure at all n locations
gtcatgctttgatctccgaagattctttggctagactcaagagcaactgcgatctcaagacggagtctgcgagtgtaatgactgaggagtgcgcggtggtgtccgaccaaatagacatggatacatattacctcgacatctacaacatatacgctcccttgtgcctcaactccacgctcactcgcaggcccaagcgaggaaccacaataagggagtttgacccctgcagtgaccattacgtgcaggcctacctgaacagacctgaagtccaagcggccctgcacgcaaacgctacgaagctgccttacgagtggcagccgtgcagcagtgtgataaagaagtggaacgacagtcctaccacagtgattcctctcatcaaggagctgatgggtcagggcgtccgtgtctgggtgttcagcggagacacagnnnnnnnnnnnnnnnnnnnnnnnaccaaatactccctcaagaagatgaatctaacggccaaaacggcctggcatccctggtacctagggggtgaggtgggtggatacacagaggagtacaaagggaaattgacatttgccacagtgagaggggctggtcatcaagttcccagcttccagccaaagcgctctctttcactcttcattcacttcctcaatgacactcctctccctgacacctctcgttactaa

SEQ ID NO: 169658 - DNA, 367 bp, Arabidopsis thaliana landsberg
agcaccgctgatcgcggacgctacaacctgcacgttttcgtttaggccggctacggcggccgccaagggatcggggtacgcctagcgtggcctgctcggcaagcagctggccaacggtgctacggacgaggaattggtcgacgcggagaccgatgagggcatctcggagaacctctacaccttgtgtcagcccgacccggacctggggatacgcacgtccggggagcaacggatgacgggacttctgctgtggcagagcgcctactcgtagatgtggttcaccgaggcgcactggccggcgattcggcgggacgactttctgcgggcactgcgcgactacagcgtgcggcaccggagattcgggcgg

SEQ ID NO: 169659 - DNA, 171 bp, Arabidopsis thaliana landsberg
ttctcataacttttggcatgtcttgaaactctatactatcttctgttttgattttcctaacaaatacgtctcttttgttttcagatggaactctcaaaagatgcagtcgatgatgatgagtctaaagccaaagacgctggatacagcagtgatgagtggtttgttgtgtaa

SEQ ID NO: 169660 - DNA, 1292 bp, Arabidopsis thaliana landsberg
tttgtttatttacatgtgaataacacaatgtcagcttcgatgcacataccgggcctatgatgctatggatgaaataactgctgcattttcagttggattcaatcctgatggaaccaagtaagcaaaaacttcatctaagttgtatccatcttcccacccggtaaagaattgattaaaagtggtctatgttcatttgcctgtgttatgtctttaggatctttgctggttacaacagctccatcagagtgtttgatcttcatcgtcctggaagagattttaggcagtattcaactctacagaaaaacaaagagggccaagcaggtttttttctttcttttccactcagacgctgcataacaatattattacagattatacagaaacaagaacaaccttaactggttcataatttccaggtatattatctactcttgctttctccccaactaattctggaatgttggctgtggggtcttacgggcaaactactgggatttatagagaagacaacatggagctattgtatgttttacatggtcaagaaggcggtgttacacatgtaagcattgaccactaaatgtgccttatttttgtccattgggatatgatcaattattgatcgaatttttggtgcttttaggtccagttttcaaaggatgggaactatttatatacaggaggtcgcaaggtaacatactgttataaacattttaccctctgaatgttgagcatattatatcgcaacttgacttccattttaaggataaccctttttggaagaaagtatcgtctgtccagagatattctcgttggtgtccaatattagagtatgatatgtaataggatgatgaattgtcctaacctcaccaaaaaaatgtttcttttttgtttgctctttttcaggatccttacattctttgctgggatattcggaaatctgttgaaatagtctataagtgagtatttacttctttattttggtttgggtagtctttggtttctaagctcatacttgttttacaatataatctagaagcaagaacaagtgctgtaaacaagattaatgcttaatgagccatgagcagcttaagattaacgttacatcaatgttcaagttaatagaagtcttagcttgagaaatggtagatgttgaagctcttataatgttgacatgtgtttgaaatggatcatttatatgtgtgatcagattgtacagagcaactgagaacacaaaccagcgtgtattctttgatattgagccatgtggtcgacatttaggtaccggtggtcag

SEQ ID NO: 169661 - DNA, 514 bp, Arabidopsis thaliana landsberg
gcgatccagaacgcgctcggtcagggcatggtcctgtacgcggagagggccgggatccagacgctgtcgcagctcgtcgccgcccacgaggaggagcgtcggcgcatagccgaggacatccacgccgactccctgcaggtgctcgacgcggccctcctccgcctggagatgctgtcgcagcgaacggccgacgccgcgcaggccggtcagctggccgaggtgagaagcgcggtggcggaggccgagaaccggctgcgacacctgctcttcgatctccggcccccggccatcgaggcccccgacggacttcgctgggccttccaggagcacctggaacgtctgcagcaggcgggtggccttccctgggagctggatgtccgggtatcggtcgagctgcccatcccgacccgcctgatcgtctttcgcatcgcccaggaggcggtggacaacgtgatcaagcacgcccaggcctcgatcgtgcgggttcaggtgaggtagcagggcaaaggggggg

SEQ ID NO: 169662 - DNA, 685 bp, Arabidopsis thaliana landsberg
ccgaattctccttagaatccatcaagagagatgccaattctcgagcgtcaactctgtaatcctctttttcatatttatataattaaacttttaacctatatgaatcgaacgcaagaatatatacttattcaaatcatatgattttctcattttcagggattgacgactcgaatggcagctttaggcttaagagataaggccatgatcgactacacgtcatcacggtctccaagagtggttgcactctcttgcaagatggtaggaggaggaagtgacgggtcgttggatctatgcgcgagggtttgcataacggatgagagtgacaacgttatctttcacacgtatgtgaaaccttcgatgaccgtgactagctataggtacgagacgacggggatacgtccggaaaatctaagggacgcaatgccgttgaaacaagtacaaagaaagattcaagagtttctttgtaatggagaacccatgtggaagattcgtccaagaggtggaaaagccagattctcgtgggacatggcctcgatcacgatcttgaccgccttcaacttgaatatccttcttccatgataaggttgacatttatctttaagaaaataaataaagaaaatacatatcacaagattcttttagtgttactagctcctctttcgatataacatatgattttatgtga

SEQ ID NO: 169663 - DNA, 538 bp, Arabidopsis thaliana landsberg; identical to SEQ ID NO: 62263
  unsure (1)..(538): unsure at all n locations

SEQ ID NO: 169664 - DNA, 723 bp, Arabidopsis thaliana landsberg
aaccctgcttcatttagttgatacttttttgaaacttttgaaaaaactagttataaaagtaatagccgtagctagcttttgttttcgtcgtactcaaatagatcaagaatactaagaagttgagacatgaatttaacaaacatttgacacaactcttgttttgtaagggaaaatataagacacccttgcgattagaccatcttaaagagtaactaaattgtacttgttgtttctgatgaacataccaggattttgtttctttgaacaacaatcaattaccttacctaaattttatgatcaggtgcacatacaattggacaaaccgactgtctcttcttccgttaccgtttatacaacttcacggtgaccggaaactccgatccaaccataagcccatcgtttcttacacagctcaagactctttgtcctcccaatggagacggttcgaaacgtgttgctcttgacattggtagcccctcaaaattcgatgaaagtttcttcaagaacttacgcgacggaaacgctattctagagtcggaccaacggctttggtcggacgccgagacaaatgccgtggtgaagaagtatgcgagtcgtcttagaggtttgttagggtttaggtttgattatgagtttggtaaagctatgattaagatgagttccattgatgtaaagactgacgttgatggcgaggttaagaaagtttgttccaaggtgaactag

SEQ ID NO: 169665 - DNA, 501 bp, Arabidopsis thaliana landsberg; identical to SEQ ID NO: 61240

SEQ ID NO: 169666 - DNA, 829 bp, Arabidopsis thaliana landsberg
taacaagtctctgactctgatttgtcaaccaaacaatgtctgatgatctttattacttccacagatactttaacgtgataggttcagatccagaaggtagactaggagaagctccaaagcccgagctacgtgaacacggacggatttcgggtgcctgtttcgatgcagctcgtggcgtgattccaggccttcaggtaaataaaacacactcatctctcaaaactctctctatgcttcttttttactcaactcttataactgaaaaaatggattcaaacaggtcaaaggaacagactacaaaacaggagatggaacttgtgttcgtgactacatagatgttactgaccttgtagatgctcacgtaaaagctctcgagaaagctaagcctagaaatgtgggaatatacaatgtaggtacaggaaaaggaagatcggtgaaagagtttgtggaagcatgtaagaaagcgacaggagtagatatcaaagtagattttttgcctcgaagacctggagattacgcagaggtttacagtgatccagcaaagattctgagagatcttaattggtctgctcgttacactaatcttcaagaaagtcttgaggttgcttggaagtggcaaaagactcatccccatggatatgcttcttcttaaagacgaccaagaaagaaaaaaaagttttaattttaaactttttacataattgtttttgagagattagcttatagaaaaagaattgatttattacagaattacagttcaataagtattattattatggtaatttgatacagtttacaagagttgtcgacctaatcagtgactttatat

SEQ ID NO: 169667 - DNA, 1279 bp, Arabidopsis thaliana landsberg; identical to SEQ ID NO: 29539

SEQ ID NO: 169668 - DNA, 412 bp, Arabidopsis thaliana landsberg
tacaaaaacctatttgtgaggaaactttctttacaagtcatcactttctctcttttttcttcaacagtctccattaatcttgaaacactactcaatacaattgtgaagttgttcgtcgagaatcagagtggctcatcgttcgagattgaagtggatcacaaggatacggtgttagagttaaaacagaagatcgagaagtctcaatgtatccccgtctctcctgaccagaaccctaaccacaatcaaaccgagcaatctcctcccccgtcgaactcaccacaacagatcatcgacggtcatcaagattcgactgtgataggtcagaccgagcaatctcctccaccgtcaaaaaacaacagaccagactcatcaacgctcatcaagattccactgtgacggctcggacagatca

SEQ ID NO: 169669 - DNA, 2499 bp, Arabidopsis thaliana landsberg
cttttcagcagattccagtctctaaccaattgaatggtccctcacttttcaatcctagtcaaggtcaaagctttgatgactttgaagcttacaacaagcagcctaaccgtagtcgcgtgttggctgaaaacttggctgctgagaaggagaggatgaatgctgttgcaaagattaaagtcgttgtatgtttttctttcctttagtccctataactaaccacttgagtttttctacttgaattaagtggttttccagccttgtatattgtgaatactaatccttaccgtatggtttgagaacaggtgcgtaagcgaccacttaacaaaaaggagtcgacaaaaaacgaggaagatattgttgacacccatgccaattgcttaacagttcatgaaactaaacttaaggtcagtctctgatggcttggattcatgcattcccaatcgtctgagttatcaacgtggaaagacactaagactgatctattattacattattacaggtcgacttaacagcttatgttgaaaagcatgaatttgtgtttgatgccgtgctagatgaggaagtatcaaatgatgaggtaagttttgtttgcaagttactggactgactataactttggaggaagccttcttttcaaaataatcagtaaccattgtgccgcttatgtcccaaatttctgtaggtatatcgtgagactgtggagcctgtagtccccctaatttttcagcgcatcaaagccacttgctttgcatatgggcaaacaggtaaattatttcgaaggtatcatagatacacaagatcactttcctggaaaatctaacaagctaatagcaacaccttaaatccatctaaagtatttggcatgaggttaaggcctactctactttcccaaactgtgcatgtaatagcctcttcaaataaagtgtaaagattatttgaatcgataattaacatccacttttcagaagcaaatactagtctggtttaactatatttttccccattttctctaagtgaaccgttttcgcttttatatttgactttcaggtagtggtaaaacctatactatgaagcctttgcctcttaaggcttcaagggacatcctgcggttgatgcaccacacatacagaaatcaagggtttcagttgtttgtcagcttctttgagatttatggaggaaagctatatgatctcctcagtgagaggaagtaagttgaaagacatcttatatggttatatatcttgactgcaatacttagtatgtagttgtattcaaacgttttttaccttgataggaagctgtgcatgagagaggatggtaagcagcaagtgtgcatcgttggtttacaagagtacagagtatctgatacagatgctattatggagcttattgagagaggaagtgcaacaagaagtactggaaccactggtgcaaatgaagaatcctctcgttcacatgctatactacagctcgcgataaaaaaatcagtagagggaaatcagtcaaagccccctcgctttgttggcaagctttctttcattgatcttgctggaagtgaacgtggtgcagatacaacagacaatgacaagcagacaaggtaacactttatttcttatcgcaacaattgttcattgtgaatgatgtttccgactatttgcttagatgagttatctatatcatatgacacagattggaaggagcagagatcaataagagcttactcgccttaaaggaatgcattagagctctggataatgaccaaggtcatatcccttttagaggcagtaagttaactgaagttctcagggactccttcatgggaaattctcgtactgtaatgatatcgtgcatatctccaagctctggatcatgtgagcacaccctgaacaccctaagatatgcggacaggttggttttactatgttcccttttactttctttattcgttatgtgtgcgtctcgtataattttgcattcactatgcaaattgtagggttaagagtctctcaaagggaaacgcctctaagaaagatgtatcttcttcgaccatgaacttaagggagtccacgaaaattcctttgtcttctgcacttccaactccatctaactttgatgatgacgtgaatgagatgtggactgaagagaacgatgaatttgatgcatcggattatgagcaagataaacaaatgtggaagaaaaacgggaagctagagccatcctataacggtatggcacaggagagaatcccgaaacctactattcagatgaagtcacgagacatgccaaggcccgatatgaagaagtcaaactctgatgacaatctaaatgcgcttctgcaggtattattcagcaatttcattcttcttcagaaaaaagcctcctctgttttatatcatccttgacacaagaatcttttttcatgtgatttttcaggaagaagaagaccttgtgaatgcacaccgtaaacaagttgaggataccatgaacatagtgaaagag

SEQ ID NO: 169670 - DNA, 1798 bp, Arabidopsis thaliana landsberg
gtcgcaagatgatccacatgctgaagtgtgggacaaaagatttggatagtatacttgctgctggaagtgtggttaaatcaaattttggtttaggatgcaatggtgttggatcaggtgcaaagacgaattttgtacgaagcgaagctgctgctccaacaaaaagtcaaacaggttttcgaagcaactatgatgctgttccagcaagacgtgtgtaccagaatcacgatcactatcattcccggagaactgtgacaggttacgaatgttactactgtggaagacatggtcatattcagagatattgctacaggtatgctgctaggttgaataagctgaagagacaaggaaaactatatccatatcaaggaagaacctccaagatgtatgtcagaagggaggatctctattgtcatgtagcatacacctcgattgaagaaggaataaagaaaccatggtattttgacagtggagcatccagacatatgacaagaagtcaatccaatcttgaaaattacacctctgtcaaggaaagtaaagttacttttggaggtggggataaaggaaaaatcaagggaaaaggtgatttgactaaagcagaaaagcctcagcttacaaatgtgtactttgtcgaagggcttactgcaaatcttattagtgtgagtcagctatgtgatgaagggctgactgtgagtttcaatagtgtaaaatgctgggctacaaacgagaagaaccaaaacactctaactggagttagaactgggaacaattgctacatgtgggaagaacctaaagagtgtcttatagctgaaaaagaggatccagtggtatggcatcaacgtcttggtcacatgaatgcgaggagcatgtcagaaatagtgagcaaagaaatggttagaggagtacaagagctgaaacacatagagaaaattgtgtatgatgcctacaatcaaggtaaacagattagagtccaacacaagagagttgtaggtgttgttgagagaaagaaccagacttttcaagagatggccagagccatgattcatggacatggagttcctgaaaaattctggacagaggctatcagtacagcatgttatgtgataaatcatgtttatgtgaggattggaggcacatccgacaagttggtcaaaacgtttgtgaagacaatgacgactgagttcagaatgagtatggtaggcgaacttaagtattttctgggtttgcaaatcaatcagactgatgaagggattactatctcgcaaagcacctatgcacagaatctggtgaaacggttcggtatgtgttcagcaagcctgctccaactcctatgagcactaccacgaaattgttcaaggatgaaaaaggagtaaaagtggatgagaagttgtatcgaggaatgataggaagtctactttatttgactgcaaccagacctgatctatgcctcagtgtaggtttgtgtgcaaggtatcaatcgaatccaaaggcatctcatctcctagctgtgaagcggatcattaagtacgtgagtggaactataaactatggactcaactacaccagagatacaaggttagtacttgtaggctactgtgacgctgactggggagggaatcttgatgatcgtcgaagtaccacaggaggagtgttctttttaggaagtaatctcatttcatggcacagtaaaaagcagaattgtgtgtccttatcatcgactcagtcggagtacatcgcacttggaagctgctgcactcaacttctttggatgagacaaatgggtttggattacggtatgact

SEQ ID NO: 169671 - DNA, 885 bp, Arabidopsis thaliana landsberg
  unsure (1)..(885): unsure at all n locations
aaagaattcagaaactgaagagcanagtgttccagtagctgatagtaatgagcntgcgtcagcctgtggtaccagtgttacagtaggtgaagacatcacgccagcaatgtccacaagggatganagttttgagcagaagaacggcaatggaagaactttgtcgcaagagagttccaaggacaccaagatgaattatgttaatcaannnnnnnnnnnnnnnnnnnnatttgacgaggttttcccctgtgatgatgttcgttttagtgatagtatttttactggcgatgaacttttacagggtaatggcctctcatgggttttggaacctgtttcagattttggggagaatgaaactcaaaagtcgtttgaggatccagagctcttggcatctaaaattgagttggaactttttaagctatttggaggtgtgaacaagaagtacaaagagaagggaaggtctctcttattcaatttgaaggataagaacaatcctgagctaagagaaagtgtcatgtccggaaagatatctccagagagattatgtaatatgacagctgaggaacttgcttctaaggagctttctcagtggcgacaagcaaaagcagaagagatggcggagatggttgtcctacgggacacagacattgatgtcagaaatctggtgaggaaaacgcataaaggtgagttccaggtagaaattgatcccgttgacagtgggacagtggatgtctctgctgagattacatcaaatagtaaacctcgagccaaagcaaaatcctcgaaatcatctaccaaagccactttaaagaaaaatgactcttatgataagaacataaaatccaaccagggacatcatctgctgtgactctgccccaacagaagaga

SEQ ID NO: 169672 - DNA, 588 bp, Arabidopsis thaliana landsberg
  unsure (1)..(588): unsure at all n locations
gttcgtgtgtccgtatcaccaatggaactacgacatgcaggcccggctgatcggcgtgccgctgcggcgcggcgtcaagcagnacgggcgcgtcaacggcggcatgccgccggatttcgatccggccgagcacggcctgaaccagctggccgtggcctgccggcacggcgtggtgttcgcctcgttcgaccaccaggtcgagccgctggaagcgttcctgggcccggacatcctgcattatttcgaccgcgtgttcaacggccgcgnnnnnnnnnnnnnnnnnnnnnnnnnnnnnnnnnnnnnnnnnnactggaagctgatgcaggagaacatcaaagacccctaccaccccgnnnnnnnnnnnnnnnnnnnnnnnnnnntcggcctgtggcgcgccgacaaccgggcgcagctgaaaatggattcgcacttccgccacgccgccatgatctccacccgcggccagggcggccagaaaagctcggtgacgcagggcgtggccagtttcaaagagcagatgaagctgcacgacgaccggttcctggacatcgtgcccgaacccggtggaacggccccacgacagtgtta

SEQ ID NO: 169673 - DNA, 1603 bp, Arabidopsis thaliana landsberg
  unsure (1)..(1603): unsure at all n locations
ttaggcaaagcataagaaaccacatatgagttgatcatgggaggtttgactcagctttaagtatctacaaaactttggagatcaacatcgaagaacttatctacaaaatcaacgatcgattttcatatcgaaacaaggctttgagccacttaactggatagatgttcaacctatgtattgatggaatatcttaatgtgaaccctagctctatattcattttcatatagtcttgaaaagaaaaaataatgaaaatcggccaactcgtgtactatgtttcgagaacgtttttaatggtcgaaaagttttaaagaaaactctgttatatttaatttttttttggtaagctgttaaatttaatttatcattcatcaacttaatatgatttttttcttaccaaaacaccaaaccaatcccgaaaaagtttccaatatttaacaattgaagttctgttccactttggtgtatacattttgtaaaccggactggattacatcgcataaccgaaaatcccactcaataaccgttccataatctaccgggacacgtttccttcgcagggaaatagccaaaaaggcaaacacgatgtcacaaccctaattacttacctagtacctacatcgatcttgtcgcactgttgagatagaatcttgaattgccaaatcgtgttctagggttccttcgttttttccggcgatgacatcgaccaacaatgaattaactgtttccatgatgggtacatcgaccaaggaggaggttgtctctaaagtcgacgaggaagacgacgatagtagcagcgacacgcntatggatgacggcagcgacagcgagtgggctgggtataacgtgttagcggaaactgaaccagagtgggacgtcgacagctttgatggtcacgaatttaaaatccatcccagggttcgtaagatgtacggacgtcaccagcaacattatgacgaatactacaatgacaggctcgaggctttcaagagtaaggtacaatttgtttaattcttttcttgtaaccattggcatatctgtataagcctcttcttttctcttatcagttgctatttgttttgctgaatatagatgcaccaatagatttgtgtatgcctgcctttgttgtccaagttggttttttattaaatcagtaaaaaatatgaaaacaaatgtcttttgtttgttttagggttttctttctgatcatctgaatggaatctatgatgtttatctagacgaaaaaatggatggctacaacagtactagggatttcatggcagagcttgctaatgtgtgtgttaagaaacacaacgagaccaaggtgagtgagtcgaaagaattacttttttttttttttgaagaaatttcgtattttggtttatttggaattttatacattttttttcacagggaaatactttggaattggtaaatgttgtgagagctactgaaaggggagcagctacatggaggttgtacatcacttttatggctcgagagtttcctgatgggcctcttgttgagtaccaagccaaggtaataaagttcttaggggtcaaggatcctttcccagttctctgcagagcagctcctaaaccagga

SEQ ID NO: 169674 - DNA, 710 bp, Arabidopsis thaliana landsberg
aacgctttcgatactctctctgcttttgccggcgaaaacgaaaccatgggtggttgttgcttctcgacgcctcttgataacaatcaacaacctccacaacagccacagattcctcccggcgaacgcaagaacgacggattcgtcaactggcctgtcacagagttcttcctctccgatatcaccacggcgaccaataacttcagttccgacgagatcatatcagagaacgcagaagaatcttccaatgttgtctacaaaggttgtttattagagaatcttggcttcgtagctgtcaagagattcaagaatacgccttgggatgatcctgactacttcacggtaccttttctttgcttttaaaggttatcaaagtttgcaacgttcatttgatctcttttgtttcttcaggaagacgcaaaaacagctggggagctaaagcacaagagacttgtcaagttgttgggatattgctgcgaggaagatgaaggacttcttgttgcagagtttatgccaaatgatactcttgctaagcgtttattccagggtatgattccttctcttctttcgttttcagatatagaattggggaatatgagcttaaaagtctggattgttagtcgatctggtctatagatgtatgtgctctgttttgaatcttgggagaaaggctgcattgttggtttttgcggcatgattgggggtgtaaaatg

SEQ ID NO: 169675 - DNA, 1503 bp, Arabidopsis thaliana landsberg
atattttattttagcctcattgattgcttcacgttgtaccttcttcctgtgatcctgttcgtttgatctaactttcttcttaatcattgtcgaattttcgaaacacttctcctccgttagtaaaatcatttttttttgggggtaaactagccgttagtaacaatttttttttttttttttaaatcatatttgacggaaaaacgttttacattttattttaatccgagttattgcatcacgagaacgtcgagaagacaatattaacttgttatatacatctcgtgttacctgcctattttgttcattgtccattctcttttctcgaatatgcgacatctatttttatgcttctcctcctcctctcatattttattagagtagatatttgcatgtgtcaccgcaattttcgcgttaatctatccaatttataaaataaaattaaaaaaactaatttagtagaatatgatcttgaagaatgatttaaattcatacacttgtcgaatatcgaacgtaatgttacaacctcaattacttttatcattcgatgaaataatatactttagtgtgtagaagattgaagaagcaagaggattatttaagaaaaaaaaacaaatgagatgaagtttgggtggtaaaaaataatggaaagtaactagagattattgaggaaagtctttgaaaataggagtagtttatacatagatatcaaagcatatactaaaatattatatgaatgggatccatgaagatgatgaattcaagctcgtgcgtcaaatctctattgagtattgaccattatttcctcctgcctccttttgtcgttttgaagctcatcaacaatggaagcttcaacttttattcttcttcttgtccttgtgctgttgcttgtctctgcgggaaaacatgtgatatattcttgccgcaactctacaccgaaaacatacccggttatcggatgcttaatttcattctataccaaccgaaaccggttactggattggtatacagagctcctaaccgaatccccgagtcggacggtagtcattcgccgcttagctgcacggagaaccgtagtgacggcgaacccctcgaacgtggagtatatcctcaaaacaaacttcgacaactatcccaaaggcaaaccttttacggagatcctcggagattttctcggcaacgggatcttcaacgttgacggaaacctctggttaaagcaaaggagacttgctacacacgacttcaccccaaagtcgctgagagaatacgtcaccgttttgagaaacgaggtggagaaggagctcttagcgtttctaaacgcagctgcggaagattcacaacccttcgatcttcaggagcttctccgtagattcactttcaatattggttgcattgttttcctcgggatcgatcgttgcactttaaacccttcgttcccccgttctgagttcgacagagcccttcaaacagcttttgcggtcagcgctggacaccggtccgcaccgc

SEQ ID NO: 169676 - DNA, 976 bp, Arabidopsis thaliana landsberg
tctccggactcttcctcctcgatctgaaactcccaaagttcagacctcgatttgctatgattcgctctctggactctttcaccgatctcaacaagtgtaacagcttcaacggttgatcctctccgctaacaacttttccggtgagattcctggtgatatctggccggaattgactaatttagctcagcttgatctctctgctaacgaattttccggcgaaatccctaaggatatcggagagcttaagtctctctctggtactttgaatctctcctttaaccatttatccggccaaatccctaattccttaggaaatctaccggtgacagtctctcttgatctccggaacaacgatttctccggcgagattcctcaatctggttcgttctctaaccaggggccaaccgcatttctcaataatccgaaactgtgtggtttccctctccagaaaacttgtaaagacactgatgagaactctccggggattcgaaagtcgcccgagaataatgcggattctagaagagggttaagtactggattaatagtgttgatctcggtggcagatgcagcaagtgtagcttttattggtttagtgttagtttacttgtactggaagaaaaaagactctgagggagggtgtagctgcacagggaatgcgaaactcggtggtggttcggtgaaggggaaatcgtgttgttgtatcacggggtttccgaaagaggatgattcggaagcggaaggtaatgagagaggagaagggaaaggagatggagagcttgtagcgattgataaagggttttcttttgagcttgatgagttgttgagagcttctgcatatgttttggggaagagtgggttagggatagtgtataaagtggtgttagggaatggagttccggtggcggtgcggcgacttggggaaggaggggaacagaggtataaagagtttgttcggaggttcaagctatgggagagt

SEQ ID NO: 169677 - DNA, 1268 bp, Arabidopsis thaliana landsberg
cgaagtggcggctcatgatgtcgcatctttgctaaaaacccccaattgggagaagaacagttctcttaaatctctagtctctcacatgaatccaaatgtcgcttcacaggtcatttcgcttcaacgcagtgacaacgatatttgcgttcgctttttcatgtgggtctgcaagcattcgtcgtattgtttcgacccaactcagaaaaatcagcttttgaaactgattgtttcttccggattgtatcgagttgcgcatgctgttattgttgcgttgatcaaggaatgtagtagatgcgagaaagagatgttgaaactaatgtattgttttgatgagctgagagaagtttttgggttccggttaaattacccttgttacagctctcttttgatgtccttagctaaacttgatttaggatttttggcttacgtgacttatagaagaatggaagctgacggatttgttgttggtatgattgattacagaaccattgtcaatgctctgtgtaagaatggatacacggaagccgctgagatgttcatgtctaagattcttaaaattgggtttgtgttagattcccatataggcacttctttgttactgggtttttgccgtggattgaatctcagagatgcactcaaggtgtttgatgtaatgtctaaggaggtaacttgtgcaccgaactctgttagttactccattttgattcacgggttgtgtgaagtagggagacttgaagaagcatttggcctaaaagatcaaatgggtgagaaaggttgccaaccaagcacacgtacatatactgtgcttattaaagccttgtgcgatagaggtttgattgataaagcttttaacttgtttgatgagatgattcctagagggtgtaaaccaaacgtccacacttacactgttttgattgatgggttgtgtagagacggaaagattgaagaggctaatggggtttgtcgaaagatggttaaagacaggatatttcctagtgtaataacttacaatgcgttgataaatggctactgcaaagatggacgggttgttcccgcttttgagcttcttactgtaatggagaagagggcttgcaaaccaaatgtaagaacttttaacgagcttatggaagggttgtgtagagtcgggaaaccgtacaaggctgtgcaccttttgaagagaatgctggccaatggcctgtcacctgacattgtgagctataatgatttgatcgatgggctttgtagagaaggccatatgaatacggctt

SEQ ID NO: 169678 - DNA, 1422 bp, Arabidopsis thaliana landsberg
atgcaagatatggaccccagaagctgtaagtatttgggtgtccgtagatatgtcaattaaacccaactccacagtttcgtggtgatcctgacaatcaggtatttgttgttgttccagttgagggagaagcttaaacactatggagttgagaatatggatgatataacgttggtagaggacagcaacaatgtcaacatgaatcgagggtatgcctttttggaattctcatctcgctcagatgccatggatgctcacaagcgtctcgtcaagaaagatgtgatgtttggagttgagaagcctgcaaaggtctcttttactgattctttcttagacctggaagatgagataatggcgcaggtactcacattgcaggatcaattatttctagcaactttcatcctaccatgtcttctttagagcgttggaggagtttataggggcatgtgtgggtgccacctattctgtatggtgacttagaatacttgctaaacccatcatgaaaacagagtcagaatacatattccttttggccctctaacaacatgctagatactgaattattgattgttggtgaatctattatatctaacttatctatcttgctcatagtaattagttttatgatatttctggtgttacaggttaagacaatcttcattgacggtctgttaccttcatggaatgaagaacgtgttagagaccttctgaaaccatatggtaaacttgaaaaagttgagcttgctcgcaatatgccatcagcaaggaggaaagattttggctttgtaacttttgatactcatgaagctgctgtgagttgtgccaaattcatcaacaactcagagctaggcgaaggggaggacaaggtatgcataatttaaatgcattatccttatccacgaagtattttcttgctttctaattctctttttttttccaggcaaaagtgagagcacgcctgtctagaccacttcagaaagcaggtaaaggccgacaatctagtcgctcagaccagcggtctaggcatggggctggacggtctggaaggagttcatttgctcgtcttccacctcgtagccttgcttcctctcggagtgctagaggcgctggatctcgggccccatcttctagtgcaaagagagcttctggatcaagaggaagacgtcctcgcccacctctacctccgcctgcaagagctaggcccttgcctccacctgcaagagccaggcccatgccaccacctgcaagagccaggcccttgccaccacctgctaggtcatatgatagaagacctccaggtaccactggaattattacatgtttagttatcttttttagttgaatctcttttgtgttcatgtatctaatgattctgatcatatctccatattgtgtttgcagttgtctgtatcaaagctagcttga

SEQ ID NO: 169679 - DNA, 397 bp, Arabidopsis thaliana landsberg; identical to SEQ ID NO: 18413

SEQ ID NO: 169680 - DNA, 1329 bp, Arabidopsis thaliana landsberg
atgaagaacaagcacacattcatacaatttgacaatgggtattattcagaagagcatgagtggatttcaaacaattctttaagcggtgtattgttgaggacgtcaaaggtaacatactctatgttagtagaaaaaatatgcaagaagattggaatagatgaaacctcaaggaaggtgaaattgagttatattctatgcacatctcagagagagacatctattgtagatgatgatgactttttaggttatctaacggtagtgaatgctaagggaattagaccagctttgaacgtggaggtagtaaataaagaatctgagagggtggaagaaatttcaagggtagagagaagaagttcagttggtgttaattatgaggagttgaatgcatttgatgtggagaatggtggagtagtaacgatttttataggagaaggtgcaggaggtaattgtgttaatgctgaaccgattattgaagaggctaatagtgtagaagaggctattgagaatgcggatagccgggtttttgaagaggctatggagaatgtagttattgaagatagggagcatgtggatagccggatggatgttactgaagataatggtgttgatggtagaattgagtattatgagcttccatgtgttggtgaaggaagtcagagtagtgagaaaagtcagagtgttacggaatgggaagatggaacggggattgaattgcaccaagaatttgtttctaaggaggtcgtgcaagatttggttaacagagctgcaaataagtattgttttgcgaccgcaactatagcgtcagatccaaagcgactcatgttacgatgtcggcaatctaaaacaacaggttgtcgatggtatttacgatgtgcaaaagtaaagagttcagattgttttagtgttagagttcacaggaagatgcacacatgcaagcggtctaataagaactcaggcaattgtaaacataccggcacaccacgattaatcgcgtctattttgcatgaggattatccaggtgagtttcaaactcccccacctaaaagcataatgagtattgttcggggaagaatgggtttgcattgctcgtatgctaccgcatggagagggaaaagacaacacgttagtgatgtgcgtggtagtcctgaaaaaagctacaccgacttgtactcttatctgcacgtattaaaggaggtgaatcccgggacaatatcatatgtggaagtggatgcacaacaaaagttcaagtacttattcgatgctttgggtacttgcattgaagggttcaaagttatgagaaaagttgttattgtggatgccacttttctt

SEQ ID NO: 169681 - DNA, 152 bp, Arabidopsis thaliana landsberg
tctcgatgagatggagggcgcggtggtggttgcaaatattagggtgcgagccttggcggagcggtcgctagtgcacatcttggtggtaggagcaaatattcaaatgagaacttcgaaggcctaagaggggaaaggatccatgtgaacggcac

SEQ ID NO: 169682 - DNA, 1578 bp, Arabidopsis thaliana landsberg
gagtttttgtctatgttttcttgctaactttgaacaaaagtctataaatctttcttgctatattctaacaggaataccgaggagtctgagaaaatggatgaagatagtagattgattgacgagctccgccagacgaatgaatatcaaaggtctcagatactaggtttagaaaaagctcttaggcagacaatggctaatcaggaggaaataaagtcgagcagtgaccttgaaatccggaagtccaagggtataattgaagacttaaatcaaaagctggcgaattgtttgagaacgatagattccaaaaatgtggagcttttgaatcttcaaactgctcttggtcagtactacgctgaaattgaagctaaggtttgtattagtcgtgaaagttgtttttcccttttagttgttagtggaaccttgatttatgtattcctgttcttataatgtttgaggaacattttgaacgagagcttgcagtggctaaagaagatgcaatgaaactctcagctcgtttgaaagtaaaaaatctctaatcttttgctttgtcaactatctgatacgtcatatggattacggactatgctatttttctgtttcttaaggatgttgatgaacagttagagtcttcaaagaaagaaaaggaggaaatcacatcgaagggattgcgcgcagaaaatattgcagcagaatggaaaaacagagtaagcaaggttgaagatgacaatgcaaaagtaaggcgtgttcttgagcagagcatgactaggctcaatagaatgtcaatggactctgattttctcgttgataggtgggccaatgacttttatttacatgttgttccatgtttcttcagattctgatcatcttgacatatcctttattcaggcgtattgttatcaagttgctggttacgtacttccaaaggaatcacagcagagaggtaagatttgtggaattaaaattccagaatctagttttttattagaacactaatattgtagaggaagtcattttgtattaaattttagcacataaagcttatgcaaaatggccttaagcttatcgttctctcatctgaatgtctctgagtaggtgttggacctaatggttcgaatgcttggattctcggaggaagaaaaacagcgaataggattggcacaacaaggagcggcaggtaaaggtgttgttagaggtgtattgggttttccgggtcgcttagtcggtggcatcttaggcggtggcggtggctcacccgattctcatccaaatatggcttcagataatcaggtatcaatagctcaaaaaaaaactcttgaggattgaaaaagtacatttgattgattgtcttgcctcttttgtttggctcagtcttttgcagacatgtgggtcgaatttctacttaaagacgcggaagagcgagagagaagagaagcagaagatgcagcaaacaaagagcaagagaaggctactgtttcttctacgcagagaccaaagtatgaacaatctgattcggagttttcaactgtgcctcttacatcatcgaatagtaatcacaggctctctagattactcacttga

SEQ ID NO: 169683 - DNA, 2813 bp, Arabidopsis thaliana landsberg; identical to SEQ ID NO: 24434
  unsure (1)..(2813): unsure at all n locations

SEQ ID NO: 169684 - DNA, 916 bp, Arabidopsis thaliana landsberg
taccctcttaaaaacagaataagaaggactggtgatgaatggatcactgaaaacttttgcaggtgttctgtgataactacttagatggtggctatcatgtaccttatgcacataaaggtttgatgtcgggacttgatctcgaaacctattctacaacggtatatttcttttggtgaatctgaactagggccaaaatctgactttcagcacatgattctaatctttagttagttgcttcttgtgatgaactttatggtttaagatatcagatattcgaaaaggttagtatccaagaatgtggaggtggttcaaaggttggcgaagacggttttgataggcttggatctgaagctctatacgcgtttgtctacccaaatttcatgataaataggtaacatacatcaagtccattgctcaactcaacttccaataacttgactcgactcactctgcatggtttatgtttaataggtatggaccttggatggacaccaatctagtgctacctttaggaccaaggaaatgtaaagttgtcttcgattattttcttgatccttctttaaaggtaaaacaaaccaacaacattaacctatatttgtcccgccctgtatttatagcatggagtctttgaaatcttcttttggctttaggatgatgaagctttcatcaagagaagtttggaagaaagcgatagagttcaggtacgataaatgaatgaatctcattataccaaaactagtgccgcttaaagagacataagtttgtgtaagttttggtgaatcagatggaagatgttatgttgtgtgagagtgttcagaggggtctcgaatctcaagcctatgacaaaggaagatatgctcttgtggagaaaccaatgcgtcacttccattgtttgctacatcacaatctcaaactg

SEQ ID NO: 169685 - DNA, 331 bp, Arabidopsis thaliana landsberg
aacgccccgatgaactgtccaatacccgtggtgaagcgaagaatgaaggttccaatttatgtggatgaagacttgatcaaaatcttcccacaggccacaacttatctccgtcaaatccaaaagagtaataaaaattcttcaacttgttatagttttttttttatcttagttaagttgcttcgattattgtttaaaggttttgagtattgaaaatgttaataattgaaatttgcaaataaaacgaggaggtgggtctgggtgctttgaattcataagaggagaagtttgcacgaaagacttgagtcagaacaacactttttattttattttt

SEQ ID NO: 169686 - DNA, 2148 bp, Arabidopsis thaliana landsberg; identical to SEQ ID NO: 30399
  unsure (1)..(2148): unsure at all n locations

SEQ ID NO: 169687 - DNA, 584 bp, Arabidopsis thaliana landsberg
atgataaattgtggagatgtttacaaggtaatcgaagcaatggttccactctatgtagccttaatcttaggctatggctctgtgaaatggtggcacatcttcacgcgtgatcaatgtgatgctataaaccgtctcgtttgctatttcaccctgccgctcttcaccattgagttcacggcccatgtcgacccgttcaacatgaattaccggttcatcgcggccgatgtcctctctaaggtcatcatagtcacggtcttagcgttgtgggccaaatatagcaacaaaggaagctattgttggtccattactagtttctctctatgcactcttactaactctcttgtcgttggtgtgccattggctaaggcaatgtacggacaacaggctgttgatctggtggttcaatcctcggtatttcaagccatcgtgtggctcacactcttgttgtttgtcttagagtttagaaaagccggatttagtagtaataatatcagcgacgtacaagtagacaacatcaatatcgaaagtgaaaaaagaaaaactgtggttgtgggagagaagtcgttccttaggtggatgtcccg

SEQ ID NO: 169688 - DNA, 1847 bp, Arabidopsis thaliana landsberg
  unsure (1)..(1847): unsure at all n locations
atgcatctacaacatctacaagattcaaatccaaggtgtaggcgtaacgcatcacacttatggagtatgcatgccaagaattatgcttcttggttaaaagaacaggtaagtcatctcttttcttggttaagagaatagattgaaatctcatgacggtgattctggttaactctaactgatagtctctttaaccgcttgctagatacctcttggttcgactgaacatgaagatataattaagtggatagcatatggtccacgatgtagtgctaggtcctttactgggtatatagtgaacgggcagcgtttccacacaagctcacttcaaaggcaaagtcagaatagtgggatttattatgaggcaactgctatgtgtagatctagtgctaaagataactcacaagtggtggatttggtatcctactatggtagagtcatagatatcattttgctggattataatgtgttctatgtgcctatattccggtgtcaaagggcagttagaggaaacggagctaaggtagaagatgggttcacgcttgttaacttgaatcagagtcaagttagcttattgaaagatctgtttatactagcctctcaggcaaagcaagtcttttattctagagaagatgatgcatcaagctggtatgtagttatgcaaggtttttcaagaagaaactgtaaagaagatcttcaggagggcaacgcagatattggtccattgccagcagatattgacatggatgttgacatggaagattctgagattgctagaactgattgtgaaggaatatatgtgcaaaatgtagctttcttttgcattttgatagggtcttgtatatttgcctttgcttttcttctgatgtctgcaattcatatgtgtgttaagtgtcttagattattgtcatgttctaactatttctgttctttcttacaagtgaattaagatgggacaaaagaagaagggtgcaaacaaaagaaagaaaactgttgaatcaaaaaagaaagatgttgttgtggaggctcaacttgcaactgtggagtctcaggctgaaaccgtggagcctcagatagaggttgtggagcctcagacagaggttgtantttgaaccttaaaacttgctttatattgatgatgtattttgaaccttacttatgctgtgactcagactacaatgccacatgagcctcagactacaatgccacaggagcctcagactgtaactgtggagcttcctgaacctcacgggctgcctgaagatggagctgaggatgttcctgaaggtgaggtagagttatctgaagaccatcagcctaagcgtaagaaacataggggaccaacccaagatgaataacattgccaaagatccaactgtcagagaaaaagttgattacagtctcatgggagatccgatccgtatggtccagggtcattgaagctgtcatcatacgttggaacattggttagagagcatgatcctgttataattgaaaacttgaagcacgttagtcaagatatcaaaacagtattgtggaagtcagttcaggtaacatgtccattttagtgtgtcatcttcatagactatagtgtatcaattttgatggttagttattttgcaggcaaggtttaagcttgatgaggagtttcaaaggattgatgtgctaaagcagatggaaaatttgtggaggtcatacaagtcacgcattgtcaaggatctcaatgaggctgctaacattcaacggattgtctctataacatataaatatataatgtcagttctcacttacacaattagctaagattatctatatatatatataagtgagaactaacattacatatttat

SEQ ID NO: 169689 - DNA, 1537 bp, Arabidopsis thaliana landsberg
atttggagagaagagttgctgagctgaccacaacagttgataaattgcatgaagagaacaattatgttaaacaaactctctccaagttacaagagagttacgcaggtgctacagaagatcttgatttcttgagaagaaactttgaagagaaggatcaagaatgcagggagttgcacaaatctgttacaaagtttttcagaacttgcaaagaacaagggaagacaattgagggacttcgagatggtgtttctgaggaggttaagaagcaaccgtcagagaaattagaccagttggtcaagaaattgcaggtcgagcaggtaaggttgacagggatcgagctttcacttagaagggaagtagaatcaatgaagcttgaaactgactctcttcgtcatgaaaatatctgtctactgaatcgattgaaagggaatggtcaagaaatagacattacaacccttaagctagagaatgagttgaagatgcgtgtctgctacttgcaagaacagggactgtcaatgttaaatgagagcagccagctgtgttacaagttactgaagttcatcaaagggaaattaactcagcttcctgaaacctatcaggataagaattcagtgaaggacggattaagtgagcagtttatgattgagtctgaaatgaaagtccatgggataaggcgcggaactgaaaacctgaagaggagtttgcaaacggtgaccagtgtggtagcttcgaattcagaatcgtcttcctcaaatactggtaggcctagggaacaaagaaaccaatcagttgaagtaagtccacggatatgtccatttcttaatatctctattgtattttcttgtatgtcctgttttgctttacactaatatgtggctaatgtatacctggcccaatctcatgtaggaaaacttgcgagcagaactgagtgctgagaccctaatcacaagtttagtgcgggagaaactgtattccaaggaaaaggaaatcgaacagctccaagcagaactagcagcagcagtacgaggtaatgagattctgagatgtgaggtccaaagcagtttagacaacctatcagttacaacccacgaactgaaagacctcaagcatcaggtattgcaaaacaagaataacacatgacccatatctgtttttgtatataaagaaactattcccatttataaaatgtaaactttacgctaatcttttttgacatcagatgtggaagagggaggcaagcataagacggctcgaaagcaatctccaggaagcggcgaaagaaatggcgaggctgaacgcactattgtcaaaagtgtctaatgaaagaggccagatatggagtgagtataaacaatacggtgagaaaaacatgcttttgaactcagagaacgagacattgaaaggaatggtagagaaattggaggagaaggtattagagaaagaaggagagatcacaatactacaagacacaatcggaagcaagcatctgaatctcctctcaagtcctgatttcttggtataagggtttttctttatc

SEQ ID NO: 169690 - DNA, 2617 bp, Arabidopsis thaliana landsberg
gaagacaaagtgacaagcactgtaagtaacaagtctagacggtattttgcttccaaaagtgaacttggtggatattcaccacggaaaagaagggagcaagcatctaccaaggctgcatctccacctaatctttcttccgagaaaaaaagtgctaaatggggtcttgcagctactgtaactgctggcatgttttcggactcagtattttctggtctccaagcagcaactcagacagcatatcctaccatcagtgaggcttccttgacgcttttgaagccacttatggttatggatgcgccttttaggacgccaccggcaaggcagaccacttcattcgattctgttcaactgacagaatccaccagacgtatgagaagactttacgcagaaaatgtgcctgattcggcctctgagaagtctctgattgaatgcttcaatggctatatgttatcttcagggtccaatcacataaaaggaagtgaaccatgtattagctgtattgtaagtttctgtcatgtgacttccttattcatatcactcttgttatgcttgtgaattatatcacctgatagtatttgtcctttaaatgcagataaacaaggaaaaaagtcaggcgctagtggagttccttacgccacaagatgcctctgctgcactctacttggatggctgctcctttgcgggttcaaacctcaaaatccgacgccctaaagactatgtcaggacaacagtaagaattgcaatttctacaacctctctctctctaaaactcttgctacttgctccgcatgttttatcttctaatagtcatctggttaattttgcaagctagctcaaatatcggcaatatatttctctaggtgtcatcagtaagattcaatgtttccactttcagttcagttgataacatgctactgaaacctgtgtgacttctttttaatgatttaagcttgaatttattgtgttatatgaccactgtccggtgtaagtttatgttacattatttacaagtcgtgagcatcagtcctcttttgatccagatagatatattcaaagtagacagacataaggaacttagcaaaacatctgtctctatattttagagcacataagcatggtgttgtataaccaaattctcatttactgataacttttctgttgaagattatggttgtcttctataatcagaaaaattaggagagttcttattatcatcgattcatgtatgattcagtcttagatgcccatactgtgccactccttaaatgtactatgttggaaccaaaaaatgctcatggtcctatctttgaaggtagtctcaatggaagcatattgccacttttaaactatgtattgcaacttgagagtttgataaatgcaagacagtactgttgatgttacaactgttagcagatttgttggtaaacatatggttttgcgttgcttcagtaagcttaaaaccttagccatttttcaaaggatggccctctgagaatagaaatttagatatcgttgaagtaaattcatcatggttataggaaaagaataaatgaatttctctgtatttgcttgatgtttccatcacatgattctcttgctgggttgtgaagtccaagcgatttggaatttgcaaaaaggcttgatgtgttgaggtgcaatcttattatttatttgcaattggttttgaaggcttctctgtttttttcccgtgccattatcataattaatactgacaataggtgtcactaagaattagtgtagtttatggattcctgcacttgacatgatatgttttcaagccacatgtcataccgttatctgactgttgtgtgttggaatctcttaaatagggtgtttatgttgggtatgtcataattcacattcaggagggtgatgacgctgtctgctaaataagaagactaccaggtgtagtgaagagtttgttgtcttccaagtttgtttccattcttcttctcttttttgggcttttaggaattcatacagataatccatatgattcctgtgtgatatggtttaccgttcttgtgttctttgttagttttgtctaaatatgttggtatcagatgataccatatcaatctttttttttatctttgatcgtctcctaactgaatgtggttgtagtaatacctttattcatttatctgtttggctattactgtgtttcattcctcagcaggatcagatacctggtgttgattgttatctctattctttcgtgttggcgcgcctaagaataacatgaataccctaaactcttaccacctcctcttagatcctcgttcgggtctaagcgagcgaggattttttgcctttgtccttcatttttgatcagttcttactgtgattttcggctgagtagttgtaggaaagtctatgaaaaatgactgattatcaaggctgtggactttgtccttctatttggccttgtacatcagtaccatgcattttactatgatttctgagctatgttatggttaccatccatgaagcaggttttcagacggttgctattttcatgcagaacggtgaattggagaaaaaagagccagccgcaaatgcagtaagtgacaacgtggaggactcatcaaacaag

SEQ ID NO: 169691 - DNA, 4341 bp, Arabidopsis thaliana landsberg
aacagcagcaatagtactatccttgaccacataccaagattcccaaaagaattccgcagtgaagctgtcaggacccggagccttgttgcgaggcattgcaaagaccgcagcagttatctcctcatcagacgggagagcagagagacgagacgccagtgtatcattacagcgaaaaggatggatatctttgattctctgaaccgaatcgggagtgagaatgtcgctgtcaaagcccaaaaggtgggtataataggctacaatcatttctttgacctgagtaacattctccacttttacatcatcatccatgcgaagaaacttgatcagatttttagcctgatttgcaagaatgactttatggaagaaccgtgtattagcgtcgccatcttgcaaccatttaattcttgatttctgtctgtaaaaagactctagagcagcagcaaagaagttccactttttcctggcaacatgctcaactctaaaaagagaatcagaagggttggttaatagctgagactgaatcgattccaaagaatccagagcctctttggttttatgctggatattgccaaacccttgcctgttcaaaagcttacaacacttcttggcagcttttaaatgttcccctaaagaaaacatgtgagaaccaacaggaatctgctcctcccaagcaacagtaagggacaccaaaaaggtaggatgagttgaaaggaaggagaaatatctgaaacatttcttagatctctttgggaggtttttcaggataataatacaaggagagtgatctgaaacccctgacagctcaaagacagcaatcgcactaggaaaagaagagaaccaatctccattggcaatagccctatccaacttccttatgatcggattatcatcttgatgatttgaccaagtgtaatggaccccacgactaggaatatccaccaaatcactatctcttaaacagttctgaaactcctctaaacctctcatggggattgaagtttgaaggacagaatagtgatcagaagtagcagctatctggttaaagtccccaaccaggatctaaggagtgaagcaaagaggagaggacggtgataaagtagagatgtcttcctaaagggttcgtctctaaatctcagtgtttctaccataaacaaacgctaccgcaaaagatgtagcaagacccggcagcttaacactacaaaccatcaattgatccatcttcttaaagaccaaaaccgaaaccgaagggtcccacacgatccaaatccgacccaactcggaacaacaataattggtatctaatctccaactcgtaagggttgaatccaaaatagcaggggcattactctcagctacatgcgtttccaaaaaacttccaaccaacaaattatttttattaacctactgtctaacagcgcgttgacgggaatggctattcaagcctcttacattccagcaaaaaaccttcattattaacacaaaaggggaaggggaaagctaagctttcaagcacaggacgatccacccgagaccaaagctcgtggggaccctgagaccttagaaatatggtcagcagcgctgcttctgctgatattccacttatgacgccatctcttcctggattttgaagacatagcaccccaacccggtggataaggaaaggaatcctccaacgggatagctgacaccaaaactgattcaggaagatgggactcaggtggcttgacaggacttctagcaacacctgtagtcgacttcttgacccaagcagagcccttggcataggactgtcctgcctcaaccaaaacagtagaaggaacaatctcaatattcttccctttcacgcaattctgagaggtgataagccttggaggggtactactggagcgcttcttagagcgtgaacgaactcttcccttccaaccaaagatgttgtatccactaatattttatcgaagcgaaggcgttatctctggaagcaagtgccaaagcttgagtatcttgatacatctcttgacactgagcattggagagcttcacgttttgttgacaggtttttgcaactacacgaagctcctgtcttggaaacaaaactcaattcgacggtcaaattcaatcttttcaacgtgacaatggctgagaatacaataacaaccaattccatgaattttttgataaaactggaatcaaggttcgtttctcaagcccacatacctcccaaccaaatgggaaattctgaaaggatgattagaactaataacaatgttattcgagctctcctatttcaagctcgtctatctccttgttattgggttgaggcactaaatgttgttgttcatatcctaaaaatccttccctccacagctatccaaaatcaaattcctcatagcctcttctttcataaaaatccaacctgtgatcaccttcgagtttttgggtgcttatgttttccaagcttgaatcattcaaatctgtcaaaactatcaccgaggacaacgccttgtctgttcctttggtatccatctcaacaaaaagtgtatcgatgccttgatttaaaaacaaacaaaattattatttctcggtatgtttactttgatgaggatacgtttcccgcaactaatcaaaatttatctcaagtttcatcgtacacattcctaaacgcagttgatgatccttctcctttgttcaaggaaattctccaatcaccactacctcaaaaccaaccaccaccacctcaaactctctctgtgccaatgaacacaagatcaaaatccggcatcactaaaccaaaaaaggttttatcacttgtcaccacagccaaagcgcctcttcctaaaagtcataatcaagctttattggaccctaattggaatccggcaatgactgatgagtatgatgctatgactaaaactaagattaaaatttggtgccacgacctcctaaggtcaatattgttagatcgatgtggcttttcaggcacaaatatgatgcagatggagtgctttcttgacataaagcaaggttggtagcaaactgtaaatcaaaggaacacggtgttgattttacagagactttcagtccggtagtgaaaccagaacaatacgggttgttcttgactttggagtagcgttaaactggcccatacaacaactggatgtcaagaatgctttactacaaggtgatctccatgaaacagtttatatgcatcagcctccagagttcgtcaacaaggaatttcccaaccaccaaccatgtctgcaaactagaaaaagccatttatggactcaagcaggccccacgggcatggaattcatggttcaccaaatttttaatgtagcttggtttcatcatgagcaaggcagacaactctctgttcatcttcaaacagggcattcaaatggcatatgttttgttatacgttgacgatataatgttgaaagcctcctcaccaagtctcattcagaaaatcattacacaactcaaaggcgagttcccaatgacagacatgggctggctgcatcacttccttgacatcaaggcaaattttaacaagcaacgtatgttcttaaatcaacatgtttatgctcaagatataataaactgagcaagaatgtccgaatgtaagccatgtgcaacaccagttgatctaaaatcaaagctctcgaccggtgaaggcaacccaatacctgacccgacatcttacagaagtgtcgatggtgctctacagtattaaacattcacgcgaccggatatagcatacacagtccatcagatttgcctatacatgcatgaatgcgctagaaaggataatctgttacttgcaaggcactaagtcttatggccttcacttggttaaagataacatttcaacccttacgacttattctggtgcagactgggatggctgcccggatacacagcgatcaacttcagggtattgtgtcttccttggtccaaacttggtgccatggtctgcaaaacgacagcccactgtatcacgatcaagctaagaggcagaatataaaggggtcgcaaatgctgtagcagaacttacatggctaaggaacctaatgctggaacttcatctccccatcaccaaagcttctctactgtgacaatatcagttcagtatacttggccacaaatctggtgcaacatcaaagaacaaaacatattgaacttcacatacactttgtccaagaaaagtagctattggtgaagtaaaaggtcatccatgtcccatcctcactccaatatgcagacatcttcacaaagggtcttccgacatttctcttcaacaagtttcgaaccagcttaaccatccgggaaaaaaatgcttca

SEQ ID NO: 169692 - DNA, 1175 bp, Arabidopsis thaliana landsberg; identical to SEQ ID NO: 29583

SEQ ID NO: 169693 - DNA, 1570 bp, Arabidopsis thaliana landsberg; identical to SEQ ID NO: 69775

SEQ ID NO: 169694 - DNA, 1222 bp, Arabidopsis thaliana landsberg
  unsure (1)..(1222): unsure at all n locations
atggtcaaaaaaggtggcacgaagagaaagattgcgattgagacgatacagaagagagattcccttagggttacctgcaccaaaccccgtgaaggtctctatagcaaagcctctcagctttgtcttctctccgacgcacaaatcgctatcttagcgactcctccttcttctgaatccgacgtctctttctactctttcggtcactcctctgttgatgccgttgtctctgcttttctctccggaaaacgtcctgtttcggctccgaaggataacaaagagacgagggaggacgttggtatctgtttgactcgcaagaatctagggttagggttttggtggaatgacgagagccttgtgagatcggagaatcctcaagagattagtgaagcgatcggttccatgtggactctgttgagtaatctcaaggagttgcgtgcggatgaagcttgcgttaacgatcacaaggacttgaagaagaatgagaagagcgatgttcacggaactcaagatcaaaccctaattcttcagtccgcttctacgatttgttgcatccctgaaagtatcaacgatattactcaagagccaaatcaaaccctagatattcagtcaagtacttctgcaatttggtgcgttcctgataaatcacctgaaaatttcaatgagatcactgaagaacaagatcagattctcttgatttgtgaaactttttgngtacggttataacaacagcagcaacaacaacgctgctttacctgaagttaacctatatccaatcaagacatggatattgataaactcattgacttcaacacgcctttgaaagctcgatagatgattggttttcggacaacactactcatcaggagactagtgcaaatattttgaacgatgttggtgttgatgatcaagtctcggtggatccaaatccgttttcttattttcaagccattgaagatgcagatttggtgtttcagagatgtttggatggagataatctaagattctctgattgtttcaatgactttgcannnnnnnnnnnnnnnnnnnnnnnnnnnnnnnnnnnnngttttcaaatcaacttctctctgttatatgtatgtattgattctgttaaatttggttagagttttattgttctagccctgcaatgaatgaaggatctggtttgacctcgatcaattttccatatatgtatgaggaaaattgatcgaactcaaactgg

SEQ ID NO: 169695 - DNA, 452 bp, Arabidopsis thaliana landsberg
ccaaccccggcgacacctttcatgtcgactacgacatgctcggttccatcgcctgccgtttcgtctgatcggagaccgtttcatggacatgcccatcaataccttcaagcaacgcctgcgcagcggcgaggcgcagatcggcctgtggctggggttggccgatgcctactgtgcggaactggcggccaacgccggcttcgactggctgctgatcgacggtgaacacgcgcccaacgacttgcgcaccctgctcggccagctccaggccgtggcgccctaccccagccagccggtgatacgcccggtgatcggtgacactgcgctgatcaagcaagtgctcgatatcggcgtgcagaccctgctggtgccgatggtggaaagcgccgaccaggcgcgcgaactggtgcgcgccatgcactacccgccccatggtgtacgcggcgtcggcagcg

SEQ ID NO: 169696 - DNA, 1592 bp, Arabidopsis thaliana landsberg
ccccacgggtttctacactttgtacgaggggttcttttatggctgcttcttgtggctgtcagttccgaggcaggttttggagtacgtgacgtcgtaccagattgccctctcccagatcacgatgcggtccttgagacatttgctcgggattttgatttgcagttatgaatccgaaaccgaaattacgcttgctcatctgaggaattttctcgagatccggcgggttcccaaatctgaagtggatcggtattacatatctcctgctaagggaaagaaaattattgacgggttctcgagcaaggatgaatcgtataccgaccacttcttttacgtggctctcagagatgccgttcacgatgatcttctcgggacggttctgacgagatggggaactttgggtagttgtagttaacgatctgtttacgtccgacgcgatttatatatttttggttctttttccaactagtttcttttgtcgcagaacgcaccctcaagttcctcgagccgattcctgacgatttcctctcgtcttatcacgcgttatcatctcggaagtgcgattggtcaaaacatttttcccgggatcgagtcgaacgagccctccgtcttcttcacggtgtttcctgcccctccagctcagaatctttggaccatcgtactcaattcttcgtcgatatgcagtcaactaagcttactttgagggaggtgtacgtgaagaaaaagaaagataaagagagacgcttggcggaggagaagcgcctcgcagaggtaaggctgagtttgtcgcggggggcctctcccgatgcggctcaagatcgggacgttgctcccgaggttgtggttccggtcgacccgacgcccgctggggctcaagaagtcgatcctacagttggatggctttatccaatgatttgtagaacctatgcctggacggctttatccattttgcaattcgaactttttggtggaattctaaaatcccgaaccgttttattgcctaatataattcagtttaagtatgggtgaagcttttcggttgcgatctgattcaatctttgaccagcgtttagaaacgagctgggataccggtgtttgagtatgaccgggtttcagaagatagaattcatagcctgctcggaaaaacattcgagcagattcttatcttgaatatttatatagcgcgctgtaacctctagcgcagcgggtttgcgctaaatattgggatatgttcggcacctctagcggagctttggggggtgtactacgggttatatattgcctgggagtataaggttacccggttggagttagaggtggactccgagattgttgttggttttctcaagacggggattagtgatactcatcctttgtcattcctagcgcgtttgtgctatggctttatatcgagggactggatagtccgtatttcgcataagtatagggaggctaaccgtcttgcggatggattagcgaactatgcattttcgttacctccggggtttcatgggcttggtgcttgtccggagagtgttttagcggtgtttggtgatgatgtcaatggggttgggacttcacgaaatgttttgttg

SEQ ID NO: 169697 - DNA, 527 bp, Arabidopsis thaliana landsberg
tatttgtctccaataagaaaaaatctccaaaaacacattcaaatgaaaaatacaaagacttctattgttctcattctccgtatcttgaaaaaattcttaaaaaatcgacgaaacgatgccggagttaagtttattatcggcgttagacgcagcgaggatacagtggtaccatttcaaagcgataatagtcgccggaatgggacttttcaccgacgcatacgatcttttctgtatagctccgatcatgaaaatgataagtcaaatatattaccacaaagactcaatcggaaccgctcttctctcaacttcttacgcaatcgctcttcttggcaccgcgttaggtcagctcatctttggttacttaggtgaccgagtcggacgtcgtaaagtctatggacttagtctcttgatcatggtgtttagctcctttgggtgtggcttctttgtttgcacgactcgacgttcttgtgttatggttagtcttttattctttagattcgctcttggacttggaatcgggggaaatt

SEQ ID NO: 169698 - DNA, 527 bp, Arabidopsis thaliana landsberg
ggctatgagttcatcttcgattgcgtgatcaagcttgataaaatcaacccgtcgacggcttcgcgcatcgtcacctcgctgtgcggctggcagaactataccggcgcgagccgcgacaagatgatcgagcagttgcagcgcatcgccgcgacgccgaagctctcgaccaatgtcgccgataaggtgatgaaggcgctgccggaagatggcagcaagaagaaggccggcccggcggtttaaccgtgaacccgcacttgaaactggagaagcaggccgcaggcgcggcctgcggcattgacgaggcgggccgcggtcccctcgccggtccggttatcgcggcgtgcgtttatatcccggctgagaaatacaagctgaaatgctggaaggaagtgcgcgacagcaaggcgatcgcggcgaagaagcgcgaagcgctttatctggagattgttgcgcatagccatcatggatttggtgaagcgacggcggaagagatcgatacgctcaatattcatcacgcgacgctgctg

SEQ ID NO: 169699 - DNA, 2028 bp, Arabidopsis thaliana landsberg
atgaaatttggaaaagatttttcatcagagatggtgtcagagtggcaacaagcttacgtggattacaagtatctcaaaacccttgtcaaagacatcaaccgcttcaaacgcaaaaccaatcttcacggcggtcagataagcctttcgtcgacggtggtcgagattgaggatggaataacgacggcgcctattcaggtgagttctacggcgagtcaacggtacgagacaacgtttctgatgacggctgagaaaggaggagagtatgaattggtgtttttccggcgactagacgatgaattcaacaaggtggagaaattctatagagagaaagtggatgaggtggtgaaagaagtggcggtgcttaacaaacagatggatgctttgatcgcatttcggttaaagatgaaggaagagagtacagtggagatggctcgctttgccttgcatggcgtggtttctccggcggagctcgccaaaaatccatctagtaagcgaaatatgaaatattttaaccttttaccaaaaaattatatcaaatatttgatagaaataaagcgaaaatttgataatctaaaagccctgaaataacatatgataataataataaagatatcatcaaaatctcctaaagatatcactttttatgattttcatgtattcatttgtgtttgaaattcgagacaaatatttgacaaaaaatgtttttttgcgaataatgtaaatattcattgaaattgaaattgtttagactttacatgattgaataacctatgaattttgtcacttggcaaaaaaagatgaaaaacatggaagcaaaatcaaattttaggtgtaaaactctctattagaaaaacagaaaaatatcaaattttaatatttagtccattgaagcaatgaagctcacaatatcagctgaagtgataaacgatctaaaagttagaatatgaatcctccaggacgagaagaaaataattcttgtaacatcacaaaatataaatgaaaacgaattgatactaaaagttttatttccaagttctagcttgtccacctctatcaaaagctgattaaacacacatagtaaagccatatttttttatagttatattcaaatgaacagtaacaatatatatcaaactcgccaaattttaaaattgaccttttttgtcttctggtgttaattgtagtgaaagttcatatggaggccatagaggaaggaggttccagtagagctggtagaagatccgatgaagatgactattacacagacgaagaagatcacaatgatgtattcttcacaccagccaataacttgagcaagatgaaatcttcaagctcggcttttatcgaggttttagatagcatcaagatcaacaacacaaaggaagctcttcagtccaacactaaaagcgttctcaaagtatcgaaccatacagagctcaaattcagcagagataatctaaggaaaatcgaggaaaagctaatatgcgtctttgttgagttccataggaagctttggtatctcaagagctataggtgcgtatcctttttatcctccgacttgagataaactgaataattttttcttttggatttgagttttgaattatcaaaattatatgcagcttcttgaatgtgttggcgctttcgaagatattgacgaagtatgataaggttagatggttagagaatatatatttttatttcattgtcttttgtataaggttggttttcataagtgaaaatgtattctatcagataacttcgagggatgctgctaagtcttacatgaaaatggttgataaatcttgccttggaagctctgatgaggtaagctaattagttttaatgttgtaaataattttatagaggaaaatatatatgttacttactcgactatatgagatatgaaatataaacaacattcgatgagatttgatgaaaacacattgtatcttctaaaattcaacagtgataattgttgagtcaacccaaattactataatatcaacttattaaccagcttcatag

SEQ ID NO: 169700 - DNA, 526 bp, Arabidopsis thaliana landsberg
aaaaacatacttcgactatatcagcacagcatgattattttgtcacgcctgaagggggaatgccccactacagtcctaaagttataagctggacgacatcaataccggaaaactcctgctggagctattccgcgtcacgggccagaaaaaatactggaaagcagccggccttttgcggaaccagctgcgaacccagccccggacgtcggacggaggcttctggcataagaccatttaccctcaccagatgtggctggatgggctgtacatggcagagccgttttacgccgagtacgcgatgctggatcatgaggacagcgcctttaccgacatcgcccaccagttcatcctgatggaagaccatgccagggatccgcgcacaggcctgctttaccacggctgggacgagtcccgcgagcagtcctgggctaacaaaacgacgggcgattcccccaatttctgggggcgggccatcggctggtacgcgatggcactggtggacgcgctggattatttcccggccgct

SEQ ID NO: 169701 - DNA, 461 bp, Arabidopsis thaliana landsberg
atgtttgtagccaaaaatctttctccggaacgagaatccaaaaggcagaagaaagaaccggagatcatggaaccctcatttccattgttgtctcctaataactgtggacactggtacattcgttacggattctgcatcgtatgcaaatcaacggtggacaaaactatcgaaggccgagtattcgacggtttacatctaagcagcgaggctttagcgttaacgaagcgtctcataacgaaattctcttgtctcaacatgaagaagcttcaccttgtccttgacttggaccttacgcttatccactccgttagggttccatgtctctccgaagcagagaagtatctaatcgaagaagctggttcaacaacaagggaagatctatggaaaatgaaagtcagaggagatcccaaatccataaccatagaacacttggtaaaactacggccatttctgtgcgtttt

SEQ ID NO: 169702 - DNA, 405 bp, Arabidopsis thaliana landsberg
ttcagaaaaaccatttactttttttctatcggccatttaaattaaaaaagaaacttctacacccttaagaaatcaaattatttatatatcacttatctatatattttacaaagcatgtgttgattaccaataggctttatgtggacaacattccagtacgggtgttcaagaacaccacaagccaaggcatgaactacccatcaaaacctatgcaagttgtggttagcttgtggaacggtgaaaactgggcgacagacggtggtaaaagcaagattaattggtctttggctccctttaaggctaattttcaaggctttaacaactctggatgtttcaccaatgctgaaaagaatgcttgtggttcgtcagcgtactggtggaaaactgggagttatagtaagctaa

SEQ ID NO: 169703 - DNA, 1731 bp, Arabidopsis thaliana landsberg
  unsure (1)..(1731): unsure at all n locations
acctccaaagagttttgtattaatagttcttaccaccatgacattttctttgccctgttttgtgattagttgtgagcggaaagttgatgccgccttgtcccaaagttgtaagtagataataacatccctaattataaagatatagttcgatgatgtgtaagattttttctaaataatatttgttatatatttttaaaattttataactaaataatatttgttatatatttttaaaattttacaacacttatgtatccaccttaaatcgtacgaccaaacaagcttttgaagtctcatcagcaaggtttggtcattggacaaacattatttgtccaacaacatctccaaaattaatattattgttgttttattaagtttctttgtatttttaattggatacataaaatttgagtgttnnnnnnnnnnnnnnnnntttttgtttgctagagcttgtaggtggtcgatgttacgtatcttcaatttttttntgttttatagttaacaaaaatagcaaaagcggtgatcggagaaataatgagaggaaatgacttctagatgcattgagtgacgagaaaaagagagatacggaagttaccaaaatgtcttggccaacccaaaatacgatgtgtgtcatttgataaaccagaaaacagcaaacgccaaacaaaaaatattcactaaaagcgaaaacactgacattgttccaaggaaagcgagcttcacaaatttctggccaagatgtctgcattttctgcaggcggatcaaacatatatctattaagagatgttgcaagaaacagagagaagtgaacccttatttctaaaaagtaaaatcacatcaattcataccaacagagagacattcttgccttcaaaaacccattgctaaagaattaaatcctatttccaatacgaagtttgaaaatctggtgaaaatagttgacaaaaaaaacagcccacaacgccgatttggtgaaccgccgacaccatggacaaccagagttggtgagatgatgcgctaacagtgtgacgacaacctgatcttagaaacattgacggattacaaatcgttctgattttgctttttctcggcgttgtcgccgaagtgagagagagaggaggaagaaaaatcatgggattaattttttttacctttaatatttaccaatacaactaataaaatgttgtcacgtcgctcccgcactaaacctaagagcgcatctaagctaagaactgctctaaggtttattgatcatttaacattaaatttcaatctttaattaacctaagaaacctcttaaattccccatgtaatgatgctcttacaactgtgaaaagaaagagtaagaatcacttttgagttttgaaatatatatgtacttattatattggtcgtctaatgtggtgtttaggtcaacttaaatggcttaaatattaggagtatttgcaaacctaccatttttatactattcttttgtaacaatatccttatcgtttgggattattatgttaagcggaaaagaggcacatttatggcaggaagcacaagttgagcttcatgttgaaagccatgatcatttgaatctaggagctcgatctcgggtgagggatatctcacagcatactaactattcaggttttctttgttttgttgacgaatcatggaaaagaaagtgatcaattttcaggattaggatggtgttgtacatcatcatcaggagagtcctgtag

SEQ ID NO: 169704 - DNA, 1941 bp, Arabidopsis thaliana landsberg
tgctgaatagatttaataccttgtaaagcaggatattgtgacggaaagtgatcagttcaggtgtgttcagttggctttttttgtctgtttatgaaaataaatctgttagtattagctttactcgactctcgattttttgggatttggtttgcagtattgaggaattcatacctcttttaaaagagcgaatgaacgttctcaacccttacgtccggcaatttctggttggatggatcactgttcttgatagtgttccagacattgacatgcttgggtttctgccagactttctcgatggtaattgcaatttgataactttagctagatgtatatgaccgtattcaagtatagttatttgtgtactcagctgactcaacttgtaataaatttccagggttattcaatatgttgagcgactctagtcatgaaatacgacagcaagctgattcagctctttcagagtttcttcaagagataaaaaattcaccagtaagacttctgtttcgtccttagtttgggactaagataaaaatgctgctataaaaatcccattttctgtggatctatcttatattgttagttcatgtttgtttttaaagactgtttttatgtttcaatggtatattactgactggggcagtaatattgttgaagtctgtagattatggtcgcatggctgaaatactggtgcagagggctgcttctcctgatgaattcactcgattaacagccatcacgtgggtaagcagaataaaccatgcttctgcttggcgtcttccagttatatagattggtactattttgacttctcgggagattcatatactaagaatatctgctttttattaaatgttgtagataaacgagtttgtaaaacttgggggagaccagctcgtgcgttattatgctgacattcttggggctatcttgccttgcatatctgacaaagaagagaaaatcagggtggtaagtttgcttctcctcctcagtgatggaaactgtaggttttgtatgcatctttttactttctttgttttttgatttttatttgcataaggttgctcgtgaaaccaatgaagaacttcgttcaatccatgttgaaccctcagatggttttgatgttggcgcaattctctctgttgcaaggaggttagtttttctctattgttgtttttatatccgtttgaatattattaaatcgcgcctgtttatttgtgagtttttgcattgagcaggcagctatcaagtgagtttgaggctactcggattgaagcattgaattggatatcaacacttttaaacaagcatcgtactgaggtgaagaaactggtttttgcttgggcatcattcttttctagttagcctttttgtttatcgcgttatagctaaattggtaatgctgcaacaggtcttgtgcttcctgaatgacatatttgacacccttctaaaagcactatctgattcttctgatgacgtaagttctatctccctgactgttcgtttgattggttggtgaactttataatataaaggtttggttttgcctagtaataaacttatttgatatttgaactatctggacttggaaatatactttaggtggtgctcttggttctggaggttcatgctggtgtagcaaaagatccacaacactttcgccagctcatcgtatttcttgtccacaatttccgagctgataattctcttttggaaaggttagttgcatctaataatccgccttttaggtatctggaaagaacatattatttagttggtcaaaacatatctcgttataggcgcggtgcccttattgtccgaagaatgtgtgtacttttggatgccgaaagagtctaccgagagctctctacaattaatgagggagaagataatcttgactttgcttctaccatggttcaggtattatctcatttcctacatttc

SEQ ID NO: 169705 - DNA, 1294 bp, Arabidopsis thaliana landsberg; identical to SEQ ID NO: 2811

SEQ ID NO: 169706 - DNA, 545 bp, Arabidopsis thaliana landsberg; identical to SEQ ID NO: 73161
  unsure (1)..(545): unsure at all n locations

SEQ ID NO: 169707 - DNA, 2554 bp, Arabidopsis thaliana landsberg
atgaacgaaacacaaaattctgaccggcaagagcgggggatgataaaacgggaattgatcgttaatctccgcacgttcatcggaaatttcgtacgctgctgctctgaatcagaatcagctccaatcttcttcctcctccattgaatctcttttcgctacggaaaaaaactcgaagcttatcgtcctgcattctccggtaatcaatgtctactctctcgttttttttctttttctttcgcggccgatgctttgtcgaatttggaagccttgtttcatttttgatctgcctctgctagatgatgcacttgattttctgatttgagagatctagttccattgaatttggcgttgagagagatgtggaaatgaatgcgacctttggattatagcaatgtgcactagtacggtcttagattccttatcctccgaagcaattttgcgtattcagtgctattttcagatgattatagaagcgaatttagccaaaacctttagctggatattgcttatgtataatgtgggaatttggagtcgtttctgtatattctgctaagtgtttgattaaatgagaaactggactcaatactcaaacgtgaaattgactttttttttttttaggttttcgttttctcgtaaagtaaggctcatcgttgtctgagctagcgttggattgctaaaatggaaactgatcctgctaactcttcatcgaagtctccagctgtagtatctgagaaagatgtattgattcctgaaccttctgaaaatactgtgggcgttgtacaagatcctgtgagcgctgaaagagaagctcatgaagactctattagtacagaagcttctgttgcaaaggttgatgatactcaaatgcctgctagttctaccggctctgaacctttaagtaaaacagatgatatagttccatgcccaccaggttcctccccacgcgaatcaccgccgtctatattttcttcttctggtctttcttcttgggccaaaagttttaaattccagcagcaagatccaaatcgtacagattctgggatgtcagctttcacaagattcacctctgaacttggtctgcatttgccaacgaaagggtctgaggaggttggtgattctagatcatcaaacacacaagttggtggtgcttttgagtccctcacaaaagctgtggttgattcatctcgtggtgccgttaaagcaatgcaggtgaaagcacgccacattgtctctcagaacaaaagaagataccaggcatggtaatgctgtctttctgcttttgtagattctttgaaactgaggcaccttatagtcacaacagcttgttgcagcacactaccctattgcagtgaatgggccaaaactagcagtcgtttatttttatgagctttccctgctgtctagtgtaatgcatcgtttagattatagtatatatgtatgccctgatcagtaccacttacatctctgctttacatggcacctggtgcaatcttcaggagggggaattcgatttggacatgacatatataactgagaatataatcgcaatggggttcccagctggtgacataagctctggtcttttcggatttttcgaggtaaatagcttggtctggtttgaaatataagttccccagccagttcttttcttctcttagtcttgagtttctcattgacaaatgtcatattcagggactatatcgtaatcacatggaagaggtgataaagttttttgaaactcatcataaggtaaccattggcactgactggaagcctcttaaagagtttttgacaactcactaattctcataagattcacaccagttggatttgataagacactgcagcccagacatgtagtggttacttggtttatgtttgatcatattggtacataccagaactctaaaccttgcccccgatatgcaggataaatataaggtctacaacctttgttcagagagattgtacgatgcttcaagatttgaggggaaggtatatacaaactctagcacttgatatctcagaccatatatcttgcaggcagtttctgtggttgtcattgtttttaaagctagtgtttatagacctcttacagtgtttgcttcatcgcttgtctgatttccttttcttcaggttgcatctttcccatttgatgatcataattgtcctcctatccaattgataccatcgttttgtcaaagtgcatacacatggctgaaggaagatatccaaaatgtagtggtagttcattgtaaagctggaatggcaagaaccggattaatgatttgctgtcttcttctatatctcaaggtgacacttcttaaatgaaacaaagtcttggctgatgcacgcattcctcctctgtaagactcttgtgacagatcttactggtaactccattgcagttctttcctacagctgaagaggctattgattactataaccaaaagagatgtcttgatgggaaagctcttgttctcccaagtcagattgtaagttctgagctcacaccaatcttttaatgtgcttattcgattctccctcagcctat

SEQ ID NO: 169708 - DNA, 816 bp, Arabidopsis thaliana landsberg
tgaattcaactttgacacatacctgttctgttactgcaagggctcaatatggcaaacaggcgactgcaaaagtaatagctgaggtactgcggggcaagtattctaacgggtctggaggtccacgcacggttgaaattccggatattgttttatctgagctgaaagtgtctgtcacttacatgaaggcctggtatgcacgagaggctgctatcataaaaagcagaggcagcgaagaaagcagctacaagctgttggctgtttatatgcatttgctggagcaaggaaatcctgggacaatctacaaacttgaacatacacaaaaggcaagtggtgtgcaacagttcaagtacttgtcctttgcacttggagcgtgcatatcgggaataaagtacatgcgcaaagtaattcttgtggatggaactgctataaaggctagatttaaaggcgttttgttggcagctagtatgcaggatgctaatttccaagtgtatccaattgcatttgggattgttgatggcgagaatgagccatcatggacttggttctttcgccaacttagtaagatagtaccagattcggaggatttagtacttgttactgatagacatcgagctatttatgctgcagttggtcagatttaccccaaagcctttcatggcgcatgtgcagttcatctagaaagaaacgtcagagtcagatggccgaagcatgggattccaggacttgtcgggaaagcagcacgggcatataatgttgggcagtttaatgagtactataacgaaattggcatccgcagcagtaagtgtcatcagtact

SEQ ID NO: 169709 - DNA, 3086 bp, Arabidopsis thaliana landsberg
gaaacaatatcaagtttttacgttttgataaaataaaagcaacaaatatgccaaacatatcgagctttactaaatctaaagaccaagcttttgagtcatgttccaataatccgagggagtggccacatggtgctaatgatgtttcctcgatgggacatttatgcttgagcgtaaagtgattttgtcagcatagaagctgacatcagtaggctttataatctgaaaaggctaaacgtgaagtaatgcaagaaaatgagatctatttcgatgcttccaccaagacttgagttttttgatgctcatgggtgtagttccctgaaaaaagtgtcaaatcatttggctcgtcaactgctgactcagcaaatcaacgcaaccttcaatttttcaaactgcggaaatcttgatcaagacgcaaaggatagtatcatctcttatactgggtggaaaagccagatagtactagatgctttatctagatatgatggggtatgtatatttatctctctatcagctttaattctttctaatatcataagtgttgatcaacattgttttttaatttcttttttatgcagggtgttgttttggaagttcggattggtacttgctttcctggattgaatgtaccagcatgtttcagttaccgaacctctggatctgtgttaaagcgaaagttttcctcacactggtgtgacaacaggttcactgggatttctctatgcgctgtaatcttatttgctggaaagcatgatcaaagaaatcatctgttagtgaaatgtaagtgcgagttcaagaataaagacggatcacgtattcgtttcagtatcactcttgggggttggagggaatcagataacacaccgcagaagattgagtcgtctcatgtctttgttggctatatcggtaaaagggatatcaacaaacatggtgttggtaacaatgaagacggatgtttttgtcctgaagcttaccttgagtttcaagtaacagatggtaccgaagaggtaatagcttgtaaggtgttgaattgtggttttggtttggtatatgccaatgatgaaaagactgccgtaattccaaagagagttgagaagcctaaaatactttctttcgttggagttgaacgacgactcaagcagctggaaaagatggtgtactcaaaaacggaaaaactcgtattattggagttgtgggagaatccggcattggtaaaacaactatcgcaaagagtttgctataatgggtggatgcaaggtcccaagtaacttgttcttgaggatgagaaaagagcatagtttggagcagctgcgaaggacgttcttgaacaagctactgaagcacgtaaatcacacaataagcgaagatacaacacatgaatatgtgaaggataaactactccaagctaaatcttttattgtgctcgatgaagtgagtgacaagaagcagttagagtttctccttggcaacctcaaatggatcaagaagggaagcaagattgtaattacaacgcgtgacaagtccttactcgatggacttgctcatgatacttatgtggtcccgaaattggactacagagatgcctttcaactatttagatatcacgctttcgatgatcacagctgtagtcccacagggaaattcttgactatgtcaagaagatttgtcgagaagagtggaggtaacccattagctctcaagttattgggaagcaaactccgtgagaaagatgaggctaagtggaaccatcaaatgaaaaaaaggacatgcagtttcgatatgaagatccatgatgtcgagagatcctctaaggatcaatttaatcaacaacacatatctgacattgcatgtttttccagatcagaggttgaatatatttgtaggagtctaatggattcaggaaatttggactctacatattctaaaagtgaagtcagggatctcgccgatatgttcttgatcgaaatttataatggccgtgttgatatgaatgatctagtgaatacatttggtaaggacattggttctcctgggcggtgtatgttgttgaactacaaagatataactgacaagctgaagaatatggataatgaggtacggttttatattgttctttggttttctttgcaaaatagatattgaaacatatttacactatttattggtttttaacacaaaactgttatcagaacaaaaaaattgagattagcttgtgtatctcatcactctctacatgaaaacaaaaatcaaaatattttggttcagatgtttgacaagagtactgcttggaacatgcattattagcatatagtttggattacaagtctctacaattttcatattcttaaactgtgtcagtacaacttatcttgttaaattgtagagttttgatttaggcttagacttcatgtacttgctaacttttcacttttgatttgcttccaggaggctgataatgtgagagggattttcattgacatgtgtcacatgtccaaagtaacaaagagaatccccttgggatatatgacctttggtaaaatgcgcaatcttcgatatctcaagatatatgattcttgttgtcctcggaaatgtaacggcgactgcaaattatactttccagaagggcttaagttccccttgcaagaggtccgatacctcgactggttgaaatttccgttggaggaacttccatcgaacttcagaccaaagaatcttgttaaccttaggcttacttacagcaagattcaacgtattgtgttatcacaggagacaccacaattaaagtgggtggatctaagccattcaagtaagttgctcaacatatcagcattgtcaaaggccgagaatctcctgagtttgaatctggaagggtgcacagttttggaggagctgccactggatattcaaaatatgaagtctcttattttcttgaatctgagaggatgcatacgtctctgctttcttccaacgatggatttaatctctcttaaaactctcatccttaccgattgctcaagcctcaaggagtttcagctaatctcaaacagtttagaatttctacatttagaaggcacttcaatcaagggact

SEQ ID NO: 169710 - DNA, 1186 bp, Arabidopsis thaliana landsberg
  unsure (1)..(1186): unsure at all n locations
attgctctgagacgggaaaagatgggagaaaccgctccgttttggagattttcagcggcatcatatccacatcttgtaaaggaatcatctcatgagactgttgcagagaaaacaaaactagcattgactggaaatggcaatgcatcatccggggtatagaaatattagctaatttattttctccctgtgtatatctaagcactagtagattgaacgagattaactgatactttattttagggtgacgtttatccagtggaaccctataacgatttcaaaccggtccttgacgctcattggggaatggtctacgatgaagatgtaagacacgtttctcggatactgcattcgttttataattttctttttgatccagtaaatccttcgaaattagaggtcaaagtgaactaaaactgtttacctttttgcagtcgagcggacttcggtcccacacattatctttacttgtggccaacgttcccggagttctcaatctaataactggagctatctctagaagaggttataacatccaggttattatgcacacacttttgcttttagcttcaccgatgtgatgcatactactcatttctctcaagagtatgtgaaagttgttgcttttattgctctagagtctagctgttggtcctgctgagaaagagggcttatctcggattacaacagttattcccggaactgatgaaaatatagataaattggttaggcagctccagaagttgattgatcttcaggaggtgagctaatgattcgaaaccgtagtgtactttgggtttaattttaattttatatgtctaataacgtgtcccttttcattggcttttctagatccaaaatataacgcacatgccatttgcggagcgagaactgacgctcatcaaagtacctgctgatacttctgcatggagagacgttttagatcttgctcaacatttccgnnnnnnnnnnnnnnnnnnnngcgatcatactatcacccttgaggtgctgatatcatatctccctgaactttacacacaaaaagctctcgaacctctctgatatttcaagcttgagaggagatctctgagctgatgaaatccgtcgatgtgcaggttacaggctatctcaaaaaaatgactcgactacaaacgcacttagaggcctatggaatctgccaggctaaaaa

SEQ ID NO: 169711 - DNA, 3382 bp, Arabidopsis thaliana landsberg
  unsure (1)..(3382): unsure at all n locations
atgaaggctcaagttctggccgattttttaacagagttaccggtacttggtggacgggagcaaccagaaaatcagacttggaagttacacgtcgatgggtcttcatcaaaaaatagatccgaggtggggatcaaattggagtctcccacctcgaaaatccttgagcaatcatttcggttattattcactgcatctaataataaagcggaatatgaagcattaattgctggactcagattggcacagggagttggagctgatgaagtgatcacgtactatgattcacaactgattgttaaccagctcaatgaagactatgaagccaaagattcaagaatggaggcatatcttgagggtggtcaaagatttggctaaatattttaagaagttcgaactcattcgcataccacgaggagaaaacactaccgcagatgcactcgcagccctggcatcaacatccgatccagaagtcaaaagaatcattccagtagagagtattttggaaaggagtattaaggaagaaaaggaggcgttggtaatcacaaggtcctgagctgcaacccgagatcgtggcgacgctgctgctgaattaccacctgtcaaaagacgaaagtcaaaggaagcaaccgtacctaatctcgctgtgcgggaaaatacagggatcgaactagttgaagaaatcacctccggcgctacaatcgaagctgaaaccgaaccatgggttgacgaggatatactagcaccaaatgaacatcccgaaccagaagctcgagtatttcacgaagttgaccaaattccggctaaagattggggggctgattggagggagctaataaagcattacatcgttacaggcgagctcccaaagaacaaatggcaagctaggaaaatgagaatcgttagcacgaaattttgtttatcaaggaattctttgtatagacgaggtgtaagtgacccctacttgctttgcatttttgggcccgaagtcgagattgttatgagcgaagtacatgaaggcttgtgtggaagtcattcctcaggaagggctatggctttcaagataaagagaatgggttactactggcctactatgatcacggactgcgttaagtatgcccaacgatgcaaacgttgccaactccatgcaccactcattcaccaaccttcggagttattctcttcgatctccgccccataccctttcatgagatggtcaatggatattattggaccattacataggtcgacccgaggtgtacaatatctattggttctaactgattatttttcgaagtggattgaagccgaagcgtatgtgaatattaaagattcggcagtaaagactttcatttggaagaacatcatatgcaagcacggcgttccatacgaaatagttactgacaatgggccacaatttatttcacacgagtttgaagcattttgctcggactgggggattaaagtcagttattccactccgcggtatccacaagggaacggtcaggccgaagctgcaaacaagacaattctaagcaaccttaagaaacgtttgaatcatttgaaagggggctggtatgatgaacttcagccagtcttatgggcatatcgcacaactcctaggcgttcgaccggagaaaccccgttttcattggtttacgggatggaggcagttgtaccagctgagctcaatgtgcaaggacttcatcgaacggaagctcctttgaatgaaaaaaagaattctgcaatgcttgacgattcgttggataccatcaacgagaggcgagatcaagccttaatccgaattcaaaattatcaacacgcagcagctcggtattacaattcgaaagtcaaaagcagacctttctttgtgggcgattatgttttgaaacgtgtgttcgataacaagaaggaggaaggagctggcaaacttggcattaattgggaaggtccttatattgttaccgaggtggtccgaaatggtgtttacagattgaaacatttagaggacagaccagtccaacgtccttggaatgtggtgaacttgaagaaattttatgtttgaaacaaaaaggaaaaaaaagacacgcattttttgtacaagaactactgtgaggcttgatctcgaaatgggtacgtaggcagctccgaaacgagttcagctattaatcgaatttgttttattcatgttaaaaaagagtttgattatacgaacgaatgaaaacaaggagttcgactatgcgaatgtacaaagcaggaagcaaagctaaatttattcaaagcggaaaacaagaaaaaatgtgccgaagtcctttcaactaggaaatcctcctcgtcttgcagaacacttcgaccccttgactggcgatgtcaagaatgggcatcatacaatccgggatgcgaggaaattctgcaattccgagtttgatccaatctccagggtgagagttgagggtgtgtaactcccttgatatcacggtgactcttcgcagcatttggttgatcttctctcggagtttcttcttttcctctgagtgttttttgtgttgagtcgcgagagccttgatgaaggacatcgcgatgtcttggtctctgctcgaaaggtccttgataagtgcacacggagctcggatctgggatctgaagctgagaagtgtggggcgtcctctnnnnnnnnnnnnnnnnnnnnnnnnnnnnnnnnnnccgatcctcgaaaagtctggcatggattccgagcaacggaggttgaaggccataactgcaaaagaaaagagcggtatggttagtaaggagtgaaaagaaccctaaagagggaatttatagggaggtctcttagctttcagagatgcgattccatttaaagtcggagtgattcgcggaagcattcacgtcgctttagtcgccctgcattcaaagagtatctccaaaacgaatatttgatgaatcaaggaaaattagaaagttcccttaaataaatgggccgaagcccagtagttaggtccaagcgaaaataaaaaagagggtttttagtctcggggaacatttagtgaaggggctcaggaacaggctccttcatcgccggttcggggttcgaagtggacgcttcgtttttgtcgtccacgtcgggttcacttcacgcgcttccaggggttactatcctcctcctaatcttcacggtcttcactgtcagacgggatcacttgaaccggagcgtttacaggaccggggacttggcctcgagcacggaggtacatcgagagcatgtgcgggatcttcgccacgcagtcaaagtcctccactcccactgaaaagggtcgctctccatgtcccttatcttcctctcgatgcgagcaattcgggcctcaagcgtttaggcaaacgctac

SEQ ID NO: 169712 - DNA, 881 bp, Arabidopsis thaliana landsberg
tcgtaaccggagtaggactggttcaagaaaacctcggccactctttctgctacgttcgtccagttctcaccggatcaaaatcttctttcccgccggaaccgcccctccgacccgacccgatacccggaaccaccaccactttccgctcaatctccggcgcctctgttagcgcaaatacttcaacggtgctctcagcttctccgtcaacagacgcgtctggattagcctccgcgttcgagagctccaatagattcgcttccttgcctctccagcctgtgccacgtggtccgattaagaaactgggtcacgagtcgggtctattcgaacgccggttcttatccggccccatagaaagcggattgttttcagggaaaaagaaaaaggagaaagcaaaactgaagaaaagtggaagcaaatcattcacgaaaccaaaatctcacaggaaatttcttacattcaaaaacgttctcaccaacttaactttttcgaagaagagtgtgattaagccaatcaacggttccgattcattcgacggatcatcagatactgatcgtgacatacctgagatcaactccttaagcacgattgtgagcagccatgagaaacctagaatcaaacaagaagaagataagactgagtctgctttagaggagccaaagatacaatgggcacaggggaaagcaggtgaagatcgagtacacgtcattctctccgaggaaaacggttggcttttcgtcgggatttacgacggattcagcggtccagatccaccggattatcttctcaaaaatctctataccgccgtgctcagagagctcaaagggttactatggatcgacaaaggtgaatcatataataaaaacggcgagtccaacatcgag

SEQ ID NO: 169713 - DNA, 2613 bp, Arabidopsis thaliana landsberg; identical to SEQ ID NO: 15960

SEQ ID NO: 169714 - DNA, 1985 bp, Arabidopsis thaliana landsberg
atgggaggaggaagcaataatagtcacaatatggacaacgggaagtacgtgaggtacactcctgaacaagtggaagctctggagagactctacaatgactgtcctaaaccgagctctatgcgccgccaacagctaatccgcgaatgtcctatcctctccaacatcgagcctaaacagataaaagtctggttccagaaccgcaggttcaatttcttcttaattctcatcatttcttgacacccaagaaactttctaggtttataactcttggcgctgtgagtttatacaggtgtagagaaaaacagcgaaaagaggcgtcacgacttcaagctgtgaataggaagctaacggcaatgaacaagcttttgatggaagagaatgaccgcttgcaaaagcaagtgtctcacttggtttatgagaacagctattttcgccaacatcctcaaaacgtagatagattaatttatttgattcattcacattaattagttgacacataagttaaggaattgaaatagtctgtcgctctcagcaggggaatttggctaccacagatactagctgtgagtcagtggtgacgagtggtcaacaccacttgacccctcaacatcagcctcgtgatgctagtcctgctgggtaagttagaaccaacaattcttggctttaaataacatgacacacttttgagtcagtttttgttctctgccaccatttaaagcttctatatatctttgttaaatcaatgaatctctttgagtgtatctccagattattgtccattgcggatgaaactttaacagagttcatttccaaggcgactggaaccgctgtcgagtgggtccaaatgcctgggatgaaggtaattctcataagtctatctcgtcttcttttatctatgattcaatcattttcacttccttactgactaatttcatctgcagcctggtccggattccataggaatcgttgctatttctcatggatgcacgggaatcgctgctcgtgcttgcggccttgtgggtcttgatcccacaagggtaagtactattctcacttctttctaataggtacatcctcatagatcaaccaagaacataaatcacatttctgttttgtttttttcgcaggtcgcggagatcctaaaggataagccttgttggttgcgtgattgcagatctctggatatagttaacgtactatccactgcaaatggtggaacccttgaactaatctacatgcaggtattgatgatcaagaaccctaaagatgattttatcttcagcacaaaccaaataatcgaatcacacaaaactaaattttcctctctttctttctcatgaaagctttatgcgccgacaacactggcaccagctcgtgacttctggatgctacgttacacatctgtaatggaagacgggagccttgtggtaattatcctcttaacatcgatgctttgtttctcttttgatcattcgatgatactaatttaagatgttattgcagatatgcgaacgatcactgaacaatacacaaaacgggccaagtatgcctccgtctcctcatttcgttagggcagagattttaccaagtggttacctcattagaccttgcgaaggaggtggatccattcttcacattgtcgatcatttcgatcttgaggtagcctcacaagttttatcatttttttcttcttacacaagaaacctaattcttggtctaaaactgaagtgtttcctctgttttcacaattcgttctttatctctagtcattattatatactttttggtgccaatgatatatattcaaataacctggttgaaatcgtttgtagccatggagtgtgccagaagttcttcgttctctctatgagtcctccactttactcgcccaaagaactacaatggccgtaagattcctaattaaagacacattgtttttcatgtatttgaaaagaaaaaaactgtgtgtaaataacgtataatgt

SEQ ID NO: 169715 - DNA, 2623 bp, Arabidopsis thaliana landsberg
aagagatactccctgaaatttccgttgatagaaaaatattcttgggtgcagtacgagatgttttggaaggagcattgcttccaccatttgatgtccctgatttagatgactgcttgaatcttatacgtgagcagaaaagttgtagggacgataaagtgctggagtccataggccttctgacattagtggtcacccacaaggttcattcatgactgtaatattcattattaacaacagagtaacatattcatcccaacttaataaattatcgacatgacttgcaggttcttctaatcgactcaaagattttgctgattgaaaattcaaggattagtttgctaaacaacctcgccaggctttctgcatttgacaaccgcacttatattcttcaactgatgaaacctttcttgctggttggttatatatagacagctttcattttctgtctgacttggcctttatattgtttttttatatggtttcatatctcttctcatctagaatgaaataatgaatatggaacgcaaagccaaggcagatgcagtagcagtagatcttgcactcgagaggagaagaaggcacagtcaaagaagaagaatgataaaataaacaaggtctttcaactagtaatattctgtgaacaagtcaatgacgttttcctatcttattttgataacatatcttccattttgacttcgtttccttacttttaggattccacttctctgctttgtgtatacctgtaatgtcacattgtattaatgagtgatcttgatggtgcagcagagagcttcaatgagcaagtttagtccccttgatcagactgttgaacagtaagtaccttaagagtcattttcttatgttaattaattgttttcgggttttctctgagtttttacatgtacagtaaacctcctgtcaaccttgaactaaaaacggtggaagaagattctatggaaccagaaaatgctcttgcaagtgagagtggtccattggaaagttcatccaaaactcaaaatcaagaggaagctactaaagatggccctgcaggttgtttaaaagcttctcaattgacaaataatttgaattgtcttgttttgagatgcattattcttatatctttcattcgccattttcaagagatgctagacatgcctaaagaagattcactgtcggcacattcagagtcagcaattggaggacctgcagccagatacaattcagctcttgacatgacgctgaaggtaaagcagtttccaaccaaaggaagatttaatacctaatctctcatttactgattcaactcattccacatctcttcacttccttattccttttgatagtttcacaaaaacatgtggtattgcaggctctcttgaacattaaagttctcaaagaagatttgaagaacaatacacaacgatttcaacaagttccttctacactgcaacatttttttaatgcttttgtgtcagagagcataaaaactgagggagtctacagttgcatcttgagcgacttacttagttccctagaagaagttatttccaaggttcgtcatttgtgtggagatgatatgcatctaagcattgtattataatcttttttgtcaataagcttaattgttattcttaaagtttttagactttttactctttgtagtcgagtgatgctgctaaggtagttgtagccatccttgagttttggtgttgctggaaaaatccaaaagtagaaagcttggtgactcgcctcgtaatctctccaggcccgaaaccacatcatgtaatataagttttgtcccaagcgtcactcgaaccggcgacctctaaactttgcctaagatctttaccaattgagctaacgacatttggttgactcgcctttttacgttggcggagaatgaaagaatgagttgtagaaaatgcagatgtattacaaattatccagagaaaagttcttatgccattgttatggctgcagattctatcagagacttgaaggtacgtttcatttatttccctccgtatgcttcctacagaagctaatacttccccttataagattgttttgtgcttgtatatatgaagtgtgctcttgggaatatagagtttgtggatatccttaaggtgatccggatggattatacaatgctatgtgacattaaaaacggaggctgtggaatagcaaactttattcatcacattataagtaaatgcccacctatcttcacaattggtaagttttgaccaccatgattgtgatcttatgtactcatttcatatattatgcttatatagcaaatttggtgttttgtgggttgcatgattagtgttagagtgggaaaagagtgaaactgaaaaagaaatatctgaaacaacaaatgcttttgagtgggagatagatatcagcagactgtacgcaggcttagaaccaaaaactaactaccggcttgcgtcaatggtaagacatctaaaacagtgtcgcaatatgtttatgctactgttcttctgtaatttttgttacggtctcagaatatgagatgtgatgcaggataggttgtgatgaaaaacaggagcacatttgcatagcttataaaagaaccgttgggtcaatctcagacgtg

SEQ ID NO: 169716 - DNA, 555 bp, Arabidopsis thaliana landsberg
aaaccattgaagtattaaaccaaagttttgatttttcttctttggtttcttcttctgagccttatttgaacacttttactgtttatcatttttactgaatcttctttgttcttactatttcttgcaggaaacatcatctgctcagtatattcttcagacagtacactgcagcttctggtggtcagaagctacaaaactccattaaaaacgcttatgcgatggggaagctcaagatgattacttcagagcttgaaactgctacaagaaccgttaggaatcgaaacccatctaaggctgagactggaggttttgttctttggcagatgaatccagacatgtggtatgttgagcttgctgttggtggtagtaaggttcgtgctggctgcaatggcaagcttgtatggagacacactccttggctcggatctcatactgctaaaggacctgtcagacctctccgccgtggacttcaggtaaaagtcttgactttttaggtgttttagtagttcgagagaacaaaaaaatccttaagtgttttttggatgattcagggcc

SEQ ID NO: 169717 - DNA, 1033 bp, Arabidopsis thaliana landsberg
ggtcccgtcaaccgtagacccagatgcacctggatcagagaaaggcactaaggctctgaaaagacctgttaaacttaatgcatggaagcttgcaaagttggatccaaatgaagctgcaagggcagctgccagagccagagcgtcatcatctgtcctaagaccgatagataatcgccatttacctgataatgatcttagttccattggcacagttagtatcatcagtagtgtaagcacagatgcaaatgtggctgcaagtaaagagataaggaacaatgatctaaggtcatctctttctagaaactcgtttgctccaagccaaggtagccgggatgagtatgacacagggagccatggtatgagcaatcttagcagtccaagccatgttcacgagtctgtcacacttgctccactccctcaaaatcctacaatagttggcaatcgcttcactgcaacaagccatcacatgcactcgacctttgatgataaggttctgcacagaggaaacgacgcggatccgctatttctctttgctcctgcaacttctcatctgagggatgtgagaaagacatcagttgtttgggatccagaagctgggagatatgtatcagctcctgtaacaacaacatctgaagtccgcaacagattgctaaatcctagctcacaaacagccagcactcagaatccaagacccattcttccagctcatgattcttcttctggatcatcagcactaagggatcctcttcctctgcaccaagccgagagaagactgacatatacaggtgactctatcttttatggaggccctttgattaatattccgactagagataccccgagaagcggaaggggcttggtaagagatgtacaagacagattggcatcaacagttcatcgagatgcaagaattagaagggattcaacctcaaaccagcttccggtgtttgcccctggaggtcttggggcaaactcccaaaccggttctaaacatcaagtagatacactgattgtatttcttgaaaggctctga

SEQ ID NO: 169718 - DNA, 881 bp, Arabidopsis thaliana landsberg
  unsure (1)..(881): unsure at all n locations
agtttttcactggctttacaaggaccagcaaatgttattcaaagatgtggagaattttttatgcttgacataagttcaaacacattccaagatccgtggcctttgttaccaaactcgacaacaatctttttaggctctgataatcggttttcgggagagattcctaggactatatgcaaattggtttctcttgatacacttgatttatccaacaacaacttcaacggctccattcctcggtgtttcgagaagtttaatactactctttcggtcttgcatcttcggaataacaacttctccggtgagtttccagaggaatctatcagtgatcacttaagatcacttgacgttggtcgcaaccagttatcaggagaactccccaagtctttgatcaactgcactcgtctcgagtttctgaacgtggaagacaacataatcaatgacaagtttccattctggttgagaatgttgcccaaacttcagattcttgtccttcgttctaacgagttccatggtccaatatcttctcttggagattctttgagcttcccaaaactgcgaatctttgacatttcggaaaatcgcttcaatggagtcattcgatcagattactttgcgggttggagtgcaatgtcatcagccgtagacnnnnnnnnnnnnnnnnnnnnnaggtatgcgggacgtgactcaggaaactattataactcagtgactatgacggtcaaaggatcgataatagagttggttgggagtgttttcacgatttacaaaaccatggatgtctctggaaacagattcgaaggacgtaatcctgaaaccatcggtttacttaaggaactgattgtgctcaatacgtcaaacaacggtttcacaggtcgtat

SEQ ID NO: 169719 - DNA, 1922 bp, Arabidopsis thaliana landsberg
ggagaacaagaaaagagaagactttaagaatccaggtaatattttaaaatacgcaaaacgtgattcattatattagattaacgtgaaaacgtaaatcattattcttttgtttcaaaacctaacaaagtttttctatttattattaataaacacgtgcagatctgaaacttacactggctgaaattaggaactacactctgcaagaaattgagaagattatgttacgtaacggtgcaacactcaaagaaattcaggattttccacagccttctagagaaggtattgataactccaaccgtttagttgttgatgagctgagatataacatagattctaacttgcaagaaaagcatgacgagtggtttcaaatgctaaatacggagcagagaggcatatatgatgagataaccggtgctgttttcaatgatttggaaggtgtttttggtttttatggattttatggttttagagggactgggaaaatttttatgtggaagacattagcagctgctattagatgtagaggacagattgtgcttaatgtcgcctcgattggcattgcgtctttgttgttagaaggtggtaggacagcacattgaaggtttgcgatcccttagaatcttgacgagtttttggtttgcaagatcaccacctaaaattgatcttgctaatttgattaaagaagcatctcttattatctgggatgaagcgccaatgatgagcaagttctgttttgagtctttagataaaaccttctgcgatatactcaacaacaaagacaacaaagtttttggtggaaaagtagttgttttttgcggtgattttatacaagtacttccggttattaatggcactgggagggcatagattgtgatgtcttcactcaatgcttcatacatttgggaccactgcaaggttctcaaattaacaaagaacatgtgactcctttcaggcggtttaagtgttgaggaagctaaagatatacaactgttttatgattggctattggttgttggtgatggtaggattaatgatcctaatgatggagaggcacttattgatattccagaggaattgttggtgaaaggggtaagatacccaatagaagctatcaataaggaaatttatggggatccgtcagaactacatatgataaatgatcctaagttgttccaaaggagagctattttagcaccaaccaatgaagacgtcaatactataaaccagtatatgctggaacatttgaaaagtaagtcagccaactaccttagatttttacggtttaaactaattgaaaactttaacggtttatgcttattacacgttgcttttgtttttttgtatgtgaagaacggatctatttaagtgctgattccatagatcctacagattctgattcacttaacaatcctgttatcactccatattttttaaacagtatcaagttaccaggtttgcctaaccattctttgcgtttaaaggtcggtgctcctgttatgttactacgaaatttggatcctaaaggtggtctatgcaatggcactaggcttcagattacgcagctatgtactcagattgttgaagctaaagttattacaggagacagaattggtaacatagttttgattcctacagtgaatcttacacatacagacactaaacttccattcaagatgcgtaaaagacagtttccactctctgttgcattcgctatgactataaataagagtcaaggtcaatctctagaacatgtaggactttacttgcccaaaccaatgttctcccatggtcagctttatgttgctttgtctagggttacctctacaaaaggtttgaaaattctaatactagacaaagatggtaaacttcagaagcaaacaaccaacgttgttttcaaggaagttttccaaaacatagactga

SEQ ID NO: 169720 - DNA, 582 bp, Arabidopsis thaliana landsberg; identical to SEQ ID NO: 71507
  unsure (1)..(582): unsure at all n locations

SEQ ID NO: 169721 - DNA, 1052 bp, Arabidopsis thaliana landsberg
cttttcacaaaagatacgccattgattccacgcactggggtggtgctaaagccaacgcggcaatcttagcatttcttgaagaagaatcgtcgttagactctcatttgcctgccatcggttttcttcgtgacaacggtcctcgcctaaatgcgctcctcgtctacatagaggtgttgtgtttttataatacatacggttagattaattttttgtagtaactattatataaattcaaacgttgtataatgcagcataggtattatggggagacgatgccatttggatcagcagaagaagcactaaagaacgcaagtacgttggggtatttgaacgcagcacaagccctagcagactatgccgcgattctcttgcacgttaaggaaaagtactccaccaatcacagccctatcattgtaattggaggatcctatggtggaagtaagttcagtgtatgtgtatacatcaaaagttaaaattatcataaccgtaacttatgtggttatgtgatgtagttaatctttatctcataatgataatattaaatagcattatatgatattaatgaatttttaaataataattttttttcatggtataaaagtgttagcggcatggttcaggctaaaatatccacacatagcactcggagcattagcatcttcagctcctcttctctactttgaagatactcgtcctaaatttggttattattatattgtaaccaaagttttcaaggtaacaataattatccactcagaacccatatcaacatgtaggagttatttttttccccacaatcagtccattaatttcaactatttcgtttttgttgttacatggtagtctttactaattttaactaattacaattttttattttctccaaaatatattccattaggaagcaagtgaaagatgttataatacaatccgtaattcttggaaagaaatcgatagagttgctggcaaaccaatggtctctcgatccttagcaaacaattcaaaccttgcgagtacagaagaaatatcttaattttctattgttttttttt

SEQ ID NO: 169722 - DNA, 1836 bp, Arabidopsis thaliana landsberg; identical to SEQ ID NO: 9735

SEQ ID NO: 169723 - DNA, 797 bp, Arabidopsis thaliana landsberg
ttgatactaatcatttatatatcacttgataatttctccaacttagagtgtgagattttatttcactaaacaatatgacttgcattagaattatatattgactactgaataagtgaccagatcgctctatttttggagcgatcagtaacatactttttccttaagaattgtgtgtacactagacaacactttttatagataaaaaattgtatcgccatgttttcagctccaattgttagaagatcgggagaatacggattgttgtacgctgcagagcctcttgatgcgtgctcgtacttaacaaacatggcggaaaaaggttcgaaatttaggccctcgtatgtattgatcgtccgtggtggctgtacttttgaggaaaaaataagaaatgcgcaggacgctggatacaaagctgcgattgtctataacgatagatatgaggagctcttagtacgtagtaagttcataagttctcaatgtttatgtgagtgttataaacatctttaatcgatggttgttataatcttgaaatcatagtggcaggaaattcatctggtgtctatatacatggcgtgcttgttacaagaacatcaggggaggtacttaaagagtataccagtcgagctgagatggagctcttgctcatcccgagattcgggatttcatcttggtcaatcatggctatcactttcgtatcgttactcgtcatttctgccgtcctagcctcttatttctctgtccgtaggcatcgaattagacagcgtgtgagggatttacatcatggtggcctaggacat

SEQ ID NO: 169724 - DNA, 603 bp, Arabidopsis thaliana landsberg
gatttgattgatttgggaggaaaaacattcctggtacccggaaacttcccaataggatgttccacggcatatcttactctatttcagaccgcgacagtagaacacgacccttttacaggttgtatcccatggcttaacaaattcggagagcaccataacgaacaacttaagatagaactcaaacaactccaaaaactctaccctcatgtcaacatcatttacgccgactactacaactctttgtacggactttttcaagaaccagccaaatatggtatgcgccttctaaagcttctaactttgaccctcacgtacggtttaattcgttaacccatgttttatgaattatggtccctttttaggttttaagaacagacctttggctgcttgttgtggagtcggaggtcaatacaacttcactattggtaaagagtgtggagaaacggagttagctattgtcaaaatccttctgagtatgtgaattgggatggttatcatttaaccgaagccacgtaccagaagatggctcagggtttactcaatggtcgctaaacaaatcctgctttcgactggtcctgccttggctcttatgatttcagtgga

SEQ ID NO: 169725 - DNA, 903 bp, Arabidopsis thaliana landsberg
atatcgccggcgataatgggatgcatttgcttcaagtcttggcgccgatcatcttcttcaccgtcgattacgtcaacggtcatagatgatctcgaaaacgtcagagagtacgatgccgacgacgacggaggacattatccgttgattttccgtgagttcagtttagaacagctgagaatcgccaccgacggtttctccgccggaaacatcgtatcggagcacaacgattcggtaccaaacatcgtctacaaaggaaaactcggcgatggtcgtcgcatcgccgtcaaacggtttcaaagactttcttggcctgatcctttcgaattcatcgttagtcttttttgatctttataatgtttttggttttgctaacaagtttttgatatctatcaatggtggactttttttcagaatgaagcacaagctgttgggagattgaggagtgaacatatggcgaatttgatcggttgttgttgtgatgacaacgagagattacttgttgctgagtatatgcctaatggaacattagcaaaacatctttttcactgtaaaatatctctttgtccttttttctcttattgatgattgatgatatgttttggtttgatgattaagagtttaatgtgtgtttcaggggagaaaagacccatgaaatgggaaatgaggttgaaagttgctctgcatactgcaagagctttggagtattgtaatgataaaggaattgatttataccatgatcttaatccttacaggattatgtttgataaggtaatgaaagctaaactctgttttgatttgtgtgtttctcttaatttttagcaaatctttattaatcttcaagttgttgaatgatagacagggattcctaagctttcttgctttggtctcatgaagaatagccat

SEQ ID NO: 169726 - DNA, 454 bp, Arabidopsis thaliana landsberg
atggtgaaaaaaggaggtacgaagaggaagattgcgattgagacgatacagaagagcgattaccttagggttacttgcaccaaacgccgtgaaggtctctttagcaaagcctctcagctttgtcttctctccgatgcacaaatcgctatcttagcgactcctcctacttatgaatccaacatctccttctactctttcggtcactcctctgttgatgccgttgtctctgcttttctctccggacaacgtcctgttccgaggataccaaagagatgagggaggacgttggtatctgcttgtctcgcaataatctagggttaggtttttggtggaacaacgagagcctcaacaaatcggagaatcctcaagagattagtgacgctatcgactctatgatgacgctctagagtaatctcaaggattgagtggggagatagctttgggtaacgatcac

SEQ ID NO: 169727 - DNA, 604 bp, Arabidopsis thaliana landsberg
attgcttcagagaatgctcggtttgagcaaatatggcggagtaggaagggaaacaaggaaggcatccatgagaagtgtcatttctttgacgttattcgtgttgatactgaagaaagacgagacaatgcacaagagtaagtcccctagtaatgtgcatttgtaattaagatctcagagtcagaaatagattagctgtagttcaataaacacagtatgtaaaggtttactctttctgtaggtttacatccctggaggaccagaaaatgctcgctagtttcttgcctctccttagcggttgtattccttcggctgctggagtgattgtagctgatatcctatctagtcgctccgttgaatacgtttctgattcttatgctgtgggcgaagagatggatgtcagcgaagatagttccaagattcagtttcctctgtgcgtattcgttttcgtcctttactttttcgtcctttgctttttcgtctttgtctcttgtgtcgcacctgttgatatggtttttttgttgtttttcagtgtcatagtccagtggttaagaagaattctgtgatggatctgatgcatcaggctacgcctctgatgattcaaacg

SEQ ID NO: 169728 - DNA, 575 bp, Arabidopsis thaliana landsberg
  unsure (1)..(575): unsure at all n locations
cgtcgattctgggcacgctggacagcatcgcccggcaggattacccaggaccgatgcaggtgctggtgatcancgacggctcgcgcgacgccaccatggcccgtctcggcaccgtctcgtatccgtggctcacggtgatcgacctgaaacagaacgccggcaaggccaacgcgctgaaccagggactgaagcaggcgcagcacccgctcaccatcacgctggacggcgattcctacctctacaagggtgccttgcggcacctggtgggacgcttcctgagcgatccgccgaacacggcggcggtggccggcagcgtgctgctgcgcaactcgcgcaccaacctggtcaccaagatccaggagtgggactacttccacggcatcgccgcgatcaagcgcctgcagagcctgttccagggcacgctggtggcccagggtgccttctcgctgtatcgcaccgacgtgctgcgcgaagtcgacggctggcccgaatgcgtgggcgaggacatcgtgctgacctgggccatcctcaagctcggccaccgcgtgggctactgcgaggacgcgatcaccttg

SEQ ID NO: 169729 - DNA, 533 bp, Arabidopsis thaliana landsberg
ttgtgccaagaaaactcaatcttgttagctagatacctttttccacctgtcacatttttacggtctcatatatactttccaaacttttattctcctaggtctaagtgatgcggttatggagcgtctacggcagaatgctcaagctttcagtcaaatctcctcaaacctttctgtgtgcaaggtaattgatttgtatctgatccaaatgctagctggtagaaaaagattgcataagcagaaaattgaccttaaaaagatcgtagatcacatgcacaatgtttattcaatgcaacttattgtttggttgggatacatgctgttgtcctttcgtaatggaattcccatcctgacatcctattttctgcatacagccacaggataacgtcagtctgttttatatggcaagaaataacatcagtgccatcttgaatgagtatgtggatctaatagcatgccgaatccctaatgattcatttcctctgtcgtaattctcaaactcgtctatgaaagcttatcttactatactcttggct

SEQ ID NO: 169730 - DNA, 319 bp, Arabidopsis thaliana landsberg
  unsure (1)..(319): unsure at all n locations
atgccgacaaaccgcagcacatcgcgcaaaggcggcgccagcaggcgcctgattgtcgcgatgaccggtgcctcgggctccatctacggcatccgcatccttgaacgcctgcgcagcatcggtggctgggaatcgcatctcatcgtatccgaagccggcgtgctcaacgcctggcaggaatacggcatggaccgcaaggcgctgcacaagctcgccgacgtcacccacaacgtgcgcgacatcggcgccaccatcgccagcggctcgttcctgaccgncggcatggtcgtcgcaccgtgtnnnnnnnnnnnnnnnnncg

SEQ ID NO: 169731 - DNA, 266 bp, Arabidopsis thaliana landsberg
aaaaacataattattttaggtcgtcaatgtctaatctcatataatggtgcttcaagaattgtattcaatcaaacttacccagagattaacatggctcgcatcacgtaagaacgtttttattttcattatttatttactaaaaagcgtattataaaaaataaattaatctaataaattaatttcttttttttttctacttttggagggctcaattccttgtacggatgcaaccagctgagctaggtgaagttgttgatgagaattga

SEQ ID NO: 169732 - DNA, 331 bp, Arabidopsis thaliana landsberg
  unsure (1)..(331): unsure at all n locations
atgcccaccgccctgtcgccgcagcagcccgtcggccattccgttcccaactggaccgcccggccgcgcccgccgcgcgaacccattgccggccactattgccgcctggaaccgctggacgcggcgcgccatggcgccgagctgcatgccgccttcagccaggcccccgacggcagcgactggacctacacctacgcggggccgttcacggacgaggccagctacctggcctacgcgcgcaccgngcaggcgaccgaagacccgcagcatttcgccatcatcgacctggccagcgggcgcgccctgtgcaccctggccgccatgcgcatcg

SEQ ID NO: 169733 - DNA, 603 bp, Arabidopsis thaliana landsberg; identical to SEQ ID NO: 81090
  unsure (1)..(603): unsure at all n locations

SEQ ID NO: 169734 - DNA, 543 bp, Arabidopsis thaliana landsberg
  unsure (1)..(543): unsure at all n locations
accgttgcgggacgttttacaagcctccgcccccggcgccgaaccctatattaaggtgggcgaccaagtggagtccggccaggttgtctgcattgtggaagcgatgaagctaatgaatgagattgagtcggatgtggctggagaagtggtaaaacgcatggtcgcgagcggacagcccgtggaatacggtcagtctctttttgctattcgcccgcgctaagctgtgacctgcgcgcgggtcttttgattcgtaaactccccagagttcaacaccttcactgagttgaggtttatgttccgaaaagttcttatcgctaaccgcggcgaannnnnnnnnnnnnnnnnnnnnnnnnncaaggaaatgggcattcgtacagtcgcgatctacagcgaggcagatcgaaattctcttcacgtacgctttgccgacgaagccatctgcattgggccaccgcgctccgcggacagctacctgaacgttcctgccgtaatcagcgctgcggaaattgctgatgtggatgccatacatgccggctacggctt

SEQ ID NO: 169735 - DNA, 1120 bp, Arabidopsis thaliana landsberg
cttcctatctaaacattacgcaggtttaccccatgtcatctcatgctgcttgcgtcgtaaacctgaaaaggaacattgaggcgtactttaaatacgatcagctagtttccttgatatcgagtgcagctagagcttatcgactaactgacttcaataggatatttgctgaagttcgagctaaacatggaccgtacgtagactacttggaaggtatcgggttcgagcattggacaaagtcccattttgttgggaataggtataacgtcatgacaagtaatattgtggagtcgctaaataatgtgttaactatggctcgagattatccggtaatttccatattatagtcaatttgcacaccactcgtaacatggtttgcgcttaggaggcaagctgccaaaagtgaggataatatcctcctgcctaaagtgcacgatatgctaatcgaaaattacgagaaaggagcaggatgtgccgtgctaaagattggggatgggctatatgaggttagagaaaagagaggctcagcatttgcagttaacctatgggagagaacgtgtacgtgcagggagttccagctcctaactatcccctgctcacatgccatatcggcggctatagaagaagggctccgcgtggacacgatggttggagtccatcacacgaccccccagcttagattgtcataccaagcactcataataccggtacccgacacggaaacgctgactccttcaccaaatgatgtaggaggtggaaaattggctccaccgtatgtgcgtcgaccgcctgggcgaccaaggaaacggagattattcttaaaaggagaattcaaggtaacatatttgacatcaaagctaataaaatatttatatggtaatactattaggatgtaaccatcgcttccatttgtagcgagcatcaagaaaaagatgctcacaatgcaagtcattgggacataacaggccaacctgcaatggaccaatatcggtatgtcaaatattatctgttaatgactatattatggaatatttatattatctgttttgagtgcagggaccgtagaaaatatggttcaaggacgttttttggcgctgaaagtgatggatgctgccatgattaa

SEQ ID NO: 169736 - DNA, 2801 bp, Arabidopsis thaliana landsberg
attcaaacgaggaagaattttgaaaatcacatcgctatatcacgtttcttagatctaagtctctatatcagcgtatcttataattttctctgcaaaatcaggtatgagcaagatatatggacatacatttcaaggtttttggatggtaaatcactggtgaagctgggagcaacaaacaaatggttctataagatcgcaatggaggatactgtttggaggtttgcctgcttgcgtgatcttcaggtccctgtgccgtttcccgtttcttccacctggattaagatttatgcttcagcttttggtaagtttcacatccatttcggacttatgatacattcttctacaatggtaaactaagaaaagatatggaaaactgcagatgggagtcactcttacttgttccgtcagaaggagaagcatattggttagtccttgaattggatccatcatactctcttcttagtcatgttaagatgttgtacagatctttgactttgaagtacttcatttgctgatcacagcctcattttgatctcgttttgacactgtcattatagattggatgcggataggtgcctttgttcttgactctcgaacttcactcctgactgagagtttgagtggtcgtctgaaagtcccaagggaaggaaccatagaacggatgttacaatccagtggttcatgtcttatcaacgacatcaaaagcggtatttggattgcaggcaagaacaatttctttagaaactttatctactgcagaaaaagaaaactgtaacatggcttatctcatgttccagatttacagcttgtacgttgccctgtttgtgacctcagtacctgtgatggtaaaagacactaatcaacttctagtctgtttctattgatgttagtctatgaaataactaaattgcaactaagagagtttctgttttactatgtataggaacaatgcaaactcttgatgctaggcacattgaactcttccttagtgaaggctacaaagatggaagctgggattacaatctgatcggatctcataagttgcagaaaaacgcaagtgcagcttgtggagccatatttgacctcaaacaccttaaagaatcttcatattcaggtaacttcaaatctacattacttttctgttcctttactcctcctctttagatcattctccttgggtctcatacattttcacatgaataataggtattctcaacctcaagtcttggaccggagagtcaaatgattcccaacctaaagcagttatcgcaccccacgctgttgctgttcacacaagactgcaagaaaacgaaggtacatgtccaaatcactttgcataatcaaccatctttatctagcaagtaagaaacacaattacaattcttttacaaatctaaattgcaggaatccttgtgaagtaccacacaatgaaagcaggaacagacggtgacattgtttccatcagaatctcccagcaacttctctgattctttcacagtgcattgtctcatagtcagtatttctggtatacaaatccttctcctcttcagtaaaataaagataaacataagctttactgttctatgactttttccattgtctataagtatgtaaattccaattcccttagtgccttaccacaatatgactttctcaaaacaattccctcttcttctctatttcttcttcttcttctactttcctctcctaaatgcctcaaaaccaaaacgttgctacagttcttcatgtggaggaaacaaccttgacgttagcttccctttctggctatctcctgagcaatcttcgtcatgtgactacccaggattcaacctccattgtgagacagccttaaagcttccaaattccagacgatttctcgtccaagacataaagtcgcagcgtattcaccttagagaccccgataactgcttagccagacggcttctcagcttcgacgcttcaatgtctcctttttctcctcttcaccttgtcaactacactttcttgagctgtcataacgaaaacgtcaaatcctcttctttggaacccatccattgccttactaattccacaccttcagatctcaccggttcaatgccgtcctcttgtcaaaccttgaagacactacttcttccggtctcttcaccactcgcaggtgatctcaacaaacaagacctctggctgaaatgggactcaccggattgcacaggttgtgttgattttagtccgttatgtagtcataaacaataccatcctcaaagtcaaatgcttcacatacgttgattctggtaaccctctcgtcctataagttctcacatatacaccccaacttgaaatcaaaatcttggcttcatcaagaacatatcaaagaacaatttttcttaaaaatgttagacttttttctatctttcaggaaacccttggttaataacgttaaagatattatgcttatgcctatccgtaccattcttcatagtgataactcctgccgtctgtatcatttttatcccaatccaacaacaagccaagagtgtcccttggcgaaatgacactctctgtcccatttgtttatcagaatacacaagtgaagagaccgttaagtgcttacccgaatgtgaacattgcttccacaccgaatgcatcgacccgtggctcaagttgcataactcttgtccggtttgtcggaattcgccttcatctttgccaaataaagctgccacgacgaacgttgtctagatttgattcgagccactattgattgtttatcgtaatttcaatgttgcgcattacgcaatttcaga

SEQ ID NO: 169737 - DNA, 1094 bp, Arabidopsis thaliana landsberg; identical to SEQ ID NO: 792

SEQ ID NO: 169738 - DNA, 1124 bp, Arabidopsis thaliana landsberg
ccgccaatcacctcatctccacctccaacgcctccttcttgccctccaccttctataactccacttccttcacctcctcagcctcaacctccgcctcaatccaccccaactggagattctccggtggtgattccttttccaaagcctcaattacctcctccttctctttttcctcccccctccttagttaatcagctaccggatccaagacctaatgataataacatacttgaacccatcaacaaccctatttctcttccgtctccgccttctactcccttttcgccaccgtctcaggaaaattccggcagtcaagggtctcctccgttgtcatctttattgcctccgatcgttccgctaaaccctaattctcctggaaaccctttacagcccttggattcacctctgggaggagaatcaaatcgtgtaccctcgtcgtcttcttccccatctcctccttccctctccggatcaaataaccattccggaggctctaatagacataatgccaatagtaacggggatggtggtactagccaacaaagtaatgagtctaattacaccgagaagacagtgattggtattgggatcgcaggtgtgttggtcatattgttcatcgctggcgttttctttgttaggaggaaacaaaagaaaggctcttcttccccgcgctctaaccagtatttgccaccggctaatgtctctgtaaatacaggttaatatttttaccttttggtgttgtcttaaattggctcttgaaatcatgtcctgctcttgattttatttttgtgtacttgacccttaagtctagttcttgttcttgattattgtttcttgtcgcagaaggattcatccattacagacagaaacccgggaatgggaacagctcggcgcagaactcttcaccggatactaacagtcttgggaacccaaaacatggtagaggaacccctgactccgcagtaatagggacttcaaagatccatttcacctacgaagagctaagtcagataactgaaggattttgcaagagctttgtggtaggagaaggcgggttcgggtgtgtatacaagggcatgctattttagggatagcccgtagcgaccaaacagctgaagtcggtc

SEQ ID NO: 169739 - DNA, 519 bp, Arabidopsis thaliana landsberg
atcacgtgtggcgaagaagccaaggcgccggcggtacgcgcggaatcgccggtcattccgccgctgttcaatgcggcgtacgtgcgtaatcctgcgccggcgtatcctgccgccgcgcgccgcagcggcgatcagggcacggtgatgctgaaagtgctggtcagtcccgagggcgtgccgctgcgtgttgaacttgatcggtccagcggctctaagctactggatggcgccgctcttgacgcagtgaaaaactggcggttcgtgccggcgcgacgcggtgcggagaacgtcgaaggctgggtgcgggtgccggttgttttcaaactggaatcttgatatccgcagggttgaaaccgccgcggatgccctcatctgcaccacagcagtttattcgtaaacttattcgtacattcaacataatcaacaggttgcattcccatggcagacgcggtttttcacggcaccaccattctttccgtgcgtcgtggcgcacgtgtcgcgctagatggtaacggccag

SEQ ID NO: 169740 - DNA, 644 bp, Arabidopsis thaliana landsberg
aagcgggggggggcagaacccgtggcttctaatccggaagcacctgtgtctgcggacaggcgatcctcgggacgatcccagagtggaggtcagtcctcgagaggtgggggtaggtcctcttctcgagttccgaaccgatctcaagaggttagacagacttccaactaaagtggaggacgaggctgggctagcgaatctgctttgccacatcaaaggacagaattaccaggtcccaggtgtgaagaacatggtcgaggcggcgacctatgctgatatggtggtgaaggagggccgggtaacaatcgattatcgtttccctttaattccaaattttgtgcttgttttcattcctgtttcgttttcggcaggagattgctattacgaacaagctgattgctctttattatcaacacttaagcaaggtcttccctgacgcttatcaaggagataacggagactgtgaagtcaggtcaggagcgcgaggcttcgtaccaggtacactcctatcattttttcgtttttgtgctttgtgttggtttgatggtgtaatgatgctgacctggctatggttttaggcaaagatctacagactgaaaatggagttgtctacctcgaaggacctcgagaagagctatgttgacctg

SEQ ID NO: 169741 - DNA, 1459 bp, Arabidopsis thaliana landsberg
caacttcaagaggaatgaagtttggagcctggtgccatgtccaaagcaaaatgttgtgggaacaagtgggtgttccgcaacaagcaagacgagcatggggtggtgacaagaaacaaggctcgacttgtggcaaaaggttatgcccaagtcacaggtttggatttcgaggagacttttgctcctgtggctaggctagagtctattcgaattttattagcctatgccgctcaccactctttcaggttgtttcaaatggacgtaaagagcgctttcctcaacgggcccatcaaggaggaggtatacgtggaacaaccccctggctttgaggatgacaggtaccccgaccatgtgtttaagctctctaaggcgctctatggacttaagcaagccccaagagcatggtatgaatgccttagagatttcttaattgctaatgctttcaaggttgggaaagccgatccaactctttttactaagacttgtaatggtgatttgtttgtgtgccaaatttatgtcgatgacataatatttggttctactaaccaaaagtcttgtgaagagtttagcagggtgatgacgcagaaattcgagatgtcgatgatgggcgagttgaactacttccttgggttccaagtgaagcaactcaaggacgacactttcatctcccaaacaaagtacacgcaagacttgctaaagagatttgggatgaaggacgccaagcccgcaaagacgccgatgggaaccgacggacacacagacctcaacaaaggaggtaagtccgttgatcaaaaagcataccggtctatgatagggtcattactttatttatgtgctagtagaccggatattatgcttagcgtatgcatgtgtgctagatatcaatctgacccaagggaatgtcaccttgtggccgttaagcggattctaagatatttagtttctacgccttgcttcaggatctggtatccaaaggggtcaacctttgacttaattggatattcagactccaattatgttggatgcaaggttgataggaagagtacatcagggacgtgccaattcctaggaaggtccatggtatcttggagtttaaagaaacaaacctccgttgccctatccaccattgaggccgagtatgttgtcgcaggacagtgttgcacgcaactactttagatgaggcaaaccctctgggtctttggctacaatctgagcaaagtcccactcctatgtgacaatgagagtgcaatcgcttggcggataatcctgtgaacacagccgcactaagcacatagacatccggcatcacttcctaagagaccgccagcaaaagggagatatcgaggtgtaccatattagcaccgagaaccagctagctgatatcttcactaagcctttagatgagaaaaggttttgcaggttgcatagtgagctaaatgtcttagattcgcgtaacttggat

SEQ ID NO: 169742 - DNA, 473 bp, Arabidopsis thaliana landsberg
catgacccggtccggggtcagccgggcggtgtcacggctgaagagcagatcggcgtgcggctgctgtttcgcagcacgcgggcgctgcggctcaccgacgacggcgagtcgttctaccagcgctgcaaggacatcctggccgacctgggcgaggcggtggaggcgctgaactacgcgcgcaccaagccgaaaggcaagctgcgcgtggcggtgaacgtgtcggtgggccgggctgcgctgatccccaacctggccgagttcgaggcacgctatcccgacattcggctggagctgtcgatgagcgaccgcaacatcggcctgatcgaggaaggcatcgactgcgcgatccgcatgggcgagctggaagactccaacctgatcgcgcgcaagctcggccatttcagcaacgtgttgtgcgcgtcaccggaaaaccttgagcgacacggcacgccggtcagcatgacgacctcagc

SEQ ID NO: 169743 - DNA, 1820 bp, Arabidopsis thaliana landsberg; identical to SEQ ID NO: 35868
  unsure (1)..(1820): unsure at all n locations

SEQ ID NO: 169744 - DNA, 2812 bp, Arabidopsis thaliana landsberg
gaagtgcactttcggagtaacgtcaggagaattcttgggatacatagtcaccgaacgaggaattgaagccaacccaaagcagatcgatgcaataatcggactaccgtccccccagaacaaacgagaagtgttacgtgatcgagaagaagcagcgaaagaaggatatagcaattaaaggacgaagagcgagctgcgccgtcggagcgaccagctcgcgaatcaatgaaggcgccaagttgcaggattatccaggtcaacatcgacgagtcggatccatctcggacggtcggtatcggaagcgagctagaaggagagataaaggaagagctgatcgccttcctgaaatcgaggtcgtcatcttttgcttggtctacgaaggatatgacaggaatcgccccggaggtaacctgtcataagctcaatacggatccaaccttcaaaccagttcgccaaaagcgaaggcggctggggtcagaccgcgccaaagccgtccaagacgaggtcgagcggctcctaaaagccggcctgattaaagaagtacaatatccagaatggctggccaacccagtcgtggtcaaaaagaagaatggtaagtggagagtctgcgtggattacaccgacctaaacagggcttgccctaaagacagttatccactgccacacatagatcgcctagtcgaggcaacgtctggaaatcagcttttatctttcatggatgccttctcggggtacaatcaacgaaaaacctatcttctataccagtaaagccctgaatgacgccgagaccagatatccgaccttagaaaagctggcgttggcggtgataacggcagctcggaaatttcgaccttatttccaatcacattccatagtgttcactgatcagccactacgcacagtgctccacagcccaaaccagtctggacgaattgcgaaatgggcaatcgaactgagtgaatacgacgtggaatatcgctttcgcccgagcctcaaatctcaggtcctagctgacttcatgaccgaactgtccccggatgtgattgacgttaccccagacgaaaactggacactttactcggatggctcctcatcattacaaggctccggtctcggaattctacttcagtcaccaaccggagaaatcctcgaacagtcacttcggctccagtttaaagcatcgaataacgaagcagaatacgaagcacttcttgcaggacttcgactcgctaaaggactcagagctagacagatcaaagctttcagcggggaattcgaagtcaagaacgaaaggatgtggggttatctctcactggtccacgaactttccagccagttcgaccagttcgccctggtcaaaattcctcgaaacgataactcagcagcagacgcactagccgcactggccttaagcgccaaccccgatttaaggcgaataatccctgtcgaaagcatagcaagaccgagcatcgagccaccaaattcgacgtacgtgatcgtagaccccgtaacggccatggacatagacgacaacgcaatcaacgcgccgggtatagaagaggatccggaaccatccgattggcgactccccatcaaaatgtacattgccgacggcatagttccaacagatcgataggaagctcgccgactaaaaaccaaagcggcgaactacatgatgctagatggcgaactttacagaccaagtgcgacaaaagctttcctcacttgcgtggatcaaaaagaagccctgacactcatgaaggagacgcatcacggagacggtggtaatcattttggcgggcgagctctctgccttaaaataaaaaaagatggtcattactggcccactatgctggcggattgcgaggtctacgcggcgaagtgcgagccgtgtcagaggcacggcccgatgaagaacgtccctcccgagatactgcgttcggtcacggcgccatatccattcatgcgatgggccatggatatcgtgggaccgatgcctccttccggatccaaaagatttcagttagttctgactgattacttcaccaaatgggtcgacgcgcaggcgtaccacaaggtcaagtcacacgatgttgtcgcattcatctggaagaacattatttgccggcacggtcttccttatgagatcgttacagataatgggaagcagtttgtctcgctcattactagaaacttcctcgccaaatggaacattcgcatgagcaactcgactccaagatacccacaagggaatggtcaagccgaagccacaaacaaaacgatcatagctgggattaagaaaagacttggtcctaaaaaggggaacagggcaaacgagctggatggcgtgctctggtcgtacagaactacgcctcgacgacctatatcattatcccctttctccctggcttacggcatcgaggcaatggctccaaacgaagctggagttccgactttacggagatgcatgttgtcaaacgaccatgaactgagcgatcagcttttgggcgaccacaccgattttgccgaagaacttcgcgatcaagccgccatccggatccagaattaccagaacgcagcggcgaaatactataatcgaaacgtccgagaacgtcgcttcaacgtaggcgacctcgtgcttcgggaagtttatagtaacaccgaagagaagaacgccggaaagctcggagctcgatgggaaggaccttacttgatctccaaggtacttcatccaggagtctatctgctgatgaccatgaagctgaaagaggtggaaaatctgtggaatgcagcccacctcaaaaggtactactac

SEQ ID NO: 169745 - DNA, 721 bp, Arabidopsis thaliana landsberg
  unsure (1)..(721): unsure at all n locations
atgaaaggaacacttccagctttgtttctttgtcttctgggttcggtcctggaagcagcgggggcaaaaccaaactttggagactccatacactgccttagctatcggactactccggagaatccaatcaccgatgccatatccttcgacgataacaccaccaccttcttgtcttcttacgtgtcatacacgaaaaacaaaaggttctcgacccctaattatagaaagctactagccatcgaggccgcataacatgtatctcatgttcaggccacggtggtctgcgcacagaccaatggtatccaactccgtatacgaagcgggggccatgactatgaaggcctttcttacgtgtcgtctgtgccatttgtcattcttgatatgcacaaactgagggatattactgtcgacgtgtcaagcaagaaagcatgggtccaagctggtgcgaccttgggagagctctacgtgaagatcgatgaggcaagccaaacgttagcgttccctgctggcatttcgctacggtaggagctggaggacacataagcggtggagggtatggaaatctgatgagaaaatnnnnnnnnnnnnnnnnnnnnnnnnnnnnnnnnatttagttgatgtcacgggcaagctcttgaatcgatcttccatgggagagatctcctttgggcgattcgccgccgttgttgttccagtttcggagttatactcccctgggaaa

SEQ ID NO: 169746 - DNA, 956 bp, Arabidopsis thaliana landsberg
ctcttcaacttgtcttgttgcaacacaatagtagtacaaggaaatgttactgctgtgatgaagatctcaacaagctattttattattgcttagcttgcgatattgcaataaatcttgcttgtgtggacaaaccaacagtcttatcaatagaaaatccgaagaaccatgagcatacacttactctgtttccaaggtacatttccttaacttgcgactcctgcgccttgactgattcgaactgtccgttctatatatgttccccttgtggctttgcggtccatcaaaattgcatcagcttaccgcgtgtcataaagatgtcacgccatcaccatcgtatctccttgaccccttctttaggccaaggagattggtcttgtggtgtttgtcgcaaaaagatggacaatgattatgggggctattcttgtagaaaggatggttgttggtacgcggcacattcgaaatgtgccacaagaaatgatgtgtgggatggtatagaaattgagggaattccagaagaagtagatgaagagaatgaagaagatgagtcttctgagatgacaagcggttccagtcatcaacatcgtttcagacgttatgaggacactggaagagattacgacgagaataagatgtgccaagcatgcatcatgccgatctatttcgggaacttctactcttgtgtgggatgtgatttcattttccacgaagaatgtttgggttttcctcccgaaataaattacccgttgcatccacatctactcactctagaaataggatataacggtgttttgagtgatgagaataaatgttcagcttgtccttggttgtgcactgctggttttttctacaagtgttctagagaactatgtcgttttaagctacacgtacaaagcgccacaatttctgagtcattagaccatggaagtcatgagcatccttagaactacatcaaacag

SEQ ID NO: 169747 - DNA, 1001 bp, Arabidopsis thaliana landsberg
gtaaaagttgacattacttactgtataatcaaaaaaggattgaactagtagtttctaaagagaggaacaaaacaactgttcaattttcttcagatgaggattaaaatccgttattattttaaatctcggggactacaaaatttgactccgaatctatgatttactaaaaacaaaattagttaagccaacattttaactaacctaatactatcatttgaacacttataggtatgttaactgatttcaaaattatctatatacaccttttgtaatggcatgttttccatcaatgtgtgtgaacattgaaaacataaactgttgaacatctaacccatttaccaaaaacaattcagacaaaatttattttcggtttagtcgttttttttcgttttcttaatttcaaaataatttactgggaaaagaaaaaatcatcattacgctcatgtgaaaaaagatcgttcattgtatgggttttggaagttggaaaagtaagcaagcaatttataccctattggccattatatctaaccgagaaacaacaagctctttaatttataagttggtgtggttgccttacacaaaccccaagctttcactacacacataaccaaaatcatagtttgaaaattctgacatgtcaaagaagcatctcaagccgttggagacatgttttgaagatgaagaagatgatgttatttatcttcctccaggtcttgtgaccggtgcaagttccaagaagaatgaggagttttgtggcggctccggcaaggtacaaccgtctgagatgaagcgtcggagtgaagggacctcaacggacatgacttcgaagagagccaagaaggtttcagcagaagatgagaagaaagttggagaatggacaaaaaacccatattttcaaagactgtggagtgaggaagatgagatagttatgctacaaggaattattaaatttgaagatgttacagggaaaagttctgttgatgatagacacggatttatag

SEQ ID NO: 169748 - DNA, 1636 bp, Arabidopsis thaliana landsberg
ttcccattttggaaaaagaaaccaaaagcgatcaatatcaattcaaacacttaatggtaaaacataaattcattagcatttcatttcctttaatttttacttacatttttgatagttaaatgcctgaactgttttcttttgagagtggctaaatgaaacagttgatctaatgagaagccaagattcgctaatgaactaattggtaaaagcaagcaggagttacaaatccaaataagacaaaaaagattatctagagctcccattgatggagtggaaagctttagccatggcaacaaacaatttttctacggaaaataagcttggacaaggtggtttcggtattgtttacaaggtaaacatgactcataacttgttgaaaatctatcactggcaatggtttcattgaataatcaaatgtgtggtaatagggaatgttacttgatggaaaagaaatcgcggtaaagagactatcgaaaatgtcttcacaagggaccgatgagttcatgaacgaggttagattaattgcaaagctacagcacataaaccttgtccggcttcttggttgttgcatcgataagggcgagaagatgttgatctatgagtacttggagaatctaagccttaattctcatctctttggtaagtgattcaaaacagctaatgttctaataattgagaatctttggaaataagttaacacgttgttggttgttttcaatttgtagacaaaacccgaagctcaaacttaaattggcaaaagagatttgatattatcaatggaattgctagaggacttctatatcttcaccaagattcacggtgtaggattatccatagagacttgaaagcaagtaacgtattgcttgataaaaatatgactccaaagatctcggatttcggtatggcgaggatctttggacgggaggagacagaggctaatacaaggagggtggtcggaacttagtaagcaatcattctccaacaaaacaaacaaagagcttttatctcaagtccaaatattttcttaaaaacctcataacatatgagtttatattttgttattcagcggctacatgtcaccagaatatgcaatggacgggatattctcgatgaagtctgatgttttcagctttggggtcttgcttctagagattataagtggaaaaagaaacaaaggattctacaactcaaaccgtgatcttaatctcctcggttttgtaagctaaaaacctcttcaattcgatattattttgcactcctaatctgatcataacactaaagaaagaaatattacgtcctttatgcacaggtatggaggcgttggaaggaaggaaaagggatagagattgtagattcgatcaatatagattctttatcatcaacgatacggacacatgaaatattaagatgtatacaaattggtctcttgtgtgttcaagaacgggccgaagacagaccagtgatgtcgtccgtaatggtgatgcttggaagcgaaactacggctattcctcagcctaaacgtcctggtttttgcgtggggagaagttctcttgaggttgattcttcgtcaagtacacagcgtgacgatgaatgtacagtgaatcaaatcactctctcggtcattgacgctaggtaa

SEQ ID NO: 169749 - DNA, 1287 bp, Arabidopsis thaliana landsberg
aatggctatgataataattaattggaggtatcggtcgttttggttcataaaaattataaaactgttagatataaaatatgaattttttatgaatcactcacaaggaatttggtaatttaattttccaataaatataacataaaatatgaattattaggaaagattaaatatgaccctgaaagcatgtggaatggctaaatggtaatataataaatgtatgtatgtttggttgggatttgatcttcatttttatgaagtaggttacccttggtgaagcaaacaatggggatggacaagcaattgtttatccggtgcttcagtcaataatcgcggatggctataaggaggagttcgagaggttttggttttggtttatagaatataattggaacggttggaggtatagtgagaaccgccgagcccccggtcatggctggtcatgatttctttggaatatcaggatggcgatgggcctttatattgagtgccacgctgagtacgattgtcgggatcctcgttttcttctttgtcagtgacccgagagaaaagaagactagcagcgtcattgttcatcacgatgatcaacatgaacggtaatataaatctctacattcttggttatatatagcaccaacatgacaataaagcgttttttgcttattggttttgagttagttatgtggttttgtagagatgaaaacaatggtgctacaacgatggagagtccgagctcttcggtttggaaggaatcgtgggtggccataaaagatgtaaccaagttaagaacgtttcagatcatcgtattgcaaggaatcgtgggttcggtgccatggaatgcaatggttttctggacaatgtggttcgaactcattggtattcatccaaaccaaacgtatattttttttatatcaaacatcaaacatgaaccaaccatatattctatctaacatgaatggttcattaaatccttaaccccttaaacatcaaacaaaaccaaatctttgttactagggatacattctaaaaacaaaatataatataatttatgagtacaactttaaattttttgattatttttcaaaatacatttactatatacaacatatatatgctcttaacttagataaataaaccaaaaagatctttgaattctcaaagttcttttttccaggttttgatcataatcaggcggctcttctcaatggaatatttgccaccggacaagcaataggatcattggtcggaggaataattgcggataaaatgtcttgtgtgtttccaaacttc

SEQ ID NO: 169750 - DNA, 788 bp, Arabidopsis thaliana landsberg; identical to SEQ ID NO: 9423

SEQ ID NO: 169751 - DNA, 661 bp, Arabidopsis thaliana landsberg
tttgggggcccaaaaaaaattttgggttttttttgggcccgggggaaaaaggcccgaaaaaaggtgggttatttaggaaagaagaaagaaggtgaaatggtgaaaggattgcttcccattcttgaagttatgcactgaccctgaaacactaaaagcgaggagcaaaggaccggctgagatcattaggcatgtcctctttggctacttcagtcagaaaacagggctcttggttcacattgaggattcacatttgacccggattcaatctaacggtggagagactgttttctgggagaccacatacaactcgtccctagacgattaccgtcaggtcgaaggaatcatgattgctcactcgggacattcagttgtgacactattcagatttggggaagtggcgacgagccatacgaggacaaagatggaagaaagctggacgattgaggaagttgcgtttaacgttcctggtctgtctctcgattgctttataccaccagctgatcttaagaccggttctttaaccgaatcctgcgagtacccacaagaggaaagaggcaagaacaacacactcgcattgtctgcagctcacagggccaaagttgcagccttggagaacgggagcttcgaagatcaccgcccggtttggcatactgatgtctaa

SEQ ID NO: 169752 - DNA, 545 bp, Arabidopsis thaliana landsberg; identical to SEQ ID NO: 77339

SEQ ID NO: 169753 - DNA, 2668 bp, Arabidopsis thaliana landsberg
cttattgtgctaacttttacattatctggtactgattagggttgtgcaaatgtgatgggcatatcctttaatgtatctacaatcccgaatggcgtgcatataagcgcaaaagcttttcaaaatatgcgtaatcttcgatttctaagcatctacgagacaagacgtgatgtaaaccttagagtaaatgtacccgatgacatggatttcccacatcgtctaaggtctttacattgggaggtatacccaggaaagtctcttccttctacatttaggccagaatatcttgtggaactcaacttgcaaaataacaagctagagaagctttgggaaggaacccaggttggtattgtacatgaaaatatatgaagatatatgtactttctcttccagttattaatatgacgatctttttacattacatattcagccgctcaagaatctcaagaagatggatttgtcaatgtccaagaatttgaaggaaatcccggatctttcaaatgctacaaatctggagaatttggatctgatgggttgcgagagtttggtagagattccatcctcttgttcgcatctgcataaactacagaaattgtcgatgagtaaatgcaaaaacctacaagtcatcccagttcaaatgaacttaacatctcttaaatacgtcaatatgagaggatgctcaagattgagaaatattccagttgtgtcaaccaacatcaaaaatctgtttataccacggacagcggttcaaggcgtgcctccatcagttaggttttggtcttgcctcgagcatctctatttgagtagcaaaggagacctcaagggattaaaacatcttcccaagagcgtaatgacactactcataaatgattctgatatagagaggattcctgattgcatcaaagatcttcatcggctaaaatgcctttatatatctggctgtccaaaacttttttcactgccagagctccctggctcactcacagacatatacgcacaagattgtgaatcactagagaccatatttttccctttaaacagatcatataagtgcctccatctcaccaactgcttcaaattagcccaacgaagagaaattatccaacaaactctttctccagaaacggcgctcttacctgctagggaagtgcccgcagagttctttgatcaccgcgcaaaaggaaactccttgaccattcttctcgatagtaacaggtcttaccgtggcgttcgggtttgcgtagtgatttcccctaaccagccactcacagaaaatagtgttcgcaacatattgtggactcacatcaaaggtcaatactactccctttcagctcaccccaagtacgtaggcgaagtctccaaatttcaatcggaacatctttttgtatttcactctgacctgggaggattccacccatctgaagacaacagagagataatattcaaattcagcagcaaatcccgcgacttcgaaattatagaatgcggtgccaagatcttacccgaagagagtatcaaaggtagctgtgaatctgaatcagaagcttttgaagagagcatcaaaggtagctgtgaatctagattagacgaactatttgtagacggtgaccgtacagattgttggagttggctcttcctctgccttgatctctccaagattgtgaaaaacgtccgaaactgtgtcttgggaagaagacggtagaatccagaagctgatgatgtgtccattctccaattcatgcgtgataaaagaagcatcatgcaggattctgtagcaaggcactcagaaagtagggttacataccagagacgaataaggaatcacggtacatctaatttacctgtaacattgaattttcctcgtgcttgcagattctttcagactagaatagcttggagctctccaagtacttcttcaaagatctgtataataattatgtatatagagatattcttaagcccagtgtttcacattagctgtttcacaatctagaacaactacaatcgagtcagcaaaatctggttcagaagcatccgatacgttttccatttcgagacaaaattgaagatatcatctaacagccaatgaacttcactgataaaccataaaccactgaattgtgtataaacataattatcaaaattgagtagcaaattatatccatcttatggtgtcgtcgtctatatactgtagttcaatcagaacatatccgtatgttgtaattcagtcttgtttggtcgtgtgagcagcgagatactgttttggattatcgcttcgataattgcgaggaaaaccggaaaacttggtttggggaagatgatgatgacgtggtcatcggcttcatccaatgcgttgggtccttctaggtctaattaagttgggcctatagggaaaaaatgaaatccatctcttttattttctgggtggctaaatttaagggcttaggatgggcctatagacaaacatagtataatcaatctttttatatatatttttgtcgctaatacaattttacaatactcagcgactcagggtccacaacattttcgtcttgttgaagcagtctgtaattttgttcttcttaagaggttatacacaagaaggtttgtagaaaaggttacagtgcacatcagcacataaagctgcaaatatggatatcgtttgtattat

SEQ ID NO: 169754 - DNA, 1041 bp, Arabidopsis thaliana landsberg
gattactcaacggctgacgcgatgttgcgattcttcaagcagcatggggttgctgtacgtggccacaatgttttatgggatgatcctaagtatcaacctggatgggtgaattctctgtctggtaacgacctctacaacgctgtaaaacgaagggttttctcggtggtctcgcgatataaaggccagcttgcgggttgggatgttgtgaatgagaatctccatttctccttctttgagaacaagatgggtactaaagcttcttatgacatctacgagataacgcatgccatcgatccaagggcaacactgtttataaatgaattaaatacattagaggaacctagggatccagtttctactccagcaaggtatttacaaatgcttagggagcttcaatctattcggatttccggatatattcggttagcgattggtcttgagtctcatttcaagactcctaacattccgtacatgagatcagctcttgatattcttgctgccaccggtttgcctatttggctaactgagattgacgttgaagctcctcccagtgtccaggtaattcatatcctcttatacaagtagggcaaaagtcacaattttcgaattcccgtttatccaaccctattgatttggagttttgagcatttgtaacttgtctaatgtttgagtttcttgtaggccaagtacttcgagcaagttctaagggaaggccatgcgcatccgcaggtgaaaggaatggttgtgtggggaggttattcaccatcaggttgctaccgaatgtgcctcaccgatggaaacttcagaaacctacccactggagatgttgtggacatgctgctacgtgaatggggaggacttcgcagccaaacaacaggtgtaactgatgctaatgggttctatgaagcttcactttttcatggtgactatgatctcaatatttctcatcctctcactaattcaagcgtttctcaatgccttaagttgatttctgatgactcctcctcacagacccaaccatctctttttgtctttcgtgtt

SEQ ID NO: 169755 - DNA, 824 bp, Arabidopsis thaliana landsberg; identical to SEQ ID NO: 54604

SEQ ID NO: 169756 - DNA, 841 bp, Arabidopsis thaliana landsberg
gtggaccaattaatccaacatctgaaagtggaaaaaggtacatcatcattttcatagatgatttcagtagaaaatgttggagttatttcttgaaagagaattcagaggcttttagagtgtttaaggaatttaaagctagtgcagaaagggaattgggtcagttgttggtttgtttacgctgtgataggggaggggaatacaattctaaggagtttgatgattattgcagagagtatggcatcaaatgacagctcacagccgcatatacacctcagcaaaacggaattgtagagagaaaaaacagacccgtgatgaacatgacaaggtgcatgatgctggagatgggagtaccaaggcgtttctagccagaagcagttcaatatgcggtttacatattgaacaggagtccatcaaaggctttagatgacatcacaccggaggaaaaatggagcaaacaaaaaccttcagtaagtcatcttagagtttttggaagtattgcctatgctcttgtgccatatgaaagaagaatcaagcttgatgaaaagagcaataagagtgtgttgtttggagtcaccaaagagtcaaaggcatatcgtctctataaccctgcaacaaaaaagatagtgattagcagagatgttcattttgatgaaaacaaaagttgggactgggaaggaaagcaagaagagaaagagctttcatgggacgattcagagagtgaacaaatagaagaggagaatgttgttgcagagggagaaactcatgctggagaagaagaaaatcgagtagaagaggaagctcaactaatccctgcagcgacagttcctgtagagaaggctcc

SEQ ID NO: 169757 - DNA, 1126 bp, Arabidopsis thaliana landsberg
gggtatcaaatcactttcggaagcaaataaggttagttgtttaaaactgatctagagactcatatctcggcagccttctttgtgggtaattgggtttggacttatatcattcggaaaggttccttctggtctacaaacgatcgctctagcttggggtcttggatgtggaagaagctacttaagtatagagaagtggctaaaacaatgtgtaaggttgagacaagaagtggtagttcaacatcgttctggtatgacaattggtcacagctcgggcagcttgtggatattacaaatgctcgcagaacaataaacatggggattccgttagaagctacggtggaaactgtattggcttctcacaggactaggcgacatcgtacagccatttacaacaagatagaggcagagattcagtatactcgtcaaaacaggaggttaggtgacgacatatcactgtggcgttcttcaggtgacaatttcagacatagcttctcaacaaaagcaacttggcacaacatccgggttcttcacacacgcagactttggtataagggtgtttggttctcctacaacacacccaaatactctttcctgctgtggcttgcgatccatgatagattatctacgggtgatcggatctaaaagtggaattccggacaacaaatcaactgtcttctttgtggcaattttgaagaatcaagaaaccacttattcttctcctgccattataccactgcaatttgggacaatctcactaggcgtctcctatcacacgaatattcaactgattgagatcgtctacttgctctcctctgcagctcaactctaccaagtgaacctctcttcctgtttcgctacgtcttccaagcatctctttatcacatctggcgggaaagaaatgcaagacgtcacggagaagcgcagtccccctcaactagactcatccagctcatcgacaaaaccgtgcgaaacagaatcagctcaatcaacgacgttggcgaccatagctacgacaattgtctacgactatggttctcaacgcgtccttcaccatcattctcttctaactgcttcattttttcagaaattatctgcactcttcttttttctcagtctaaatcattag

SEQ ID NO: 169758 - DNA, 532 bp, Arabidopsis thaliana landsberg; identical to SEQ ID NO: 80034

SEQ ID NO: 169759 - DNA, 2247 bp, Arabidopsis thaliana landsberg
  unsure (1)..(2247): unsure at all n locations
atgcacctaggagtgagcgatgctcccgacatagattgcgagatcgaagaaaacaggtgcaccccattcacggataggatcgctcgttttctcatccgagacgtcgagagcctctgtttcccggaatacgacggaacgagcgacccaaagactcacctgagattcttccgtacctgacagacgaagaaaatgaagcaggtcattgccgtttcttcgcagaaaacctcgaggtcacgccctcgaattgtttgctagcctagaagggaactttattgataccttcgaccagctcgccgccgctttcttaaaacagtattcggtacttatcgaacacaggacgtctgaagccgacctctgaagtcttactcaacttcagaacgaatccctgcgatcttacgtcgaaacattcaaagcagtctaataaaaaattgcaaacctaaacgaagaggtagccatagcagcccttcgtaacagtctgtggttctcctctaggttccgtgaggaactcactgtcaggaaaccggtctctttagacgatgtccttcacaaagctctccacttcgccaaagccgaagaggagctcgctgtgctggccttacgattcaaagaatctaaaacgcaaaacgctccccttgcaattaaaaaacccttcaaaaaggaaaaccaaacgcaagggcagcataccttattcgcaatagaagaggcagctgaggacgagaggccagaacttgacctcggaaaatattgcaagtaccacaacaaaagaggacattccaccgaggtaaccttacacgaactcaacgtcgatccgacctaccgacctataaagcagaaacgtcgcaagctaggtcccgaaagggctaaagctgtgcacgatgagatcgatcgtttgttcaagatcggatcgataagagaagtaaaataccctgactggctcgccaacccggtcctcgttaaaaacaaaaccgggaagtggagagtatgcatcgactttatggacctgaataaggcatgtcctaaagacagtttcccactaccacatattgaccgactggtcaaagccaccgcgggacacgaactattgtccttcatggatgcattctccgggtacaaccaaatacttatgcgtncagatgaccaagaaaaaacagcttttattactgaccgaggcacctactgttataaagtaatgccctttggtttaaaaaacgctggagctacttaccaaagattggtgaacagaatgttcgctaaccagctaggtaaaacgatagagctctatatcgacgacatgctggtcaagtcagctcgcgaaaaagaccacctcccgcaattaagagaatgcttcaaaatcctaaacaaattcgagatgaagctaaacacagagaaatgctctttcggagttccctcaggagaattcctcggatacctagtaacccagagaggcatcgaggccaatcctaagcagattgcagccttcatcgacatgccatcgctaaaaacggcacgggaggtccaacgactgaccgaccgtatcgccgtcctcaacaggttcatatccaggtctaccgataaatgcgtccttttctatcagctcctccgaaaggataaaaagttcgattggaatgaggacagcgaacaagccttcaaacaattgaaagcatacctgtccgaaccacccatactcgcaaaacccaaagaaggagaaccgttgtacctgtacacgacagtctcccgaacctcgataagcagtgtcctggtgagagaaaatcacgaaggacaaaaaccgatctattacgtgagtaaaacgttgatagacgctgaaacccattatccagcaatggaaaaactggcactggccgtagtcatgtcagctcgaaaactgagaccatatttccaatcacaccccatagtgtaatgacgtaccaaccaatccgaaccattctgcatagtccggcccaatcaggatgacttgcgaaatgggccatagagttaagcgagtacgatatagaatatcgcaccaaaaccagctagaatcggaatacaactttgtaattgagctccagttagcggaactggatggaaccaactataataagaaatggctcctccatgtcgacggctcctccattcgacaaggatccagagtcggaatacaactcacctcccccatcggggaagtcatggaacaatcgttccgacttggatcaacgcaccaaataacgagtttgagtacgaagccctcat

SEQ ID NO: 169760 - DNA, 570 bp, Arabidopsis thaliana landsberg
tagttgttgaatcactgtgtcgtgcttagttttttatggacttatttgtggtttgtacttccagtgttccaacattttccttacaaaagatcaagatgttcgccttggtatgtttttgatttatgttccactcaatgtgacctgcaatagaatgcaaggggatttttaaataatgtttacatttgtgttgtatacaggggactttggtcttgccaaaactttgaaggcggatgacctaacttcctcggtatgttgtaaaagtctctgcagtttgtgcatgtaaaagatgctgtaggagaacaaattagtcctggtagtggtagattgcggctttataagcacattagcaaatgagcagatttgacatgggttatgcaaacaaactttgatgcatgaagatatctattgcctcgttttcaacaaatgaattttaggaattctacatcgaaaagagataatatcttactatgatttataacagtcataggttactcctctcattgccatttggttaggagatggaacacaacctccataatgattattattcttaggattgctctcaagctt

SEQ ID NO: 169761 - DNA, 467 bp, Arabidopsis thaliana landsberg; identical to SEQ ID NO: 41275

SEQ ID NO: 169762 - DNA, 2028 bp, Arabidopsis thaliana landsberg
ttgagtattaaccaaaaaagcttaacctttagttaatacaattggaaattgttagataagtttaggaacctttcatggtcatgatataattttcgtcattcgtgtgaattaaccaaaagcttgaccctttagtagttagataagtttaggaacttttcatgggaatctaggaaggtcatgttgatcttatttttctcatttgtattgtagtcctgagagtgaaatactcaacgaaatcgttaaggaggttaagaaagtgttgaagaaagtttcattggagggaagccaaaaggtggtctctgtggatccatcagaaagtattaacactctaagttcggtaggaggcgaaaaggataagacttttggaatcaaacaacggttgaaggagttggaagagaagttggatcttgttaaatacaagggaactcgtgtcgttggagttgttggcatgcctggaattggtaaaaccacactggtgaaagagctctataagatatggcagggcaagttttcgaggtatgctttgatcgatcaaatccgtgggaagtcaaataacttcaggttagagtgcttgcctactttgcttttagagaagctactaccggagttgaatagtcctcatctagatagtattgaagaaccatacaaaactcataagggtctactgcgtgaacgcaaagttcttgtcgtccttgataatgttaccggaagggaacccatatatgctcttcttggaaaatatgatcttaacagtaaacatgagtggatcaaacatggcagcaggattatcattgcagcgagcgatatctccttattaaagggtctggttcatgacgcttatgtggttcggcaattaaacggcagagacggcttgcaactttttgtgctatcacgcctttcattatgatcaaaccattcctccaaaggtggatttcatgaagctttctgatgagtttgtgcattatgccagagaccatccactagctctctaaatattgggtagagagcttaatgagaaaaatatgaagcattgggaaacaaaactgaaaatacttgctcaaagtcccaccacttatattggagaagtcgtgcaagtaagttatgatgaattgagtttggcgcagaaagatgcatttctcgacatagcctgtttcagatcacaggatgtggattatgtagaaagtttactggtttcgtctgaccctggatctgctgaagcaataaaagctctcaagaataagttcctgattgatacatgtgacggccgtgtggagatgcatgatctactgtatagattttctagggaacttgatcttaaagcatccactcaaggtgatatcaaacaacggaggttatggctctatcaagacataattaatgtacagcagaaaacaatggtgaaagtagaagttcctctatatttttattgatcaaagcttacattgtttttctcttcgctaatattgttctgttattgttgttatatattattaacagggagctgccgatgtaagaggtatttttctagatttgtctgaagtgaaggttgaaacaagcttagaccgtgaactcttcaagaatatgcgcaatctccggtatctcaagttatacaattcacattgtcctcaagaatgtaaaaccaataataagataaacatgcctgatggacttgagctaccattgaaagaggttcgatgccttcactggctgaaattcccattggaggaacttccaaacgattttgacccgattaatctcgtcgaccttaagctgccatacagtgagattgaacgactttgggatggtgttaaggtgtgtctctgtataaaatgttttgttgcatttttgcgttaaatgaacctgtgtagcttttctaactagttgttaaaatttttactgctcaggatacaccagtcttaaaatgggtcgatctcaatcactcaagtaaggtgtgcagcttgtcaggattatcaaaggctcaaaatcttcaaagactgaaccttgaaaggggcacaagtcttgaatctc

SEQ ID NO: 169763 - DNA, 2463 bp, Arabidopsis thaliana landsberg
aatatttttcttaattttctttttggtccgacgcttagatccatcattaatacgcgttggagatagctcggtcggatcaaaattattaggcggtcaagggtagaattttaatctctcgacattaaggccaaggtgagtaccgtagcgtgtgtagtagcacccgactaggttttatttttggggttatgatagttaggcatgaggttgcatttttatactttgtataatttatgcatttattgttcataatcggatctacgtttttacgtaagatcggcttggttgtttgattagatcttgcattcatgcttcatttattttgggatgaagtattttgtgtgcttaggctaggcattagtttagccattatgttgcttgattgtttgattgtggtaggatttattatcgtatttctttgctgtaattgttgtttgattgttcgtaatttttattacgaattaaattgttagcaagcctgctaggttgtttgattgctgattgattgattgttgttggttaatcttgtttcggcttgattaacctttgtgtgttagttgcgtgctagtaggtattattacgagtagtattaggttacattaggctcgtaataagtaatctggttagtcatttttgtgactaaggtgtgacgatgtcgtgattgtccaaatggctcggaatggttcgttaccacccaggactacccgacggggtagtaaacgttttaccgtaagggcgttggtccctcttacacggtttggagtggggaagggatgtgatcgttttagactttgtgtctagcggtcggagacattgccttgtgggaaatcagcatcgtatagtatagggcccgtaggatgaagagtcgttagcatgctagttttagatttagtggtttccgttgcatatactctgtaaagagtattcattgcttgtttgtttgtgttgtgtgatttcttgtcgagtatactcaatcgagtatactcgtattgattgtttgattggggattgggattgggattattttgttatttgttagaaacccggactcactcagtaatcttagattactcaagattctagtttttgtcttacaggtaaccttagttggggagaccttaaggggagcacggacgttggggaaccggtgtagagtttgttgtctttgtaaaattagatttgtaaactgactcgatttgagcattaggctcgggatcccaatccattgtaagtgttttcatgttttattgaataaaagagattttctttaaaaatccttgtgtacttctgatattagtcttgtccggactaacacaacttacggacatggtacgggttgaaaagccttaggccgtgttcgtgaggaacgatgttcaaggatggcctgaccttagtaccagatgtgttcggggaactcggtcggatcgtctacgggcatcacaagtaacgcttccggattcgttcttagtcctagaatggttcgggggtgttacaagagtggtcgtagggaattggaatgacgaaggccctcctgagcatgaggggaatgagattttttttatcgtaagcgttcagtccgttgttgtctacaaaatctcgcctcctgatttattgtaagccctattgccgccatttccgattcttcagtttctcctcaagcaagtccgattctgatctctacccatttcaattcacccgaaaacacttccgggtcttcaaaaatttctgtttttgagcagaagattagcggcgagagtttggttaaggaagttagggaaattgctaatttaacttcgattaaagtgattgaacttccgagcaacaatggtgaagataagaagacagagaagagaatcgaagaatgtgatgttacgaaagggaagtgggtttacgatagtgattatccattgtacacaaatgcgtcttgtccttttatcgatgaaggatttggttgtcaaagcaatggaagattggatcttaattacatgaattggagatgggagcctcaggattgtcatgctcccaggtttaatttcttctttctaattttgttgttttcctcgtaggcctttaagaagatctctctattgaagtagtagtggttggtgatagtgactgatgatgataagtgggattcatagttccactgagcacttaatctctctgaataagtaggaatgcaattcatggtcctgaattggaaattgtggtatgtgtgagtttaggttcaatgctacaaagatgctggaaatgattagaggcaagaggctagtgttcgttggagattccctaaaccggaaccaatgggaatcaatggtttgtttggttcaatcagtggttcctcccggtcgaaaaagcttgaacaaaaccggttctctctccgtcttccgagtcgaggtaattgaaaccgactagttatttcttatagtaatgataatgtgtttagtggaattgctgattttcgag

SEQ ID NO: 169764 - DNA, 2459 bp, Arabidopsis thaliana landsberg
atgcttgtaaaagatagcaacaggaccgttcgcggtcgaacatgctatggtgtttctacacgaacgattctttctggtcacaagttaagctcattagtttactagatctgttttgatcccccgactgcgatattgtgctaattgttgataagcgtgaagttagcttgagaaataagccatccaaatcctaagagatttaggataatattgtatttaggagatatctaaatacaatatttagtagttatctaaatacaatatttagtagttatctaatgttattaggagttatttaatgactagaagcgttcatataattagagataccaagttgtggtaatcctattgagaagtttagagtttgagagattgagagctttggtgagagctttaggttttgagtaagtttccgaaagattaataaagagtgagtctttatatacaccattctcttgttctataatttgatatttggtatcagagcaatattgaattctcaacaaaactctaaaacaataacaaagtcgtgttttgtttcagagaatcaaactatgggagatatagttccggtaactacatgcagcaagttaaaagaaacgagctcagtttccatccaatgtcctttactcaacgctacaaactataacatatggactatgcggatgaggttgttgctcaaggtacacaaagtttgggatactgttgaaccgggatcagaagacgtggacaagaacgacatcgcaagagccctcatcttccaatcagtacccgagtctttaactcttcaaattggagaacttgagactgcgaaggaagtttgggaatctataaagacgaaacacgttggagtagaaagagttaaggaggcaagacttcagactctcatggcagaatttgagaaagctaagatgaaagagacagatacaatagaagactttgcagggagactttcagagataaccaccaaatctgcagctttaggagagaagattgaggcaccaaagttagtcaagaagttcttaaacagtctaccaaggaaacgcttcatacacatcatagcctcacttgaacaggtccttgaccttaacaagacaagctttgaagacatagtggggaggatgaaagtctatgaagaaagaatttgtgatgaagaggaagatcaagctaatgaaggggagctcatgtatgcaaaccatgactcacaatcttatcaaggcaacggaagaggaagaggacaaagaggaagaagtcgtggtcgcggtcggtttggatatcaaggctatagacaagagcgggatacatctaaagttacttgttaccgatgcgacaagcttggacattacgcatctcaatgagagaaacgtgaaaccaagcgagtttgagacagattcgggtgaaaacaatgtgtggtacttagataatggagctagcaaccacatgtcaggaaatcgagcgttcttcaccaaaattgatgaatctgttacaagaaaagttcgctttggagatgactcactaatataaagggaaaaggatccgttttgtttataagcaagaacaagaagaagaagattcttgtcgatgtgtacttcatacctgatcttaaaagcaacataataagccttggtcaagccacataatcagggtgtgatgtccgaatgagagatgacttacttactatccatgataaagatggaaagctgctagtcaaagcaacacggtctaagaatcgtttgtataaggtactcatggagattgagtcttccaaatggctacaaacgatggtcctcaataattcatctaagtggcattcacgtctaggtcagattggacatgaaaccttgaagacaatgttgaaaaaggatcttgttaccggaatacctcatatggtaattgaaagagaaacccgcgcttcatgcttaattgggaaacaagctgatgagaagtttccctcaagctacatcataccgtgctacacataatttggagttaatacacggagatctctgcggccccatcacaccttctacaagtgctcggaacagataaatttttatgttgattaacaatcactctcgctatatgtgttctattctcttgaaagaaaaaagtgaagcattcgagaaattcaagaggtttaaggcaagagttgaacaagagagcagaacaaccatcaaaacgtttagaacagatagaggtggagaatttgtctctcatgagttcaacacattttgtgaagaaaatggcataacaagacatctcacggcaccatactctccacaacaaaatggagtggtagagcgaaggaatagaacgttaatggagatgacaaggagtgttctgaagcttatgaagatgtcaaactatctatggggagaagctgttcgtcatgccacttatctcataaacagagtggtgacaagggttctaacaaatcaaactccgtataagcatcaaaggga

SEQ ID NO: 169765 - DNA, 1000 bp, Arabidopsis thaliana landsberg
tttctggaaccattccctcttccctcttcatgctcccttcgttggttgaacttggcctgcgaagtttccacttcagcggccctcttgagattgggaatatctcttcacaatctaaacttcaactattacaccttggaagaaataatttcaatgggccaatcccttcttcactcggaagtctttcttatctcactcatcttgatctttcggataatgagttcactagtgaaccaccagattcgatgggcaacctaaaccgactgacagattcgctcacctggatcgaccttagggataacaagttcagaggtatcctcccatctagcatgagtagcctctccaaactggagtatatttttattggtggaaattcattttctggaaccattccctcttctctcttcatgctcccttcgttggttttacttgacctgggaggaaaccacttcaccggccctcttgagattgggaatatctcttcacaatctaatcttcaacatttaaacattggaagaaacaatttcaatccaggcattgttgatttgagtatattctcacctctcttgtcacttggtcatttggatctttccgggattaatttgaagatcagttcaaccgtcagtcttccctcatccatatacacctttattttatcgtcctgcaatatttccgagtttcccaaatttctacgaaaccaaaccatgttatcctatttagacatctctgccaatcaaattgaaggccaagtaccagagtggttatggagtctgccagagttgcggtatgtaaacatttctcataattctttcaatggttttgaaggaccagcagatgttattcaagaacgtggagaactacatatgcttgacataagttcaaacacattccaggatccattccctttgttaccagtagactctatgattttcttgttcagctccaataatcgattttcgggagagattcctagaacaatatgcgaattggatagtcgtgtatg

SEQ ID NO: 169766 - DNA, 798 bp, Arabidopsis thaliana landsberg; identical to SEQ ID NO: 26466

SEQ ID NO: 169767 - DNA, 393 bp, Arabidopsis thaliana landsberg
atgggccaaaaacatggcgttgacacaagagggaaaggcgcacaattttgtggttgttgggagattctcactgaatttatcaatggttcttcggcatctttcgatgacttgccagacgattgcttagctatcataagctctttcacaagtactccacgggacgcgttccttgctgctttggtttcgaaaagctttggcttgcagttcaattccgatagcgtatgggagaagtttctaccaccgccggattatgtatctctgcttacaaaatcgcgagttttctcttcaaagaaggaactctatttcgctctttgcgatccgtttccaaaccacaatggcaaaatggtatattatatatatccttatacagcaattggacattatgtatggatt

SEQ ID NO: 169768 - DNA, 2015 bp, Arabidopsis thaliana landsberg
atgaagactaaaacttaccggtttgtatgtcttgtagcttctgtcttaactctgcagctcatgaatggctcatcagcagcaacaccaccgccacctccaaacagtaagaattcttcaacttcgtgtaacagaacctgtggaggaatctcgattccgttcccatttggaatcggtgggaaggattgttatctcaacggttggtacgaggttgtctgcaacgccaccacttccgggtcgtccggcacaactgttccattcctgtcgagaatcaacagggaagtggtgaacatctctcttccagaaggtaataatgaacaatacggagtggttcacatcaaaggtcctgtgacttcgttaggttgttcaagtaatactagtcaagtaccccaaaagtcgctaccggatttaaacgtcacgggcaagggcagcccatatttcatcaccgacgagaaccgcctcgtggctgtgggttgcggtactaaggcgttgatgacggatatagaatcagagatcttgggttgtgaatctagctgcaaagatagcaagagtagtcaagaagtaacaaacttgttatgtgacggttacaaatgttgccaggcgaggataccggtggaacgtccacaagcagtaggtgtcaatatagagagctcaggaggagatggatgcaaggttgccttcttgtctagcaaaaggtatgcgccgatgaatgttactataccagaacaattccatgctggtggctacgtggtggtagagctaggttggtactttgatacatcggattcacgctataggaaccccttaggttgtagaaacatgacgcggtacagttcttacagctcctttgataaatgtagttgtgagtatgattacttttctgggatgagttataggatttgctattgcaactatggctacacagggaacccataccttcgacatggctgcataggtaagtgattgttttcttcttctttcgttgctgcttttcattgttcaaaccatcaatgaataactatggttcaaaaatgtgtagacatagacgaatgtgaaggacaccacaattgtggagaagggacttgtgtgaacatgcctggaacacatagctgcgagcccaagataacgaaaccggaaaaagcctctgtgcttcaaggtgagttaaagtagcatcttgcatttacgagactctaagacagagaacataaaagaagtttaccttcgtttgtgtaggtgttcttataagtctaggagtgctgcttttcgtccttggaatcttggggttgtacaaattcattaagaagcgaacgaggatcatccgcaacaaaaactttttcaaacgtaatggtggcttgctgttgaaacaacaactaattacaaagaacggaaatgttgagatgtcaaggatatttagctcaaaagagttgaagaaagctactgataacttcagcatgaacagggtgcttgggcaagggggtcaaggaactgtgtacaagggaatgttggcggaagggagaatcgttgcggttaaaagatcgaaagttgtgggtgaaggcaagatggaagagttcatcaatgaagtcgtacttctctcacaaattaaccataggaacattgtgaaactcttgggatgttgtctagagactgaagttcctgtcttggtttacgaatatattcctaatggagatctgttcaagcgtcttcatgaaaaatctgaatccaatgattacacgatgacttgggaagtacgtcttcgtatagctatagagatagcgggagctctttcatacatgcactcagctgcatcgattccaatataccacagagatatcaagactaccaatatactattagatgaaaaatatagagccaaagtatctgatttcggaacttcaagatccataaccattgctcaaactcatctaacaacgttagttgcaggcacttttgggtatatggatccggattactttttatcaagccaatatactgacgagagcgatgtttacagtttcggg

SEQ ID NO: 169769 - DNA, 2004 bp, Arabidopsis thaliana landsberg
ggtccatgaaagacttctcagtcttaaggataaagcttctatgtaagcaagcagcatcctcctcggtgttccctgcctctgccatacaatgtcaagcgacgcaacagctccaacaacgaccgcaacaataacaccggcaaacgatacaccgacaacagcaacaatggcaacaccaactctcaatggcagtcctcctacaatcaaaccagattcgacggcaaagtctctaaaccatatttgggaaaatgtcaaatatgtcaaacacaaggacatagcgctcgccgttgcccacagtttcagtccctccaagccgcaccaaatcaccagccgagttctccttttcgaccatggcagccccgtgcaaacctagcggttaactcgtcgtactctgccgcaccgtggcttttggattctggtgctactcaccatctcactgctgatctcaacaatatggcactccatcagccatataatggtggtgatgatgttctcattgccgacgggtcttcaatgcctatcactcacaccggttccactctccttcccaatcaaactcgtgctttacttttagataaaattttatgtggttcctgatatacacaaaaatcttatctcggtgtatcgattatgtaatactaatcgggtttcggtcgaatttttccctgcctcatttcaggtgaaggatctcagtacgggggtcccattgctccaaggcaagactaataacgagttgtatgagtggccggtgacatctcctcaagcagctgcaatggtctcatgttccggtccgaaagctactctcatgtcttggcattcaagattgggacacccatcctcttctgttttacattctattatttcaaaacattctttaccattttcttcttcccagcaaaagcatttgtcttgctctgaatgtttcattaataaaagccataagcttcctttctctcaaacaaccatcatatcaaatcgccctcttgaatacatttttacagatgtatggacatctcctatatactctgttgaaaaccacaaatactaccttgtcttaattgatcacttcacccgctacacttggttatatccccttaaacgcaagtcggatgtccgcgatctattcccagcctacaaagcccttgttgaaaaccgtcttcaatgcaagattggaactttgttttccgataacggaggggaatttgttgcgcttcggagttttcttgctacacatgggattactcatctcacgtctccaccgcatacaccggagcataatggtcttgctgaacgcaaacatcgacacattgtcgaaaccggacttgcacttatgtcaacggcctccgttccgaaggaatattggtcctatgccttctctacagctgtgtatctcattaaccgcatgatcactccggtgctctccatggaatcaccgtttcagaaactctttgggatctcaccgaactatgagaagcttcgaatctttggttgcgcttgttttccttggttgcgaccatatacacgtcacaaacttgacgaccgctctcaactgtgtgtgttccttgggtactctacttcacaaagcgcatacttctgtcttcatcttcccactaaacgtatgtatgtgtcacgccatgttcaatttgatgaatcgagtttcccgtttgatactcaacaagccaagtcaatatgtgcggagaatgtgaatccggtgaccaactccacctcaccgatcacactaccaccaccgccgtcatttacgccgccggtacagccaccatcgacaccaacaaccaccgttgtaccacctgaaacaccaatccatcaaccggctatgttagattcacgtgtaaacgatgataatggcttaagtggatcacaacatcaaatgggctcaattacactaggcccaatacgtgaacaacaagcccaacaacaagtctcttcacgttcaagcccatcacgtgatgaacgtaactcctcttcttcatctccatggcagacaac

SEQ ID NO: 169770 - DNA, 582 bp, Arabidopsis thaliana landsberg
ctgtctaccgtagaacacaaagggtctattatgtttctttccgtgatgcgaaattgcactctaagtgtttgattaaatgcgtgaaggagaacactgaatgtgataacaccattgcagggctatcttatgacactaatgaacctgttttgaagaatgagtttgaaaagtatggtgagattatagaaggtaggattcgccaagaaagctattagtcttctacgaaattcctccatgcttaaaaccaatgcacttcctgatttgtattcgttggatgtgaaagttcagtgaaagtaatatgcgatcacaagagtgggaaatcaaaaggttatggttttgtgttatttgattcagaagaagctgctgcaagtgccttagcttccatggacaatcagtgttgtacacaaaaccaatccaaaaaaatacattttatcgaaaaaaaagacatgttcatacaataatcttgctgtcctgggcgcggttctgagaagaaagaaacatcagagtcgaatatgcacaacgtaaaagaagtttatgccagtgtccgcaatgattcttcagattcttgcattcgcaaggtaccag

SEQ ID NO: 169771 - DNA, 420 bp, Arabidopsis thaliana landsberg
tccttatacaaacatatccactctcaacaccaccgtcttatcgtcccttatgcatatggagctttatacaaccatccagtggaaggtcttctcttggatacaattggaggcgccttatctttcctagtctctggtatgtctccaagaacttccatcttcttcttctctttcgccacgatcaaaaccgtggacgaccattgcggtctctggctacctggaaacttattccatatggtcttcaagaacaactcggcttaccacgatatccatcatcagctctatggaaccaaatacaatttctctcagcctttctttgtcatgtgggatcggattcttggaacttacatgccttactcgcttgagaaaagagaagatggaggattcgaagctcgcccgactaaagaattcaaagacgattaa

SEQ ID NO: 169772 - DNA, 1201 bp, Arabidopsis thaliana landsberg
taagattaatttcaaaaaaggtaaatcatgttaaggtaagaaacgtaaaaataaataaatatttataatcacatttaaacgttttttaaagtgatttttctaaaaaaatatctttaaaagcagatagaatagtatttttaaattattcaagagtataatttgatatagttagataagaataaaccttattgaaatatgttctccataataataaaatattagtcaatcaattcaaataatctaagtaaaaaatagtcaccggcacgtttgttacgttgccgacgacacacatggctatgatgagttgatgaaatcttaaaactaaccacacaaattattcagactttatagacttttttacgtgcgtagtagttcggatcataattgcacgtttttcactataggacaaactttatattacatgtagtgaatagatgacaagacgcattattgaattactactaccatttttcttatagaaatattgtgactttattttttctcagctgttacatcgccgaacttcgttgccgtgaacatgactttccgaaataccgctggaccagagaagcaccaggccgtagctatgaggagcagtgcagatctttcaatcttctatagttgcagtttcgaagcttatcaagacactttatacacacattcactaagacagttctatagagaatgtgacatttatggaacagtcgatttcatattcggcaatgcagctgttgtgttccaagactgtaatctctatccaagacaaccgatgcagaaccagttcaacgctattacagctcaaggtcgtactgatccgaatcaaaacacgggaatttcgattcacaattgtacgattaaaccggcagatgatttggtttcgagtaactatacggttaaaacgtatttgggacgaccatggaaggagtattcacgtacggtttttatgcaatcgtacatagacgaggttgttgaaccggttggttggagagaatggaacggagatttcgcattgagtacgttgtactatgctgagtataacaataccggttccggttcaagtactacagatcgagtggtttggcccggttatcatgtgattaattctacggatgcgaataatttcacagtcgagaatttcttgttaggagatggttggatggttcagagtggtgtaccttatattagtggtttactttcgtaa

SEQ ID NO: 169773 - DNA, 548 bp, Arabidopsis thaliana landsberg
aacgtcatgacacatctaaaagacggtcagggacttagtacaggtttattaatcatcatgtccgttactaccggtgtagttgttgccaataactactacaaccagcctttactgggactaatggcaaaagactttggcatatccgagttacaaatcagcagtattcccatgcttacccagataggttatgcttttggattgttttttattgtaccactgggagataaattaagacgcaaaaaattaattctggttgacttcgcttttattattgccgccttaattggcatggcgctatcaaaatcaccctttttgctaaaggtattcagctttataatcggatttacggccgtcattgcccagttattaatccccatggctgcgcagctggctactgataacaaaaggggaagagccatcggtacggttatgtccggtctgttaatggggattttggcctctagaacacttagtggctatatcggagcgcaatttggtagacaggccatctattatgtggcagccgttttaataagtgtattattcgt

SEQ ID NO: 169774 - DNA, 3327 bp, Arabidopsis thaliana landsberg
actcagaggacgacgacctaattgatttcgtggaattggagtttgacgatcttccaagatcggtgtttcaagagttggccgacgtgagtacatgttctaggacagaccaccttgtggagtcacccaccggccaacttttcctagtcaagtggtatactatctaattaaagctatatatagcttttgtcttcataacatatataccaaaatctctaatcctttgcttgagtatcatattggcgcgctttatcatgtctttgcaggtatggagaggatttagaggacattgacaacaccacactgtataatgtaacaagaaagttcatggtgtttaaagagggagagaaaccgagttgtgtctacactaagaagatgatctatacagaagacattggagatctttgcatttttgttggacatagtgaggctttctgcgtcccggctagctcgtcccctggccttaagcctaactgcatctattttgttggcaataactttggtgtttatgatctcaccaccgaaacttgctctaccttttacactagtgtaaggccactaaagaacgttagtttcccttactggcctccgccaacccctatctactagttcctacttaattaacatggctcttgcacgtgtatttgctttcccatgctatcattgaaatcctatgtgcctctttcaatatgttattcttagattttttttttcttttgtcttttccgaatttgccactgcatacgggtgcaagagaaagattattgaaagcctataaccaaaagcagtggttttaacttttaatttgattaggaaaaaactaaaaaacaagtgttttgtaatctagtgtttgtgaattctttgttttccaacttagatctataaagatagatctcaatatgttctttaatgtaatcgtgttatactacagtacattaaaagcaaagagtaaatcccaaaaaaaatggaaatatagcaaacaaaacaaaaacccgaaaaggaggttcttttttttttatttcgttgaacaaaattggagccgacgttaaaccgaaccaaatcgtatatgtctacattcgtgtaaccagtgaagaagtccaagtcgccagttctcggttctctcggtctctcggtctctcccctgattaagatgatcggagaaggcatcgcaaaaaaaaaacaaaaaatgccaacggtagtgacgtagtgtagaatcttcaggctaaggtcacaatggttccattttctatagctcttgtcttcattgtcaaggtgctgtagagagatcgtgagaaagttaaacgcctaaagtacaattgaagcatatttttaggcctagatctatcgtaaaggagttgagcggcatcgtgagcaagattataggcctatcgtctctgtgtgattcatgttgatgaaaaagatccaaagggctttcagcatgagattcaaggcttggtagagattgatgcacataaaattatggttttggggtttgtttttgacgtttgaaccatgtaatcgtgttttcttctatgaaatttaagattttatattattttatttttaattattgattggtgaaaataacacaattctttatgaaaacatatattgtaatatgatacaacaattattatagctattattgtaaatgatacaaatcatttattaaaactgatattaatcttaacattggttatttacaattgacaaatacatatatatattattttatttttgacagaaatatttaacatcacttactataacaaaaaaaaataagtatgcccgaataataagcagtggccgatgcagaggtttgacaaggaggtcagttgacccccataaattttcaaaaattcattatctgtcattagcaataattttaatgaccccaacttaggataaattttgaccccagtacaaaattattgttgcaatatgaaagaaaaaatagtacatatatttgaaagttgtatttttactaaaagtttagacccataatttaccttaaataaaaaaatattaacctaatattattttaatttttacaaaacacaaaaataaaaatattattttttaatgtatgattttatatttaaaaaaaatattttggaccccataacagaaagttctagctttgccactgttaataagtatgccgtgattttaggaatgattttagattttatgaataaaacaatataacatatgacaatatattttatttcggaacaaatattaaacaacaacaaaatccgttatttttacttcctgaaaaataaaacaagaatcggatttatttattttttcgatgataaagagcaatttatgtgccttgtgtgataaattctaaatattctctaaatattgtatgttcattgttatcttgtacttggtgagcacgtatattctcagtattaagtctaacatacagattcgggacacgaaacacacaaaaaatttagggtttcagcaatggcacatctgataatcagccgagtctttaaactcagtggcggaggcagaatagttaatcatgggggtcaaaaaaaattctaagccaaatgcaaaagaaagatttgagaaaaaaaaattgaaaaaaaaatgacaatataatcacaaatgatagttttttaaaaaaacaagaaagaatttttttttgataaagtaaacactaaaactaagttggcgataactttggtgtttacgatctcaccaccaaaacttgcactaccttctacacagaagacgaagttccaataagaaacttggacttcccttactggcctcctccaattcctcactactagctcctaattaattaaccttgctcttgccgtgtgtctgctttctcatgctattattgaaatcctatgtttctttttcagtaaacgttttttctttgattccataaaatatggtaacctttaaattttcatacagtcctcctaatgtgtgtggtatacatggagtgaaaccgatcgagaaacctctctgatgtgaagtatatatcagaacaatacactgaattgcatgactcatgaaaacttagggtctctctcatccaaaggtataaaccaggacaaataccacaagctcaaactcgaatattttggtacggaaggagacaacgatacaggcctacaagagccaaaaaggtgtttctttgtggaattgatgagcataggttgggaattattaaaaaaaaaaaaaactgagcctcgataatattagcatatgaatttgtaaatttgcttgtgtccccaattcactttctttatttggtttgcagaatttgattcgttaaaaaagcattgttttgcgtaa

SEQ ID NO: 169775 - DNA, 1034 bp, Arabidopsis thaliana landsberg; identical to SEQ ID NO: 18221
  unsure (1)..(1034): unsure at all n locations

SEQ ID NO: 169776 - DNA, 851 bp, Arabidopsis thaliana landsberg
atatgaagagtctttgtggcgacatggaacgtgggaggaaaatctccacactctggtcttaatcttgatgctttgcttcacgtgcatagtgaattcgatgtatacgttttagggtacacaatttcaaaatgtcttgagtatttcttggattagtgtcttgagggttgtcgatttaatcttgtctcatagttttcaggagattgttccattgaatgctggaaatgtccttgttcttggagacaacgagcctgctgcgaaatggttagcgatgatcaatcaatccttaaacaaatcatcatcatcttctggaggaagacttagcccaaaaactccatcttttggcgctggatcgatgttctttgcgaaaccttctttgaagaagattagtgagagtttcagaacagagtgcaggagaaagctgaagatctgtaactgcagcactttctctgaagatattgtaagaaagtatgggagagaatcttgtttcagatgtcctgaaggtctagttaaccaatccggtgtactttctgatgacgaagaagatgaagatgatgacgatgatgatgaagacgaggatgaaggaggaggaaaagttgcttctcttgtaagcaaccaaatgacgatgaagtatggcttagtagcatcaaagcaaatggtgggtatattccttactgtgtggatgagaaaggaacttattcaacacgtttctcatctcagaatctcctccgtcacccgcggaatcatgggttgcttaggaaacaaggtacagtactttaccactttcatacttaaaaaccataacaagtaaaaaaaaactctgtttctgatattctcttcttcttcatcatcat

SEQ ID NO: 169777 - DNA, 1358 bp, Arabidopsis thaliana landsberg; identical to SEQ ID NO: 37700

SEQ ID NO: 169778 - DNA, 755 bp, Arabidopsis thaliana landsberg
taactataaccaagactagtttttgggaagaagacatgtcttgtctaggttggcttcaagaacaaaacccgaactcagtcatttatatctcatttggaagttgggtttctcctataggagaatcaaatattcaaacgttggcattggcgttggaagcgtcagggagacctttcctttgggcgttaaaccgagtgtggcaagagggactaccaccaggttttgtgcatagagtcacaattaccaaaaaccaaggaaggatcgtctcatgggctccgcaacttgaagttcttagaaacgattctgtgggatgttacgtgactcattgtggctggaactcgactatggaggtacatgtaacatattgatatacactagtaaaatctagcatgtattatatgattatggtatctactatataaattaactttatacaatatgtgtattaaattttgatttattgcttgtacaataataggcagtggcaagttcccggaggctactatgttatccggtggccggagaccagtttgttaactgtaaatacatcgtggacgtttggaagattggagtgagattgagcgggtttggagagaaggaggttgaagatggactaaggaaagtaatggaggatcaagatatgggtgagagattgaggaagttaagagacagagcaatggggaatgaagctcgtttgagttcggaaatgaattttacattttttaaaaatgagcttaattagacgagcgaagagtgtc

SEQ ID NO: 169779 - DNA, 580 bp, Arabidopsis thaliana landsberg
  unsure (1)..(580): unsure at all n locations
gcatgtaaccgtgcagcgcgatgtataaatatttgagcaggaataccnnnnnnnnnnnnnnnnnnnnnnnnnnnnnnnnntcggcgccagcgacaagaccggtacgctggtacatttctggcccgataacagcatcttccaggaatccgtatacaggaaagagatactcgagggccgcctgcgcgagctcgcttatctcaacaaacgcatccgcatcatccttaccgaccagcgcgagaaagatgagaacggcaatccttacagcaaagaattttacagcgaaggcggtattatcgagttcgtggaaatgctcgacaggaatgccgacagaacacctctcatcgctaccccgctgtatgtggagggacatgatgaagccaccaatgtggccgtagaagtggcgctgacgtataacaacgatttcaaggagcatatcttctcctatgtaaacaatatcaacaccattgaaggcggtacgcatgtaacaggtttcagaacggcgctcacaagggtgttcaagacctatggcgataaggaagggctgtttaaagggcgaaggtgaatgtgaaggcgatagttc

SEQ ID NO: 169780 - DNA, 603 bp, Arabidopsis thaliana landsberg
  unsure (1)..(603): unsure at all n locations
attatgaaaaggagcactttaataaaagcatcngcgttgagcttagccggtatatcttcaatcccttctttactgagagcggcaagtatccataagaaggcatagatcctgcccacgatgcacaccgcatggaatggttcagggaggcgaaattcggactctttatccattgggggctatactcggtacctgccggcgaattaaatggtaagcagacaaaatatgcagaatggatcatgctgaaagctgatatcccggtgaagcagtatgagaagtatgctaaggagtttaatcctacagattttgacgccaaacgctgggttgcttttgcaaaagcagccggtatgaaatacatcgtgatcactgcaaaacatcacgatggattctgtatgtttcattcaaagctgactaactataatattgttgatgccactcccttcaaacnnnnnnnnnnnnnnnnnnnnnnnnnnnnnnnnnaaggatcaggtatcaaactttgcatttactattcggtggtagacagcccttccccggatttcccttctaaatattctcaaatgaaagaagagtaccctaaaggatatcccggcaatggaaagccgg

SEQ ID NO: 169781 - DNA, 410 bp, Arabidopsis thaliana landsberg
tttccggccttctccggggtggcataggttcgtttcttccggtatgttacattgcatgtccgacgctttctgccctcgtgggatccgccgggtctgatgggtacatgtatggctcctcttgtttatatatgccaatgttccttttcgggtgtgtgtccatcgctctcggtcgagctggtttaggtttgtcctcattggttagagtttatggggcatctgtcaaggtttcttttcagccctttagtggcgcgttgtcccctgtcattctgggcttttgtaggggttgttgcgatcgtccctttgtttcgtgtggtggtgtgctcgtctcttattggaagctggcctgaccatggattttgtagtgtcttggggcagaccaaaagggtctcttcctggccgctttcttcttc

SEQ ID NO: 169782 - DNA, 1619 bp, Arabidopsis thaliana landsberg; identical to SEQ ID NO: 66773

SEQ ID NO: 169783 - DNA, 752 bp, Arabidopsis thaliana landsberg
aatttgattatttttcttttttaatttcttttctttttaaatcaaccgcaaccgcagccgcaaatgcttgtggaaaggaatttttgaaatccagcaatttcgagcagttcgaaactgtacggagcaatttttatgattggtaccaaccgctaacaactacaaccgaccgttaacaaccgctaggtggttgttagcggataaaccaatcaagccattagttgttttgtcttaacaatacacaaaacaacccacttaatatttgggcttaacatataacacatggcccatttgtctctttcttctttctaattcttcctacgacaaagctttctctttgtctctcttcctcttctacgatctcttcttctctctttgttgcagtctcttctcatcttctccactctcgtctctcaagtatggttaattacaggattaatttccaacatctattatatatataaactcgttgaaatcataatttttttcttcagatattaagtaaacaaattggccatcgacgagagactcaaaggtattttttcttccatggaaatttcgtgaaattgatctggaaacttgtttggatatatattttcgaaggaattttgatttgaattgtagttagagttaaatgtttatatagtgaacggaaggtgttcgacgaaatgcctgaaagagctgttttgttgtatgattctgtatgtttgtgttgagcatagtacaatctagttttatggtcacctttagccttt

SEQ ID NO: 169784 - DNA, 1150 bp, Arabidopsis thaliana landsberg
cattcgtcttgctgggcgatgaggaggagctctaccaccggagcccctcgggtatcctccagcgatgcatctccatcgtcgaaggtcaggaactcctgcaagaaatacgctcgggggcttgcggccatcatgcagcgcctcgagcccttgtcgagaatgctttccggcaaggcttctactggccaacggcggcggctgacgccactagaattgtccgcacctgcgaagggtgccaattctatgcgaacagacccacctgcccgctcaggctctgcagacgatacccatcacctggcccttcgctgtatggggtctggacctcgtcggtcccttgcagaaggcgcccgggggctacacgcacctgctggtcgccatcgacaaattctccaagtggatcgaggtccgacctctgaatagcatcaggtccgagcaggcggtggcgttcttcaccaacatcatccatcgcttcggggtcccaaactccatcatcaccgacaacggcacccagttcaccggcaaaaaattcttggatttttgcgaggatcaccatatccgggtggactgggccgccgtggctcatcccatgtcgaatgggcaagtagagcgtgccaatggcatgattctacaagggctcaagcctcggatctacaacgacctcaacaagttcggcaagcggtggatgaaggaactcccctcggtggtctggagcctaaggacgacgccgagtcgtgccacgggcttcacgccgtttttcctggtctacggggctgaagctatcttgcccactgacctggaatacggctccccgagggcgagggcctacaccgaacaaagcaaccaagccagccgagaggaatcgctggaccagctggaggaagctcgggacagggccttgctacactcggcgcggtaccaacagtccctgcgacgctaccacgcccgaggggtccggtcccgagaactccaggtgggcgacctggtgcttcggctgcgacaagacgcccgagggaggcacaacgtcacgcccccctgggaagggccgttcgtcatcgccaaagttctgaagcccggaacatacaagctggccagcaatcaaggcgagatctacggcaacgcttggaacatcaaacagctacgtcgcttctaccct

SEQ ID NO: 169785 - DNA, 531 bp, Arabidopsis thaliana landsberg
atgatgatgcaatgtttagatggattaaagcacttagccttaattctgttgacttgttgtgatgctgatcctcccaaggttcgtcagaaccctaaggatgtggctagaggcactgtgtgtatgtgtctacccctacatttacttttactatttttatttgtcacaaccccaacaatggctttatgtaccaaatgcagttacagtgaatgagattgaagctctttacgaactgttcaagagcattagcaaagacgggcttatcgacaaggtatgcaagaatccatagtcggacacgagtactatatctctctgttcctctacattcactaggatcctttcaaatatattgcaggaacaatttcaattggtactattcaaaatgaacacaacgagaagcctttttgctgatagggtaaattagatagacttgtaactcacttatatgagtttccctgctgtccactcatacttcaagctttgcaggaaattgaaatgtttgataccaagaatactgggattctagatttggag

SEQ ID NO: 169786 - DNA, 1053 bp, Arabidopsis thaliana landsberg
atttaagttaaccggagtttctttttgttttccggcgaatttttggtactttgagttatgaataatgatgatattattctggcggagatgaggcctaagaagcgtgcgggaaggagagtgtttaaggagacacgtcacccagtttacagaggaatacggcggaggaacggtgacaaatgggtctgcgaagtcagagaaccgacgcaccaacgccgcatttggctcgggacttatcccacagcagatatggcagcgcgtgcacacgacgtggcggttttagctctgcgtgggagatccgcatgtttgaatttcgccgactccgcttggcggctcccggtgccggaatccaatgatccggatgtgataagaagagttgcggcggaagctgcggagatgtttaggccggtggatttagaaagtggaattacggttttgccttgtgcgggagatgatgtagatttgggttttggttcgggttccggctctggttcgggatcggaggagaggaattcttcttcgtatggatttggagactacgaagaagtctcaacgacgatgatgagactcgcggaggggccgctaatgtcgccgccgcgatcgtatatggaagacatgactcctactaatgtttacacggaagaagagatgtgttatgaagatatgtcattgtggagttacagatattaagtgggactcacatatctactatacataatatttagcttttatgtaagaggtatttatgtgagttttaagattgtagatgtgtcccaggcgttagttcctcctcttggcgagttagaagtttccttgatgggatggaatctttgtacctataaaattataaaattattgggctttatgaatcttaatatacaaagtctaggcccaatttgtcattacaacgtgacagttggagccataattttttcacagtgtgatctactcgtgagtagtaatagaattaaaggggatttactcaaatcttgttggatactagcacatacatcttgacagcatttgaccaaattaatacagtttgtacttgctagt

SEQ ID NO: 169787 - DNA, 1242 bp, Arabidopsis thaliana landsberg
  unsure (1)..(1242): unsure at all n locations
aagaataaggctggagggcggcggttccgtgtggactacagggctctaaacaaggcctccatactggatcganacccagntcctgttattgaagagctgttagatgaactgaagggcgcaagggtgttctctaagctggatctgaagtcgggtttccatcagatcagagtgaagagtagtgatgtagagaaaacagcgtttaggacgcaccaagggcattacgaattcctagtaatgccatttggactcactaatgctccctcgactttccaaagtgtgatgaacgatttgttccgcccttatctcaggaagttcgtgttggtgttttttgacgatgtgctagtctacatcccagatttggagactcatctgaagcacctggaagtagttctgcagcttttacgcagccaacagttctatgtgaatgcaaagaaatgttcttttggtctgaaggaggtagcttacctaggccatgtcatttcagagagtggagtagcagctgatccagagaaggtgtctgcgatgctgaactggcataaacccaagacagtcacggagttgaggggctttttgggtctaacgggctactacaggaagttcgtgaggaactatggccagattgcgagaccactcaccgaattgctgcagaagaatgggttcaaatggactgaaagggcagaggcagcttttgaggcgttgaaggcggcagtgtctaatctaccagtgttggcactacctgattttcaccaacccttcaccatagagactgatgcatccggagttgggataggagcggtccttactcaagagaagcgacccattgccttttacagccaagctttctcacctaaaggcagaattaagtcggtttatgagcgagagctattggctatagttaaggcggtatctaagtggaaacactaccttacggggcagcagttcatcataaggactgatcagaggagtttgaggcatctgttagagcagaaatcagtgtccactattcagcagagatgggctgcaaaactgttggggttgaattacaagatcgagtataagccgggcgctcaaaacagggttgctgatgcactttctagaaagccaccagtgggagagttgctgcagatcaccctgttggcacctttatcattgaacaaggacgaactcaaggagcagcagagaggggatccttgccttggaccactgatcctgaagttggagagaggagaaggggacccgagt

SEQ ID NO: 169788 - DNA, 150 bp, Arabidopsis thaliana landsberg
  unsure (1)..(150): unsure at all n locations
cttatgaataaagcaaggttttgtttcttttgatctgcaggttaatggatccttggcacggagggcatcaaggatctgatggcaaaggggctcataaggatggtctctgttcattctagccagcannnnnnnnnnnnnnnnnncaacaca

SEQ ID NO: 169789 - DNA, 864 bp, Arabidopsis thaliana landsberg
gtttttgtttgttatggttccagaattaaaaaaaaaaacattgcctttgaatttcatgataatcaaagaatatgatgaagaagcactacaaaccaattctctctcagctagagaattgcagatcattggtggaactgaatcaactccatggtttaatgatcaaatcctcagttatcagaaacgtcattcctctaagccgactcatagatttctgcactacttgtcctgagactatgaatctcagctacgcgagatcagttttcgaaagtatcgattgtccaagtgtttatatatggaactctatgatcagaggctactcaaacagtccaaatccagataaagcattgatcttttaccaagaaatgcttcgaaaaggttattctccggattatttcacttttccttatgttcttaaggcttgttctgggttaagggatattcaattcgggagttgtgttcatgggtttgttgtgaaaactgggtttgaagtgaatatgtatgtttctacttgcttgcttcatatgtatatgtgttgtggagaagtgaattatggtttgagagtttttgaggatattcctcagtggaacgttgttgcttggggaagtttgatttctggttttgtgaataacaatcggtttagtgacgctattgaggcgtttagggagatgcagagtaatggtgtgaaggcaaatgagacaataatggtggatcttttggttgcttgtggtagatgtaaagacattgtgactgggaaatggtttcatgggcttcttcaaggattaggctttgatccatattttcagtccaaagttggattcaatgtgattttggctacaagtctcattgatatgtatgctaaatgtg

SEQ ID NO: 169790 - DNA, 560 bp, Arabidopsis thaliana landsberg
gaagagccggttgattttggttgtgtgaatgtatatcgctttaaagcaagatacgagattagaggtgtcaaaatgggtaacccaactcaactcaactcataatcaaatgagtttagagttaaatgagttatgggttgacccaactcattttgttaaatgggttagatcaacccataactcatttaatttaatgggtgaagttgttaaatgggttaacccaattaaataataatttaattaattattattataaaacaataataaataattatcattattaataattattaattcattatcatcaaacttaaaatatttacagattctaccgtttacggatttacgtttttggcgggaaaattacggattacattgttggcgggaaaatcacgggtttacgtttttggcgaaaaaattacaagtttacgtttttggtgggaaaatcacgggtttacgtttttggcgggaaaatcacgggtttatgttttttggtggaaaaattacgagtttattttttcttaatttcatcgcttgtatatttaagaaatttggaaaaatat

SEQ ID NO: 169791 - DNA, 1296 bp, Arabidopsis thaliana landsberg
acgtttggacggcaggagagtgaagaagacaccattgcgagcatgtgaaaatgtaaaaaaataaaaatagagaagctaaagtaagaaggtgaaaggtttcacaagaagaagtatttaagtggagtcacgtgacttctatttctcttcaattgttgctgagtcaattatacgtaatacgtggcatgaatcttaccgtatactacaacgaccaaattttcaatgagagacgcaagctcaaatgtccgaaactatacacttcacttcttattcactaatttgacctaatcttatcctcaaaaatgacagcctcctcgaaaatgacatcctccactacgttgctgtcgttgttcatgaaagaagatgaagagggaagaaacaagaaaacgacaacctccactacgttggagtcgttgctgatgaaagagcgaagaaactgggtggatcttccgccggagctgacgacttcgatcctgctgcgtcttagcctgactgatatactggacaacgctcagaaggtgtgtaaagagtggcgacgcatttgtaaagacccttcgatgtggcggaaaatcaacacgcgagactgcctcatgtacaactttgatttcgtgagcatgtgccgtcacattgttgatctcagccagggtggcttgctagagatcaacgttgatgaacacttcttgagcgattctctcctcagctacattaccgataggttctctctctcccttcgcaagcacgctagcaacctttgaacggtttttcatggaaatctccaaatgctatttagagaattatgtggcttttatttgatttcactgtctgtgaattagacacaaatggtcctagtacatatattttgacagaaaagaaatctctaaaatgtgtttgttcatttttctcctgaggattagctagggcaaaaatttgataacttataatcgttgatttcgtttggtttattatgtgttaattaaactcagtttatcatgtttttttccttttaccggatctggcggtctgctatgaatggactttggatattcatttactacgtttaatttgggttagatataaacagatatatatgaaggataattttcatgcttttatagtgcttttagatagtaggtggtctagattttcatgccttaatagagttttagatatgaggctaatttctatgctatgacgctgctatatataaatgtataatagatctgttgccatacactattctagacttgttttgtttcacaccgtcattactctatcatcatcatcatatatatattttac

SEQ ID NO: 169792 - DNA, 678 bp, Arabidopsis thaliana landsberg
taactagaactacataagcccgacaggcggatggctaggttggttgttgatagaggactcgaaagtctttatgaatgtccgtgaacaatgtggacattatttgggaacgacttgtccagaaagaatccagctttcgatagatccggatccttgtaatcctatagatgaagacaaggtctatgcggatcctatcaaattacatgctaaagaggaacctatacaaatcctcttagacctctgcgcacaaaactacaggattgacatgacgctgttcaaacatgtacaggtcaactaaacggtattacggtagcccttggggttatgatattttcggtatatggggggtagcatgggatccgtagtagaagaaaaaataactcgatggaccgagtatgcagccaatcaatgtttacctcttattttagtgtgttcttccgcaggagctcgaatgcaacaaggaagcttaagtttgattcaatggcaaaaatttcctcggtgttatgtaattaccaatcaagtgccaagttcttccatacctcaagtcgtgcatctcgtacaaccggtggagtcacagctagttttggtatgttgagggatctctttatatctgtgccaaaaacataatttgcacagtcgggtaagagagtaattgaacagacattgacagaaacagtgcct

SEQ ID NO: 169793 - DNA, 182 bp, Arabidopsis thaliana landsberg
tcatttttggtggaaaatgttgaatcgcgtttttggcgggaaaatgatgaattgcgttttggcggaaaatgtttttggcacgaaaatgttgaattgcgttttggcgggaaaatgttgattgtcgtttttggcgggaaaatgttgaatgtcttttttggcgggaaaatgttgaattttttttt

SEQ ID NO: 169794 - DNA, 632 bp, Arabidopsis thaliana landsberg
atgatggtgcagatcattgagcaccgcgccgagactttggtggattttgcggtggagggagaagctacttcctccacaccgcaggttcccaatcgcccagtgccaggcactgctgctgtgcatgccgcacggcagcgcaagcatctcggactccgtcgagggcacgcctacagcgctgtctgtggctagagagttgtacgccacccctgtagctccacggcttcaccgggggccatgaagcagtggcgtgacgacgtcgatcggctgctcgacatggcacattctacttcgaccaggtcgaggcctcggtcaacccggcgccaacgcgaggcgacgacgtctctgcgctcaccctccgtaaggggtgcgcagactgacgacctctgggtagagctcaaccgcaggcgtacgggagaggacgcccagatctctttggaaaggcggcttgagcgctgacagaacatcgagggtcgcaacctcgaccgagattttgctgcagaagcaccgcagacaccgatgggcgcccggtcctaaacgggtgtcctcttggccggcgtgggttgtgccgccctcgcagaccatctccgcacgctcatggccgcccaagttccggccgcacctgccgaaaaaat

SEQ ID NO: 169795 - DNA, 219 bp, Arabidopsis thaliana landsberg
  unsure (1)..(219): unsure at all n locations
tgtccatcttgtacgcttgtgtcatggctttttaaaaagaactcaatagtccgagtgtctcatgtgaatcggaaggcaaaccggcttacagatgggttgactaaccatgcattctctttgcttttgggctnnnnnnnnnnnnnnnnnnnnnnnnnnnnnnnnnnnnngattttgcgggaaaacgacgatggagttttacgctcacgactagtccctttg

SEQ ID NO: 169796 - DNA, 1818 bp, Arabidopsis thaliana landsberg
  unsure (1)..(1818): unsure at all n locations
atggagacaaaacaacaagatgagtacattgctaaagctttcgagtggatgggttatgctcacagttttatagtcccgccaattggtttgagtgggggcttagccctcttttggaaaaaagaagtggatgtggagatccttgaatctgcagccaattttattgatactcagattccatacccgtactcccatgctcacattaccttcatttatggggctcctcaggtggaaaacagatcagtgttttgggatcgaatcacattactgggagtggggagatcctcagcttggctactcacgggagacttcaatgacattctcgataactcggaaaagaaaggaggaccgctgagatgggaaggatcgttcctagctttccgtagttttgtgtcacaaaatggtttatgggatctaaatcactctggaaattctctgtcttggagaggaacacgatactcccaccacattaagtccagattagaccgggctcttgcgaactgcgcttggtcagaaaaataccccacgagtagatgtgagtacttgagatttgaaggctctgatcaccgtcctctaatgacttttcttgggagtaaacaaaagcggaagaataagctctttaggtttgatagaaatctgaaggaaaaggaggagatcagagatcttgttagagattcctgggagctctatagacaggactcagttcttcacaaaatcagtcgttgtcgccagagcatcatccagtggaccaaagatcnnnnnnnnnnnnnnnnnnnnnnnnnnnngagttctcaacgactgctgaaagcaacgttgtcttcagaagttccagatcaggagagaataaattcacttactctagagttagagtctgcttatcggttggaggagcttttctggaagcagagaagtagagtacagtggcttcatagtggagaccgcaacactggctacttccacgccatcacaagaacccgtagacaaccgaatcacttgtcggttatagaagacagtcagggacaggcgtttcacgaagaagaggagatagctgccacaatttcggagtactttcagggaatttttacttcaaataatacttgtgatttgaaagtgatagatgaagtcctcttaccttctatttctccacaatgtaatgaggctttgtccaagattccttcttcaaaggaaataacagaggctttgtattctatcaatgcggataaggcaccgagacctaatggtttctcggctgcgttttatcatgcttattgggatatcattggagaagacgtttcccgggatatccggttgttttttctgactagctgcttatccccccggatcaatgagacgcacgttactctaattccaaaaatctttgcaccaaggagagtctcggattatagaccgattgcgttatgtagtgttcactataaaatcattgctaaattactcaccagacgcctccaaccttggttgacctccttgatctctaaacatcagtcagcttttgtccccggaagagccatagcagacaacgtgcttatcacccatgaaattctccactttctccgagtctcaggtgcaaaaaagtattgctctatggccataaaaaccgacatgagcaaagcttatgatcgtattgagtggaactttctaaagactgtcttagagaaacttggttttagtactacttggatctcttgggtgatgcaatgcgtgtgctcggtttcttattcatttctcattaacggttctccccaaggttctgtgattccatcaagaggtcccccgcaaggggatccactctccccgtatctc

SEQ ID NO: 169797 - DNA, 749 bp, Arabidopsis thaliana landsberg
attaatgaactatctccttatttatatagtatcaaatttaatgctcacgtttgtcgtaagagtttattattgacgtagaaattttaatattttgctttgattacctttaccctttttatctttctaaaccttttgaatgatgtggtattcacagaaattacatgaatatggagcgaggagaatacaagtattcggtgcaccaccagtaggatgtgtcccatcacagagaaccttagcaggagggccaacaagaaattgtgttgttaggttcaatgatgcaacaaagctctacaatgttaagctcgctgcaaatttgggttctttgtcaagaactttaggagacaagacaataatctacgttgacatatatgattctctccttgatatcattcttgaccctcgacaatatggtaatcgtcgttcgtattaatataaacaattaattttcaaattaaaatttccattttatcaaaaagttattgaaattgtatgtcattcattaatgtaacaggatttaaggtggttgataaaggatgttgtggaactggactaattgaagttgctcttttatgcaacaactttgcagctgatgtatgtccaaatagagatgaatatgtgttttgggatagtttccatccgactgagaagacttacagaattatggccacaaaatattttgagagatatgtatgatctcgacaatcgtgtaagtcatagcttggattatcgtgtctcttgatgtttattat

SEQ ID NO: 169798 - DNA, 477 bp, Arabidopsis thaliana landsberg
ttcagtataagagcggtggattagctaagcgagcagtgtcatgcttttaccagtgttacgttatacgattgacacagaagtacttgaacgtgtcgcttccagagatagcatacatggtccagcttggtaatgctaaggagatgaaaatgcatgtgcttcagatggtattgtgtcaagcacatgatttttggaagctagctttattagtttaactggtatgttggacaacatcatttttttcatgtctaacgcacagatccagcatggttagatacatggccttatcctccacataaaaggcatggtcacattcttgaaggaccctgtgcaggtagaatcaagtgatatgattgagttcatgaattctgttaatcaaaggtatgtatgcagatctaagtggtatgcaatgggctttctttggtatacattgcttgaatagaagaaactagtattaaggagtgcataaatagcatttga

SEQ ID NO: 169799 - DNA, 1219 bp, Arabidopsis thaliana landsberg; identical to SEQ ID NO: 31432

SEQ ID NO: 169800 - DNA, 1284 bp, Arabidopsis thaliana landsberg
gcgtagcgaagcagaaatgcttgaaaatatcgccaaggatgtttcaaacaaactcttccccccatcaaataatttcagtgacttcgtcgggattgaagctcatatagaggcattgatatcaatgttgcgcttcgactccaagaaagcgcgaatgatagggatttgtgggccttctgaaactggtaagactactataggaagagctttatacagcagactcaaaagcgacttccaccatcgggctttcgtagcatataagagaaaaatacggagcgactatgaccagaagctgtattgggaagaacaatttctatcagaaattctttgtcagaaggatataaagatagaggaatgtggtgcggtggaacaacgactaaagcacacgaaagttcttattgttcttgatgatgttgatgatatagagctactaaaaacgttggtaggacgtatcagatggtttggatctgagagcaaaattgttgtgattactcaaaaaagggaacttctcaaggctcacaacattgcacatgtttatgaagtgggattcccatcagaagaactggctcatcatatgttttgtcgatatgcttttgggaaaaactctccacctcgtggtttcaacgagcttgcatatgaagctgcaaagattgccggtaatcgtcctaaagctctcaagtacgttggttcgtcttttagaagactagacaaggaacaatgggtgaagatgctatcggagttccgtagaaatgggaatgaactaaaaatcagctatgatgagttagatggcaaaggtcaagataccgttgcgggccaaaccaaaggtgcagaaaaaatcaacactaaaaataattgcatggagatagggataacactgtaattaccattattgctgataataccctaagacacatgcatgcaggttgaacttcccaggtgaaggcagagaggatccactaggcgctaggcatgtctatattagctaacatccgcagtgacggagccactatactcaaacatgtgagctacaagtaatgtgggctctaagctgatacaatgctaccctacctttaagcatagagagccaggagggagcataagtaatgagctaggacacgcatcaatcaatctaacaattagtggttgtatacagacgaagcatggcgcaacatgcataaatatgctggtatgaaagtttggcatgagagtgcaagaacgtcaatacatgcggcatagacagcataactgatggtgtgcgtacgacagtttgctaccaagggatatacc

SEQ ID NO: 169801 - DNA, 462 bp, Arabidopsis thaliana landsberg
ctggcctattccaagaaacgagatggtcatcaattcctttgtctggatctggaacttgttgattgtgaattcttgccttctgaatggagaaaggtcgtgaaggtttcctttactgtcgtaaattttttctcgaagaaactctcaagacagataggtgattagtgattacttacttgcgctgcaagattctattagataattaatgcttgttttaaagacagttttatatatgctttgtgatgactttttacaggactaaaacactgttttaataagaaggatcgaagcaagggtggatccttgtttcaccttagtgaacttacggacaaaaaaagtgggtttctggtggatggagaagtcgaaactgttgcccagataactgttcttgaaactaatcgcagaaatcatgtatcgaaggactataacatggaaatgcaatgttgggatgggatgacaacgaca

SEQ ID NO: 169802 - DNA, 779 bp, Arabidopsis thaliana landsberg; identical to SEQ ID NO: 44738
  unsure (1)..(779): unsure at all n locations

SEQ ID NO: 169803 - DNA, 921 bp, Arabidopsis thaliana landsberg; identical to SEQ ID NO: 5832

SEQ ID NO: 169804 - DNA, 3177 bp, Arabidopsis thaliana landsberg
acaaagatgtgagaaattcaattatggaaaggatcaagatgtatcaagattcaaaagacgaatgtgaagctaatccgtctagagccactgttaagaggagtgttcaagaaaaactggaagatcctggacctttcactctacgatgttccattgggcaattggttttcagcaattttctatgtgatttgggagcttcagtaagcttaataccactcttcgtggcaaggaagctggaattcactcagtacaggccttgcgacctgactttgatccttattgataggtcatcaagaaaatccttcggcctgctaaaagatctgctagtaatgattaatggagtggaagtgcctacggatatcgttgtgcttgagatggaagtagaacctaaggatcctctaatcctagggagacctttcttagcctcagtgggagcgatgatagatgtcaaagacgggagaataagtcttaaccttgggaagcacatcaagctgcagtttgacatcaacgaaacttcgcaaaggacagctctagaagaaaagatcagggctcagcctcaaccttcagattcaatcaccagaccaagcacaacctctacacctgacttgcgagatctcaaaaagaaatctgatgagcaagaagaaaccatagagaagctagctcagacagttgaggaacttaagagtaaattggatcagatgcaagagaaagctcaatcaaaatgcgggattgacactatcccgagataaaagtttacttcaagatggtctgaggagatagattatccaccagaagagaaagaggcctatttcgaggaaagaagaattgagtattctgccacgcatctctcaagagaggatgctgaatatgatgatgagattagagaggactatgcagatcctctctatcacgcattttcttcttaatgagtgagaggagtcaagctagagactttaaacaagctcacttgggaggaattcccaagactgtttctgtaaataaaacttttattttcttgttatttttgatttgtttttggctgtgtttgtgattttcaggaacagagaaacagcgtggaggtagagtaaaaattttaaaattttactctacaaagcaacaggggatcgagtatgtcagtgtaaaggaattcaagaatttgaaaaaagttctgttgcactcaaagaccatgagatcgagtagttgggtcgagtattagtgatgattttaaaaactcaaaattttgaaatcatatttatactcgaccaacagaagctacaaagacttacagagagtttatcaagtttacagaggattacagaaggttctgagacattcctagtcaacagagaacagtgcttcaggacaaacagacagagcgtggcccaccacctctcacctttgttcccccacgcgtttttagagataacgaaatcccaagactgcttctccaccactcgatctcaccctatccttttccaccgacatcatctctcttcctctccattcactcgaccttgcatacacactctccctcacgtctctcactcgaccaaacatcactcgacatctctctcaccgcctctctttcactcgatcgcaacgccgctcctctctattcgccgcctactcgaccggcggaccttcaccgtctcaacttcgcctcctcttcactcgacctcgccgttccaacttcaccatccctcaccacttcgtccattttcctactcgaccacaattcagctttcaccgctcacgccactgccttctccctctcttccactcgacgatgggaccggtttcatcatctctcaccgctctcgcctcctcttcactcgaccgcacgagcccctcaacctctacttcgatttctttctctcacctctccatactcaaccgctattcgacctcatcttcgttccctctctttcactcgaccgccggaccggcttcaccatctctcaactatccaccattcactagaccgccctgcaatttggataaagaggctcttcattcgatttttgacaaacggccagagtttctctctctcgttctcgcgagccaactcgacttcgccgaagcttctcgccgttcactcgacctcgccattcactgcgcctccgttcatctcttcactcgacctcaagctgttcacttgccgtgaagcttcactcgaccgctcctcaaaccgccaccgtcttctctccattcgccgtttactcgaccacgcagttaccgtctctcattcatcttcactcgaccgctatacccgaagccacaatttcactgtactcgaccgtaatactcgaccgtgtacttgaccggtttagtgtttgcatttatttggactaacatattaacgtttggctttgagttacattctttttcaggaaatcaatatgagtaactatagtggcgaatcctccatggatggattacaacgtcgatgaagctgaatcttggtcaactggaccaaagagagagggacaggcttatgagagcttcagagctgagacccaacgctcagtagctcgacgcaatgagaggagagctgagattgctagaggaaaaagagcaatgaccagtagatatgagttgatcgacgaagatattgacgtcgagtatgagcctgagtcatggcacagaaagacaaaagctgttgaacaggcctgatgaagttacagtagaggagtacatcagacttttcgagctgaacaacttctagggaacgaggtacccttgttatcagactttagcccagctggggctactggaggacgtacagcacttattcgagaagtgtcatctggagacactgatgtcttacccgtacgtcgcttacaagaaggaatcaatagagtttctttccactctacaagtggagatgtatcagggacttacagcagatgagctggagagtgaagggttggggttcttgactttttcagtgagcgagcagcgttaccagctatctatcaggagcttggaaggattgtttggtttccccagtggaaaggaaactacaccaaagttcgagagggaagagttgaaggatttgtggttaactattgggaacgatatggcgctcaactctgcgaggtacaagaaaaaccagattcgaagccctgtgatccgctactatcaatgctctgtagtgaatgttctgtaatctacggaacg

SEQ ID NO: 169805 - DNA, 703 bp, Arabidopsis thaliana landsberg
ttccttggtacacactctagagtcttcatctatactattgtcaaacagagatccagaactatctaaataaaagaggtcaaacaagtttgaagaaaacaaggaagcaagtaagaaccaaacaactaaacaagaaaccaaaacaagcaactagagaatgaaacacacacaagcacgcatggaaccaaggaaacaagaagctagtaagaaccaaacaactaagcaagatatcaaaacaagcaagcaaagaaccagaaaatgaaacacacaagcacgcatggaacctaggaagaaactaaagaagcaaaatcaaatcaagtaaccaaggaagaaatgacgaaaacaagcaagtaagcaagtaaccaaggaagaaaacaaacaagcatgcaaagaaatagagaatgaaacaaacaagcacacatggaacaaaggaaggaggcaaagaagtaacagcaagtcatgtaaccaatgaagaaatgaagaaaacaaacaagcacgcaagaaatcaacaagtaatgaagcaaaaagagaaaagaagaaagaaaaataggcaaacaaaaaagaggaattgtaaacaaaagccaagttgtgacaaagtattcaaaagatcctggagatcacctagtctatcatgtagcatgtcgaaatataagatacaatcctctccaaattatcagtgttagggttcatggtacttcgtattcgt

SEQ ID NO: 169806 - DNA, 1025 bp, Arabidopsis thaliana landsberg
ctccttcacacgatgtttgggcgaagaaaaaaaaagcgaaccagtcctaaccttgctcagagagcctccacatccacggctggtcgacgacctcgttctcttccgtctcattacgatttcacgccggcagcagaacggtctcctcagctacagaagcatgcatcagaagccgccattcctcctttacagtcaacggcagctcatgttcaaaactatctgccgcctttacagttgttccagcactctggcagtcgacaacctgaagtgcaaaggactgcctccttagaagtgcagaacaatccagcgactcaagccgcgactactctgtaggttccttagactcctcaacaagaccctccgccttctcagcaagaccctccgccttctccagttcaagagtctcgggctcacagtcacccatcctctcaaggcaacaacttcgaagaatatccacctctgtcgccggatctccaggaggacacacttcaatccctaaatgatctgcttatgttgccggagagggataagttcgtcaccgtcctctctcccattcctcgaccgaatacgacatggtatgatcttcttcttctcttgtttatgatcccatgttgtgttcaatgtcggtttagttgagtaatgagctttgtgagattgattagattgagaaaatgtcgtaattgtttctttgttgtgtctcgtgttgtgttggtctgaaagtctgaaagtctttgatattatagatgttaaggatgcatctgagaatctattcttttgtttgaagagtcttgttatgtgttttgttcttaggatctaagttaagtattttgttcttagggtttagttgggtaatgatctttgtgagattgattagattgagaaaatgtcactttttttttttttttgtgacgtgttgtgttggtctgaaagtctttgatattatagatgttactttgcagccacaatctattctgttgtttgaagagtcttgttgtgttggtcttattttgttgtttgcgagaacaagt

SEQ ID NO: 169807 - DNA, 1639 bp, Arabidopsis thaliana landsberg
atctttttctaagtgattgcactgcactcatgactcaataccaccattctttggacttctttgattctggctgtcaaatttgatatggttcaaattacctagaactactatctcaaataagagatcaattacagtattttaggatcgaattcacggagttcttttgttcaaacaatgagttaaatgtcgagattaagctagcagggtatcagtgaaaataaaagagaacaaagtaaaaagacaacagattgattgtgttgtaaacgatttaataaagagctaggaacagggtattctcaggaaactattggttagtagatctaatgaaagctaggttgttatcaaaccattcttaaactcaaactctaattatagaataaccgatgggtgtgccgcgaaactccctatatgtatagctaataataaccagagaagccgagaaactatcaaccttaatatgcattctcaacgagttcaattgttcatcttagtaaataggccgattcttattacacacttataaacataactcatcaaataatagatctaactatagatacctatggctggaatatctattgtctggattcaagatctagttaattactctagatctagcattaagcataattaaagatgaagaattctatagataacctagcaaagggggcaatctactaaaccatatgaatccctaatgagaaactttaaacctaacaagaaaactactcaaacatgatgaatgaagcaaacaacatgattgaataagaaatcactgaataaaacaagaatagattaaggtttagcaggattttctctaaagggagtttccatagggttttgctcccaaagtacaaaagagaaaaggagaatagcctctccaagcttaggtctaaacaatgacctttaaaactatatatatgacctaaaaacgtgatgggccttctttagaaataagagaaacttctgggccatatatggaaatcttcaaaacatcaataaattgcgtcttcgaattgtcgtcaggtattggtgtcgctcgacaccaggggtggtgtcgttcgacacctacggggattttggtctgcgaactgcttctgcaacttaagttgtctgttttgctccagaatgctccataatctccaaatgcatcacaaacatgtaaagatctgaaaaagactagaaaagactctagaaatagcaaatagactctcaaacctatacctaaatcatagttaaaagcagtgaaaatcgaggtatatcaaatgctttggtatctgctcctgttgttcgagctcctaattgggactatccatttgagattatgtgtgatgcatcagattacgtagtagaagctgttttaggccagaaaatatacaagaagcttcatgtcatatattacgctagccgaacgttggatgaagctcaagcaagatatgcaacaactaagaaggagcttctagctgttgtattcgcatttgagaagttcagaagatattttgttggatcaaaggtcactgtctatgcagaccatgcagctttgaggcatctgtatgccaagaaggatactaacccaagactattgagatggatacttctattgataaagtttgacatgaagatagtatacaagaaaggc

SEQ ID NO: 169808 - DNA, 337 bp, Arabidopsis thaliana landsberg
  unsure (1)..(337): unsure at all n locations
aatgtgagttaccagatcaaactggagcagtttgaaggtccctttgacctgctgctgtttttcattgaacgnnnnnnnnnnnnnnnnnnnnnnnnnnncattaccaggatcatcaatgacttcctggattttatccaccagggagagaagctgaatatagagctgagcagtgagttcatcctttttgtatccacgctcnnnnnnnnnnnnnnnnnnntcctgctgcccaggaaagaactggatgcacagggtaatgccatagccccgaggcaggaactggtagataagataattgaaaacaaacgcttcaaagaagccgctgcgcagatggcggaaa

SEQ ID NO: 169809 - DNA, 1538 bp, Arabidopsis thaliana landsberg
  unsure (1)..(1538): unsure at all n locations
gactccgctagaagcgtgagtactataaatggccatgcaaagataatnnnnnnnnnnnnnnnnnnnnnnnnnacaatgccaaggggaactcattttaaagtaaatgatgcattatatttccctaagtctcatagaaacttgataagtttcaaacgatatccaaagtaatggatatcatatagagactatgaataaagatgacattgaatatctttgcataaaatccgagaggcgaatatatattaagaattgccaatgctatcctgcagattatattgcacaaaaataaatataatcgcatcagatgttaatgtaaactcgagtaacaatcactcgtgtgagtttactagtacatttaagatatggcatgaaagacttggacatcctggttaagtcatgatgcgaaaaattatgcaaaattctaatgaccatccattgaaaaaccagaaaatatttaaatctggtgagttttcatgtaaagcatgttctcaaggaaaactcagaataagtccatcgccaaacaaaattgggaatgaaagacctgaattcttgtcgagaattcatggtgatatatgtgggccaatccacccaccgtgcgggccaattcgatatttgatggtattaattgacgcatctactagatggtcacatgtatgtcttttgactacacgaaacacggctttcgcaagattcatttctcaaataatcaggttaaagacacaatttcctgattatgccataaagaaagtcaggcttgataatgctggagaatttacttcacaagcctttaatgactattgtgtatcgatgggaatcgatatagagcatccgctccctcatgttcataaacaaaatggcatggccgaatcattaattaaacggttgcaactcattgcaagaccgtgaatattgagaacaaaactcccaatttctctatggggtcatgctatattgcatgttgcggctttggttcagattagaccaagcgcagataatgaatattcccctttacaaatgacttatggtcaagtaccaaatttatctcatctccgcatttttggatgtgcggtatatgtgcccatagcaccgccacaaagaacaaaaatggggccccaaaggagattgggaatatacgttggttatgtatcaccgagtataataaggtatcttgaaccacaaactggtgatttgtttacggcacgttttgccgattaccattttagtgaagatgaattcccagctttagggggaagaattcatcaaatgcatatgcataaagatatagaatggtgcgcaccatctttaaaatatcttgatccccccacgaagcatcctgagctggaagtacaaaagattgtacatttacaaaacatggcaaatcaattaccagattcgttcaccgatacaaaaaaggtgacaaagtcatatatccccgctgcaaataccccatcaagaattgaaattcctagtgagctgaaattagatgggagcaaaattaatgaacctaaggttcaattaaagcgtgggaggcctattgg

SEQ ID NO: 169810 - DNA, 1121 bp, Arabidopsis thaliana landsberg
accaaatgttattcttcgtgaataaactaccaaaatctttgaaggctttcttgggtcgtttggcctaaggaataattgtttcagaatccaaacctgtgagatctatgaattcaagtttgattcatggaaaactcttgttgctaagtttgactgggatatagatattaggtgcaacaacggtgtgtctgtgaagggtaagatgtactggattgctaagaagaaggaagactttactattataaggtttgatttctccactgaaacattcaaggagatatgcgtctgtccttatactttggtgactcgattaggctgtttcgatggagatagactctctttgttactacaaggtgaagaatcacaggggattgaggtttggatgacaaacaagttgagtgataaggttgtttcgtttagccaatatttcaatgtcactactcctgatcttccagcgttacatatccactattgtatggcttgtccgggatactccattggtaagcgcagaaatataagggtgtggtgtgagggaagtgtagacgtggatgataagtcgtatgttatcatcacgttttacgaaattgatgaaagtgggatcataaaacaaattgagacagcaagctatggacagtttgagtacgatgacccgtttatttgtagctatgtttatgttccaagtctgattccgattcagtgattcccgccgtccagaaaaaaaatagttagcgatatgagtgttgtttcgtgttcttaaagctagggttttgtttggctttgtgtttggtgatcgtctaccatgtacatattgaaacgaactaggttattgaaattgacttctggttttggtttttgtatttatgagcttgagaagttttaggttcggtacagagttgtatcatcttccatatattgctaaaactaagcatcattatccgaagacctaaacatttacaatgaacaaatctaacatttcaattgatttgttcatgtgcatacatataaaaagtaaaatgtaactatttgaggaaaaaaacatctaatggcatttgattggaattggtactctaaaaaatcagataaaagcgtatgtaaaccggataattgaattgaaccgaattgcg

SEQ ID NO: 169811 - DNA, 2096 bp, Arabidopsis thaliana landsberg
ggtcagccacagagctaactatcaccacacctcctattgtagccgattatgattggttttcacctgtcttgaatgacagatcgatcgatcacgaaggagttgactctagatcgatcgatccgataacccctgtttcagaacctgcgacaccaaatactcatgattcgatagatccgacttctacttcttctgatgaaaacaatactccacccgaaccagttactcctcaggcagaacagcctcattctccgtcttctatttcttctccccatatcgttcacaataaaggttcagttcatagtcgacatttaaatgaggaccatgattcttcttctccgggacttcctgagctgttagggaaaggtcaccgtcccaagcatcctctggtttaccttaaagactacgttgctcgtacactcttctcctcacacttcttctcccggtctctcagattcaaatgtctcgccaacggtctctggtaaaaccctatctcagattatttaactcattctggtttttcatcaaatcacatagcatttatggcggccattcttgatagtaatgaacaaaaccattttaaagatgatgttctcatcaaagaatggtgtgatgcaatgcaaaaagagatagaggctcttgaagcaaaccacacgtgggatgttacagacttaccacacggcaagaaagcgataagtagcaaatgggtatacaagttaaagttcaatttggacggtacgctagaacgtcacaaagctcgtcttgtggtcatgggcaatcaccagaaggagggcattgatttcaaagaaacctttgcaccagtggtaaaaatgacaacggtccgtactcttcttcgtctagtagctgctaatcaatgggaagtataccaaatggatgttcataatgccttcctccatggcgatcttgaagaggaggtgtatatgaaacttcctcccgggtttcgacactctcatcctgacaaagtttgtcgccttcgtaagtcactatacggtttaaaacaagctcctaggtgttggtttaagaaattgtctgatgctcttaaaagattcgggttcatccaaggttatgaggattactctttcttttcttattcctgtaaagggattgaacttcgcgtcttggtatatgtcgatgatttaataatctgcggtaatgatgagtatatggttcagaaatttaaggagtatttgggacgttgcttttccatgaaagacttaggcaagctcaaatattttcttggcattgaagtaagtcgtgggcctgatggtattttcttgtctcaacgaaattatgcccttgatataatttttgatagtggcactctaggagcgagaccggcatatactccgttggaacaaaatcatcaccttgcctccgacgatggtccgttacttcaggatcccaagccatttcgtcgtctcgttggtcggctactatatcttcttcatactcgcccagagttgagctactccgttcatgtattgtcccaatttatgcaagctcctagggaagctcatttggaggctgcgatgcgcatagttcgttacttgaagggttcaccgggtcagggcattttgctgagttctaataaggatttgactctcgaggtttattgtgattcggattttcaatcttgtcccttgactcgacgttcacttagtgcgtatgtggttctgcttggtggctcgcctatttcttggaaaaccaagaaacaagacacggtttctcactcgtctgcggaagcagagtatagagcaatgtcggttgctctcaaagagatcaaatggcttaacaagtcgttaaaagaattaggtatcacactcgctgcgcctactcgtttgttttgtgatagtaaggctgctatttctattgcagcaaaccccgtctttcacgagcgtacgaagcatattgaaagggattgtcactcagttcgcgatgcggttcgtgatggcattataacaacacatcatgttaggacctcggagcaactagctgatattttcactaaggctcttggtcgtaatcaattcatttatcttatgtccaagttgggtattcagaatcttcacactccaacc

SEQ ID NO: 169812 - DNA, 574 bp, Arabidopsis thaliana landsberg
tatactacgaccatgcgaatgtttgcatatggtgtggcagctgacgcggtggttgaatacagtaaaattggaggtacttctactttagagtgcttgcgaagattctgtaaaggaatcataaagctgtatgagtcagagtatctcagagccccaactcaagatgacctccaaagaattttacgtgttagtgagatgcgagggtttcccgggatgattgggagtattaattgcatgcagtgggaatggaaaacttgtcctacagtgtgggaaggtcaatttactcgaggagataagggagccaccactgttatttctgaagcagttgcatctcatgatctatggatctggcatgtttttttggatgtccgggctcactaagcgatataaatatccgttcaccggtgttcgatgatgttgaacaaggaaatactacaagagtgaatttttttgtgagccaacatccgtataatatagcttactatctagctgatggtatttatccttcttatcctagttaaaacaggtcgattaggaaacctcagagtgaaccaggcaagttatttgtggggcgtct

SEQ ID NO: 169813 - DNA, 584 bp, Arabidopsis thaliana landsberg
  unsure (1)..(584): unsure at all n locations
aagatgatgttcctataagacgacttaaatggggaactgcaagcctcatcgcccgttccccagttaccccaatcgttttgccaataattcaccgtggttttgaggaggtaactcgtccagttcccttctaagtctgcttaactcaataatcgtttaaacttcggtagctaaatgtctgcgggaaagagaaaaagccatgaattatgtatccattttccaaacttcgaatttctgcttgatagtattattatgtcttcattcgaaggtcacttacccacattgttgtaacggcttagatgatgccggagaactacaataatggacgaagnnnnnnnnnnnnnnnnnnnnacaaacaccttaaagttgtggttggtgaaccaattgagtttgatgttccaatgatggttgagactgctgtcttggactcccgccatgtaacccctcctcttcaagaagtgaaatggcctgtcctcacttctgctggccaagtgctagacgaaactgctcagagacacctctacatagctctgtccgagaagattcaatcctccttggaaacattgagactcttagccaagcggttg

SEQ ID NO: 169814 - DNA, 942 bp, Arabidopsis thaliana landsberg
  unsure (1)..(942): unsure at all n locations
atgaggaaaggtaagagagtgataaaaaagatagaggagaaaataaagagacaagtgacattcgcaaagagaaagaagagtctaatcaagaaggcatatgaactctctgatctctgcgatgtccaccttggtctaattatcttctctcactccaacaggctctacgatttctgctccaactctaccaggtttatatataaaatcatacatatgtgtgttcttgttttggtaaaacaaaaagaaaagaaaatgaatgctctttaatatggacagaaaaaaagagttattgaagtttttttttctagttgtaattaatcaataccatcatcacttggtttcatcttttctttttcgttggtttacttctttttttttgtgaaactttcgttgatttacttaagagaaataaaatgctgacaatcttgcctaggaaatgagatgattaatcaaagtgttgcttcatttagttttttctgttcactcgtacgcaagtttgaaatgcttttggtcatctatttttttttcatataatttggtattgtatcctttatatgctttcttgggatattttattatgtaccaggtttaattctatggaaagttatgatctatgtaggaaaagttatgatcttttgtattatggatccaaaagaaaattcatattaaagttcattcagaaataactcatcttgatataaaaattttcttctgttttctagttcctaattttatttaatttttgtaacatcagcatggagaatctcatcatgagataccaaaaggaaaaagaaggtcaaaccactgcagaacacagtttncactcggtaattatttttgttataattcacaaattaatatttatcttcacatgttttaaaatttatgggatgtttttatatgaaatataaataaaaattttgtttgaaaaatttaatttttttt

SEQ ID NO: 169815 - DNA, 471 bp, Arabidopsis thaliana landsberg
aaaaaagacccgaaagaatattctttccgccaagtagggttcagcgaagggataaaacttacatccttcatagccggggcgggccaaccaaagccaaaagaccggtctctttcctcgggtgcgttcgagtaaggctcgcccagctacacgttcagagactagtcgtaataagcatggcatacggttacgcttgacgagatcgaagatcgcgccgaccggacgacgacagcccggacgcgcacggcgtattgcgccggcatgcagatgccaaactccagacgcgactgactagcaagggcctgcaaaagcgcctcctggagctctatctcgacgcgaataccctgtaggaagagcagggcgtcaacgtactgtttctggcgctaggcgcgctcaagtgggtggatcccaacaacgcagagaacgttcgctttgccccgctgttgctcatcccggtccagctcgatcgcggca

SEQ ID NO: 169816 - DNA, 417 bp, Arabidopsis thaliana landsberg
acggtaatcagcacaaggtggtattgattattgaggatgacacggcttttgccaaggctttactgaattttacccgcaaaaggggctataaagggattgtggctgtccggggagatcatggggtgcctttggctgaaaggtataaaccagtcgctattttactggatatccagcttccggttatggatggctgggaagtaatggaagctttaaagagtaatagtgctaccaggcatatgccggtgcatatcatgtcggtcatggaagctaaaaaggaaagcaggcttaagggtgctgtagactttattagcaagccgattgccatggagcagatgaaagaaatgttccagaaactggaagaggtttggagtaagcatcccaaaaaggtactaatcgtagaggaaaatgcctatcatg

SEQ ID NO: 169817 - DNA, 482 bp, Arabidopsis thaliana landsberg
acaatatacctcacaatctttaggctagcagcaaagctccttcatgccaccagctctaagaggcagacggcccatggggttcggaggaaggtttgggatcagcctagaaatatttactgcttattctgtggtgaggacaagggccatactacaagaatgtgccatgtcactattcagaaacaaaaggaaatagcagaagccgaagctcggcagaaccagccgaagcaggtcttacacactgcttcgtgccactctccttacatactagagtatgtgaacaatcatcctgcagcttctgtcgctttggctagccattcacaggcttcttggccacaacgcccacctccgcaccactacaaccgacctattcccgaagccagtagccagaagggcaccagcactctcaacagcaacgggaattcagggaggaatccgaagctcgcacagtcaacagtattgtgccagagtcaaagcacatctat

SEQ ID NO: 169818 - DNA, 282 bp, Arabidopsis thaliana landsberg
aaacagagccaccaagaacaaactaagaagaagagtaacaatggagatcaataacgagaagaagaaactctcaagacaatcttcttccttgagactacgaagtccaagtctaaacgctcttcgtctccaccgactctttgacctattcgacataaacaacgatggattcataaccgtcgaagaactaagtcaagcactctcaagactcggtctcgacgctgatttcttcgatctcaagtcaacagttgattctttcatcaaaccggacaaaaccggactccg

SEQ ID NO: 169819 - DNA, 396 bp, Arabidopsis thaliana landsberg
acgccatgcccatgtcgtgggccgccttcgcgaaccgcacgacccggtcgcgcctctccgcttcgagtgccgcgaggccacggaggcgcgggccggtctcgaccttcgtgccctcccggcccaccgcgtacgtcgggccgaccagcccgtcgacctcctcgtcggcgacctgcagccgcagcagctcgccgtagatgtccgcccgggtcaccgcgacccgcagctggtccatgaccacccggcccgggttcagcggcgccgcgtcccggccggcctcggccgaccaggccagcaggttcgcctcgccctgggtccgcgccaggtcccgcgactgggcgaggtgcatccggcaccgatccagcccacggaccgacaccccgtggcaccgagactgcg

SEQ ID NO: 169820 - DNA, 400 bp, Arabidopsis thaliana landsberg
  unsure (1)..(400): unsure at all n locations
ctctctcgatacaaaaactatatattttataatatataggaaagctggaaatgggacatataaagcancgacatggcaaattaagtttaatttgaaagcagtgattcaaactagaatatacacacttcgaatagctttggctgcagcctcaacaattgatctactggtttgggtcaacgaagttgattccaaacctctattcataactgggctaatcggtcgggataacgcgatcgcgaggcatgggattcatgggttgtacaaattgtacaatatcgatgttcatggaaagttacttagggttggtaataatactatttttcttactcatggtcggaactctgattctttttcaggtgtaatgtatgattatcttcgtttggaaggtccttccggagtt

SEQ ID NO: 169821 - DNA, 367 bp, Arabidopsis thaliana landsberg
taaacttatatagttttatacatgtgatctgatcatatcagagcggccatgttcaattttattggaggacatgaggttctccaattccacggataattcttaattggcattcttatctatcgacatgacacgatggcggcgcacggagacattaagcaacatggcatgataaacggtagccggacgcaattggataagcatgagccacaattggggagcctcttaccaagctttttcctctctctatggtcaatctctctctttccgggtcacttcttacaccaccggtgaaaccatctatgcttggaacgttgctccggctaactggagcggcggtaagacttacaagagcaccgctaattttcgt

SEQ ID NO: 169822 - DNA, 3480 bp, Arabidopsis thaliana landsberg
gcaggaggggagacagtggcatggagttacttttgcagagatgttgtgccgttcactgcaatggtcgcggtggagtgtgttacggttggatctaatacactgttcaaggctgcgacattgcgaggattgagcttctatgtctttgtcttctatacctatgttgttgctacacttgttcttcttccactttccctcatttttggaaggtactgatctcttcaagtactcttgaccagtataaaaatttcaagaatgtgaacatagtttatgtgcaggtcaaaacgattaccttctgccaagacccctgtcttcttcaatattttcttacttgcgcttgttgggtaatgatatactccttatactaccagatttagcctcatttaactgtttttcttttctagtttgctaacttttgggaaacaggttcatgtctctgatagttggttgtaaaggtatagaatatagttcaccaactcttgcctctgctatcagcaatctgacaccagctttcacatttacgctcgccgttatcttcaggttccacctctttttctttcgtttccgttctgggatagtatatagataatttagttaacaatgcggtagttccacacttatttaaccgttcaaagttttaagccttttgcttttgtcacagccactagtacaagtacaaccttgtggttgcataaaaaatgttgtgcccacatgttgttctaagagacagagagaaatatgggtaaactagaggggtgtttgtttctatcagctgaacatttaactcttgttgttactgcttccttgtgtgactcaaaagaatggaacaaatagtcttaaggagctccgcgactcaggccaaaatcattggcacgatagtatctatatctggtgctctggttgttattctgtataaaggcccacaagttctcgcctttgcatcttttacaactgtattacctaccgttacacttcaccagcatttgacctcaatagagtcaagctggataatcggagggctcttgcttgcttcacagtattttcttatatccgtctggtatattcttcaggtacaaacacttgaaaatttcactaaaaaagactttgggtttacacattaaattctgtagctgtatatggtttcagactcgtgtcatggaggtttaccctgaagagataaccgtagtcttcttctacaatttatttgcaacactaatctcagtaccagtatgtctttttgcggagagcaacttgacttcttgggtgcttaaaccagacatttccctcgctgcaatcatatactcggtgagaagaatcagatcttataatctgcttcaagaactgaagattttataaactcagaaattaacactttgtttcagggagtcttcgtttcattattcagcgcgcttacccacacatggggtctgcatctgaagggtccggtatacatatccttgttcaggccattgtctattgcgattgcagtcgccatgggtgctatattcctcggcgatgcacttcaccttgggaggtaccatctcttttatcttcttactttccagcgtattcagaatattttatctgtactgagaaatatagtactcagctcttggtagttgaaatgctatctatggaatcacatttagagagttatatggtttctggattctattctacatgagctctcatatatggtttcttctgtattatttcacatgtgagaaacacttagtctccacaattccactgtatatctctgtgtaaactgcaataagcattttgagacagtaataacgtatagaagttttgcatattttgtgttgggcagtgtcattggatcaatgatattgtgcattggattctacactgtgatttggggcaaagcaagagaggatacaatcaaaactgtagctggttctgagcagtcacctttgctgcttacacatatcatagaagatggagcctttccattaagctaggattgatgcaagtgaaatccttatactatttattaataaatatggatccctaaaagaggtgtaccatatatgtttatatatgtctatagctacatataagatatctgttctttttttcttgttttattttgatgttacatatgaatgagaattatgaatctataagaaatatttggtccttttaattatcttatcagtgcgttcacaaccttacataagtttctggtagataaatccctgccctctttgaagagtaaaagaggtagagctccatggccaaatattatctttctaaggtatagagctttctttgtagatgcgtagtttcttgatttggaagacctcgtcagcagaagcagatgcggaactgagaagcgagctgagggatttgctggcagcgcaagaagcaggaactgcgtttatattgggacattcacatgtgaaagcgaaacaaggatcatcggtgatgaagagattagcagttaatttcggttataatttcttgagaaggaactgtagaggacctgacgtggctcttaaggttccacctgtttctcttttagaagtcggcatggtttatgttgtttgactcgttgatcttacttgatgtacaggacctaattccttgtttgtaagtccgtcgcgtgtagtcccagaattctaggtatccctgcttgttaggtaggggttcacatctgaacacttcttacgagctacccggtcagaggatccgaccatcaaaatgaaaactcttattgcctactgtcattgttgctcgtagccacattattattattggtgttattattttgatgactggaaccgttcataatggacgtgatcgctgccgctagagccgccgcaaagtttggatcggacgcaattgctgcactggcagcactaacgctctcggccaccgaggaagtggccgcgatctgcagtggctgagccggtaactgtaaaccagaaaacttggactgttgttggttattgtacatagcttgaccaaccacttgaggcaaaactgccgggttgaaaccgggccgttgagcgaactgcatcaacgggttattagtggtcatattagggttgttaccgttgggtgaattggtgaggtccaatgtgatggttgggaatggtgcggaggctgagattgtagccatgcttgaggagcaaggcaagatagctcgagctaggaggtttgttgggttcattaaaccgtcttgactcgacattgagcccgagaggagcatgcttgcagctgcggtggttgttgaggccatggccatagcggctggtgggagtggatggttgtggtttccttcgtaggtggttatgagaatagatctgtcttctgcgcaacgctgcacctgttaagacatcattggttacggcttcctttgtttcaaacgcaaattatatagtagatcttaattatatttttatataatcatgccgacgtaaaatgtaaaagcatacgtacttgcttgcgaactggaca

SEQ ID NO: 169823 - DNA, 352 bp, Arabidopsis thaliana landsberg
atgagcgacgtcaccggtgatctcgcggcggtgagtgaagccaagggaggttctgacgccgcccggatatcggaggtgaaggcgtggctcacctctcagttcgaagctgtcggcaaagaagtacccaatttcgagtacactcatcgaagcattacccatttgtataatacggctaccgcttctcaagctaagtctcaggctgccaccattgtcgctaacgactttcgtctcaaggcttcagaatatcgtgctcaaggtacttgcttgtaatccttaactcctaatttgctcgcgtggctgacacaaattatgaaaatctccttttgggccttatcaccttcttgatctcgta

SEQ ID NO: 169824 - DNA, 553 bp, Arabidopsis thaliana landsberg
aaaataaaagtctatgagggtgatgatgatgtggataacgccgattatgatgatgaggggtttattgatgatgatgaagataatgctgacaagggaaagtcatcgaaacccaaagaagaaaaggcaaaactcagaagtttgggaacatttcgcattgattaccaagattaatagcttgaggaagagtacaatgcattcatttgcaagaagaattatgcgtacaatgctcacaaaattggtacaaacacatttagacgtcatttgcttaaatgtaagcttgtgcctaaaaatggtgatattgggcagatgatggttaattcggaagcaagattgcaagctagaaagataaatcagcatgttatccagcacgatctgccatttacttatgtggagtatgatagagttagagaaatttggaaatatttgaatccggatgtgaagttctttagtcgaaacacagcaactgcggatgtttataggttttatgagtcaaagatagataagttaaagagagaattagcacaagttctggaagaagagctcactcatattt

SEQ ID NO: 169825 - DNA, 508 bp, Arabidopsis thaliana landsberg
atggcccacatatcagatattaaactgataagaacagatactacacttgatcttagccaaaaggccgagaaaggtatgaatttttcgatgggctcagcttcttacttatactactaaggttatgacaaactctctctagcttgtcgatgtgggactttactcattgcatcgtcaggaggtaaatacaatcccatccgtacgttatcttctcaccaaatccttgaagctacaaacaacttcgactggagctatgcaatcggtgtagacagattcgtgtggtacaaaggtacgattgaaaacagagccgtgctgatcaagtactataaaggtgaaccctttaactttgaccctgacaacttctaccgtgatattgcggtttcatcgatgatgagcagccataagaatgttctcaagctcttggggtgttgtctagagtttcctcgtccggttctcgtgtgtgaatacccagaaaagggagctcttgcctatataggaggtgcgggggagg

SEQ ID NO: 169826 - DNA, 237 bp, Arabidopsis thaliana landsberg
gacgttcttatcaaatctatccaaggagacattaccatgagtaacataatcaacctattacaagacattcgcttttggaggcagaaattttgacatgttcttttcacatgtgttaagaaagactgtaataatgtagtccatcatttaggtatgctagctcgtagtcagcccttatttttggttggctatgtctttccgccgatttggctttatgaacttctgtgtattgacgtttca

SEQ ID NO: 169827 - DNA, 223 bp, Arabidopsis thaliana landsberg
agagtttttcactgaacagttgtttgcacaaccttgggccgaggtattggctatgggcgactctttattctcagctcttgagcgcatggtggtgcgtcaaggtacagcttacaggcttacatggaatggggcccatcccccatgtatattaatccataacatatataataggtgcgaagagtgctacatattcttttgttccaaagaattctgtcggcgctgt

SEQ ID NO: 169828 - DNA, 750 bp, Arabidopsis thaliana landsberg
aggagggaatctacaagagaacgtcccagatatcaagctcctaatcaaaaactatagcctgcaatggagagagaaatcttacctacagactgtggcttacacagaccactcaacctcctctagagctaggaggccgcctctagagagaacatcttgtgcaggtgaatcttcccatcaaccacttcccataccaaccactgaggaagttatggacgaattaagggagatcacagttcaatatactagctgcgctgatccgacagagattttagcccgcaaacagagagtcctgcaaggggaaaatcgtgggttaatggcagaaactgcagaacaaataattgctacagcagcaagactaaaccaactctctgagctaccaaaccaagacaaatcgggggctaccttaccagagccattaacagagaacaatctaccagaacaacaactagaagaaccatccctggaaggccccctcttgcaaaaccaatcaacaaaagccccattcatctctcaggggccaaagctagcaaaagaaacaaagttctggttcaaaattcaccaagaagaagagtgactgtagcaagcgctgctctacagaatattacaaagagaaaaccagctaagcaaagacttacattgatagatgaggaggctggtccgtccaatagcagagcaccaaaccaggctgttattattcctgcaatagtgaagaatatagtggattttcagaatccacagttttctcttcct

SEQ ID NO: 169829 - DNA, 637 bp, Arabidopsis thaliana landsberg
gagatacactgtccaagcatacactgatatgctcatcggttggaaaactaccttcataaatgtatacaacacacatttatttataactttttttcttcataatattgttctacctataatgattattttgtatgaataacagagtctatatgatctaggagctagaatatttgcaattcttggaacgttaccgttagggtgtttgccaggggcgagacaaattaccggaaatttgatatgtcttccgaatgtaaactatggtgctagagtttataatgacaaagtagctaacttggtcaatcagtacaaccaaaggcttcccaatggcaaattcgtctacatcgatatgtataactcacttcttgaggtcatcaataatcctagccaatacggtaaaacattgagtaacacacgcaaattttgaatatatatggtagaaaaaacaagggtgctaatttctacattgtaatacatttcagggtttacgacggcaaaaccatgttgttgctcggtgatgactccgattccgtgtttaagatctggtagtcacgtgttctgggactttgcccatccttctgaaaaagcctataaaactgttctacctaagatcctcagtaccatccaaagcaacctcgcc

SEQ ID NO: 169830 - DNA, 364 bp, Arabidopsis thaliana landsberg; identical to SEQ ID NO: 76029
  unsure (1)..(364): unsure at all n locations

SEQ ID NO: 169831 - DNA, 388 bp, Arabidopsis thaliana landsberg
ggcgccgtcctggcgcacgaactcgcgcatgtctcccggcgggacactctcgtctcgttttggtcgtttcgggctggcgtcgctggtggcgttcgtcccggtgccgttgacggcgctgctggtgcaggtcacggcgccttcggcgcgggagtaccaggcggacttcgacggggcgatgctggcgggcgacccgatggcgctggcgagcgcgctccagaagatcgaggcatcggccaccgaactgccgctgccggcccgcggcttgctcgccgcggccggccacctgatgatcgcccacccgttcccgctgcgcggcctgggccgcctgttccgcacgcaccccccgacaacggaacgcgtccgccgcctggaatccctggccggctac

SEQ ID NO: 169832 - DNA, 400 bp, Arabidopsis thaliana landsberg
accctcaaagtcgcgctgctgcaggaaatcgatcacggcagcgtcgctgccaatctcgacgcgatcgaagccggcctgcgcgcagccgccaaggctggcgcgcaactggtgctgttgcaggaaatccacaacggcccgtatttttgccagcacgaagacgtgcgcgaattcgagcgtgccgaaacgatccccgggccaaccacggaacgcctcggcaagctcgccgccgaactgcagctggtggtgatcgcgtcgctgttcgagcgtcgcgccgccggcctgtaccacaacaccgcggtggtgttcgattgctcgccggcaatcaccggcacgtaccgcaagatgcacatcccggacgacccggcctactacgagaaattctatttcacgccgggcgacc

SEQ ID NO: 169833 - DNA, 542 bp, Arabidopsis thaliana landsberg
agcgaaagcggcagcacatggcatcccacatggcggcgaccgccttcgaactgttcgagaagtccggctacgaggccgtcacgatggaacagatcgcggccagggccgacgtggcgaaggccacgctgtacagctacttcccggtgaaggaagcgctggtcgcgcaccggctccgggacgaaatcgccgagggcatggccgcgctcgcggaccggctcggcacgcatcgcagcttcgtgtcgcggatgcggttcctgttgcgtgaatccgccgcatggcacgccgagaggcgcgtttacctgccgcactacctgcgttacctgaacagcatcgcggcgtacgccgccgacgacgcgcgcaaggaaaccggcagcaggctgacgtgggacatcatggccgcgatgttccgtgccggccagcaaagcggcgaagtcgctgccaagcttccggccgaccaactggcctggtcgctgcaatacctgctgtaagacgcggaaactcactggctcgtccatcccgaagcggacctcgcccgggaattc

SEQ ID NO: 169834 - DNA, 253 bp, Arabidopsis thaliana landsberg
aagatgtcgataatgataacacaccgttacatggtcagaaacgtttatgccgttccgtttcatacaaaatacggatttggtttccattacttctcttgtctctttggtttacatgatgtaaagttggttcctttcttcggcttgaaacgtttttattacccacaaaaagttctgtataactcgaaaccttcaaattctaaaccggttaatgagaagccgattcaagaaccgagtcaagaaggagaattgtttg

SEQ ID NO: 169835 - DNA, 723 bp, Arabidopsis thaliana landsberg
  unsure (1)..(723): unsure at all n locations
acggaccggaatggcaaatgctaagaaaaatttgcattaacaaaatgttaagcagcgccacgttggattcaaattcttttagtgcacttcgccgccaggagaccaggcgaacagtccggtatttggcagaccgggctcgggccgggttggcgattaacgttggagaacaaatatttgtcacgatattaaatgtggtgactcagatgttgtggggagaaactgttgcggacgacgaggagagagagagagagttggagctgaattcttggaattgattacggagataattgatgttgtgggaaagccaaatgtctctgatttttacccggttttgagccggtttgatcttcagggtttggctaagcgtgtgcgtagatcggctcagaggatggaccggatgttcgaccggattataagtcaacgggtgggaatggataagggaagtaaagggaacggtggagattttttgatggttttgttgaatgctaaggatgaagatgaaaacatgtccatgaaccatgtcaannnnnnnnnnnnnnnnnnnnnnnnnnnnnnnnnnnnnnnaatattgctacatgatattattggactttccgagctcattccaactcccttttgtattatattgtctactttgaattaagtccgcatgattttgttaaaggaaatgcttctcaaaatacttatactagatagaattggatttggtttatatatataaac

SEQ ID NO: 169836 - DNA, 1139 bp, Arabidopsis thaliana landsberg
tgggtgatgaaaaggtgctctaccactgtagcccctcaggcattctccaacgatgcatatccatcgccgaagacatgagctattgcaagagatacactcggggccttgcggtcaccacgcagcacctcgagccctcgttgggaacgccttccgacaaggcttttactggccgaccgtggtggtcgacgccactaggattgtatgctcctgccaagggtgtcaattctacgcgagacagacgcacctgcccgctcaggccctgcagacaatacccatcacctggtcgtttgctgtgtgggggtctgtacctcgttggtcccttgcagaaggcacccgggggcttctcgcacctgctggtcgccatcgacaaattctccaagtggattgaggtccgacccctaaccagcatcaggtccgagcaggcggtggtgttcttcacaaacatcatccatcgctttggggtcccgaactccatcatcaccgacaatggcacgcagttcactgggaagaagttcctggacttctgcgaggaccaccacatccgtgtggactggtccaccgtagctcaccctatgacgaatgggcaggtggagcgtgccaacggtatgattttgcagggacttaaaccaaggatctacaacgacctcaacaagtttggcaagtggtggatgaaagagctaccctcggtggtctggagtctgaggacgacgccaagccgagccacgggtttctcgctgttctttctagtctatgggccgaggccgtcctacccacggacttagaatacggttcccccgaggacaaaggcatacgatgagcaaaacaaccagactagccgagaggattcattggaccagctggaagaggctcgggacgtagccttactacactcagcacggtaccagcagtctctacgacgctaccacgcccgaaggatttggccctgaggcttccaagtgggagacttggtcgttcgcctgcgacagagacgccgagggcgccacaagctcattcctccctgggaagcgcccttcatcatcaccaagatcttaaagcccggaacatacaagctggccaacgaccaaggcgaggtctacagcaacgcttggaacatccaacagctacgtcgcttctaccct

SEQ ID NO: 169837 - DNA, 382 bp, Arabidopsis thaliana landsberg
actgtaagtcaaatactcaaattagacaatttactcattctttgttcattgctcgaaaccaaccgggtattttggttcaccgagttcggtttaatttgataatgtctcttcgttatttccggttaaagatacatgaagagggaacatttggcagacgtaacagagttatacaacacatataaatgggagcaaaagaaacgagtgtacaagattggtcatatagctctctccatttttatcacaacctattggtacatttctttctcttatatatatcactactaattttcatatctccattgtttacgaagctaaatccaaattgttatttttctctatacttttcggtttaaggttgatccactcggcattaggagacatc

SEQ ID NO: 169838 - DNA, 368 bp, Arabidopsis thaliana landsberg
agcaggtgttgaagctgattgatcctgataaagtatactttgggaaacgagttataactagagaagcttgtccttttaataagtcacttgatcttcttgcggctgataaacgtagagtggtcattgtggatgatacggttcatgtttggccttttcacaagagaaacttgttgcagatcaccaaatacgtttattttaaagtcgatggaaccaagtgggattcggacgcagaagcaaagaaagatgagagtcaaagcaatggatcattggctaatgttctgaaattccttgaagatgttcacaaaagatttgaagaggatttaggttttaaagatttgaggctattgataccttgtagacaatgctgc

SEQ ID NO: 169839 - DNA, 414 bp, Arabidopsis thaliana landsberg
ttcaacatgggaggcaaaaaaacaaagattgagattaagaagatcataaacaaacccgcaaaaacggttgctttcacaaaacgcagggaaggtctcttccgcaaagcttcacagctttgtctcctctctccagccactcaaatcgcaatcttagcggctcctatgacttccaaatctcacgcttctttctactctttcggtcattcctctgtcgataacgttgtctcctctctgctttatgaccatcctcctcttacggcaaaccaagacaacaggtcagggttagggttttggtgggaagacaaacgttttgacgtatcggagaacgttgaggagttaaaagaggcggtcgatgctgtttcgaggatgttgaacaatgtgagatgccgattaaatgatgccgtgaagagtact

SEQ ID NO: 169840 - DNA, 257 bp, Arabidopsis thaliana landsberg
  unsure (1)..(257): unsure at all n locations
gagctatacaagcttcatggggactaggataccgctctgtgataatagaaggtgataagaaaatcattaaccacgtcatcaatgcgaacggcaacaattttcgactcaaacactatatggggacaatacaacattggagaagtagtttcatgaactcaagattcaccttcacccatcgtaaacaaaataattgtnnnnnnnnnnnnnnnnnnnnnnntattataagtccacaaccttggtctttgtatcatacatgc

SEQ ID NO: 169841 - DNA, 404 bp, Arabidopsis thaliana landsberg
aactccccgaattggtttttagttttattagaaaggtaaaggaaagcacaaaaagtttcgaaaggaaggatttcattataacaataggctatagtggaagatatgattttttacaagcatgcaaaagttttgcaaataaagtgaaagacgggctgattcaagtggaggacattaacgaaaaggcgatggagaaagagttgttgacaaagtgtagcgaattcccaaaccctgacctgttgatcagaacaagcggagagcaaaggatcagtaacttctttttatggcaatctgcttacactgagctttactttccaactgttttgtggcctgattttggcgaagctgagtatcttgaggccttgacttggtatcagcaaaggcagaggcgattcggtcgacgagtt

SEQ ID NO: 169842 - DNA, 387 bp, Arabidopsis thaliana landsberg
atgtccaatgccattagagcttcttcgcaaaggacatggcttggtcacggtggattaagaagctgcgtcaccgtcaaaacaccgtcggaggatgaagaggagaagaagaaagagataactatagcggaagcgaagaaactaatgaggcttgtgaatgttgaagacatgaagaagaagcttgttggtgtggctgatagagatgttgtctcttactctacacttttagaagcttctcaaggaatgggtatcgctagatctcccgatgaagctcatgtctttgctcgtgttcttgacgatgctggcgttgtcttgatctttcgtgataaagtctatcttcacccagacaaggtcttattagaacacaaaaacagaacttaactctgtttt

SEQ ID NO: 169843 - DNA, 1583 bp, Arabidopsis thaliana landsberg
  unsure (1)..(1583): unsure at all n locations
ctaactactatgacctaggtttcttcgcgtgttgtggttgttgcccacaatgaagtagtttcatctacaagcgttgcgaaaaggattgggacttttaactagatgcaaggtgtgcttcgcttcctgagcctataatccatgactgtcatccacatgatcaccctctcttcttcaatttgaccgaaggtgaatgcatggtttgtaagattacatccggattaagnnnnnnnnnnnnnnnnnnnnnnnnnnnnnnnnnnnnnnnnnnnnnnnnnnnnnnnnnnnnnnnggtggctcactacaagtacgataaacatccactcactctttgctgtggagaagaaaagacaaaagatctccagtattggtgcgagatttgcgaatcagaaatagatgcacaaaagtggttctacacatgcagctattgctctgtcactcttcatgttacatgtttactgagagataaggtctacatgaagccaaaccatatgatcaagatgtacgaaggtgcaaaaacaagtattggtattgtacccaacagtggtaactctagaccaatgtgtgatggatgtagaagccgttgtgtggacactttggtagtcaagacgtctgggaaaaactattgtactatcatgtgtttcttcgatatatattatccatggtaggacttctccaatggaaagataggctgaagcagcgacgtagtgttgaatttaaacttcggttttaaattaagaaaacacttatggtggcttctaaggaattagagctaaaaccataatttacatagaactttgaatgaaactaagagattttgcatggccagtagtatagcctccaaggatctgatggtagttacctcttggaaggaacttctactctttttctgccatatgactgcgaaatgtatcaatgttcttttctaaagttaagaaaatctcagcttcattttgatgccttgaatcaataactttctttccaagttacagtgctctcttcccattttccgtttcgggagtattaaagaaattattaaacaatctccttttttacgataagaaaaatttctattttgttaatggaagatttggagtccttttcacttgtattttcctttcttcttgggttaagcctcctataaatatgttttgcatctaagaacacaagacataaacaatttttctttctactatcaaaagatctagggttaaaattttagcaagatgaattatgccagagatgaactagacggggctatgatgatatcaaagactctaacaaagagtgacattgttggtaatgtggcattaccaaaagcacaagtgatgtctgtcctcacgaggatgaatggtgtcacagatgagggtttggacaacggttttgaagtgcaagtccacgacataatggaagacgatctatacacagttaccctgaaaagaattgacgacatgaagtattatttcgggactggttggagtactatgaagcattcattagatctcgtagaaggcgatgttctgaagctctattgggatcagtttgaaaacaaattcattgttctcaattttcagcataagactatggga

SEQ ID NO: 169844 - DNA, 559 bp, Arabidopsis thaliana landsberg
cagatttcactttctgatattctagaaaacaagatgcagtttcaagctgctgagatagaccggctctctaatgacaaccgaaaactagcttcaagctacgtagctctcaaggaagacttaaccgtggctgaccgcgaagtccaggggctaagagctcacatcagaaagacggaaacagaccacgagattcagatccgatcgactcttgagaaaatagcgaaaatggagggtatggtcaagaatcgagagaatataaggagggaagtgcaatcagctcacattgaggctcatagattggcgagagaacgtgaggagcttgcttcaaaggtgaagttgggaatgaaagatttgaagaaggtttgtcttgaggcagagagtttagaggcgtcgagtcaagagcttgagcggttgaaagaggagcatcagagattacggtaaaagaattgtcttttacgtgtcaagtaactgttaaagattcatcatcagtttttttaaccaattggtttgatggaacaggaaagagttcgaggaagagaagagtgggaacgtagagaaactc

SEQ ID NO: 169845 - DNA, 216 bp, Arabidopsis thaliana landsberg
ataacaaaaagaaccgtattataccacgccatgttctattagcggtgaggaacgacgaggagctagggacactactcagaaggcgtaaccattgcacacggcggtgttttaccaaacataaacccaatactcctcccaaagaagtctgagaaagcagcttcaactacaaaaacacccaaatcaccatcaaaggcaaccaaatcccctaagaaatct

SEQ ID NO: 169846 - DNA, 284 bp, Arabidopsis thaliana landsberg
  unsure (1)..(284): unsure at all n locations
tattcttcattccgcactcaaccagacactcgagcataaggaagaaaagttgaccctttctattcactcgacctcccnnnnnnnnnnnnnnnnnnnnnnnnnnnnnnnnnnnnnnccaatactgtgtcgttttaagtattagggttttcgaatatttggctataagtagcatgtcttcgtattttcccaaacaagtttttatctagttttattctggagacactgtgttctagacctttgtaatccggatttctctttatctattcagtattcagtatttgttc

SEQ ID NO: 169847 - DNA, 491 bp, Arabidopsis thaliana landsberg
  unsure (1)..(491): unsure at all n locations
atcatgagagcgaacgacgcgnaaataacttcgtgactcgtaagatcacgatcggcttatccaaaataaagcttggacaacaggaactactcgagctcggtaatctnnnnnnnnnnnnnnnnnnnnnnnnnnnnnnnnnnnnnnnnnnnnnnnnnnnnnnnnnnnnnnnnnnnnnnnnnnnnnnnnnnnnnnnnnnnnnnnnnnnngaaacacataccgtccgggaattcgtggaagcagcatgcgaagaactcaacatcgtccttgagtggcatggagaaggatcagatgaggtcggtatagatactgccaccggtaagagcatcatccgtatcaatccacgactcttccgtcctactgaagtggatcttcttctcggtgatccgtctaaagccagagagaaacttggctggcaggctcggaccacattcagcgatttggcaaaactcatgactcgcgcagattttgcccttatgaaaagaacaggaggt

SEQ ID NO: 169848 - DNA, 541 bp, Arabidopsis thaliana landsberg
ttttgacctcgagaagcaaacttgggagtctttttcaggtttgtgttttgaagagttgtccaagataacgctcagagagtggtgtgatgaacaagaagatttacataatggatcgtggaaatggcattgttttcgatcctaagaaaggtgtatgggagagagacttcttattggatagagattgggtagttggttcgtgcgttattgacaacatgttgtatacttttggttttgacagtgtaaaacgtatttatcgagtacgtgtctatgatccaagtgttagggtgtggagtttcgtgaaaggtattgaagatataccaaaaatggatggaactcttgggtctagaatggcaaatcatggcggaaagctcgtaattttgctcaaccttgataaaagtggaagaacagagctttggtgtataaaagttgcactggaaaggcgaggacaacaggagagatttggggaaagattttgtggtctaatcttgtgctaactttggaaaattcatcaacaattgttgaatgtttcgatataacgatt

SEQ ID NO: 169849 - DNA, 440 bp, Arabidopsis thaliana landsberg
atggcagcaggcaagcctcgatctatatccgggtcagatcgaggtctgtgatttgaccacgtcatcgagatctctaacgataagctgtcaagactctagagtatggaaacctagccaagaaagggtgcacgcacgggcgttgtagaacttgctgcaagagtcacgggctccactgacccacccacgtgaggagcacgtggatctccattcctaaacaccatgaggagcacgtgcagctacagacgccaacctccaacccaaccggctactttagactcatcaggtttggtttcactagtttttcattgttgttgcgtaataaatctttatttgtactagataatgcatcacttttactttgatcaaatatcatttgtaaacgggtcaaagaaaaagatctccgaaaaacataatatttcaaaatgttaacatgcatgtat

SEQ ID NO: 169850 - DNA, 784 bp, Arabidopsis thaliana landsberg
gagttacttattatatcttcttttatgcgtaacaggtgtatgcctaggtaaataagaagcacacaacagaagcagctgtatcaacttgtctgttcttgacttgggaaaacttgaacgcaccaatcgcaaaactcagagattagtaatggctgacagagtcatcacagcggatgaggaaggagttttgagagatgaagatgggcaagcctacaatgaggctggtcagagattagatgattatggactcatcctacctgaggacgccaatgaggatcaggcgcgcctcaatgcgcaattaactgccagagagcagcacggctcggtgtcgagcgacaccaactgggtgtcgatcgacaccttcaagagcagaacgcagatgcgattggtgtcgagcgacacaacagaggtgtggaaccacgtcgtactcttggagatttcaacaggccagacctgttctatgctaatcgatctgcgatcgttcccccaccattctaaaggaacgactatgagctgaagcctggttcctttgctctcctaggcaagcatcctttccatgccttatctcatgataagccaattgaccatatcgagcgttttgaggcccttgtaatgagcattaaagctgatggagtctctcataattacttactgtgtaagcttttcccttattcccttgttggctgaaataactcaaagcaggttccctcaagacttggagaagcatcaagacagcattttagaacaatttttacgatgatgctaagtctgaggagtttttaaggct

SEQ ID NO: 169851 - DNA, 1889 bp, Arabidopsis thaliana landsberg
atgtttgaagaccaagcaagggattaccctccaagactttacccaaggaggattctaatctggaggctaaagccattaatcacaacataaagttgggagatttccctagaattagagaatcaataggacaagatatatgggatgaactgaaagagacaccgcttggattaattgctaagcttgttgatagtcattttgtatgggctggtaagaccgtacattatctactatgcagacagttgagaatactgaagatttagctttggtgtctcgtggctggtcaacccatccggtttggattgaacgaattttgccatatcacgggtttaaacacagatccactgcctacagaaaagatgagcctgaagcggactacaaagcgtttttcagggaattgggtgtgccaaccagtgaaggtcctaagttagaagaacttaggcaaagcttagtaatgtgcagagcatggcctcctaaaaagcgtagatggtttgggttattgactcttctagccattggactttatggcttgcatcctaactctaggataccatttgagagtgccaaaagagtctttgatgatgaagccatgaagacttatccatggggtcggacagcatttgaagcccttgttgtttctataaagttgctgagacctattggcaagacgtacaccatcagtggtatgacttttgtgttgcaggcttgggcatatgattcaatcatcaccaataccgagcaatttgggaacgtagtcaaagaggatgagattccgttgcttagatggggtggcaaccgtacccgtgcaacaatagaatcgaccatcgcttgagatatcaaaacgcatggtggtgaggtaaggttttggctctgttatgatagttattgactgagttatgttctgttatggctgagttatgttctgttttttatcaaatatttatgttacgactgagttatgctctcttatgactgagttaatgttctgttttttgtcaaatatgttatgtgacgtctgagttatgttttgtgatggctgagttatgttctgttttttgtcaaatatgttttgtaacggctgagttatgttctgtgatggctgagttctgttttattttttgtcaaatgttatgtgacggtagagttatgttctgtgatggctgagttctgttctgtaatggctgagttatgtgtctgtttttgtcaaatatgttatgtgatggctgagttatgttctgtgacgactgagttatagtacgactgagttaaacatactgatgggttttattatctcttgtgttgtagttgcgtgtgcataaaatggttatgaaggatgatgtaagcgagctgtttcatacttggccagatgaagtagaagacctagcactcgatcacttgatcgaaggcatacacggggataagcttgttaaaggttattgggatgtgaagacgagtaagaagaagaagaaactcgtaaaagataaagatgcggatgtgtctgaatctcccgcaaagaagcagaaagtctctcaaagtgagggtgttcattctcgtgagaaagatgcccaaaagaagaagaagaataagaagaaggaagtagccgtcgaatctgatgaggacgaggatgagcaggatgttcggggagaacaacagtcgctcgtggatgtggtgtccaacttgatctctcccttaagctcaaggtttgacaccattgataataccatcaaagaaatgtcctcctgtctgcaagtgattggagttcaagtagaatggaggattgatgcaaagtttgaaagaaggtttgcatctattgagaactaggtcaaacagatgaaagagcatctgaagggcatagctgactcagaattaaactctagcttaattagagatat

SEQ ID NO: 169852 - DNA, 545 bp, Arabidopsis thaliana landsberg; identical to SEQ ID NO: 63619

SEQ ID NO: 169853 - DNA, 561 bp, Arabidopsis thaliana landsberg
  unsure (1)..(561): unsure at all n locations
ctcacgccgcgcccgttggaccgcgaccgagacggtctggtggccgcgaaaggtgcggtcacgctgatcttggaagacctcgaccacgcccgcgcgcgcggcgccaccatccacgccgaagtggccggtttcggcaccaacagcgacggcgcgcacatctcccagcccagcgccgacaacatggccgccgtgatgcgcctggcgctggccgacgccggcctagacgcgtccgccatcggctacgtcagcgcccacggcaccgcgaccgaactgggcgatgtggccgaatcacaagccacgcacgaagtattcgggccgcgcatgccgatcagctcgatgaaaggcggcttcggccattcgctgggcgcgtgcggcgcactggaagcgtggctggccatccagatgatgcgcgaaggccgcttcgcgcccacgctcaacctcgaccacgtcgatccggcctgcgccgaactcgactacatcgtcggcagccaacgcgcgctcgacatcgaatacgtcaaaagcagnnnnnnnnnnnnnnnnnnnnnnnacaccagcctgatc

SEQ ID NO: 169854 - DNA, 532 bp, Arabidopsis thaliana landsberg
ggtgatgctgctcgcgctggactgcctgcgcgccaccaagtcggggccgctcaccgtggacatggccgatgcgcgcatcgtgcgcgcgctgctgtccgggcaaacgctggcgccgccgcagctcgcgcaggtgcacgccgcgctggctgccaaggactccacggagctcgccgcgctgacgcgcaatttcgccgcgccggcgcgcgaagggctgcaggcgctgatccggctgtacggcgacgcgaaggtgctggacgaggcggcccgcgtgctgccgaagtcggcgctggtggacgaggcgctcgcgcagctgcgctggctggccccccacgtggacggcgacgtccgcaccagctacgacctggccgacctgcgcggctacgcgtactacacgggcgtgcgcttcggcatctacacgccgggcgcgagcgacgcgctggtgcgcggcggcaactacaacgaggtgggtgccgtgttcggccgcaaccggccggcggtgggcttcagcctggacgtgaaggagccgtagagc

SEQ ID NO: 169855 - DNA, 662 bp, Arabidopsis thaliana landsberg
aaacaatgatcaacaaggctaatgctcttgggaaaccagtggtcacagccacacagatgcttgaatccatgacagtctctcctcgcccgactagagctgaagctaccgacgtagcaaacgcggttcttgacgggacagattgcgttatgcttagcggagaaactgctgctggagctcaccctgagactgccgtgttaacaatgtcaaggatctgcaaagaagcagaggatttcatagattacgacattctccacaagaaaaccctaggaatggtttcgttaccgttatctccgatcgagagcttagctgcttcagctgtttcgactgcgcggagtgttttcgcgtcggcgatcgttgttctcactagaggcggttacacggcggagcttgtggctaaatacaggccaaacgtttcgattttgtcggtgattatgccagagattgctgaatgctcggactcggtagctcatgtggcgagacgtggtttgatttaccgtgggattattccggtggtgggatgttcagctagagattcagtggaggagatgattagattagctataggatttgccaagacgaagggaatttgttatactggagattccattgtggctttgcacaagattgatggttcatctattgtcaagatagtgagcgtcgag

SEQ ID NO: 169856 - DNA, 566 bp, Arabidopsis thaliana landsberg
  unsure (1)..(566): unsure at all n locations
gacttgatccctttgtccccgggtactcctgatcctttcaactggaaactcacatttggacctaaaaacttcgccaaagactaagctcctcttatggaaagcaggtcagtatgcacttccagttggcctcaacctcacccaccgacatatcactgagtcagcaaaatgtcctttttgtgacgatgatgaatctgttcttcatcttctcttcaagtgtccttttgcccaaaagatatggagtttggcccctttcaagtcccctctgatctgcgcttcaattctttcagtcactgaagggatcgcctcttcgagtaaggctatttgcctccctccatcaggattaggtggtggntcgtctcgccttggcttttttggacaatctggtcttcccgaaaccaactgatcttcaataagaagcaacctctggcggaagatgcttacctccttgcgattactcgagcaaaggaatggcaatcagccaatcagactcaatccttacccgctagaattcctgatccactggtgatacctcgatcccattctatcgatcctgtttgttgtacgga

SEQ ID NO: 169857 - DNA, 269 bp, Arabidopsis thaliana landsberg
ctaagtaataaaaaattattttaattaggatagttttttaaagaaaaattattttttgttggttaaaaggttgaaggtaaaattttgtatgtaaagttaggtattatagtatatatagttttgtaaaggttttggaatttttttaaattgttaatagtttctgttggtgaatgggtaatatataaaatgattatttataatattataaaatttgtgagttttgatgttaaaacaatatgtatgggattggtggattaaatagtatagtt

SEQ ID NO: 169858 - DNA, 862 bp, Arabidopsis thaliana landsberg; identical to SEQ ID NO: 7412

SEQ ID NO: 169859 - DNA, 726 bp, Arabidopsis thaliana landsberg
aatttatgttttacttctaaatgtatccataaactgcctgagtttttcatggcttgagtgtgatttttctccatattttgtactagagcgagttcatcgcagagtgctatgccaggagggcttatatatcaggatttactggaagtgctggtaccgctgttgtcaccaaggataaggcagctctatggacagatggccgctattttcttcaggttttgatcattatcgtcctttaaaattatttgattgccatctcatattgaaaggaaatgtggagtttcttatctacattctctgcaattattctatcaaaggcggagaagcaattaaactctagttggattctcatgcgggctggtaatccgggagtccccacggcgagtgaatggatagctgatgttttggcgcctggtggaagagttggtattgaccctgtaagctattattaaaccttctaaattgtgtctccttttgtccttaaatattgtagtttgtggtttgttatttacaagactttggaattcatgaagggagcagttccttttttccgccgatgctgctgaggaattgaaggaggttatagcaaagaagaatcatgagttggtttacttgtacaatgtaaatcttgtggatgagatatggaaggactcaaggccaaagcctccaagcagacaaataaggatacatgacttgaagtatgctggtttagatgtggcctcgaaattg

SEQ ID NO: 169860 - DNA, 1429 bp, Arabidopsis thaliana landsberg
  unsure (1)..(1429): unsure at all n locations
cgattcttcaccgtttcttgtgttttcaggctctaaactcatcaaaattccatcctctatcttccccaagtatcaattctatcaatctgcaagatgactgggcagaaaaagaaggcaagaaagagctttcctccatcctcctcctccaccgataagcttctccaccgccgccgatctccgcccttcccaaccgcaaccacaagctgcagcccctcaacctcctgtttatcaattttcttggccaaagcttccaaaagagagaattccttctcaaagggtttgggagaaagatgtcaacacataattcactaaaggtgactatatcaatcgccctttttccccatattgggatgattatgacactttgttctataatgcctggatgagtgtagaaattttgcctactcgggttacgaattttggtttgatgcagggtttgcagatggagaaatctgttttaggattgctagatgatataggtttggaaccatctgttctaggtagtacgatctgtatcctgagctagttagacaattcatggcttctgttagggtctattatgtgaatgacaggaaactcaatgttcaggaaggagcccttatcttcttcgttcgcggtgtaagatacagtctaccactgagagagttatgtgacatctatggttttgacaatgatctcactggagttgctctgcctggacagtttaaagatgctcagatcttctggagcagatttagcaatggaatttatgattccaaggacgcagtacattcagagattcgtcaccttgttctaagatacttggttaggctgattagtagcacactgttttgcaagatggagcctggaaagatgagactctctgagctgttgttgctctatcatgttgttcatgacttctttccagacagcttaggatttgaggaggttgaccgcgatgtcaactttggcgctgtgtttgctcatcacttggtctcactcaagaccaagccctttacaggtagagggaagaaattagagagagttggcagccttctcactcctgtatttgagcatttccggatcatctttgagggagaagaggtcaacaccacgcgattcactattgatgagacttacctgaagaactctcactggcttaaaggcaacttactgtggtgtttcagagaagatacatggcagcatatgattaagttacctcgcacttacagagattacaggagagcatgaggagacaggctttcatcctgatccttcccttctacatgccgcaccacgcaccaggtgacagagaggtgcaacttccggatctgcgcctacacataccgaggacgaggtcgttgaccttgctgggggtccgagagttggatcttcctcttccgctcnnnnnnnnnnnnnnnnnnctcctccacccatcctgatggagcta

SEQ ID NO: 169861 - DNA, 2053 bp, Arabidopsis thaliana landsberg
  unsure (1)..(2053): unsure at all n locations
attaccctcactatccctctgttttacttctttttcttctctttgttatctcaccaaaccatgtctcaacctgaccacatatttactgtctgcaatcctaccaacaactttacacaaaccagttcatacgaaaccaaccgcgacaccctactcgcctctctccgcgagtcttcctctctcggacactattcaaacgccacagaaggttttagccctggcccaggcccatggaaggttcctctgtaaaggagacatcaccacagcatcttgcgtagactgtgtccaaaccgcaannnnnnnnnnnnnnnnnnnnnnnnntcttaacaaaagagccgtcatatactacgacgagtgtatggttcgatactcaaatgtttccttctcctctgaattggaaatcgtaccaagcatcactatttactctcttcgctctgctccaaacccgactcggttcaatcaaacacttactgaaaaattcagcgaattgatattcaacgtatcttcgtcctctttgnnnnnnnnnnnnnnnnnnnnnnnnnnnnnnnngacacaatcagagggttcttatgatttagacacaatggttcagtgtagtcctgatcttgatatattcaactgcaccgtttgtcttcgagttgcgttctttagaatttcaacttgttgcggtttgccaagttacgccaagatctttactcctaaatgtcttttgaggtttcaaacctctgttttgttatctccaccgccatctccatcggctccgcctcctcgatctccaccgcctaaatcatcgccaccttcttctttaccacagacgccatcgccgccgctggttttcacgccgccacagaacgttccaaatcctagcggatcgttttcctttaacgttcttaaaggtcagcatatttctatagttcttttatcatatttaatcagcatagtgtgtaatattttattatgatagctaattaaactatattattgagggccggctctaaatatttattattattatttttatgacaggaaatgtaatatttcggagaattgttgttacaatgacagctttggtgtttgcacttgtggatctttgatcatatttcatggatcataaatattgatgattcgtaataatttgtattccttcaatttgtgtgatgtgtacgttctcacaggatccaagatcactaaaaatgttaatatggttcctaaaaaaacaaagttaattatatgtgttgattctgatgtatgtatcatgcatggataattgatggatgattgatcaataaaagaagattggagtcgatacatatccattttttcctttaaagttttttttttcgtccactgttatctagtaactaacaacgcatatcacacctaatttcaacattcatttaaaatagcagtggtatatcgatcaaatataccaagaaatcacaatttcaacctctatagtagcattttcgaaacatggtacatcaaatctattggttccgtctttgtagttgttagacttgaaagaaattgttattattctttgactttttttgtatgattgtatttgatatgattgtagtttacatctattctgaaattgtaagtcaaactaagaataaaaaacgcaaaagcattaaatggttcttaggagaatatcagtttacaagtggaatatatgttgatcgtacatgtaatctaatggtttgagttaatattgttgatgtgttatcattcatgtatgtaactaacaagaacataaggttgttaatgtggttttattgatactttgaatttctcatctatattggtagagtattacttattataatgtgtctaagtgatcccatttaaagtatttaaaggttgttattgtcaacaattctagtttttatttttgtgaaaaaatggaatacaagctatcttataattatcgtttacatggttgtcgatttcttatttgaaattttaaaattattttattattcccactttgaattactctttttggaagaattttcagtttataaaaatttattcccatttgcttactaataaa

SEQ ID NO: 169862 - DNA, 730 bp, Arabidopsis thaliana landsberg
actaaggatggagtctgatctgcttgtaagtttccaattgaaagagtctgatcaatagtagtttctgttgctttggcagtctcaggaatttcttggctcttctcgtcctttgtctcctctaactttggagcttcatggttcacaaactcttcttcatggtccaaagccactgttctctctgtttcattaatttcttcatttcctttctttgcctctgcaatcagagtctcactatcattctcctccaagattattggtgcggttggagtctcgacatgtgcatcccttatttcatcttcatgctcttttggttttgtttctcctacactctcttctgtttccacagaaatagatcgttcctcttgtatgtcatttgtttctctaacgtcatctgcacaattatcttcttgaagagccactttatcatcttccctagaagccaacatggaaactagagcttcatcagatgattctcttggaataatttcggtagggaggatttctccagcctgtaacttgtgttcttcctttgtttctgacactaactgagaggacagagtattatctgcatcggatgtttcaactggaagattccgttcactcgtagcttctacatcgtgtgcttcctttggttcttcctcatgaatctcctcaaccttcttaggactctggtcatcttgttctgacactaattcagatgatagagtattatctgtatgtgatgtttcga

SEQ ID NO: 169863 - DNA, 466 bp, Arabidopsis thaliana landsberg
  unsure (1)..(466): unsure at all n locations
atggaagataacgacgcagcttatgatcaagtcaaatccgaactgttaaacttagaagacgaagtaataatctcacgttatctgaagcctatggtcgttaacggagattcttggccagannnnnnnnnnnnnnnnnnnnnnnnnnnnnnnnnnnnnncagatgaggtgttcaattctgagagacctagatttgttatcgttaaaccacgaacagaggcttgtggtaagaccgatggatgtgaatctggttgctggaggaccatgggtcgtgataaactgataaagtcggaggagactgggaagattctagggttcaagaagattctcaagttttgcataaagtataggcttaccaataacttgaactggaagcaagatcatgtgatttgcaagattcggcttctgtttgaagcagaaattagtttgttgctagtcaagcatttctgcactacgtcagaatcacttt

SEQ ID NO: 169864 - DNA, 490 bp, Arabidopsis thaliana landsberg
  unsure (1)..(490): unsure at all n locations
gcgactgaaatgagcctggcgtccaaactcgaccggatcgcggcccgcgcgaaggagtagcggcgtatgctgtcctaggggatctcggtcgaggcctatgtcaaggcgtcgaagaaattgtgaacattgagccggtggtagacggatcgccgatctgcggtcggcggagcgggcgcaatcctaggcggagtcgctgctggccgatccgtagatgaaggatctggcgaagtcggagctgtatgagctgaaggagcannnnnnnnnnnnnnnnnnnnnnnnccggctggctctgctgccgaagaattaggcggacgcacggtcggcgatcctggaaatccgtccgtcgtccggggacaatgagaccggtctgttcgcggcggatctgttcacaatgtatcagacccatgccgacagcaaaggttaacggttagcaattttggagtccggcgacaccgggctgggggcgatcacggaggcggcgtcgtagatc

SEQ ID NO: 169865 - DNA, 410 bp, Arabidopsis thaliana landsberg
tctgtcatgagcgcgatcaactacaagcatctgcattacttctgggtagtggcaaaagcaggcggcatcggccgcgccagcgaacggctgcatctgacgccgcagacgatcagcggccagatcgccctgttcgaggatgtgctcggctacaagctgttcaaccgcgtcggccgccggctcgaactgaacgatgccggccgcgtcgtactcagttacgccgatgaaatcttcacgctgggcgaagagttgcaggaagtgttgcgtttccgccccggcggctggccgctgcagttgcgcgtgggcgtggccgatgcagtgccgaaagcgatcgcctatctgctgctggagccagcgatggagctgccggaatcgctgcgcatcgtctgccgcgaaggcaagctgacgagcct

SEQ ID NO: 169866 - DNA, 980 bp, Arabidopsis thaliana landsberg
catgtacgtgaaatgtggttggttagtgggtgctaagcgagtgttcgatcagatggcagtgaagaaaccagtggcttgtacgggattgatggtaggttatactcaagctgtaagagcaagagatgctttgaaactatttgtggatttggtaacggaaggtgttgaatgggacagttttgtgttttcagttgttcttaaagcgtgtgcttctcttgaagagcttaatcttggcaagcaaattcatgcctgtgtcgctaagcttggattggaatctgaagtctcggttggaactccacttgttgatttttacatcaaatgttccagcttcgagtctgcttgtcgtgcatttcaagaaatccgtgagccaaacgatgtttcctggagcgcaatcatctccggatactgtcaaatgagtcaatttgaggaggctgttaaaaccttcaagtctttgagaagcaaaaacgcatcgattctaaattcattcacatatactagcatattccaagcatgctcggtacttgcagattgcaacattggtggccaagtccatgcagatgctataaaaagaagtctgattggatctcagtatggagaaagcgctcttattacgatgtattccaaatgtggatgcttagatgatgcaaatgaagtctttgagtccatggacaaccccgatattgttgcatggactgcttttatatcaggtcatgcttactatggaaatgcctctgaagctttgagattgtttgagaaaatggtgagttgtggtatgaagccaaactcagttacatttattgcggttttaaccgcgtgcagccatgcaggcctagttgaacagggaaagcattgcttggacacgatgcttcgaaaatataatgtggctccgactattgatcattatgattgtatgatcgacatttatgcccgttcgggactattagtagaagctctaaaatttatgaaggatatgcattttgaac

SEQ ID NO: 169867 - DNA, 562 bp, Arabidopsis thaliana landsberg
cagagtgttgatggaggaatatggaaagcacataactagaattgctgtgtcattgttcgaagctatagcacaaacactgaacctagaactatccggtaaccggagatcagaatacttatcggaatcgacagggctaataagggtttaccggtatccacaaagctccgaggaagcagccagagaagctctaggaatggaagttcacacagacagttcggttatctcaatattaagagaagatgaaagtggtgggcttgagatcatgaaaggtgaagaatggttctgtgtaaagcctgttgctaatactcttatcgtcaatcttggagatatgatgcaggtaaataaagtatatccatgagtttagctcaattatttttatcattttgattgatgaaatctgaaattgtatatacaggccataagcgatgatgagtacaagagtgtgacacatagagtgaagaagaggaataggaagacagagagacactcagtgtgttattttgtgtttccaaagagagattgcgtgataaagtcatcaaactataagccattcacttactca

SEQ ID NO: 169868 - DNA, 754 bp, Arabidopsis thaliana landsberg
ggtggatttcctgttaagttgagtatgtgggttttagaggatgtcgagaaaccggaatggtcgaaacatgtctactctttgtggacggagagtgaagtcgttaaggttaaccggaatctttctgtttctgggatgactgcaaccggtgacattgttttatcgatggaagatgcaactaatccgttttatgttttcaacttcaatccggataggaacactctccaagtccaaagtgttgaaatccaaggtcttggagctaatcgtgatcacatagcttgccatgcctttgttgactatgtagaagattttagtgttagcgatgcagtgctgcaactcaagtcaagccctttacaacaacaaggccaagatacatctcatgacctctccaagtctgtgaagaacaagcaactggacaattatgaattcttagcaaacaagctcaatcactctgttagcttagctattttattttgtttgtttttccttctttttaactatctcattcggttgtgttgggttagataattcatttcttatcgagtaaataacgaaacaaaaataaagagtaatcgagttgtgaagtaaaaggttaatcggtgtactacagggccgaagtatcgttatcaacaagtcaaagccacaacaacgccggcatacatctcgtgacctatgcaagtctgcgccgtctgtgaaaaacaagcagcataacaagtatgaatcattagctaacattctctatcactctgttggctaa

SEQ ID NO: 169869 - DNA, 523 bp, Arabidopsis thaliana landsberg
actcgtgacacatctttgaggctggttcgaaagattactagagtatggacaaacaaatttgatggtgtcttctatagctggtcatgtgttccacgggaacgatgagaaagatacttcctcgagtttgcggtatagtgtttttctcttgcattcactaaaatgtttagctgttaattatcttcaataaacacaccattgggatcctttgattacaggaacagttcagtactattttgaagatatatgttaaagacggataaaagatattgcaagtttagatgttgtcttagtccttgttcatttttaacattgcaggaaaaggaattaggaaggacagtgggtattggtaaggtctttgtcaagacgcatacaaaaccagatggcacttatgtcaataagaaggctgagaagattgcaaagaactatgagcagaaattgcaggttaaagtttctgaaatggaggcagagacttcaaatgtttcagacggggaatcacgacctcggcagctcacaacagatgact

SEQ ID NO: 169870 - DNA, 1278 bp, Arabidopsis thaliana landsberg
tctcaaagcttaaacacacttaatgacgactgttcacacattctctatattattgttcttttgttcccttttctcggcttcattgattatcgccaaagtccaacaccatgattttgtcgtacgtcctcaataaaagttgcatgttcatattgactaatacactaattaaattcatcatcaagtagtaattgtcattacttatatttctgtgtgcaatcatttagatacaagagacgccggtgaagaggctgtgcaagacccgtaacgccatcaccgtcaacggaatgtttccggggcctacgctcgaagtcaacaacggcgacactcttgaagtcaaagtgcataaccgtgctcgttacaatatcaccatccattggtacattttacacatcttatcggtttacgttttgaaactttaccaatatgttacttttcttccaaaattaatagaaactttaaacaaatcaaaaataccacacaaaaaaagtgaataagctttatcaaactttctagtttttttttttaatgggtcacagtatatatatttatcacataattaagatatttcgtatatgataatttttttttgaaaaacaggcatggagtgaggcagataagaaccggatgggctgatggcccagaattcgtgacccaatgcccgatccgacccggaaagagctacacgtaccgtttcactatccaaggccaagaagggacattgtggtggcacgctcacagctcttggctccgagccactgtctacggcgcactcatcattcacccaacccctggttcctcttttcctttccctaaaccggaccgccaaaccgccctcatgctcggtatccaccataccataccggatttaaaattttccctatttgatgcacaaatttgttgaatctctaatctaattaacaaataaaaacttaaaattcaggggaatggtggaatgcaaatccggttgatgtaattaaccaagcgactcgaaccggagctgctcctaatatatccgacgcttataccatcaatggtcaaccgggtgatctctataattgctcgaccaaaggtaaacaaaaattaaaactatataatataattaagtatttgatgcattaaagtttctgaatattttgtaaaatgcagaaactgttgtagtaccgataaattcaggggaaacaagtctcctacgagtgatcaacgcagctttaaaccaaccgctatttttcactgtggctaaccacaacctcactgtagttggagccgacgcatcttacc

SEQ ID NO: 169871 - DNA, 1408 bp, Arabidopsis thaliana landsberg
  unsure (1)..(1408): unsure at all n locations
atgaggaattttagatcatcagttcttgtggtgctaagtctgataatagttttgaacgtcgcacgagctagtgatgaaagcaaggtaagctagatcttcttctttaccgaaaaaagagaataggttatgaccaagttttggttttgctgtgttgatgattatataggttcatatagtgtatttgggtgagaagcagcatgatgatcctgagtttgtttcagaatctcatcaccaaattctatcgtcacttcttggaaggttaaaacctagctacttgataaactattcaacaccattatgtatcatgctgttgttaacaatggcttttatcttgtgttacagtaaagtggatgctcatgaatcaatggtgtacagttaccgacatggattttcaggctttgctgccaagcttaccgagtcacaagccaagaaacttgctggtactcatagctctctgttatcttgaatttcaccatgtctttggtttcttagtaatttgatgataatgatttaaaattagtaatttactttgtttagctgaaattttgattggtaatgcacttttggaaacagattctcctgaagttgttcatgtcatggcggatagtttctatgaactcgctacaactcgaacttgggattacttaggtctttctgttgccaattcgaagaatctcctaaatgatacaaacatgggtgatcaaactatcattggtgttattgacacaggtacacaacaatagtttttttcattacattctaaattttacttttgtttccgttgtgttagatttcttcattttagcgtctcaatgacttgcagttttgtgttattgtaggagtgtggccagagtctgaatcatttaacgactatggggttggaccagtaccgagccattggaaaggaggttgtgaacccggtgaaaacttcatatcaacaaattgcaacaggaagttgataggagccaagtactttatcaacggttttcttgctgaaaaccaattcaacgccacagaatcccctgactatatatccgctagagactttgacggccatggcacgcatgtcgcctccattgcgggtggttcatttgttcctaatgtaagctacaaaggccttggtagaggaaccttgagaggtggtgcacctcgtgctcgcatagcaatgtacaaggcttgttggtatataaacgagctagacggagtgacatgttcattttctgacatcatgaaagcaattgacgaagctattcatgatggtgttgacgttttgtcaatctctctcggtggtcgagttcctctgaattctgaaaccgatctacgtggtgggtttgcggccggagctttccatgcngccgcnncgggcnttgnngttgtttgtgctaataataaactggcccatcatctc

SEQ ID NO: 169872 - DNA, 1242 bp, Arabidopsis thaliana landsberg
caaaccttaaagatatcaaatttcaaggaagtagaattgttacttactgtttcaaagctttgtggcttaccatcatcttcattactgcaaacttttgaggtttctttgtccttcccatcgtttaaccaaagactaaaaaaaaccttataaccttagaaggagcagagagaaatggagactaaagggccaaaaaatgctctctttcaaaacaaaagacaacgagagaactttagttcttgctcttctctcagatgcaagaatcgagcagaggagactaagaatttgtttgttaaaaattagggtttttgagtcgtttgacattttaaccgaaccgaaccgaaccgaaccaagctaatgtgagctcggcccatatatggagctctgtctttttcggcgtctctgcatataccggcgatgctgaaggaagaagctgagggagtgaaaatggaagatgatgatgaagaacctccgatggctgttcaaatccatccggatgtttctgtcggaaaggttcactcatcaagcgacactgtttcagttggtgtgtctgttatcactggctatctcggcgcgggaaaatccactgtaagtcccttcctttcactgatttacgtgttgggttttggtttttgattgtggtgtgtaatctgattgattttgcaccagcttgtgaattatatattgaacgggaaacacgggaagagaatagctgtgattttgaatgagtttggggaagagattggagttgagagggctatgattaacgaaggagaagaaggtgccattgttgaagaatgggttgagctcgctaatggctgtgtttgttgtactgtcaagcatagtcttgttcaagctctcgagcagcttgttcagagaaaagacaggtgctttgtttctctatctctctttaaacgctggttcagctcaaatttatgatcttctatctaatttctagacacactgagatattcgtgatgattgttaggcctaaagctctaagattggtgatggcttagcaaaccataggcacatatatcgccgaaattgtagtattattacttgcattttggagaagaatgtatctttcacttaatagacgttctgctttttctttcttctatgcaggcttgatcatatattattggagacaacaggtttagcaaacccccccccattggcttctattctttggttgaataaacagttagaatcagaagtcaagcttgtctgtattgttcctgt

SEQ ID NO: 169873 - DNA, 1011 bp, Arabidopsis thaliana landsberg
aaaagaaaagaaaacattgcagaattatccatccgaatatgggttcgcttcagacaccgataggaatgagaagctcatcgttgttggatacgtcctgcggatatttgctcagagagttacaggcaagtttgttttgatggtgctttctgtttttctttttaagtaaaatggttcataatttagagtattctgatcgatgcctgatggtcactgttttatgcacagatgatatgggatgaagttggagaagataagtttgagagagaaaaagtgttgcttgatatagagcaggaatgtgtagaggcttaccggagaaaagttgaccatgccaatgtttcgaggtctcgtctacatcaagagctggcagaatctgaagccgaactcacccattttcttttgtgcctcggtgaaagatcagtacctggaagagtaattttcattctttcatatccattatgaagcaaagactattcaataaacaaaaccaagactagtccagagtttcagataacctatcatagataattttgttgtcattctctatacagccggagaaaaagggaggaacactgagggagcagctggattctattgcgcctgcactgcgtgagatgaggcttaggaaagacgagagagtgaagcagttccgatctgtcaaaggggaaattcagaaaatatcagcagaaatagcaggtagatcgacatatgaagactcaactagaaagataaccatagatgacaacgatctttctaataaaaaacttgaggaatatcagaatgaactgcatagactccatgatgagaaggtacattttgtataccaaattgggaacaatgttttttttttggtcaacatgcatgtgttttacttatcagacagttttggcttctccatcatgttgtctttcattgttctgtcacacaagaatgagagactacagaaggttgatatatacatatgcgccattcgagatctatcagcaacattgggaacagaagcatcaatgatca

SEQ ID NO: 169874 - DNA, 307 bp, Arabidopsis thaliana landsberg
atggttttacacacatgttcccggtgcgctcacggtgggtgtacgctgactcactctttctacgcttccttagatagcgttctctattgccgggatcactttaaccaactcttcatggagaaaggaaactacgctcacgtcctccaagccgccaatcaccgtcgcacagcctcaggcaacactcttccaccggaacctaccgaagacgtcgccgtggaggccaaggaagagaatggcgtttcagagtcttgaatatctcttacctgagtgtttttgagtgaatgattgaatgaatgttgttgcgggg

SEQ ID NO: 169875 - DNA, 1550 bp, Arabidopsis thaliana landsberg
tggctcgcctaaaccgataagaatcgttgtggttggtgaaaagggcagtggaaaatcaagcttgattatggctacagcaagaaatactttccatccaaacatcccttctctgttaccttacaccaatttaccttctgaattcttccctgaccgtattcccgctactgttatcgacacttcttcaaggtaaatgtttctcctgattctatacactatacattgacatcaaaaaggttatgcatagaattttctgataaggttttgtggataaggcaaagataattgaatttattgttattaatagtttaatattttgtcgataaccggggttaatcctaggccgaaaccgatctaatccccgaggttttatagaaaagccggatattttttccatttaaggtgtatacattattagccaagagggaagtacgacaatttgtctagaaggtggaactcgatccttggcttttgacacacatgccgagtcctcaacccgtgcgaaacaaaccactgagccacgcgctcttggttagaaatcgaatctttacactattgatgtctctgttgattaaatctgcagaccggaagacaagggaaaggtagttaaggaagttaggcaagcagatgcaattgttttgacatctgcatttgatagaccggagactcttgaccgtttgagtaaatactggcttcctctgtttcgacaattagaggttaataatttgcttcttttctttttctttcttctccttgcaagcagtaaactatttgcaatcccctgaagtattgtaatatttcttattaaaaagtttgtcttgtcactcttttattgaacaggtgagagttcctatcatagtggcaggttatgaagttgataacaaagaggcttataatcacttcagcattgaacaaataacatcagctctgatgaaacaatatcgagaggtcgagacatctatccagtggtctgctcagaggctagatcaggtccctttgctttgcttgagatcttaactttacgcattctaagaactgaaagttggatctttgtgatgaatctggctagttttcattttcaattttcaggctaaagatgttctctactatgcacaaaaagcggttattgacccagtaggacctgtgtttgatcaagaaaacaatgtactgaagcctcgctgtatcgctgccttgaaacgtatcttcttactctctgaccataacatggatggtattcttagtgacgaggagttaaacgagcttcaggtttcttcttattccctctctttcatattgttcttcttgagtgcttttatcagacagttttaaaaggttttttttttaaacagaaaaaatgcttcgatacaccattggtgccttgtgaaattaaacaaatgaaaaacgttatgcaagtcacgtttccacaaggagttaatgaaagaggactcacattggatggtttcttgtttctaaacacacgtttaatcgaaaaaacaagaatccaaacactatggactatgctcaggaaattcgggtatagtaacgatctaaga

SEQ ID NO: 169876 - DNA, 436 bp, Arabidopsis thaliana landsberg
ttcctaacaaaggcaatgggcttgattatgagaaatactcatggggacagaatctccaagaggtcacaattaacattccagtgccggaaggcactaaatcaaggtctgttacctgtgaaatcaagaagaaccgtctcaaagttggtctgaaagggcaagagctaatcatcgatggagaattcttcaattctgtcaagcctgacgactgcttctggaatatcgaggatcaaaagatgatatcggtgctcttgacaaagcaagaccagatggagtggtggaagtattgtgtgaagggagaacctgagatagacactcagaaagttgaaccagagaccagcaaacttggtgatctcgaccctgaaactcgcgcatccgttgagaagatgatggtaagttaaatcggtttctttatcttgatcatgatgatttctttgtg

SEQ ID NO: 169877 - DNA, 545 bp, Arabidopsis thaliana landsberg
aagttatgaagagagactcgagttgtggaatttgaaaaatgagcaatttgaggagttgctaattcaaccatcattgaattactatgacgatatttttcaaagaggacctgttcaaacaaattgcggtctaggatggagaaacatttggtctcgactaaatgaagataatgctgcttgtctacagttgctacggatgtcacttgatgcgttcacaacattgtgtcatattctacaaaccaattatggattacaataaccattgaatgtaagcatcaaagagagtgttgctatatttctccggatatgtaggcacaatgaagttcaacgagatgttggattacggtttggacgaaatcaagaaacagtgaagagaaagttttttgaagttctgacagctactgaattacttgcttgtgattatatcaaaactccaacaacacaagaattacataggattcctgaacggctgtagttggatgactgatatgggattcatgcatgcgaaaatgtgaaacccgcattgcaaggaatgtatggaatcaaca

SEQ ID NO: 169878 - DNA, 976 bp, Arabidopsis thaliana landsberg
agaatatatcttattacatgtgactatgagctagaatatgattattctgatcttataacgaagtttaatatttgttgagacgcattgtagatggtgatgttgttgatgatgggataggttttgttgatccggttgttgatagttggagaaaccgtctaatcaaagagaggaagaaaatctggtggaaggacatgtttgaccaagatgtgcgttctcaaagcggcgagcaaatggaggaggaacatgtctcagagaatgttctggacaacagtagctctttggaggaagctattgatgaaggctttaagtcgagttatggagatgttggcagaacacaatcaaaggcttctaaccattgaaaggagacaagctggtgagaatgtgcctccatttgagaagaatgggaattctgatgtgaataaggagaaggacgatggtggtgagaatgagaacagtaagaatgagaagaaagtgaatgtggatgatgtgactgagggttttgagaatgagggtgttgcgactaagggttttgagactgagggtgttgagactaagtgttttgagaccgagggtattgagaccgagggtccaagtgtaatggaaacatgcactggcattattctttttgttggaggaccatcaaaaggtatgttattttgtcaatttttgatagtgtttaatatatgatgtgtgttggttacaatggaatatgtggtttactgttgaacaaggtacaaatgatgaggctgaagcggatagaggcggtgatgagacgccgaagaaggaaatgaagaagaaagggaagtagagaaaagggaagtgtaatgataagaagaatgacaagaaaaaaagagatgaggatgagtacgagggtgagggtggcaaaaaaccagagaagaagcgtaaacagaacccatcgagattccacaagccaccttataccacagagagaatgcgagggaccattggtcatgtt

SEQ ID NO: 169879 - DNA, 887 bp, Arabidopsis thaliana landsberg
atgcagtataatccatcaattggcgcgactggaaataggtcattcaataatcgtctggtatccagtggcatatcaggaaatgaatctgctgaagctctgatcggaagaaaagtgtggacaaaatggcctgaagataaccacttctatgaagcaattataacccagtacaatgcagatgaggtactatttttgttcattgagtgtagattgctaattgggtagatagatggtttgttgtccctgccaatttttatagaagtctctgattatctattggatttgcaatttacgcacttgttttattctcacagggtcggcatgctttggtgtatgatatacacgcagctaatgaaacgtgggaatgggttgatctcaaggaggtaatcgttacatgaacattatcttaatattctttgcctgtggttgcatatgttttcgtaagcgatctggtgtctgtacatactgatgatcttgataagagctgacattattattgtttagataccaccggaagacataagatgggatggggaggagagtggggtagctttaaacattggacatggaagtgcatccttccgtggcaacagaagaggccaaatccatggtggtagagggagaggaccaagaattcatcaaccaagaagggaacttgtaccgccaccaacacaacagaatggtagtggtgggcggagaacttcctctgatgatattgagttgttcaacacagactcgcttgtgaaggaggtacgtgtttttttatctgctgtatacccattaagctcaatgcctgctctaacatgaaatttttgttttaggtggagagagttttcgattctacgcatcctgatccactcgagctcgacaagcccaagaaaatgctcaag

SEQ ID NO: 169880 - DNA, 1704 bp, Arabidopsis thaliana landsberg
gaagctgatgaagacatcaatggagagacagaaaaagcagctgatgaagacatcaatggagagacagaaaaagaagctgatgaagacatcaatggagagacagaaaaagaagctgatgaagatatcaatggaaagacagaaaacgaagcagaagaacctgaaggcgagcttgaattattctgagatgaagaagctgttcaacctaagaccaagaggcagcgtggaccaactaggatgaaagatattgctaaggatccaaatgccagagtgagagtggagtacaccatgatgggagagcctattggtaaaggcttagttaagttagcatcatatgcaggcgcattggtccgtgaacacgtccctatcacaattgatcgctggacaaaaataggtgaagaaatcaggacacttctctggaaatctgtccaggtaacacttcactttttattttttttgtaatatttgactatctttccttatcacagcaataatcactttttctgtaattgattgaaggcaaggtttgaactagatgaggagtatcaaaaggttgcagtgcttaagcaaatgggatgtttgtggagatcctggaaatcaaggcaagtaactaagtttagagaagcaaagacaaacaagcagaggatgaatctgagacctaaaaatgtttctccatttgagtggagaaaatttgtgaagagcaaaactagccgtgaatttaaggtatgttaagggagaaaattaaactaagtatatttactatgtagaaagttactaattaacaatcattgttaggttataagcgatagctacaaggaaagaaggcgcaaccagattcctcacacttgtagtcgcagagggatggttagactagcagaagatatggttatcttatgtgcctgttaggttatgttttttatcgcttagaatttttactaatattggcatgttgtgtttttcagaaaactggtagtgaagacccaactgaagtgacgaggctaaaggtttgggttaagtcacggaccaagaaagatggaacaccagtgaatacaaatgcggctgaaaaaattgtgagtatgttatagtttggaagttgtgacagtttggtttgtgatgattgttaggttagtgatggtttgtgaaattggataggttagtgatggaacagaaattggattggtttgtgatggttttgaaatgaatctgataggcaataaatccagaagttagccagtgattgtgtgtgatggttttgaaatgaatctgatagacaataaatccagaacttagccagtgattgtgtggactggtttatgattgtgtgtgatggtttgcagaaaaaggcagctgagattgttagcagtggtcctcaatcaaatgggacgaatgaagcacaagattcacttagccaactcttagggcctgacaatcgtggtagactaagggcgatgggaagaaatatgaacaagaccaaactagcttgtttccaagtaaaaagcaaatgtatggctgaaatgcaacagaaacaggaccagctccagcagaaggtcaatgagttacaagaagtaattgacaagataaagaaccaggtaaacacttgtctacttatacataaagctaatcaatcgtttagtacatatatttgactttgttttttttttggtacagagacaatcagctgaagttggtgaaacctcagctgcaaga

SEQ ID NO: 169881 - DNA, 551 bp, Arabidopsis thaliana landsberg
gtttctgtgcgctatattggaaaacttcagaagaatgggaagattttcgattccaacattggaaaatcaccatttaagtttcgtctaggttggtattataactagattcaaagataatagcttgggaaattggttgagaattacagtgtattgctggtgtaagtgatactttatgttcttattgtaacgtgtaggtattggatcagtcattaagggatgggatgttggagttaatggtatatatcttaatttcttactgtttttttacttataactttgttcaaaaagtgaatcgtgttgtattcatctcaagtttttgaattccacaggcatgcgcgttggtgacaaaaggaagcttacaattcctccatcaatggggtaagtaaactcattttgatttatgttattttgaattagcaatgttttgttaaacctttttaattggatgataatattgtttggctcacaggtatggtgcgaagggtgctggtggccagattcctcctaatgcttggctgacttttgatgtcgaactgattaatgttcaataa

SEQ ID NO: 169882 - DNA, 183 bp, Arabidopsis thaliana landsberg; identical to SEQ ID NO: 61469

SEQ ID NO: 169883 - DNA, 439 bp, Arabidopsis thaliana landsberg
atgagccatggtggtggcggcggcggaagtaacggaggaggaggagacgctgaacgaatgctagctcaagcagagaagctactcttaagcggagacttaaacggttcaaaaacctacgcgatccgcgcatgcgaagccgatcactcactcgtagaccacgccgaactaatcctcgccgtcgctgacactctagtcgccggagaatcacgaatcagaggaacaacctccgatcttcccgactggtacgccgtgctccgcctcgttcgtttaactcacaaccccgaactcgtcgcgactcagtacagtagacttgcgctgttgcttaacccgagtcggaatcggtatccgtattctgaacaagcttttaggttaatctctgatgcttggtatgttctctctgatccttctagaaagacattgtatgatagagaattgcatc

SEQ ID NO: 169884 - DNA, 328 bp, Arabidopsis thaliana landsberg
gtcatttttactagcacgcagaacaaccccccggcggcgacgagacctttcacttaatccacctcctcacacccgacagcgtcacctaccataagacatccttcaagtgcacccactgcaaagccatcccctccaccaccacctactctaccatggacggcgtgctgtactgcaacacccactttgagcacctcttcaaagagacccgtagattctacaagaactttacgctccgtgtcacgactccagacaaccctcaactgacaacggccaccatcaagccatcatccacctctttctgtcactcacgataagtgcacagcttgcc

SEQ ID NO: 169885 - DNA, 487 bp, Arabidopsis thaliana landsberg
ggcgtcccgctgtccgccgggtccgcgtgggcccaccggcaggccggcaccggcgcggtcgcggtgacctacttcggcgacggcgccatcaacatcggctccacgctggagacgttcaacctgtccagcgcctggcggctgccgctgtgcctgttcgtcgagaacaaccgctacgccgtctcgacgagcgtggaggaggcgaccggcgagccgcgcctgtccgcccgtgggccggggttcggcatccgcagcctgcaggtcgacggcatggacgtcctcgccgtccacctcgcgatgagcgaggcccgcgcccacctggccgccggcgagggtccagtgctggtcgaggccgaggtctaccgctacttccaccagaacggctcgttccccggcagcgcgtttcgctaccgcaccaagcaggaggagcagtcctggcgcgaccgaaaccaaatcgcgcagctgcgcgcccacctgctgcgccgggacc

SEQ ID NO: 169886 - DNA, 347 bp, Arabidopsis thaliana landsberg
cttttacaacgtctcgtttggttccctttcttagccttggtggccacacaactcctatttatacgcaatgtttcgtccctgaacctcaccaatgagtatctgcatcacaaatgtctcgttagtgaagggaaatataaaccaggaagcaagtacgagtatatccttaacgattacatccgttttctcgcagccggaaattttcgctcaggttccatgcacatgactagtggtctaaaacccaatgctgtaaccattctctaccagtgccgcggtgactcctataattctaagtgccgctcttgctatgctgccggcatctccggggtaacattatttactctcttcat

SEQ ID NO: 169887 - DNA, 1551 bp, Arabidopsis thaliana landsberg
atttcaactgaagtgtctttatggagagtatcaaaaacggggtacacaaataccagcgtgttccgatgatctactatgaaaagttgcaactaccaacaccggtttctgtctcaaataaccaaccaggaaaatgtccagatcccacatttaggagttgcacaagaaaggttgaacgacaagaaagttcttgttgttattgatgatgtgaatcagtcagtacaagtagatgccttggcgaaagaaaatgattggctaggtcctgggagtcggattatcatcacaacccaagaccgaggaattttgagggcgcatgggatcgaacatatttacgaggtggattatcccaactatgaagaggcccttcaaatcttttgcatgcatgcttttggtcaaaagtccccatatgatggttttgaggagcttgctcaacaagttacaacactttcgggtagacttcctttgggacttaaggttatgggatcctatttccggggaatgaccaagcaggagtggacaatggcactaccaagggtaaggactcaccttgacggaaaaattgagagcattctaaaactcagttacgatgccttatgtgatgtagataaaagtttgttccttcatctagcttgctctttccacaatgatgataccgagttagtagaacagcagcttggaaagaagttctcggatttgaggcaagggcttcacgtcttagctgagaaatcgcttatacatatggatttaagactgatacgtatgcatgttctgctggcacaacttggtagagaaattgttcgtaaacaatccattcatgagcctggacaacgtcaatttttggttgatgcaacagatattcgtgaagtactcactgatgatacagtaagttttgacatatattttttcttcctttattgttcttatcatttgacaactaaactatataatttcttcagggcagtagaagtgtaataggcatagatttcgacttcaatacgatggagaaagaattagatataagtgagaaagccttccgaggaatgtctaatcttcagttcataagaatttatggtgacctttttagccgtcacggagtatactattttggcggtcgcggtcaccgcgtgtctctggattatgatagtaaattgcacttcccgcgaggtctggactatttacctggaaaacttaggttattacattggcaacaatttccgatgacaagtttgccctctgagtttcatgcggagttccttgttaaactatgcatgccctacagcaagcttgagaagttgtgggaaggaattcaagtaactgtttgttctctttatttacttctctccaactttcatttttttttctttttcgaatggattatttgatgtatacgaacggctttgaaacgctttcacacttctaaacttctagttgtggtttttgtactgcagccgcttagaaatctcgagtggctccatttcccttgttccagaaatctgaaggagcttaatgatcattcaacagccactaatctccaaagactgtccattgagcggt

SEQ ID NO: 169888 - DNA, 1364 bp, Arabidopsis thaliana landsberg
agttaatttaaagtctctgttttagttagtccaagtttgggacttggaagagattcagtaaacataagcccaagagttaaagagatacctaaaggtgaccctagaatagctcagtgggatggtctgcaccaaatatctaagaatgtgaaactgagttttaatgttttcgagtggcgtccttacactaaaccgttgaagaactggaacccacttcggttttacgttgatgaagctatgtggctgactgttgatgacagtgtcgatcatgcatttgcttcttttgctcgatgtgtgaaagtttcataccttgctggaaatggttttgttgaagattacttcccttatcgagtggcgaggcagttcggtttgtctcaagatcttcctggtttggttactcgtttggttactcgtcgtagaaaaatcacagaaaaggatgcttgggatgattacagtaattctcttgaggatttaaatctctacttgccttctcaacttgatcgaggttatgtcactgccaggtaccaagactggtggtttaaatcagcttcagaatattttggttctgaagagatacagaaagaatcgactgaagcttttgatgcaaggaatacatttgatcatcttgataaagatgatgatgatggtgcattgatgtatctaccaaggtacctcctttgagtcaagtagttcagaagttggaagaaggctttactgcaaaacgcagaatatcgaggatgcatagatcagcaaagagatataagataactgagtctgatgttcacatgaagcgagctcgtgaggctgatgctgagatttctacggataaagaagatgactgcatgaccgttgctcaattgatcagatctaggaataagtactttagtgatgtagacaagaaaactggaggtgatgcttctgaatcacttggaaaaagaagtagaagatatatgctggtggatagcgatgatgattcagggccttgtcaaaagcatgctttaatgaaagtagagcaaagaagtgtagaggatgatggaactaccaaaaaaacagagattacaaggcaaacatgtgatgatgtaaatggaagtgatgcagagaagaaggcaataatcaatgatggaatcaaggaggcagattcttggctacttgaagatagagaaattgagaggagatgcattggaaagttttgcagtgaagttaaaaaggaagaagatgttgatgaaagattgaggcagagaacgcttgcaatagagaagatggcactggagctggagacacgtcttagtaagatggagaagagtttggcagagattagaaaatggaaaaccagaggaaaccagaccaaaaatggtttttctgcttag

SEQ ID NO: 169889 - DNA, 2381 bp, Arabidopsis thaliana landsberg
  unsure (1)..(2381): unsure at all n locations
atggcagcgacgaggaagagtaatcggcggcgaggagtttcggatattgatgaggcatcggcggcgacgataaatctgggttagttttccctaacttcgtttggagaatgatttgattcaaaatctaggttaattttagagatttcaactcataaattttcaattgaccaaggggttttagtttttttccgccaaaaacagttgattgagtataaaaggtttcggtgtacgtgtatatgaatatcgagtttttgtttagttggtatttggatatagtgtacgtgttaagaacttcttcgtcttgttcaactttcaggaagtacttctaatgatccgggtgaattaccacagaggttgtttgcactcgatcactaccctagcaaggcgaagataaatgcgtactccagaccggagtacattggtcaaatagcagctgcgcttaaggacacaccagaaatgacgttccttctagattctccatttggtgacctctttaggatccctactaacaaggcatccttttctggtaaacttgttcttggattaatatgctgtcagttagttacaaagaaacgttatgagatgtggatggtattcgctggtcatcctattaggctcggattaagagaatgggcacttataactggtttggaatgtggaacctatcctaaagataaggatgtagaaagtgttatgcagcgggaggaaggtgaaaatacagtttgggctactctgtttggagatgataaagctaatccaacagttgaagaattaagggatagattgatttctgaaactgacatgcctgcatggaagaaattagctctcgccctaattatcattgtggatagggtgctaatatgtgacaagtctcctcctctgagaccaaatgagatgacagttgagctgacgaagaaccttgatttctcctgtaaatatccctggggaaggacatcatttctgcttactttggagcgtatcgcaagtttcaaaggagagaccgacgttaaaaaactccggagtggttgcaagcaacattcttatgcactccatggcttcccacttagactccaactccttgcatttgaaactataccgtctattgctagtctcctaccttctgaaggaaataccgccgtctttacagaaaggactattaaaaacctttccaaactgcgtccaatcaagacatccaccatattggcgtgcgagtctgctgaacaggtttgtgcagttgttgttgtacgtacattggtataaaaaaatgaagtacatacactctgaaattaacaatgatcgtctatgtaggtggatatcacatatattgtggacccagcagacagtaattgcccaaaatcttttgtatggaggaaagaaaaagaggacccaagagttgataacattttaaggatgttgaaatctgagcaggagtggaatgagaaaatatgggttggaggcgatgatgcgcctaagaagcaagtccggccctcagcaactggagagagaggtaaccatatcttttttcgtataacttatatcagaattaggttcctctaagagtagtaatgcatgatttaaccgtttaatatagttattttgaagaggcaaagacgggtggcagatccagttgaaaacaaaaaaaggaaaattagtcactctaatgatggtgaaggtggaccaagtggtggtgatggtgaaggtggacccagtggtgctgatggtgaaggtggacccaggggtggtgatggtgaaggtggacccagtggtggtgatggtgaagttggagacgaagcgtttgataagtatgcgggcgaattgaggagtttcttcaagaggcaaacacaacttttggataataaatttgaagatttaaaagtatttgtccgtgaagagatacatgctgctctatagtcccaggaccgaaacgaagaaggcccacgatcatcccacaaatctgattcaccatctgagaaggttgagagggtgaccaaaacttttgagaaggtgaacaaaagggttgagaaggcgaacaaaagagttgagaaggcagctgaacaggtacagagaaaatctgtaaagaaatccaccaaaccaagaaaatttgttcnnnnnnnnnnnnnnnnnnnnaacaatactcccaagaaggctgcaactggtagtcttcctgttgaggtacgtgtacagcatgtaccttgtgtaaatacaatccaaaaaaaggtttttattaagtgtacgtacaaccaaatacttaggaatgcgttatattggtgtttattcacaggaggtaccaggcaatgatggggatggcgaagtttcagcataacataccgtctctaactatgatatggacaacatatatttgggtggagcatcatccactg

SEQ ID NO: 169890 - DNA, 530 bp, Arabidopsis thaliana landsberg; identical to SEQ ID NO: 77956

SEQ ID NO: 169891 - DNA, 944 bp, Arabidopsis thaliana landsberg; identical to SEQ ID NO: 450

SEQ ID NO: 169892 - DNA, 745 bp, Arabidopsis thaliana landsberg
atgttggggaaacaaaccttcttcttccaccagggtgattatcacgctaaactcagaaagcctgttcttggtgctttaatgcctgattctatcagaaaacatggttcctgatattgaatccatcgctcaagactctctccgaaagttggaagggaacaatgatcaacacttaccaagaaatgaaaacagtaagctcctctgtattgtttttcctctgctagaaacagagctacacacataattcccctgtttttgaaaacagagcataacgttactttcctctgttttgatctttttttgtttgatcagtacaccttcaacgttgcgttgctatcgatcttcggaaaagacgaggttttatacagagaagatctaaaacgatgctactacattctcgagaaaggttacaattcgatgccagtgaatctccctggaacacttttccacaaatcaatgaaagctcggaaggaactctcacagatcctcgctagaatcttatcagagagaagacagaacggttcctcacacaacgatcttctcggatcattcatgggagacaaagaagagctaaccgacgaacagatcgccgataacataatcggagtaattttcgccgctagagacccgacggcgagtgttctgacgtggatcctcaaggacctagccgagaaaaacaacgatttagaaaccggttctggaaggaccaaaacggaccaggatttggcggcctttgggtaaaaaaaaa

SEQ ID NO: 169893 - DNA, 1302 bp, Arabidopsis thaliana landsberg
ggaagagaattctctgagatatttcactcctcttggtttcagtagtggttctcgtttaggagataggaagaaagggaaagtcctttcctttcaggagaaggagagagttgtgagagaagttaaatccagtttggtggttagtacttctagggacagagttgcagcacatgtgaagttcagggatttatcttcttctggtttcatttccaaggtaacttcattgatctcattataaccattccaaagtttgactgtatggaggaatcagagcatttctaattgtttcctttaccttgtgttccttaactgacatatttagcattccgttttgagtcatattgccccctcgcaacttcttatgttatgcatattactgaactcttgaagcttatgttgatgtttactaaaccgcaggatataaatgctgagtcagtagattgctcccatggatctccggaatgtcagacgaattcggaagatgctcatcaacctagtcctgtttctgttctggagccaatgttttatgaagataacttagacgatagtgaagatattttagacgacagtgaagatcttccttatcccaattttctaagtaaggaacaagttttgtagctgtaaaaatatttgttgttgcatgcaatgtaaaaaactttaataaactacttgtgttaatctcattaggtctagagaatcagctggaaaccctgaaatctgaatctgagagttattcagatgggagtgggatggaagtatcaagcgatgaggagtctgcacttgattctgcaatcaaagaaagcacggaaagtgaaccaattgggttcttggatacccaagaaagcagggattcttcttacattgatgatatcttggctgaagctttactcggggaccagaattgcgttcctggctaacgggatttagtcatcaccccccagatcttcgagaaactggctaagaagtattacacagagacatcttggcatagatctgacagaaagattttgtttgacagagtcaatcaagtcttgtagagattctagaatcctttcagctacaccaacatggaagaaacccgtttctaggaggctaggcactgcgctaagcacatgtggactgaaacaagaactctggaaagtactttctaggcaagagaagcgatccaagaaaaaatcattggccaaagtgccagtcatagacattgatgagtggttagaactcgaagctgatgatgagtcagtggtttgtgaattagaaagtatgatagtggatgagttgttgtctgaggttgtcagcttcatg

SEQ ID NO: 169894 - DNA, 1838 bp, Arabidopsis thaliana landsberg
  unsure (1)..(1838): unsure at all n locations
cattaattttggtcaagggatacggtagagaagatcctctctagggttccgatgaaatctctaagagcagtttgatttacatgcaaaaagtggaacactttatccaaagatttgagctttgtaaagaagcacgttggtcatgcaaaagtacagcaaagaaaaaggagtttatcgtaatcatgatgattgattttagggtttatttgacgcacatcaatctaaacaccaacgttgaatcgtgtataaagcatgaagctaaatttactaacctagacgatcagatgaagtagatgtagcttaagtctttcactacgatggtttgttgttaaacatcacgaaagacaatgctaagctagtggtttggaacccgtattatggacaaaaccggtggatcgaggtcgagcctagttttcaccgatccgacttgtatttgtatgctctaggatatgagaagagcagaaaatgatgcggtaggcacaaaatcttgagattcattaatttttgtcgtgacaattgtttctgagtacaaaatctatgattttaactagtcctgggcgtttgggtattcggttcgggttcggatcggttctttcggattcagatctttcggaactagaatattagaccccgttcggatacttgaaaacttcggttagggttcggttcggtacatttcgggtttggatagatactggtacttccattgaaaaaccgaaaagtaactgaatattattggatactagttcgtaactactacaatatacccgaaaatacttgatactaagtaaatataccataaaacctgtaaatttgtaataaataaaacttgaaaataaaatcaataaagcatgacataacaaaagtttcatacgttcaagccaaaaagcaagattcaaaacatccaaataaaaccatccaaatagaagaaagaagttcaaatccaaagcaagacataaaaccattattcaatatcaaatccaaagcattcaaagtaaagaaagaagttcaaatccaaagcaacatccaaacatgatagattctccatgacttgttcctgttacatcaaaaccaaataagctcagttgaaaaatgaaaaaccataataaatattaaaccataaaccaagtaaaaatgaattacgaaatgatcattgattcataagtctagtatattaacattgagccataaaccaagttcagaagtaaaagaaaacaaaatggagtgatgaagttaccttgtagtcgtttccttgattagtcttttagtccaagttcacttcattttgaaactctgaaaaagattcaatcaacacccaagttgtgttagaacataagagagttttcaaacaacatctaaaactaaaactagtaaactacatagataaagttacctttctcaagcttatcaagtaattctatatcagcaagaagttgtgcatttgttagaaaagtgttttcactcagcttgatttcacttttcaaccactgctcaaggcaaaccaaagtctctaccatataatgagtaaggcagcttctacttggctccaaaagacgaccactggtgctaaaagcactttcagatgcgacagatgacacttgcattgcaagtacatcttttgcaatttctgataaaactggatacttctgactattgagtctccaccaagacaagacatcccactccattccaggaagagtcttaggattntctacctcttccttcagatagatatctaactcatctttaggatcagtaaccctaatttcattaaccatctctatataagacctgtccatcctttcagactcaacattactatcttcagctaactcacatgc

SEQ ID NO: 169895 - DNA, 423 bp, Arabidopsis thaliana landsberg
ttcatgagtggacaaagaagctatttgatggacatgatcgactctcgatgtatccctcatagcgatttaagacatgcctataactctaaaaccgttccttcgaggtcatacaaagaaacaagttccagttactaaaatgtttcacatttgtatatccgatccgaccaaggaagttaaaattgcattcttttctgtagggtactcaatcaagacgcggtcgttacaaatcttggaggtaactttcttatgcgaccttcgagctggtttagcgggttatgcagaaatgaccgagacagcacagagaacaagactctgcctctactggaggtggcgacctactttcgttttaagacatatacacgaacagttttgttaaaaaccgagaaaggtactaaattcttggtgaaatcttatgcccattag

SEQ ID NO: 169896 - DNA, 721 bp, Arabidopsis thaliana landsberg
gatcagagaagttacggcggagcttcctatttacttggcgaactctctcaacagtctccgtctcgaaggtcaaaagacggcggcgattgagattctgcagcagtttaattggcaagttcctgattgggtcattgttcctggaggcaatcttggtaacatctatgcgttttacaaagggtttcatatgtgtaaagagttaggtcttgttgatcgtatccctaggcttgtttgtgctcaagctgctaatgcaaatccactttacttgcattacaaatctgggtttaaagaagatttcaatccattgaaagcaaacactacatttgcttctgctattcagattggtgaccctgtttcgattgatagagctgtgtatgcgttgaagaaatctaatgggattgttgaggaagctacagaggaagagttgatggatgcaacagctcttgctgattctactggtatgtttatatgtccacatactggtgttgcattgacggcgttgatgaagctgagaaagtcaggagttattggagcgaatgatcggactgtggtggtgagtacagctcatggattgaagtttacacagagtaagattgattatcactccagagtcaataagaataaatcccgattattatcataaacatgtgatttatatgaataaatgttaaatgcttatatcaaaataatatgtataacatatcaaatcaatataattacttca

SEQ ID NO: 169897 - DNA, 2184 bp, Arabidopsis thaliana landsberg; identical to SEQ ID NO: 6601

SEQ ID NO: 169898 - DNA, 859 bp, Arabidopsis thaliana landsberg
ttattaaattcaaatctaattgatttttatatagatacgttatccagtttgatctggtttggtcgaatgtggctcggtttgtatacttacgcatccttagctttatctactacatagtttgacttcagaaatttgtgcaggttcaatggaatgtttgtcatgcgttgagcaatttattctccaatgagacagtaaaactgcaagatatggattggtaagcatcctttagctttctattacccaagctgcttctctcggtgacctctaataacttctatctttttcttttgcagggctccaagtgtttttagtatcttactattgctacttcgtgatgcatcaaactttaagataagaatacaagctgcttccgctttagctgtcccagcaaccccacttggtgactttgattctctatccctctctctctctaaccatgtagctatattaatttggagaatagaatttgtttgtcttatattgtatgtgttttgggattgtacagtttggctgatatctttctcgcacattatgtaattgcagcttatgggagatcattccctgatgttgtcaaaggtgtagagcatactttacaaagtctccattctgacagagagacgactgcagcaaatttcaaatataagaggtcgcttgagaatcaggtaacatgatgttggcgtaattttaggtattgatgaatgatttatcttaaacgcagttgctcgttgcagttaacgtcaaccatgctgcatctcctgagcctagtttcaagctgtcatttcgaagcgttgtcagaatttcttataagagtaagaaactggcagctattattgttaatacaactggtttcatcgcttga

SEQ ID NO: 169899 - DNA, 1534 bp, Arabidopsis thaliana landsberg
ctcttcaaatcttctgcatgtatgctttggtcaaattcccctaaagatggttttcagaaccttgcttggaaagtaataaatcttgccggtaacctccctttggggctaagaattatgggctcctattttaggggaatgtcgagagaagagtggaaaaagtcattaccaagattagagagtagccttgacgctgatattcaaagcattttgaagttcagctatgacgctttagatgacgaagataaaaatttatttcttcatatagcatgttttttcaacggtaaagagattaagatattggaagagcatcttgcaaagaagtttgtggaagtcaggcaaagacttaacgtcttagctgagaaatctctcatatcttttagcaattggggaactatagagatgcataaactgctagcaaaactaggtggagaaattgttcgtaaccaatctatccatgagcctggacaacgccagtttttgtttgatggagaagagatatgtgatgtgctgaatggtgatgcagcagtaagttcattgcattgctccctacaatatttagtttatttaaaaactaaccatctagacctttttttcttgttcctttatttcagggtagtaaaagtgtaataggcatagatttccactacataatcgaggaagaattcgatatgaatgagagagtttttgaaggaatgtctaatcttcagttcttaagattcgattgtgaccatgatacattgcaattatcccgcggtctgagctatctttctcgtaaacttcagttactagattggatatattttccgatgacatgtttgccttctactgtgaacgtggagttccttattgaactaaacctgacgcacagcaagcttgatatgttgtgggaaggagttaaagtaagtactttctctttatttcttaatctatcatttggcttttttgtacagctaatcagctttaaaaaatagaatgatcttgcctctcccgattttttccatggaagtatttccaggttgttaagtggtttcacttctaagtgtatactcagccatgtttgtgttatttgtctgtacagccgcttcataatctcaggcagatggatttgagttattctgtaaacttgaaggagcttcctgatctctcaactgccattaatctccgaaagttgattctttctaattgctccagtctgatcaaactcccttcttgtattgggaatgccatcaatctcgaggatttacatcttaatggatgctcaagtcttgtggagcttccctcttttggggatgccattaaccttcaaaaattgcttcttcgctattgctcaaatctggtggagctcccctcttctattgggaatgccattaatcttcgggaattggatctttattattgctcgagtctgatcagacttccctcctctattgggaatgccattaatcttttgattttagatcttaacggatgctcaaatctattggagctcccatcctccattgggaatgccattaatctccaaaaactggatctt

SEQ ID NO: 169900 - DNA, 5337 bp, Arabidopsis thaliana landsberg
ataatttctaaacatatatactcaaaatatgggagttccaatgtttaaagtttaattaaggctattgccttaattcttgcaattttttttgttttgtttggattttgcatatttttagaacataattcaaatatttcggtggtaagtctctgttccattccatcaattaattaggaattggaattagagaactaggagtttagcaatgttattatcatattacttggaaatgtgtttttagagcaaaacgattgctaaaataattggaaggaaatattaaatataatggaacaaaaaaatgtaaactatataataataataagattgttctttagcattacattatatatctttcacggcccgaccaaaaagtagataaaccaagaagtggagaaattatgaagctccgattttgcttgcctactttctccaagatttttggctcagcggatctaaacttccacatgtcaattcctcatttgttctgaattaaaaacatgaattaaaagctatatattgaaaacaaataaaatggctaaatcgcttaatatcaggtctaaatggtttgattacgattaggaattttaataaatgagaaatctaattacagaagtacaaagagggccgtagcaaaggaaatcttttaaagcaatagcaattaaaaaggctaaaaaaaataaaacggaaaattataattttaaatactcaaccatttctctttatagtttccttatataacaaaaacaaaaaccattccatcaatttctcatctttgttgttttcttcttcttcttcctcttcttttatgtccatcgccgtcgaagtttctccggtaatggaagacatcacacggcagagcaaaaaaacttcggttgagaatgaaaccggcgatgatcagtcagcaacatcagtagtccttaaagctaaacgcaaacgccgatcgcaaccacgagacgctcctccacaacgtagctccgtccatagaggcgtcaccaggttaacatgagaacaaaacacactcaaaacgtcaccgtttttgtttatctttacttaatcatataactttccgattataggcatcgatggactggaaggtacgaagcacatttgtgggataagaatagttggaacgaaactcagaccaagaaaggaagacaaggtcagtctatacatacacacatatctatatatctttatgagttattaaagatattgtcgttttgatcttcaactccgatttctccggggaatgagttcgtcgttactgttcttgatttgaaaattaattatatcttattttgtattttttgttcttgttggttaatatgtttttttttttggttttgctgacgatgctgaccggaataatggctgactcatcacgtgcagtatatttaggtgagtttgttttggtcatttttcatatggcgttttctttttgcactctcaaattggtagacactttttagagtgagtgatgctaattaattatcacctctaattataaaaaaacaaacgttacttctcagttctttataaagccaacttggtggttctaaacaaaagcatacatgttaacatctatggcgtgacaaaaacaaacaaatgatctgataattcttaaaagtacatttcgatttgtctttttcaaatgtgcttagtcacaaattgaaaatcaaccccaaacatttttgctacttcacctttatgtttacaattgacatatgtagttttttaagaaaatatttacgtaatatatagtattttaatacgtaaatgaaaagaaataaagatttaaaccaatgtttaattaatgtattaatgtggtttgcacaggggcatatgacgaggaagatgcagcagcacgtgcctacgacttagcagcattgaaatattggggacgagacaccatcttgaacttccctgtaaattttctcggaatcctagttaatacttaaaaacattaaataattagaaagtagttactattcacatgatctttgtttgcttcacaatctttcttacatatgtgttcttatagaaagaaacccaaagaaagaagaagagtctgtttatatctaattcttgcttcttcttttttttttttttttagttctaataactattgtttattttgtgtgtgatttatagttgtgtaattatgaagaagacatcaaagaaatggaaagccagtcaaaggaagagtatattggatctttgagaaggtaataactaaatcacttttttgaatgattggtggttaactataattctctgctttcttttggttaacaaactaagtattgattaataatattttttggatgatttcttacagaaaaagtagtgggttttcacgaggtgtatcaaaatacagaggcgttgcaaagtaaaccgactttaattccccataataaaagactataagaacaatgatcaatttcaatattactaatttaaatgtttgataagtatatggacttgcaggcatcccacaatgggagatgaagctgaatcgaagagtgtttggcaataaatttataccttggaacttcggtacttttaaaacttttttatttttttatcagtataatgaaaaaacatattctccaaacgcaaacaaactagatgaaattcaagcaagtagaagtaaatatgcgatatcatccacaccttgatcaaattgtacgttttcataaagtttaaacaactactcctgcatttgagtttattagtggttagtttcctaaccaaaaagattgtatgatacatatatattttgattacaaattataaacattcactaaattggatggtggtaaatggtagttgtgataacacaaattctacaaatgctatatgtgggattctctcttcattataaccaaacatttttactttgaaatctttaataaggggttgatatatgcacgtaatcagatcttgtgttggttgggaaatagatcaccaaacccaaccacttagtcaagcctttaatttattatagagtttgtttttccttatgtttatacatatttatttattgtatggtttaaattataagttgctcatccaattttactggccaatttaattctatttattatatgttttacatattgtcctatatcaacgggacaaagtacattttcaaaaaaatctaacgtgattattgacttgtagcattttcattttgttgttgttggcattattcacttgtgtagcacaatattacgtattaggcaaatccataatagtttggggagtaaaacgtaataattaacaaaccaaagaattagaagtttcataaattgtcttaaacttctcaatgtgacattttgcaccccttttattgtagcgacgcaagaagaagcagctatagcgtacgatatcgcagctatcgagtaccgtggactcaacgccgttactaacttcgacatcagccgttatctgaaactcccggtgccggagaaccctatcgataccgcgaataatctcttcgagagtccgcattctgatcttagcccatttataaaacctaaccacgagtctgacttatcacagagtcaatcttcgtcagaggacaacgatgatcggaaaacaaagctcttgaagtcgtcacctttagtggcagaggaggtaatcggaccatcgacgccacctgagattgctccgcctcgtcggagcttcccggaagaaatccaaacgtatttcgggtgtcaaaactccggcaagttaacggcggaggaagatgatggtatcttcggtgatttaaattctttccttacgcctgatttctacagcgagttaaatgattgctaaagtgttgttcttctgataagttttgtttcttagttgttcagaatctcggttgtgaaaatcaacattgacacatcgattattctttcttgtgacaatcttatataataaagtttgaatctttttaacagttgtccactttcagtttcctctgatggtgaatttgatttgagaggtactgaggtagtttgtgaaactcagatagaggaattgtttatgtagaaaagtaaggtatacagatgatgatcattggagggatgttcagagattgaactcgtccgtttattaatgatcaaacagtacaacaaagcttggaatcaatagaagccaagcaaatgcagaatgcttggtagcctgagaatggatacctgcaaacagataaagcaaaagacttttagatgataaagcctttaatcctaagcttataagtatgtttatgtttggctcattctggtttgagcaagtagtacctgaagtcgattacatatcttgctttgtcaactctccctatttgaagaattgtctgccttggagtctcctgcttataccaaattacacaatgtttaggattcttgagattggtttttgatcaaagctttaaagttgtggaaatgcaccgtgagtgttagctgaaagttcttcaccgagctctgtattctcagtcctgttcttcctctgtctctgaagtctaactcatgctgcttggagatctaaagaaaggggaagacacaatgaatttcatgctttacaaaatcaacaatgatgcccggtgagacttactttgttgtaatgtggtatccttgagcatagcttctgaattttttccttattctcaagccaatcaagcggtagtttactagcttgttgaacctataaggagatacatacatacgtgtattaacagttttatgttttcggaatgcaagattgatggagagaagtttaagattaggcatttacctgcttattgttgtttttctgcattggctgctgctttggtagcaaagttctcattcttctgtagctccctgtccaagttgttatggtgggtgtgaatctgcagaagccaacagatgcataagcaaacccaaaactaaggcagaggcaaattcatcaaaaaacacggcattcaaaatcctcaacgcttacattacaaccgaaagaagcggcttcaccattttacctacagaaccaactcgaactccctgcaatggaatcaaaagaccagaaacattcatactcgatttccaacctataagcagaaccaacaccgttacattgagcttgaatttctgaccttggcccatatgtagtacttggaacccaagagattagccgtcatggaaccgacataactttcatccgaactgcacagcaatcccttaacattctgtgccaccctaaatatagattttccattacgtcggctatggcaagcaactgctaactttcggtctttacgcccccgaccttactgagatatcagacacatcgatatcactacatctcaattcttac

SEQ ID NO: 169901 - DNA, 593 bp, Arabidopsis thaliana landsberg
gaaagaaaaatcaaaatgctattgaatttaaaggtttttttttgttaccttctatagctaaaatagtaatatatgtaaactaataactgtagtgtaacaatcttggttctataaaagaaaatcatacagcaaagtgaacagcaaaaaagcaacagtgtcattatatgtaattatctttccgtacaaacaccctttgttttctagtggtaactcgcttgtctaagtcattgactcattgggtctctcttatcaccagccccacaaaataaaactcatcaaatcaaactctaataataacatgattagctgttaatgggaaatgattatctctaaatcaaatcaaattttaatttcaggttattcacctaaaggaacaactttacgaggctgaaagagagatccaacggcttgcaaaaagagttgaaggaactttaagtaacagtcctatctcatcctctgtgaccattgaagccaatcatacgacaccgttttttggagattacgacatcggatttgacggtgaggctgacgagaacttgctctactcgccagattacattgatggattagactggatgagccaatttatgtaa

SEQ ID NO: 169902 - DNA, 680 bp, Arabidopsis thaliana landsberg
atggagaagtcttgggtttggctgccaaggtaagcttttgatagttatttacgttgttctcttatacttacagtgattatattggagttaatttgttaattttattgactaacagggctagccctgactatggagaaggagctaataaatttgttgaggcgtcagccaggagattgggtaatcctgaggatattttatgtccttgcagtgattaccgaaatgtttgccatcaaccattagggacagtagtagatcatttggtttttagaggtatggatcaaaagtgtatgatgaatacttgttggagcaaacatggagatatcagggatcatcagcggactgatgttcagacttctgagtttgaggcttatgacttgattaggactgcattttatcagggagaagaaaatctgcagtctcagactgagagtggtgatcagagttctcatgttgagagtaaagaagaatcagagtttaggcagaaactgattgatgcagaaactcctctatactcgacgtgtcccagctatactaaagtttctgcaatcatggcactctatcgcataaaggttaaaagtggtatgtctgagaactacttcgaacagctcctgacattagtgcacgacatgctacccaaagaaaatgttctaccaaaatccagagatgagatgaagaagttc

SEQ ID NO: 169903 - DNA, 407 bp, Arabidopsis thaliana landsberg; identical to SEQ ID NO: 38907

SEQ ID NO: 169904 - DNA, 564 bp, Arabidopsis thaliana landsberg
aaaatgttacttttggtttttaggataagccatccgttctttaccaaccagccggcgactttcttcccatgatcgatgaggtaaataagtctgtgtcccaattggattctttgcctcatctgtgtatgtctctgagtttacaattttttcgttttattttcaggtttttaaaccattagtggagaaatccaaatgtacaccagcagccgcagtggagaccctcaagttctgtctttctgtgcacttctgttgtgttacccagaaggtaattgttaataatccccacaataatatagtatttagaccaaatactcatccgattaatgtatgtttattgatagcaaacctaatagagtgcgcaataatctttaaataatattcagcaatggacctagctggcttcaaaagttcggtcggtggtaaagaactatccgccgttgaacctgtctcaaggtccaaaggtatgtcgtgacatcttcttgttggtgaatgtcatatttcagtgttgttttttgcttttaaatttctaatttaatcaattgtgcactaataaccaggctttta

SEQ ID NO: 169905 - DNA, 659 bp, Arabidopsis thaliana landsberg; identical to SEQ ID NO: 18601

SEQ ID NO: 169906 - DNA, 1053 bp, Arabidopsis thaliana landsberg
atgacgactgtgactccgtccgccggtcgtgagctctcgaatccgccgtccgacggcatttctaatctccgattttctaataacagtgatcatctcctcgtttcttcatgggataaggttagtgaaacacctcatttgctctttgactgatttgattcgagtcctctctttccttcatctgaagtttttttttctgttgttctgtgtttgttgaatctaagcgtgtgagattgtatgatgtgagcaccaattcgttgaaaggagagttcttacatggcggagcagtactcgattgctgttttcacgatgacttctccggcttcagtgttggcgctgattacaaagtccgacggtattgtctctcttttctctcagtcatgtgaagagactgttggcataataatgtttcccctcaggctaatttaacattggctgctcagaagttgttgattttactgcgattttttcttcatattttgtcactgtgacggctatggaatctttctacatttagcaaatgccttgaatccgttgtataatttccttaatttataaggtttcatctggttatactgcaggattgtattcaatgtcggcaaagaggacattttggggacacatgacaaagcagtgcgatgtgttgagtattcttacgctgcgggtaggtagagtggtactctttatgctagtttgaacttcaacactgacgatttctggtgcttttaagttctagaaaactcatagctaaccagtttttgttatatgactctgatgatggatgatttaataccttagctgtcttggacagtgaactttgttccctaatcttttgtaatgtaactatatctggaactcagatattttgatttcagcattttgtttttttacacattatctttattttgtgatgttacaggacaagtgatcactggatcttgggataaaacagttaaatgttgggatccaagaggcgctagtgggcctgaacgcacccaagtgggaacatatttgcaaccagaacgtgtttactctatgtctcttgttggacatcgt

SEQ ID NO: 169907 - DNA, 1055 bp, Arabidopsis thaliana landsberg
tcagttcaagatgatccaacagttgggagcgaaaggaatcaagtcagatgaacgtaatcagcgggagtgggatgatggatctgaacatgatgatgtaacaaagatatacgtacgaggtggtcgtgaaggaataagatccatttatttcaactatgtgaagaatggaaaacccaaagatggatcaatccatggttactttgactctggtttcacacaaacggtatgttctggaacatatacggtattctaaaaatcggcggctacctatgcgtctacaaggccaaatcacataaacattttgatattatattggcaatatccgtcaaaagaaaagtcaatgttattttgatgtagatctgataaggctgccgattaatttagttttttttcttttaattttctatttgctttttaattcatttttaaaagggaaaattatcctttaacggtaaaatgtaagtagtaaaagtttactctaagttcttttaaagtctataattagcaattctagatcatcgtctagaaaatcaacatattccttaactcattttatattgaggtgaagttgatatataatgctgactttgtggtatttgtattttcactaattatgcagtttgagattaaccatctacgaggtgaatatcttgaatctgttgacgcttactacgacaaaaagtcctacggtatgcaagcaattcaattcaaaactaacttcaggacttctgaactgatggggtatagttatgagtgtactatgtttacgctagccgtccaaggaaagaagatcattggatttcatggatctaattatgtacatatattatctcttggagcttacttcatttccattgctcctacgagattggaagtgaaaggtagtaagggaagcaagaagtgggacgatggatttgaccatgaaaatgtatcaaagatcgaggtactaggtggttttgaaggcatactgtacatcaaagttgactatatcaagaatggaaaactaaaaactggattagtccatggtcactctggtggtgatggttttttacagaggg

SEQ ID NO: 169908 - DNA, 589 bp, Arabidopsis thaliana landsberg
  unsure (1)..(589): unsure at all n locations
gaggggaagagcagaatacgaagggcgaacgggcaatagcgaggatgacaaagaaaccggatactgtggatatggagattcgtnnnnnnnnnnnnnnnnnngtggggattacaaaccaggatggcagatagagaaagagtgggaagaagcagagaaagttaggaagagaaataaagctatgggagttgaggatgaagatgatgaggctgacaaggatagcgacgaagacgaaaatgcattgccctttgcttgcttcatttgcagggagccttttgttgacccagttgtcaccaaatgcaagcattacttctgtgagcattgtgctttaaaggtatgatcataacttaaatcacaattacgagtctgtttttttttggttgtgaagaaatactaatgagttttgtttaatgtaatgatgcagcatcacacgaagaacaagaaatgctttgtgtgtaaccaaccaacaatggggattttcaatgcagcacatgagatcaagaagagaatggctgaaaaacggagtaaagctgaacaaggattgtaagtccttctttcacaggacaaaaaggcaaaaactatacatttgatt

SEQ ID NO: 169909 - DNA, 1179 bp, Arabidopsis thaliana landsberg
ataaatggatttataattcttaacccctttgtttttaaaatttttaccttggtatatttgaaagaaacttttactttatttaaaaaccataatcaattgtatatattttttatcaaaatatatcaaacctaccctcatgtagcgtgggttcaaaatctaatcatgtatttagaatagatatagttttaggaatttgagagagttacatgtcaaccgttgattaggtgatgattgtaaaaaaaaatacacgcttgtagacttttctctttgtcgattattgttctagtgataaaacatgagatttctctgatgattctgttgattaagagtaaaattaagtgtgaaaatgttgtgactgagtgttggttccgccagattcttcatgtactaaattcaattgatttcttttgcaattgggaataatgtgaaggttcaacgattggcaatggaggtttgacagttaccttcgctgaagcagataacgatcatgaatggtgtttcttgtggtatgtaaagattatgaaattataattctactcaaatagtttgttaggtattgttttctatgtgtgtgtgtgctcatcaggactctcttcgtttttggttgttttgagctaacctacaaacccttgatgttcatacacactatttcggtcaaaggaggtttcaatgttgtatggaactaaaaactgtttatgattgttcactgacctttatgtatgtgacaaaagctaacatggctactaccgtggctaacttgacaaataatatggagcaagtttctaagacccttgaagtgagtttttatatgctttatctatggtgtttttggtgatatatttagttctagagttaaatctggatcttaactcgtttcattatcaggttgcgaaaagacatttaacacaaaggattcagagtgtcgatgataaggtagaaaatcaaattgatctctctaaggaaattaatagcgaggtatgaattatgatgttgtttacctttacattagttcctatgattagaatgattggctttcatgttacgcatttgtagtgcgttgcagaatttttgacaatatgatgtgcttgtggttatgcaacaaaagccatttctgctcatgagaaaatccactcacccgagatatatttggagacgctgcgtaaaatgccttatcaccaa

SEQ ID NO: 169910 - DNA, 573 bp, Arabidopsis thaliana landsberg
gagcacatggcgaattgccgcgcgcaatcggtttacgtcggcatttccggcacgcacatccgcagcctgaattcgaccggtgtcgcgccggtgcgtgccggcagcgtgtcggaccggaatgtcgacagcgtgatgaatgcggcgcgtgcgatcgcgattccggccgaccagaaaatcctgcacgtgattccgcaggagttcgtcgtcgacggtcgcgaaggcatacatgatccggtcggcatgcacggcgtgcgcctcgaagccaaggttcatatcgtcaccgggtcgatctcggccgcgcagaacatctacaagtgcgtcgaatcctgtggactgaaagtcgacaagctcatcctccagcatctggcgtcgagctacgcgacgctgctgccggacgagcgcgatcttggcgcctgcgtgatcgacatcggcggcgggacctccgacatcgccatcttcaagggcggcacgatccgtcacaccgcagtgctgccgattgccggcaaccaggtcaccaacgacatcagtgtcgcgttccgcacgccggcgccggacgccgaagaactgaaggtg

SEQ ID NO: 169911 - DNA, 1272 bp, Arabidopsis thaliana landsberg
cctgtcttctcttattctctaatacataggaaaagaataatccccttgtgttctgctactttctgaaagtgatgatttgtttgttttttcgttttgtatgttaaaccagcccagccaaacttgtggaaactgtaaaacaacgtttcatttctcttggtggagtcattttagaagactccagcctctcgagcatcgtcatctacaatgatttagctgtgagttatctggcgttttctccaaaaacattgtacctaagaagagtattcagcttattgatatgaattgtttgaacattttgattgacaggttatgcaactttctaaaggtgacacattatcttcccgtctcgttatcgatgccatgggaaacttttctcctattctgaagcaggtcatatcttggcctaagaacatatctacttttacattttcatttgcattagttatggtggtaaaaaaataaaacttactgattcgcttttcttgagcaaattgtgtattgcccttgcataatacttttcttgttatgtattctgctacaaaagatcaaacgtggtagaaagccagatggaatgtgccttgttgttggatcttgtgctcatgggtttaaagagaactcatcaagcgacgttatatatagcagttcatcggtgaccagagttgcagattccaatgtacaactcttttgggaggtaaaaaaatctgtccccattctaacacaattcccataaccacaaagaaatggttttaatataaggatgcttattgttgctttaaggctttcccggctggctctggtccattagaccgcactacttacatgttcacttacactgaaccgcaatcaacatctccgagtttagaggatttactcgaagaatactggaaactgatgccaaaataccaagtgagtttccttccatcttatatcacaatctttcatcaactttcgttttttctttcttttcctgatgtcttttggcaaagggagtctctcttgatgaattggaaatactgagagttgtatacggaatctttcctacataccgaaataggtacgactttgacaagaaactccgctgatgcctgtatctctatatctatcatctctggaagtttgaaattctttcattgatattataattctgtctaccaatttcggacaataatacttgctgaattctgacatatctaaccctgttggattggacttggcaccaatccgtagtcagcttgatttggacgtgttctacaaggtgggtttggtcattta

SEQ ID NO: 169912 - DNA, 522 bp, Arabidopsis thaliana landsberg
tatgttcattgcgatctcaagccagaaaatgtccttgtcttcccttgtggagattcttacgaagtgaagatttctgattttggactctcattacaagtcggagaagttcctgatcactggaaaatcgaatacccgtttgttggaacgcttaactacatgcctccggagtctctacatgacggtgttgccaataaaaccctagatttgtggtcattagggtgtttagtgttggagatgtatgtgtgtaagaagccatggatagggtttatacctgaggattttgtgtatatcctctctaatggtaaccctccagagattcccgagagtttgccttgcgacgcaagggcgtttattcaaaagtgtttctcaaggaaccctaaggagagaggtactgcgtctgagctgctgtctcatcggtttttgcgtcaagaaaaatcgaaattgaagatgatttctccattcaacctgctaaagtttaagaaatttttaaacaagctcttgaggttgaagaatttcctctga

SEQ ID NO: 169913 - DNA, 538 bp, Arabidopsis thaliana landsberg
cggcatcggtgcgcgccgcatctggcgcggcgtgtcgccgccggggccgctaaagccagccacggcaaccgcaccgggcgccgctgcagaagccacgcgcgacgtgctgacgctgaagtacctggacggcggccacggccacggctgcaacaacgaggacgaccgcttcacgctgtggcggcggcgcttccaccagttcacgttctacggcttcctgctgtgcttcgccgccacgtgcgtcgccacgctctatcactacctgctgcagctggaagcgccgtatccgtttttcagcctgccggtgctgctcggcaccgccggcggcgtcggcctgatcatcggtccgctcggcctgttgtggctgaacctgcggcgcaatccgcagcagggcgatccggcgcagcggccgatggatggcagcttcatcgcgcgggtgctgttcatcagcgccagcggcctgctcatgccggccgcgcgtggcgacgccgccatgacgcaactgctggcactgcacctgggcgcggtgatggcgctgctc

SEQ ID NO: 169914 - DNA, 1720 bp, Arabidopsis thaliana landsberg
  unsure (1)..(1720): unsure at all n locations
gaacgttctgtcatcgaaantatcagcgatatcagcaacgtgaggaaatgcggtgagatgtgtttgtcagattgcaagtgtgtagcttcagtttatggtttagatgatgagaagccttattgttggattttaaagagtctgaattttggcgggtttcgagatcctggctcaacccttttcgtgaagactagagctaatgaatcttatccctcaaattcgaataataatgattctaaatcgcgtaagagccacggattaagacaaaaggttctggtgattcctatagttgtggggatgcttgtgcttgtggcactacttgggatgttgttatactataatttagataggaagagaacactaaagagagccgcaaagaactctcttatcctttgtgactctcctgtgagtttcacttaccgcgatctccagaactgtaccaacaacttctcccaacttcttggatcaggtcagaatcaacaatcatcatataacaagttttaacttagaagtgtttcaaatcttattttctttgttttatgatgtggtaggtggatttgggacagtatacaaaggaacagtagcgggtgaaacgctagtcgcggtgaagagattagacagagcattatctcatggcgagagagagttcatcactgaagtcaataccattggttcaatgcatcacatgaaccttgttcgcttgtgtggttactgctcggaagactcacaccggtatgacttagaagacttttacaaaacattttactctgttttcaagcaaacagatttgaataaatgtttttttggtgacattacaggcttctagtttatgagtacatgataaatgggtcgttagacaaatggatattctcttcagaacagacagctaatctacttgattggcgaacacgtatataaatagcggttgcgactgcacaaggaatcgcatattttcatgagcagtgtcgaaacaggattatacattgcgacattaaacctgaaaacatcttgttggatgataatttttgtcctaaggtatcagattttgggctagccaagatgatggggagagagcattcgcatgtggttacgatgattagagggacgagagggtatctagcgcccgaatgggtgagtaaccgcccgatcacggtgaaggccgatgtgtatagttatggaatgcttcttctagagatcgtaggtggtaggagaaatcttgatatgtcctatgacgctgaggatttcttttaccctggatgggcctacaaggtaaatttagacgatttctaaaatataaagaaagggcttaaattagttataaacataaagattataacgtcctaacgagtttttgaaaataaatgaataggaactaacgaatgggacatctttgaaagctgtggataaaaggctacaaggagtagcagaggaagaagaagtagtgaaggctcttaaagtggctttctggtgcatacaagacgaagtatcgatgaggccgtcgatgggtgaggtggttaagcttttagaaggcacttcggatgagataaatctgccaccgatgccacagacgattctagaacttatagaggaaggattggaggatgtgtatagagcgatgaggagagagttcaataatcagcttagctctttgactgttaatacaatcacaacctctcacagttatcgttcctcctctcggtctaatgcaaaatgtagatattaa

SEQ ID NO: 169915 - DNA, 1745 bp, Arabidopsis thaliana landsberg
atggatgttagcgagctcgaggagaatttgttcgctgctagcgatgccaaggttatattctcataaatggatatgttttaaccatctctatctctaagattcttgtcggtagttgtaggaataaaatgaacaagggatatgcttagtatgttattgttatctccttttttgtgttttggttttggattgcttctatttttttatgttatagagttttgattctcctgaattcagacttgcccctttgatccctttccctgttaattgttagcaaatcttgtgttgagagagtatatgggaatcttagcggcattagtattatttccattcttgttctatgatgtaactctttcaatttgatggtgttctctattctttgctaaaagttgtgtgctgcgtaaaatgcagttacatggagatatgtgcaaggaactatctgcagtttattgcaaggtattgtccatcttcccttcgttggaagaagcaagacctcggagtaaatcagggattcaaaccttgtgttcgttacatattgcacttgagaaggcaaagaacattcttcaacactgttctgagtgtagcaaactttatttggttagttgctctttctttctttggatacattattctcttttgtgtgtttggtctctctcttgaattcctccacttttatatgttgagcaggccattactggggatgctgtactgttaaaatttgagaaagcaaaatctgcacttatcgatagtcttagacgtgtggaggacattgttcctagttcaattgggtctcaggtaatgtatatatcagtgcacacaaaatctttccttttgcaagttaataagtgtccagggcttatgtgctagatattggctttttttgtttattgattttagaattctagttgataaaatggtttatgctaatgttatttgacttcttcagattttggacattgttggtgaactagagcacaccaagttcctacttgatccatcagagaaggaagttggtgataggataattgcactattacaacaagggaagaaatttgacaacggcagtgacagtaccgaacttgaaatttttcaccaggcagctactagactcagtataacttcttctagatcagctctggcggagcggcgtgctttaaagaaagtcattgacagggcacgtgtggaagaagacaagcggaaggagtcaattgtggcttacctgttgcatctcatgagaaaatactccaagctatttagaagtgagatgatggatgagaatgactctccgggttcctatccatgttcgcctaatgaagatcatgggagtgttcatgggtttggtcgtcagctatcaaggtttggttctttaaacgacaagcccatgaacagcataaattcaggacagatgcctgttccacccgaagaactgagatgtcccatatctttgcaacttatgtgtgatcctgtcattattgcttcagggcagacttatgaacgggtctgtattgagaaatggttcagtgatgggcataatacttgcccaaagactcaacaacagctcccacatatctctttgactcccaataactgtgttaaaggtcttattgcgagctggtgtgaacagaatggaactcccccctcctagtgggccgccggaatctcaagacctcgactactggagactagctctctctgacttcgagtccaccaaatcacagtcagtcaacagtatagggtcgtataaattg

SEQ ID NO: 169916 - DNA, 838 bp, Arabidopsis thaliana landsberg
gaaactcagaaatgcatgaacggtcttgtgatggttgatatagggtgcttctgaggaagaattaaactcacagattgaagcagcttgtactctagttgaaaagcttatcactgaaaatgctgatctagttgaaaaggtaaggtgtactactatagatcttactgagttatttgttgtgggctgattgaaaatctcactggttgttaccactacattgtcaggtgaacgaattgtgtattaagctaaaccaatcacagcatgcttcccctgagagcctagcaattgaagtagagaaatctgaatccttagaagaaatacccatacacgacgagttgattagaattgataactctagggacatggatactgcatcaataaagagaaacttttcagaaggtgaaatagaagaaacggtgccgctctctctgaacgcgaatggggaagtagacgtggaatcacaggttgcagtagctggagaagacgaaataaatgctggtgtgccactggcgaacgctccacttatcggtgctccattcaggctcgtctcgtttgtagcaagatacgtgagtggtgcgagatttgacggcaaagaaatagtttttgtaaaactcaacaatacattggaggcagagaaaatgcatcatcaaatctatatgtctccctctctcttttataatttgaagggacctgagaatcattgattagctttgcacaatatttagagtacacaaatgtatattgtaattttttgataggataacttggtgatgacaatgatgttgattactgttgttttgttctccatctttttcagaaaatcttgaaagttgaaacataa

SEQ ID NO: 169917 - DNA, 398 bp, Arabidopsis thaliana landsberg
gtgatcgtcaacgcctcaccgacgggcggcgatcgcgcgaagctggcccagctgtccgcggtgaccgacgtcgtcgtcgtcaacgagaccgaatccgaccattggcgatggccggtcgagcatcgggtgatcaaccgcggcgcgcggggtgcggcctacctgagcgccgccggcaccatcgacgtgcccgctccgcgggtgcgagccgtcgacacatccggcgccggtgacgtgttcgccggcgtgctggccgcgagctggccggccgggcctgagcatgcgctgcggcgggcttgcgcggcgggtgcgctggccaccctggtgcccggcgcgggcgattgcgctccggaggccggcgcgatcgacgacgcggtgcggccgggctgattaccggcacg

SEQ ID NO: 169918 - DNA, 2563 bp, Arabidopsis thaliana landsberg
tttgttgtttttgtctacctcatctcattgaagctaaaccattctaagtgatcgtcgatcaatcgggccatggaaatttcacgaccatacaaaaagctattgattcggtcccaatcaacaatactcattggttcttcatcaacgttaaagccggcctttacaggtcagtgtagcacaacatacatcattgactgtaaataaagttacatatggcttgtagggaagttacatatgtgaaagtgtttactaactaatgtcatttctctatgtcttgtaaaatcaagagagaaaataacgataccgcaaaaaaaacctttcatagtaatcgtgggagctgggaaacggtcaacgagagtagaatgggacgaccatgcctcgcttgcacaaagccctacctttgctactctagctgataacaccgtcgttaaaaagatcactttcgccgtactgtgattttactttatattatggcatttcctatgatgattccttctttttattaaatatatataaagggtttcttttaatatattagaattcctacaacttccctagcaatgggaaaataaacaagaaccctagagttccggccgtggcagcatttatcggcggtgataagtcggctttttactcggtaggatttgctggaattcaagataccttgtgggactcggatggccgacactacttccatagatgcaccatccaaggcgcggttgatttcatcttagggagcgggccgacctcgtaggtgttctctggtcgcatcggacaactcctcgccgagccacaaaagaaacccctttcgcaatagtctccagaaaagaatgcgtaattccagccgaaatgatagtaccgagcctacgccggagtctatcccccgagaacacccctgataatactcagaggctcctcgacgaactcgatctgatcgatgaacgaagggattcagccttggttcgcatacaaaattatcaaaatgaaacggctcttcattataactcaaacgttcgacagcgtagattccacgaaggagatcgggttctccgaaaagtttttcggaacacccccgaaccgaacgctggaaaactcagggcacactgggaaggaccatacttaatctcgaaagtcgtctgaccagacatttacgaactcgccgatttaagcagcaaagtcattccaagatcctggaatgccatgcacctcaggaaatactataactaagtgtgagaagcataaacttgaactacgaggtggtttgatccctaagaagggtacttaggcagctcgtcttcgaacgagttcagctaccccccacccccaaattaaaaaagggggagtgggtccgtatatccatactcccactttcatttatcttgtgagttttcactttggcatgaataaaagttctacttttcacagtttgtacctgtttcaaatactacgatgagcgacggctcagagtatcttttaaacctacttggttacaacgcactatctaaattcgagttataacctgccggaaaaacttcgcgcagaatctcgttctatcttcagaaaacccagttatatcataataccggtaccccagcttctttctaaacgctggtgaaagagtgaatcggatcaggtcgcaaccgagaagatttcaccaatgcaaaaagttaagtctattccattcacactggccctaaccaataaaacggttcgtaattagaaagcaattccgcgaaagagcgactcaattaggttacggtaacatcaaacgaataaaacgcatcgggatcttatgagaggccaaattttcaaaaggtgaaatttgtggataaagcaatccagacataagtgtttacaaaaaccaaaaaggataaagccatccaagcgccaatctttacgtacacaaaaataaaaggaaagctggttcgggtcacttgtcaagtccttcatttcgcgaggcatcgccacggaagttcgaaccggcttggttggcaataccgatctcatccacctggcattccaccgatctgttgcctgcacgactctggggatccaaggtagaaggaacataaggaatggccaactcttccataacttctttaaggagactggtatatgtcgcctcggcgactacataatccttctaccagctccttctcgtcctccaaatgcttcccaccctcaagcgcatcaatcagctcggtgtttgccttagcatgcgccaaatacatccagtggtcgctagcttgatcgaccatagctaacttcgcctcgacagctttcatcctctcaacaaacaaagctgcagtctctcgcgctaccgatcgacgaacccgagcaattttattatccaagagacctctctcctcggtcaacatacgcttgtacctctcgcctgtcgacgaaatctcaaggttggcctcggatagtaggatgggattctcttaatgggtgaaagcatcctgtgtggctttccccttttctggaaacatcatagtcgctatgcgttaactagagcaagttccgcagcggccaacttcttttcagcttcgagaagcttgaccgc

SEQ ID NO: 169919 - DNA, 799 bp, Arabidopsis thaliana landsberg; identical to SEQ ID NO: 60798

SEQ ID NO: 169920 - DNA, 1145 bp, Arabidopsis thaliana landsberg
ttgggttaagtatacctcttgtcgacgctctggcacttatcccggatttccacaagttattgaaagacttgatcgtagagagaattcaagaagtgcaagggatggtagtattgagtcatgaatgcagtgctatgagagagaagaagatcattccaaagaagcttagtgatcctggttcattcactctaccatgctctttaggtccattgcattcaagagatgcctatgtgatttaggagcatcagtcagtctcatgccactctccgttgcaaaaagattggggttcaatcaatacaaatcttgcaacatatcccctatcctagctgacagatcagaaaggatccctcacggttttcttgaaaacctaccaatcaggattggagttgtagagataccaactgactttgtagtcctggagatggatgaggagtcttatggaccttttgattctagggagacctttcttagccactgtaggagctatgattgatgtcaagaaagggaagattgatctaaacattggcaaagactttaggatggcctttgatgtcaaagacgcgatgaagaagcctaccatagaagggcaactcttttggatcgaagaaatggatcatttagccgatgaattactggaagagctggcagaagaagatcatctgaacagtgctttaaccaaaagtagtgaagatgggtttctgcatttggaaacattgggataccagaagctgttagactcccataaagcaatggaagaatcagaaccctttgaggatttgaatggaccagcaacggaggtaatggtaatgagcgaagaagggtcaacacgagttcaacctgcacactcgagcaaatactcgatcttgtctgccaacgaatttggggagccgatcatcccaacttcagatgactggtctgaactgaaggcgccaaaggttgatctaaaaccacttcctaaaggtctaaggtacgcattccttggtccaaactctacttaccatgtgatcattaatcctgagttaaatgatgatgaagtgaacctgctattatttgagtttagaaagtataggagagcaattggttattcattatccgacattaagggaatttcacctagtttatgcaacgataggatccaccttgaaaac

SEQ ID NO: 169921 - DNA, 560 bp, Arabidopsis thaliana landsberg; identical to SEQ ID NO: 44628

SEQ ID NO: 169922 - DNA, 1935 bp, Arabidopsis thaliana landsberg; identical to SEQ ID NO: 36528

SEQ ID NO: 169923 - DNA, 1063 bp, Arabidopsis thaliana landsberg; identical to SEQ ID NO: 54810

SEQ ID NO: 169924 - DNA, 1805 bp, Arabidopsis thaliana landsberg
aatggtacatgggaggagatcatctacataccaaaatctaatatgttggacgtttgtcttgtcaagacagggccgtccacaccattgatatcatccttggtgttaaggcctcttgcaaatgctacttacatcactcaatctggttggttgaagacttatgttcgggtttatctaagcgactcaaatgatgtcatacggtaactcatcttaaagaaacgcgtttttcggactaggacattgctcttagcatatatattttgtaaatgttttaactattgaaaattgcggttacaagctctaagcatcttttatggctactaattcaaaattgtaccaaatgtagatatccggatgatgtctatgatcgtatatggggttcatactttgagccggagtggaagaagatttccactacacttggagtgaacagctctagtggatttctgccaccacaaaaggcactcttgactgccgcatctcctgccaatgctagtgcaccattggctattcccgaagtactagatctcccaagtgataaactatacttgttcctccacttctctgagattcaagtcttaaaggccaacgaaactagagagtttgaaattttttggaataaaaagcttgtgtacaatgcttatagtcctgtatatctacagaccaagactatacgcaacccatctccagttacttgtgaaagaggagaatgcatactagagatgatcaaaactgagaggtcaactctcccgcctttgcttaacgccgttgaagttttcacagtggttgaatttcctcagccggaaacagatgctagtgatggtacgttagcaataatcttacaacgtttgaaaatatgttttaccataactaatcttaaatgctaaatctaacatattttcaaacattgtcgaattttatgatagtggtggctataaaaaacatcaaggccatctatggattgactcgagtcacatggcaaggagatccatgtgttcctcaacaatttttgtggaacggtttaaattgcaacagcatggagacgtctacacctccaagaatcacttccttgtgagaaaaccttttcatataataagaaacgtttaagaaaaccttttcatataataagaaacgttttctaactgcattattactttttttgtgctatgatgtttatatagggacttgtcttcaagcgggttaaccggaagcatatcagttgtaattcaaaatcttacccatctagaaaagttgtaagtatgatcatttttcccacgaagatgaaactcttattcaatgaattttgatctccaaaatatcgaaatttcagggacttgtcaaataatagtttgacgggagcaatcccagaatttctagctaatatgaaatcattgttgatcatgtaagtgttttgatacttttggtcccaatactccatgtgttcactttcaccaatgtatgaaatttttttctccttcactagaaatttgagcaagaacaattttaatgattcaattccacaagctcttctcaatagagaaaaggaaggactgaaattaatgtaagaaaacaactccactacgttcacaaatttcattttgaaagcccctttcctttcgtattcagaattctatacaattgatgctttttattttgtcagtgttgatgaacatggaatgaatcaatgtctacctggttcatgtgtcccaaagaaaaaatttccagtgacaattgttgcactggttgctaccaaggtgaaaagttataatcatcgtggtgatgattctcgtttgtgtcgtagaaagaaa

SEQ ID NO: 169925 - DNA, 2445 bp, Arabidopsis thaliana landsberg
  unsure (1)..(2445): unsure at all n locations
atggcagcaaccttcgcatacctcaaagacgtccgtccctacaccacaacatggatagttcaggttaaagctctttattcctggaaacaatacacacagaaaacgggtgaaactctcgaactgattttctctgatgaacaggtattaaaatcaaactttcatttacactttctaacgtctcattcatatcagacagcttatcctatttattttacatttcagaacaaaaaaatccatgccaccattcggacagacttggtgtcaaagcatgttaataagctaactgttgggcagtgggtttttgttgagatttttactctcaactatgctggcggtcaattcaggccaacgaatcatctttacaagatgacatttactaacggaactactgtgatgggatctgatcctgtatctgattctatgtatctatcactggcaaaatttcataaaatccaaaatggagagtttaatccatacatattagttggtaaacatttattaaaaaagctaatattaataaatattcactgtcgatattccatttgtattaaattaacacctttttcttttatagatgtcattggtcagattgtttctattggagagctgcagaacttagaagcagccaacaaaccaacaaccaaaattgagtttgaacttcgtgatgaaacgtaagtttctggacgtttgacttttctactaatctcacaaatcaattttaattatatatctcactaatcaatttttttgttttacagtgatgagaggattggctgtactttgtggggtacatttgctgaacagatatttagggcatgtcaagactctaatcgtggaatggtgatttgcattctcagatttgtgaaaatcaaatcttataaaggtatatctaattcattctcggcttcctctcttatatctaaatgaattgttattaagatacttctatattatactaggtgtaaggactctatcaaattcctttgatgttactcaagtgcatgtcaatccgccttcctctgaagcggttttcttccaacaagcgtaagtgacgtttgattttaagtttttcagcaactttacaaatggaatcctataagaaaatgtgtttgtgcttactagaattgtattttacagcctgccctctgatggcctaagcctcatctcccgcgaaaggcagccaaggtgggaaatggttgtaaacaaagatgttgattggcttgattatctgaggaattcaatttctgacttgaagtgttcaatcgaggttgtattcatatcacctctagcaaataaactattctatttacgatatagatcacctctttaatatctgtcaaaaacgttttctgcttttgtagattggaaaggctagggttttgtgtactatttatgccattgacacggattgggcatggtattacattagttgtaagacttgcaacaaaaaagtgaaccatatcgatgctggagtccatggtgtgaataacaaggggaaaaaccaaggttttggtgtgccacttgcaaaactgtggtcactaatgttgtcccaaggtaataacaatcaacctatgggtttagagaaactatttcattactcattttggttaaactatttcattactcattttgagtcaatntgtgttacaagtttatgctttacgctaatgttatggacaatcttggagaggcaaggtttctcttatttgattcagtttgctctgaactcattggcgagtcagtcgcatctattctcaatggatcactcgatgaggtaggttctctatgtttattaacacaaacagaagcggtgtaaactgaatagatcctacactgattgtaatatacatttttccttcttaggttgtggaccctgagaatttgctacggccagttaaaaacttaattggaacgacctttctcttcttggtgaaggttgaaacgaacatatatcagatggaaaggaagactacaaagtttggaaagttctttgcaaggttgaaaaagaacacataccatattttgctgatatggtgaatcttgcctctattgtgtcagctgatcaggttagctaaatcaaacattatctaaaatttagttgcccgtgtattgacaattggaaactgatatgcgaaacgattctttcccaaaggcacaactcatgttagagaatagccacgacacatcagactccggtactccttcttccatggtattgctgatgaatcctccacctctaagaagatatatgttgaacccattgacttggaaaagtcaaacctagaattcagactcacttctcaacacgcacaactaggagatcctagcggaaaggatagggatgagaaaggaaaaggcgtggagactggagtaccaagtttgaggagcagcgttcagtatgaaaagaaggacgtggctgtgaaggtcaaagttgagaaggagtga

SEQ ID NO: 169926 - DNA, 1286 bp, Arabidopsis thaliana landsberg; identical to SEQ ID NO: 28200
  unsure (1)..(1286): unsure at all n locations

SEQ ID NO: 169927 - DNA, 1233 bp, Arabidopsis thaliana landsberg
tcactgaagatcggcgatgggagagagagactacgaagcagaaggtattttagagaaggcgaagattcctttgttaaaggatcaaaatgtggcagaggaggaaaacggagaaataaagaaagagatatggctagagacgaagaagctgtggcgtattgtcggaccagctatattcactagagtcacgaccaacttgatctttgtcatcactcaggctttcgctggccacctcggcgagctagaactcgctgccatatccatcgtcaacaacgtcatcatcggcttcaactatagcctcttcgtatatatacgcaaacaatactttttatgtagcttatattataatgttgggtttaatttgttaagaaactatatatgtttatatgcagattggaatggcgactgcgttggaaacgttgtgcggtcaagcgtttggagcaaagaagtatgacatgtttggagtgtatttgcagcgatcttggattgttcttttcttattctccatcttgctcctcccaatgtacatctttgcgactccgattcttaagttcatgggccagcctgacgacatcgcagagctctccggtatcatctctgtttgggccattcctacacatttctcatttgccttctttttccctatcaaccggttcctccaatgccagcttaaaaattcggtatgtaacttatgatttgaaaggtcagtaggtcacaacggtgggggttagtccacatatcttgtgaactagacagctctatttttggggtagacagtgtttgcaaaaatattgaagagtttccgtgtgaaattgatgagtaaaactaccattttttcattgatgttagattaacttattatagaaagttaattgattttttgtagatgctagttatttttggcaatattcctttgttttatttatttgtgtgtgtgtgtttgtgaacgatttcttgcatttagaaatcctaaaatgtctttgtatagtatgtttgtttttctcgttcatttttaaatcttggaaacttgaatgggtcagcgagcttggtggaccaataattgatgaataaataacatttacccaaatggtcaaccacgtgttcctcgttgaacaacaagctgtctcatttgatcgtactagtgaattaaccactattaaatacataattagtggactaattgggattatttgttaatctttcttgagtttctagtttgttaattgaagtttaaca

SEQ ID NO: 169928 - DNA, 512 bp, Arabidopsis thaliana landsberg
  unsure (1)..(512): unsure at all n locations
tggtatctttgcanaattatgagtaagcatggcaggatattagtggcaatgagnnnnnnnnnnnnnnnnnnnnnnnnnnnnnnnnnnnnnnnnnnnnngggctatgaagtgattggcctgaccatgaagacctgggactatgcctcttccggtggaagctcaaaagaaaccggctgttgtagtcttgacagtattaacgatgcacgcgcattggcggtgggctacggctttccgcattatattctggatatcaggagtgaattcggcgacttcgtaattgataattttgtggatgagtacctggctgggcgcacccctaacccatgcgttttgtgcaatacgcatattaaatgggaagctttacttaaacgggcagacaagcttgactgtgaatttattgcaaccggccactatgcaaatatccgcttgcaccatcacggccgctacgtaatatcaaaaggcaaagacgaaaacaaggatcaatcgtacgttctctggggcgtttctcagga

SEQ ID NO: 169929 - DNA, 746 bp, Arabidopsis thaliana landsberg
  unsure (1)..(746): unsure at all n locations
gattcaacaatggcagaagaagctaaagctaaaggaaatgctgctttctcttccggtgacttcaccaccgctataaaccacttcaccgaagccattgctcttgctccaaccgatcacgttctcttcttaaaccgttacgctgctcacgtgtcgcttcatcaatatgctgaagctctctccgatgcgaaagagacgataaaactcaaaccgtattggactaaaggttatagccgtctcggtgctgctcatttagggttaaaccagtttgagttagccgtcactgcttataagaaaggtttagatgtcgatccgactaacgaggcgttgaaatctggattggctgatgcggaggcgtctgttgctaggtcacgagctgcaccgaatccgtttggtgatgcttttcaaggaccnnnnnnnnnnnnnnnnnnnnnnnnnnnnnnnnngactagaggctttttgcagcagccggattttgttaacatgatgcaggagattcagaagaatcctagcagtcttaatttgtatttgaaggatcagagagtgatgcaatctcttggagttttattgaatgttaagtttaggccaccgccgcctcagggagatgaggctgaggttcctgagtctgatatgggtcagagttctagtaatgagcctgaggttgagaagaagagagaaccggagcctgaaccggaaccggaggtgacagaggagaaggagaagaaagagaggaaggagaaagctaaaaa

SEQ ID NO: 169930 - DNA, 400 bp, Arabidopsis thaliana landsberg; identical to SEQ ID NO: 70274
  unsure (1)..(400): unsure at all n locations

SEQ ID NO: 169931 - DNA, 547 bp, Arabidopsis thaliana landsberg
agtggcgcaacgttcggacccgggagctctcgccgggccggttcttcacgtcgaccgaggcggcgcagggctcgacggtcactgtgatcggctccgacaccgcctcgaagctgttcggcctccagagcccggtcggccagcaggttacggtgaacggtacccggctgacgatcgtcggggtgctcacgtcctcgggagcatcgtcctcgggttcgagcgaggacgacctcgccgtcgtacccgtgggcacggcgagccggctgaccgacagcacctcgacctcggtctccacgatttacgccgaggctgccagcgaggcaaggctggccgccgcctaccaggaggtgcaggctctgctcgcaacgcggcacggcgtgaccaccgccgaggccgacttctcgatcgccacgcaggactcgctcgtcgagaccgcgaactcgaccaacaggaccttctccgtcctgctgggcggtgttgcagcgatctcgctgctggtcggcggcatcggcgtcatgaacatcatgctcgtctccgtctccgaaaggat

SEQ ID NO: 169932 - DNA, 723 bp, Arabidopsis thaliana landsberg
aaagacattactaattattctaaaaatatatttgatttttttaatggtaatggattcatcggagtagacatgggctttcgaaacacggccgggccggcaaaaggaccagctgttgccctccgtgtgagtggtgatatgtccgtcatttatagatgtcgtgtcgagggatatcaggatgccttgtatcctcacagtgaccgccagttttatagagagtgctttattaccggcactgtagatttcatttgtgggaacgcggtggcggtctttcaattctgccagattgtagcaagacaacctaagatggggtagagcaatgtcataaccgctcagtcacgcgcatttaaggacatttactcgggcttcacgattcaaaaatgcaacattactgcaagctcggatctagacacgacaaccgttaaaacgtatcttggaaggccttggaggatattttcaacagtcgcagttctgcaatctttcatcggtgatttagttgatcccgctggctggactccttgggaaggagaaactggtctgtcaactctccactaccgcgaatatcaaaataggggtccgggagctgtgactagcagaagggtaaagtggtcaggctttaaagttatgaaagatcctaaacaggctacagaattcactgtagccaagctcttagatggagaaacttggctaaaagaaagtcgaattccatataaacgtggattgtaa

SEQ ID NO: 169933 - DNA, 991 bp, Arabidopsis thaliana landsberg
  unsure (1)..(991): unsure at all n locations
tggtttacccctatagatttccaaaattgattgatttttatggaagaccaaatttgctctgctttgctttatgacttatgttgtatagtgttgttttaaaggctctaggtgtttcttttgttatggaacgtggtattaatggtgggactttttgtatttgtacagatagatgaaaatgtaaaaagggagataatcaaccacaggtccttaagacatcccaatatcgttagattcaaagaggtttgttttcaactctcttttaagctgttttcttattattaacattttcaggaaaaaaaaggaattctataatttaatccttaggattgcttcaggttatattaacaccaacccatttagccattgttatggaatatgcatctggaggagaacttttcgagcgaatctgcaatgcaggccgcttcagcgaagacgaggttgttctctcttttttttcttgctttgatgattaatcgaagattcaaaatgctgaggctaatatatcgtttactatcatgtannnnnnnnnnnnnnnnnnnnnnctcatttcaggagttagttactgtcatgctatggtaatgaaaaatgctctctatcaaatcaatgcttcatcctctgtgaaattcagctgacttaagaagttaaattttatgttgtagcaagtatgtcaccgagacttaaagctcgagaatacgttattagatggtagcccggcccctcgtctaaagatatgtgatttcggatattcaaaggtatctttgaaaacatttcagaaactctgagttagttagtatctctaagctttgtgttttctttttcagtcatcagtgttacattcgcaaccaaaatcaactgttggaactcctgcttacatcgctcctgaggttttactaaagaaagaatatgatggaaaggtactccattttcatagttcccaaactagtatgataaccatatcttgtagaaagaacaatctttctatttttatcct

SEQ ID NO: 169934 - DNA, 1018 bp, Arabidopsis thaliana landsberg
tctcaggagcttcttctccttcttcttcctccaacaacgatcggaagctatcatcggcggagcagttaattctcgatctcagcaatcccgaactcagagaaaatgcacttcacgagttgtccaaggtcatctctctctctctctcaccgaattctcttactcgcgaatttttgatcgtttgggttttcgttttctgcgttctattgaatggaatttcgaatgtatttggttgtttagtccggtgaatcgtatacatgcttttagattagcgattcttaattattccttgccgcaaattttgagggaatttgtaagattactgttgagattgtaaaccttgcatgaacaggggatgaaattatataatcgaaatagttcaacactgattaaggcgttgatcacgattggtgagcaatttaagttggtatgaggattcttcactgaagttaaacgtctggacaattaaaaaatcaaatggttttgatgtttactgtactcattgcttttgatttcattcattaagcagttcttctcactgaaattcatgtctaatcccgtgtttcattatttcagaagagagagatctttcaagatttggctccgcttttatggcattctgttggtaccattcctgctcttctacaggtactctctcctctatgttattatatggcacttgtcctttattcttcaggggaaatgatttattgatttatggcttctctatatactgctatagttttagcattttaacttttgagatttgatgtacattgtattgggtaagatctagtcattttctttctttcctcttttcaggagattatcgcagtttaccctgccctatctcctccaaccatgactcctgctcaatctaacagggtgtgcaatgcacttgctcttcttcaggtgcataaaatattgtcaatttcctctttcttttttggggagacttacaaacgtttatatatgtatgttcaatttggaagactctaatttttattgattcgactctttt

SEQ ID NO: 169935 - DNA, 1282 bp, Arabidopsis thaliana landsberg
gggaagaaattattaacgcaacttcatcattctctgaagatttaaagatcggaatgggagcttacggggatgtttacaaatgcaatctgcatcatacaatcgccgctgtcaaagttttgcattctgctgaaagtagtctatccaagcaattcgatcaagaggtaaccaatcaaaacataattcttatttgaaatgtttctctgttttcttcaaaaaaactgacatttgtattcaccatttaacctcttagctcgaaatcttgagcaagatcaggcacccgcacttggttcttcttctaggagcatgtcctgatcatggcgctctagtgtatgagtacatggaaaacggtagcttggaagatagactgttccaagtcaacgatagtcaaccaatcccgtggttcgtgcggttaagaatcgcttgggaagtcgcatcagcgcttgttttcctccacaaatcaaaaccaacaccaatcatccaccgcgatcttaagcctgctaacatcttgcttaatcacaactttgtcagcaaagtaggagatgttggtctttccacaatgatccaagctgccgacccattgtcaaccaaattcacaatgtacaagcagacaagccccgtgggaacgttatgctatatcgatcccgaatatcaacgaaccggaaggatatctccaaaatcagacgtgtatgctttcggaatgatcattctgcagcttctcactggtcaacaggctatggcactgacatatacagtagaaacagccatggagaacaacaacgacgatgagttaatacagattcttgatgaaaaagcaggtaactggccaatcgaagaaactaggcaattagctgctttagcactccagtgtacagagctccgttctaaagacaggcctgatttggaagatcagattcttccagtattggaaagcttgaagaaagtagctgataaagcaagaaactcgcttttcgctgcgccaagtcaacctccaagccatttcttctgtccattacttaaggtagtaacttgtttgctacgttatctgtttacttgcaagagatgtgaggttaatttaaagaagaatgttgttatattgcaggatgtgatgaaggagccatgtattgcggctgatgggtacacttatgaccggagagccatagaggagtggatggagaaccaccggacgtctccggttactaattcgccgttacaaaacgtgaaccttttgcccaatcacactctttacgcagccatcgtcgaatggagaaatagaaatcagtga

SEQ ID NO: 169936 - DNA, 596 bp, Arabidopsis thaliana landsberg
tccgtcgctccgcggctccgtcctgccgccatcgtgtcgtccacgagtccgggacttcctggccgcgcgtcccggggatccacgtctcccagttctccatcggcttcggcccggcgctcgcctcgttccgcctcggcccctgtggatgctactgcgcgccatccagctgggcggctacgtaggcttccccgacgacgacccggagtccgcttcgcgcccgacgaccccgacctcctccgcaaccgccccgtcccggaccgcctgctcgtcgtctccgcacggtcgccgccaacctcgccttcgccttcctcatcgtctacgcgcaggcgctcaccgtcggcgtccccgtgcaggcgcagctccccggggttctcgtgcccgaggttctccctgggctccgcggcgcgcgcgcgggcctcctccccggggacatcatcctcgctgtgcccggggccgcgccggacccgtccgtccccgtcctcgtcgacctcatcaaggccagccccagcagggaggtgcccctcaccgtctcgagagccgcgcccggggcggtggacaggcggtccgttgagctcaccgtcgtgccggacaccagc

SEQ ID NO: 169937 - DNA, 5632 bp, Arabidopsis thaliana landsberg
atgggtaaggagcattgcaatggatcaagtccacaggtaaaggaatgactctccatcagacggactaagcatagctacgatgcgactatcggtaaacctcgaaaccattaggctagcccttagacctaggatagcttaagaaaaccttagttttaggaaaccttagaaggacttggaaaccttagaaggactaggagaccataggggaatccatttgggcagtgggatatgagtatgggtcgtgaatggtcaaggtattgatcgaagaatgcagataagtgacgataacgagcttacttggttaattctggcatggaacgtgttatagacctaaggaagccttgatttatgtcatggaccctcatgagacattggagatggagtgagccctatcaatgctcttgcggtccagtgacagatcgtgggtttcgccggaatgaagaaacggacggccaggattgaattgcggctcatgtttatccgttaaggctcaagcttatcttctatgccgttcatccttatccatttaggttcttgcttatccacttttggatgatgtttatccaaaaaacggaaggaaccaatcagaggccgtttagtgtcccagaatgcccgtgggacgatatttgttgcgttcagactggtccgagccacctcgtgcttccccatagccgacctaacgcccatataaataccctctctgctcatttgattcctcagacccaaaaatcgctgagaagagcttagttcgcgggaggaaacctttataagccaaaccgctcgggaaatccaagtgagttttgagtcacgtgaagtagcacgtgaataggatagtttattcatttatttccttaatatagcttaggaggttaattatgattacttagcttaattattcgcttaatccttgattaggatagttaattaggtttagtaattgttacttaggattagtgatgactaattaggattagtatttcctaagcatgattagggctagttaaaccatgattagggggaataattacgattagtagtaattaagtatgcttagttgtttgactagtagagttttgcatataagattaatgcatgatagtatgtgagtctgttgtcatgttagttagtctttaattagatgactagcattagccgaaccatgaggatcccgtctgtatgttgtgcgtcgcatgtaactccgttccgttatggcatacgaaggctcggggttggatcgttaccgaccgggcgctacatgacgatgtagtataaaagaatgctatgtctcttatagactttgtgtctaagagtatggaggcatgtccttgggagatcatggatttgtagaaggccttacctaggttgatagaagcatgcttgcattagttgtctgctgcatattaggaaatttgagtctgcatacattttgcattgtgcattatattttgcttgtgttgtgtgttacgtgttatctttttttatgtcttgcttgttaggttgtattattgttacgtgttgtttgctgcttagggggtaagaaagggtattaggataacactgtctagatccggggttcactaagtaatgctagattacttatgatgctacttattcttttcaggatgccatagttgaccgaccttgtagagggtgctcgtgagttaggacaaaccaatgtaggttttacggctttttgtaaattcttactaagtatattatgtatggttttcaaaaaggatctgaaaactatatacgttttggtaaccatttctcgtatgatatatatatatatatatatatatatatatatatgtataagactccgatttctaaaatttatatggttatactgactcatataagtcttatccggcttacacaactcgcgtccgcggtacgcgttgaaaagccttaggccacgagcgggaggctggactcttgcggttggacaactcaggcgaacgaatttgtttcagaaacctgggttggccgactgcgggcgtctgacatgaagctcctattttgtttatatttttatagagggataggggtgttacaaggtggtatcagagcatggtttatgatgcaacgggaaaccatagttttcaatgtttaatcgagtaaatgtatcgcaaaaagctgttaggaaattgcttcagtcacttgctagagtttaggtagattggcctataggatttaccctttttttttaggttggcttacccttattgttactattataggtggcttacccttttgcttatattttcgtgtcttaacctttttgtttgtattatagtatgccgctaaagagatctcgtggtagggagtctgtggaggatgagggagggtccttgggtctgccgtccaggcgatatgacgttcgtgagagagtcatgggtaggtgggtgaggagggatgtggccgagtattcccgagttatgtcgaagattggatcgagcgatacagttgcttattctggtcttgcacggataattgctatgttagagcggattatccgggaggatgtgtagatagggtatgggatgatgatcgattcggattgtgaggatgattgtgtgatcacgggattgaggacggtggagcattagctggctccgggggcacatgagatcgtgatggtccatgactatgtgagtgtttcctctagcagttctgccacgccatcataaatcataagccttttcttgggttagtttccaaatatttactaaggtttatgatttctaggggaatcacggtaaccctaagctacacctcgaacaggtacaacctagaaaaagatcatcctcggtgtcgggaatcaatggggatgatggtcctgctacgtgagatagggaagtatacgtcggtgcaggaatctgaccgtcatctctcatcagcatacaggtagccgcataatgctcatactctccacagtagagacaagcaatggccatgggatgtactgcgtgtagaactgacagtcttgcgggtaatgaccatcctcgccacagatgaagcagaacagtatcttgatacccgatgtgaagcccccatcaaaggtcggaatagcgtcagccctcatatcagccttgaaacagagtatgggggacgtgccctcccataacagtgcaaaagggctatcgggagagtgatcaacagcctccgggacgtatggagaaatcggtggatcaacagcctccgggatgtatggagaaatcggtggatcaacagcctccgggacgtatggagaaatcggtggatcctgatcctccttcggatctgactcataggatattggtgaatataggctaagtgcaaaggatggcgaggcagaacttttcgaggaaacactcacatagtcatggaccatcacgatctcatgtcccttcggagccagctcctgctccaccgtcctcactcccgtgatcacacaatcatcctcacaatccgaatcgatcatcatcccatcccctatatgcacatcctcccgctctgacatagcagctatccctgcaagaccaaaatcagcaaccgtatcgctcgatctagtctccgacataactcgggaacactcggccacatccgttctcacacacctacccccgactctctcacgaaggtcatatcgcctggacgacagacccaaggaccgtccctcctcctccacagactccctaccacgtgatctctttagcggcattctataatacaaacaaagaggttaagacacgaaaatacaagcaaaacggtaagccacctataatactaacaacaagggtaagccaatctaaacaaaaagggttagtcctataggtcaatctacctaagctctagcaagtgactgaacaaatttcctaacaactatttacgacacatttactcgataaaacattgaaaaccatggtttctcgtagcatcacaaaccatgctctgataccaccttgtaacacccctatcccgctataaaaatataaacgaaataggagtgtcacgttgaacgcccgtagtcggccaacacagggttccgaaacgaattcgttcgcccgagtcggccaaccgcaagagtccagcctcccgcccgtggcctaaggcttttcaacccataccgcggacgcgagttgtgatagtccggaaaagactaatatcagtcagtataaccatataaattttagaaatccgagtcttatatatatatatatcatacgagaaatggttaccaaaacgtagatagttttcggatcctctttgaaaaccatataaaatatatttagtaagaatttacaaaaagccgtaaaacctacattggttcgtcctaagtcacgagcaccctctacaaggttggtcaactaagttttcctgaaaaagataagtagcgtcataagtaatctagcattccttaatgaaccccagatctagatagtgttatcataatacccttccttaccccctaagcagcaacaacacgtaacaataatactacctaacaagcaagacataaacaaagaaaacacgcaacatacaacaaaagcaaaatataatgcaccatgcagaatgcatgcagactcgaatttcctaatatgaagcggacaactaatgcaagcatgcttctatcaacctaggtaaggccttctacgaatccatgatctcccaaggacatgcctccatactcgtagacacaaagtctataagagacataacattcctttagactacatcgtcatgtagcgcccagtcggtagcgatccagccctgaggccttcgtatgccataacggaacggagttacacgtgatgcacaacatgcagacgggattctcatgattcggctaatgctagccatctaattaaagactaactaacatgacaacagactcacatactatcatgcattcatcatatatgcaaaactctactaatcaaacaactaatcgcacttaattattactaatcacggttagtccccctaatcatggtttaactaaccctaatcatgcttaagaaatactaaccctaattaatgaacactaatcctaattaacaattactaaacctaattaactatcctaatcaaggattaagcaaataattaagctaagtaatcataattaacctcctaagctatattaaggaaataaatgaataaactatcctattcacgtgctacttcacgtaactcaagactcacttggatttcccgagcggtttggcttctgaatgttttctcccgcgaactaagctgttctaagcgattttgggtctaaggaatcaaatgagcggagggagtatttatatgggtgttaggtcgcgtatgcgtaagcactaggtggcccggaccagtcagaacgcaacaaatgtcgtccccacgggcgatccaggacactaatcggcctccgattggttccttccgttttttcggataaatatcatccaaaaaaggataagcacgaccctaaatggataaggatgaatggcttgtagataagcttgacccttatcgcatatacatgagccacggttcgatcatggccgtccgtttcctcattccggtaaaacctactatctatcaccggaccgcaagaacattgatacggcacactccgtccccaatgtctcatgagggtccatga

SEQ ID NO: 169938 - DNA, 786 bp, Arabidopsis thaliana landsberg
gttgtgtgtgtgcttatatatatgcagtgtgctcttgggaatatagagtttgtggatatccttaaggtgatccggatggattatacaatgctatgcgatgttaaaaccggaggctgtggaataacaaaccttgttcatcacatcttaagtaaatgtccacctgtcttcataatcggtaaattaagaccaccatgtttgtgatgttttgttttcatttcatttattatgcttatgataaagccaatgctggtgttttgtgggtttgcaacattagtgttagaatgggagaagagtgaaactgaaaaacaaatatcagaaacaacaaaggctttatactgggagatagatatcagcaggatgtacgaaggattgaaaccaaacactaagtaccggcttgtgtcaatggtaaatcatctaaaacagtgtcacaaatgtgttggttattgttcttgtgtgttatttgttacagtcttagagtttgggatgtgatgcaggttggttgtggtgtagaagaagaagaacacatttgtgtatcttatgaaaataatcggtggttcaatctcagacatgatgctttaacaagagaggtaagacgaaccaactgagtttgtctctccttgattcgagatatgaatttagataggccaaaataggagtgatgcatttctggtaatgccataggaagttcgtaactggaaaagtgtggatggattctgtgaagagagaaaggatcggccagatattctgttttatgaagctaccagctcgatcgattttctaaactaa

SEQ ID NO: 169939 - DNA, 1683 bp, Arabidopsis thaliana landsberg
  unsure (1)..(1683): unsure at all n locations
ttggtaacatcaaggtatatagatcttacattgtcatagttttgataaataacatgataatcaagttaaagatttctaatttgtttctaaaacgaaggtatttctgcacgctacaacttcaaagaagcaagcaatgcacttgaaaatgaggaacatagagtggtggatgaagaagagacatttgccaatagggtttagacagcgagtccgcaactatgagcggcaaagatgggctgctatgcgcggtgtagacgagtgtgaaatggttcagaaccttccagaaggtcttaggagagacatcaagtaccacctctgtctagacttagtccggcaggtcagattgatcgtcatgatttattatcgattaaagaaaaaaggaagattaattataacgatgaaattagttaatggtgattaaagtggatgagtactacaggttccattgtttcagcatatggatgatttggtgcttgagaatatatgcgaccgtgtgaagtctctcattttcaccaaaggagaaacagtaagtatcttcaaaccaatttaggggacgtaaacaaattaatatatataccaaaatcttattaaaaactgaaattacaattcgtttgtaaagtatgcttcttcatatacaaaataaaaaattgtaaccggtttcaaaaccatcataaagcctttgattgttagcgtgagatccaagaaactgttaacgtcaacaatgaaggcaaagtaatgaaatctttgaaaatgcagattcagaaagaaggagatgcagtacagagaatgttattcgtagtgagaggtcatcttcaaagcagtcagttactaagagacggtgtcaagagctgttgcatgnnnnnnnnnnnnnnnnnnnnnggcgacgagcttctctcgtggtgtctccgacgacccttcgtggagaggctaccgccttcttcttcaacgcttgtaacactcgagaccaccgaagcgtttggcctcgacgccgaagacgttaagtacgtgacgcagcattttcgttacacttttgttaacgagaaagtcaaacgtagtgctcgctattattctcccggatggcggacttgggccgcggttgcggttcagctagcttggcgaaggtacgtctcatttattgacttttaatctcactcattgatatcagtttatagaagaagaaaaaaaaagttgtttaatggatagaagaataatcttgtttcacacattcctcctgaatatatcatatggaaattttcttttaaatttgtttaaaattcataattatgttctcttcatatatcatatgcatttcttgattatgtaaatagttattaattataatcaacatgacaggtacaagcataggctaacgttgacatcactgtcgttcataagtccgagaagaccattgtcaagatgtgcgtccttagcagaagacacattgaggctctatgcagcaatattatcctctcctaaacccaatgccgtcgattttgatgattattgattgaactatttttttgctacgtttgagtatccctcaattctggaacacttaagtggtaactatttcctcttctcatagttcatgtggatattcttttctccttccgcctttcccctaggtttaacaagtcattgaatgcctctactgaaatctacgaattagataggtcaccagtctaa

SEQ ID NO: 169940 - DNA, 675 bp, Arabidopsis thaliana landsberg
tctatcgtctctatatatctatgtttgttttcaacagatttggatgatactctttatcctttaagctctggcttatcagatgcatgctccaacaacattataggtattgctatgtttttttcttaaagatttttattgtgattacttcttaatatgtttagtattttatataaaatcaccatattacccttgtgcagaatatatggttgaaaagcttggaatagatgaagatggagtttttgaactaaaccaaattctttataagaaatatggaacttcaatggccggtcttaaggtaaattataactaccttcataaaatatatgttgatcagacacaataactgagtctgatttcttccattacacaaatatgaaatttgtttatgattaaatcgaaacttaaatttacaagatcatttatgcaggcggtaggttatgaattcgataatgacgagtaccaccggtatgttcatggtagattaccttatgaaaaccttaaaccggacccggttctaaggagtctcctccttggtctacctttgcgaaaattggtattatatattcgctttatcttttttttaagttttggcttagcttcagtttttatattaactgtgttctattgttaaggtattctcgaatggagatgaggttcatgtgatgaaggctctca

SEQ ID NO: 169941 - DNA, 414 bp, Arabidopsis thaliana landsberg
  unsure (1)..(414): unsure at all n locations
ccaaaagctggccttttcttgcacatggcatgagctggaccccggcaacgggcgatgcggcaagtgtcaatctgagcgataccgcagaagaggtgaatttactggtcgttgaacccggtgaaaacgccgcgctctgtttgttagcgcagcccggcgtgaccattgccgggcgagttatgcagttaggtgatgcgatcaaagtcatgannnnnnnnnnnnnnnnnnnnnnnnnnnnnnnnnnnnnnnnnnnnnnnnnnnnngtttaagcttccagctggacggacgttttcggcacacagctgcagcataaaatcgtaccgtcatcacctaccgccgatttcttcagcgctgtgacttcaccctcgaccagtttgattcgacagcatccgcaaatacctgcacgacaggagtaag

SEQ ID NO: 169942 - DNA, 1133 bp, Arabidopsis thaliana landsberg
gtttttgaatgtttgatattttctgagtgtagtttcttcaaatttgtgtcctcatcctaatgagaagcaaaggttggaacttggcaaaaaacttactttggagagtaagcaaattaagttttggtttcagaacagaagaacacaaatgaaggtactttatctgaaaagttatggttttgatagtagagttatgatttttatgggaatgttgtggtttttatattgaccagacgcaactagagcggcatgagaatgtgattctcaaacaagagaatgaaaaactgcggctagaaaacagtttccttaaagagtcaatgagaggctctctatgtattgattgtggtggagcagttatacctggtgaggtttcttttgagcagcaccaacttaggattgagaatgctaagcttaaggaagagcttgataggatttgtgctttagcaaatagattcattggtgggtctatttcacttgagcagccttcaaatggtgggattggctcacagcatttgcctataggacattgtgtcagtggtggaacttcactgatgtttatggatcttgccatggaagccatggatgagttgttgaagttagcagaattggaaacttctttatggagttcaaagagtgagaaaggatcgatgaaccatttccctggttcaagagaaactggtttagtacttatcaatagcttggctctagtcgagactcttatggacacggtatgctatactctctaataaccggtattttatcgatatatgcacactctactaaacgtctcatctttgttattggtttgttacagaacaaatgggcagaaatgtttgagtgcatagtcgcggttgcatcaacccttgaagtgatatccaacggtagtgatggatcaagaaacggctctattctattggtatgttactcaagaaccataaagattatatattttggcgacatttgctaattcaatgagtcctttgtttggaacagatgcaagcagagtttcaagtgatgtctccattagttccaatcaaacaaaagaagtttcttagatattgcaagcaacatggagatggtttatgggcggtcgtcgatgtttcttatgatataaacagaggaaaatgagaacttga

SEQ ID NO: 169943 - DNA, 1435 bp, Arabidopsis thaliana landsberg
atgtcttacgatgagatgctttctgctgcgaagaaagctgtttctctcgctgctcgtctcagcaacgtacgatcactcgtttcttccgtcttttggatcatcacatgattgattctctgcgatttctcgatttacattttaaaccataaattcttctcttttttcttcttcttattgctcgttgacatttgcgatacgtgttcgaggagagttagatgttttctttgaactcttttgtggagttaaatgtgtagactttttcttcttgtttcctgtaaattgtcaactgatatgagtattttcgaattaggatgtgaaaatctgagattttttatttatgaaaaaatatgaaatggggatctagctagacgtgactgaaatcttcgatcttgttatctcttcggtttcaatgtttataggaattgggtttttgttttgtattttagtcagattataacaagtgaaattgatttgctttttttccaggaagtgaggaaatctctgttggtaactgacgtttggaacaaatcagatgatagtcctgttactgttgctgattatggttagtagtaaaattgtgtatcactcagaaaaatgatatctttctctgttatactctttagatttcgatatctttattggctcattaatgaaacaaagtcatgttgttttaggttcgcaggcggtggttagccttgtactggaaagggaactccagaatgaacctgtgtctttagtggctgaagaggtgccaaacatatacaaaataatacattgctggtttttcttgattgaactaagatggattttgtttatgactttgtaatttatgtgtaggattctggtgagttaaggaagattgctgctgagaccgttttggctcgtattacagagcttgtcaaagatactcttgcaagtgatgaatcatatgctattgcttctcctttgacttcggatgatgtgctcaacgctatagatcgtggtaaatcagaaggaggtcctaagggtcgccactggatcttggatcctattggtggcactagagggtgagttctcatatgttgttgatatttcactaagcacaaacttatagttagttacttttggatttgttttgcaacttcatctcgtttcattgttcaacgcctgtgtcagagactaatcaatctcagagtattgttgcattattgaactgtcgtcatagatttgttttgcaacttcatctcgtttcattgttcaacgcctgtgtcagagactaatcaatctcagagtattgttgcattattgaactgtcgtcatagatttgttttgcaacttcatctcgtttcattgttcaatgcctgtgtcagagacttatcaatctcagtagtattgttgcattattgaactgtcgtcatagagcatcggaacttaaatttaactataacctgcgaat

SEQ ID NO: 169944 - DNA, 2049 bp, Arabidopsis thaliana landsberg; identical to SEQ ID NO: 35591

SEQ ID NO: 169945 - DNA, 1121 bp, Arabidopsis thaliana landsberg
atggcggagatttgctattttgggggtctagtccattataaatcaccatctcttcctttgtctcttcattctctcttccgcagcaagaagccacattactacaattccacttctctcatggctgaatgtctctcctcctccaccgtggagcctccttctctcctcgtcttctcaggttccactttcttcctcttccttgtttcgtgggtctccctaaagttacgatttttatgtcgataagatcgtctatttgtgttagatcttgaccaattacttaaaatttgacatttgttaattctgtttgttgcaaagtgcaaagctttatcattgtcttacattggtttagttagttttcttttgctctgaattttaaaaacgttatatttgttgcaatgaaggtggtactggatttaatggtgtggttgaagagttgaagaagttaacaacacgagtcgctcatgttcttcctgtctctgatgatggaggaagtactgctgagattgttcgtgttttaggtaagttctaggattcaataacaatggtataagacccagattatatgttttagcttctaaagttcattatcacaagtaatctaagctcaatatctccgttgctataggagggccagcggttggtgatatacgttcgaggtgtttaaggctgtctgatgagagtacttcagaggcacttgctgttaggcggttgcttggccatcgcttacctattgatgcacatcaggccaagaaagattggtaatttatccaatgactatgttttctttatgcacatagtgtggtctactctataagctacacatttaaggttctgtggtggacaatattgtgtaatatgccattggctgagttggaactttgacaggtacgatattgtagaaggtaatcattctctgtgggatggtgtatcaagaccctacagtgaaacaattcgcgctttcttgatatactttcagaatgaggtaatgttaactgatacagagaaacatgtttttgttggtttcatatttgatcagttccaagttccaacttcttgattggttaaatttttctttccttaaaaatctgtcaaattaacttacatgtttcttataacagattcat

SEQ ID NO: 169946 - DNA, 629 bp, Arabidopsis thaliana landsberg
  unsure (1)..(629): unsure at all n locations
agtaagttctgtttctacatactattggttcttgatgaaatattttgcttagtctntgttttttcttgtgattatctcagctatgttcaatgacgctggtcactgcactgctcattttactacgaagtgcatcaaagatcacacacaaggctcaggcggtgacttgtcttgcagccaagtggcatgtatgtgcgacgatagaatcctttgagactgtggatggagagactccaaggttagttgatagagcaagcggacacggatactatccaacagatgatgataatggagaatcagatagtgaagattatggagacgaagaagatgatttcgataacaacaatctcattcctgcttatgcttatagcaccatatcattccaaaaacggcaagctctaggtatgtaaaatatattcctctgcatccacactaaatctcataccttcacatctttagttatgtttattcatcttcacattttttgttttgtagtgaattactttgagaacaatagatcaggaatcacggtgtttgggtttacacttgatagaagcactctccatacaatcttcggtatcgaaatgtcgcttgttctctggttacttggtaagaccattggaatttcttga

SEQ ID NO: 169947 - DNA, 1937 bp, Arabidopsis thaliana landsberg
ggtacagaacaatgtttttgttctgaaaatgatgggagatctgaccttgttttggatataatccggtcaacgaaattgaactcttcccaagaggatgcactcttgggctgccttgagacaagaaactgtacccataagaacagtgtgaaactgatatggggacctcctggaacaggcaaaacaaagacggtcgcgactcttctctttgcccttctcaaactaaggtgcaagacagttgtgtgtgctcctacaaacacagctattgtacaagttgcatcgaggctcttatccttatttaaggaaaattcgacatcggaaaatgctacttacaggctagggaatatcattttatcaggaaactgggacagaatggggattcacaagaacgatcatgttcttctcgatgtgtttcttgatgagcgtattggtaagcttggtaaactgttttcaccattttctggatggatgcagagattagagtcactgatacagtttcttgaaaaccccgagggaaagtatgagagacatgtctacattcctactatgggagaattcgtaaagaagaatttcaatagcttaagtgattaaagggttacatgcatcgttgatttgttcacacatcttcccaaggtttaccttccatatgaagatgtgaagataatgattgcttctcgtcaatctcttcagcgtatcagatatttcttgagggagaattcttctagggttgatttcgaggaaggaaatttcagatttgattgcttcaaaagactcagtgttgattgcctcaaggctctacgcttacttccaaaacgttttgagattccagacatgttagaaaacgaagatattaggaaattttatcttcaaaacgcggatattatcctctgcacagcctcgggtgctgcggaaatgaacgtggaaaggacaggaaatgtagaactgcttgtggttgatgaggcggctcagcttaaggaatgtgaatcagttgctgcattgcaacttccgggactgcgtcacgccattttaataggagatgagtttcaattgcctgcaatggttcataatgaggtaagcacttaccttaaataaaaaaactttctttttcttagtcatatatgctatagtattgtaatatgggaataatgtggcagatgtgtgaaaaggcgaaattcggaagaagcttgtttgagagattggttttgcttggtcacaacaaacacttgcttgatgttcaatatcgaatgcatccttctattagtcgtttccccaacaaggagttttatggtgggagaatcaaagatgctgaaaatgttaaagaaagcatttatcaaaagaggtttcttcaaggaaacatgtttggctcgttttcttttatcaatgttggacgtggaaaagaagagtttggtgatggacatagtcccaaaaacatggttgaagttgctgtggtttctgaaattatatcaaatcttttcaaaggtattaatcttttattgatttgagagtatattaatctgtttttcattattcttataaaaacaaattcgtttattctttgaaacagcttcatgtgaaaggaggatgaaggtgagtgtcggagtggtctcaccttacaaaggacagatgagagcaatccaagagaaaatcggagataagtacagttccttatcaggtcagcaattcactttgaatgttcggtccgtagatggtttccaaggaggagaagaagacattattatcatctccaccgttagaagtatcagtaatggaaaagtggggtttctcaacaaccgtcaaagagctaacgtggcactgactcgagcaagacactgtttatgggtgattgggaacgagacaactttggctctaagtggttcgatttgggcaacactgataagtgagtctaggacacgtggatgtttctatgatgctactgatga

SEQ ID NO: 169948 - DNA, 553 bp, Arabidopsis thaliana landsberg; identical to SEQ ID NO: 54211

SEQ ID NO: 169949 - DNA, 1087 bp, Arabidopsis thaliana landsberg
aagaggaagcgtctcgcgtatgtccgaattttctgcggaggcttgcgaggtgaacaattcattcctccaatccacagtcgacaagaaggaatacagcagaaccctgttagtcgacgatgaaagagccgaagcggcaaggtctgccggtgcctacagacccactcctcaccgcgaaggccacagcggccggttatctcacagagaacgatcaccgcgccgtgattcacctcggccttcctcccgaactggactaagcagcgaaccgcttgctgacctaattcggaaaaagagagacagatcaacccgcgacagctcctcccccaaaagagataagacgagagcccaaactgatccctctcctcgcctatcggcaccaccccgttctatgggtcctcctcctccagtcaccatatctccttcgtctggatccggaggtgaaaaggccgaccggagtgcaaacccccgacgagaagaagctgaggtccgagatgctggaactaaggttgttctggttcctcagaccaagtcgctcacgggttagaaattaccttccttttgtttatacctgccttatcgtttcgatttactgacttaacgctccttgcctggtctaatcctttctttattctaacagcgatggaaacagagggaaatatctttcgatgcttcaaaactcgaaaagacaccatcctgccagcctttgataggtggcgccctgtaattcgcgagcgattcctactccatgccgccactcatctcgggttagttctcttcacccgtaataatttttaaacttcatccctccacttagatgctaaatctttttcattattacttggttcaggcaaacagcaaactcaatgacatgattgagtactacgagagactgttgctagacagggagaaggaggttatgacgtggaaagacaagtattcgtcccttgagtccgatctccgttcttcaaatgacgccaggcagaaactggaggatcaactagacaatctctcctccgaactcatgaaatctaacggtgaattgcaggaccaataccagaggtatgacaagatccaagaagaactctcaact

SEQ ID NO: 169950 - DNA, 713 bp, Arabidopsis thaliana landsberg
tgatcatcccgggtgccggcgttctgtattcgcaggccagccgggccttgcgcacatttgccgagcgttatggcgtgcggttgctgaagacacaggccggaaaatcgagcctaccgcacgatcacgggctcaatatgggttcggtcggggtgacgggcacctcggcctcgaacgatctggccgagcaggccgatgtcgttttggccatcggcacgcggctgcaggatttcaccaccggctcctgggcgctgttcaagaacgatgcgctcaagatcgtggggttgaacgtgcagccgttcgatgcgcacaagcatcgggcgctgccgctggtggccgatgcgcgcgcggggctggaagcgcttaattccgcgctgaccggctggcaggccgatcccgattggaccgccaaggccaaggctggcaaggatcaatggctcatcgcggccgaccgggcgaccggcacgaccaatagcgaattgccctctgatgcccaggtgatcggcgcggtgcagcgcgcccgcgagaatgcgacgctggtttgcgccgccggcggcctgcccggggaattgcataagctgtggaaggcccaagggccgggcagctaccatatggaatatggcttttcgaccatgggctatgagattgccggcgggctcggggtcaagctggcgcggccggatgacgatgtgatcgtcatggtcggtgacggcagc

SEQ ID NO: 169951 - DNA, 2003 bp, Arabidopsis thaliana landsberg
tttaaaaagaaaagtttgactaacatgccatgacggttctgttggcacaggctttgttctattccgctctactgtcttctcgtgagatgataactgtaaatgatagctccaaaaatataataaagacaattagcaacaggctcagcgcattatcatttcacatcagagaaaactattgggttgacaaaaacaaaatcaatgaaatttaccgttacaagacagaggagtactctatggacgccaccaacaagttcaatatctacccggaacaggtttctccatggctaatggattgggttcctgaaagtcctgagtctggattcctgataggaaacctccagcctgctcacatggatttcaggttcttcaccttgggaaacctctggtcaatcatctcctcactaggaacaccaaaacagaaccaagctatattaaatttggttgaagagaaatgggacgatctcgttgggcatatgccgcttaagatatgttacccggctttagaatcttcagagtggcatataataaccgggagtgacccaaagaacacgtgagttttcttctcttccgctttgatactttttgctgaagtagcttacagtgatattttctacatgtatgtgttctgtaggccttggtcttaccacaatggtgggtcatggccaacacttctctggcaagtaagtatgagcttttaatcagacgacacatatatctgtcttccattaattcacatatgtatttaaatttttgttagttcacactagcatgcatcaagatgggtagaccagagttagcagagaaagcagtaaccttggcagagaagaggctccaagctgatcgatggccagagtactacgatacaagagacgggaagttcattggaaaacagtccaggctttaccagacatggacaattgctggtttcttaacttcaaaacagctattgcagaatcctgaaatagcatcatccttgttctgggaagaagatcttgagcttctagagtcttgcgtctgcgttctcaccaaatcaggccggaagaaatgttcacgagccgcagcaaagtctcagattcttatataaattggttttgtccagaaaatagacataggataacaacttcctgttgcaacaaatgtgttatacaggttaaccaaattaatagtgcaacaacatctgtatatatatactatatagtagttcttttctacaaattatgtcatatctctgacttacttccctaaccagatgaaacataactaaaaatcaaatttattattattactaacttgaaaaccaagcaagagtgagtacttagtgctgcacttaatctccctaatgggcatggctaatgataatccaacgagaaataagcagagtttagcaggattcttaaaccatgtcatcagtttcaacagaaatctgcaattaaaacttaaataaactcctcttagagctttgttttcagcgagttggagaaagcttactctcatgagtatttccctcgaacactttgcaagcagattctgccaccattttttttcttaccaaacaactaaaaaggtatttgacaccataatatactcgtcttcgagatcttcttgtatgcatgaaccgcttcctccgcttcagcaggaaactgaatagcattccacaaaactgaatcccatacaggaattttgacaaacactttgcgagcgtataaaaagttcttattttctcaaaatagtgggttaatgggctaggcccattcataaatctaataattgagagaattattgatttatttcccacaggaacgacaccgtatcgcatccttatttaagaaaaacccaaacggccaaatccaggttttggctcagacgaccagaggaagagcaccgacgatggcgtggacacgattgattcagagcgcgagagcagctctagggacagcgcaatcgtgctcgactcttggcctccctagattccactcctccaaaccagccacttatttcggtgc

SEQ ID NO: 169952 - DNA, 1001 bp, Arabidopsis thaliana landsberg
agttaacatgcgagcagctatcatgtggacggttagtacttttcctggtcttggaaatttatctggttgaaatacgtatacaacgttagcttgtccaagctgctgttatgatggcattggagaacgattacgacatagaaagaaaaactgttttattagtcatcgacgttttcttcctcgagatcatagctttcgtcaagacatgacacattttgacggaaaagtagaaacaagatcttcaccactcatattgacaggttctacaattattcatccactagaacaagttaatgttactcttggtaaaaaaatgaattagtttgagttgggagaaaaagaaagcgacgtgatgcaggaagatgtggtaatcaacaatgggaatttacaatggcgcgacataatctggtttcatgcacatagagaaaaatgtgttcgacaatctaatctacacaatgttggatgacaaaaaaaaatcaaaagataatctgagtgctagaaaagatcttcgtgagctaggtatacgtcctgacttgtggcctgatgataatgagaaatatcaagctgcatgtttttctctgaacaatcaagcgaaagacacttttttaagtgtcttccagaatgtaaaactcacggatggttatgcttctaatttatcaggttgtgttgatgtcaatggtcaaaagctatcaggcttaaaaagccaagattgtcatgtgataatgagagatttattttccgtcgcagttaagaatgcattgccaacagaagttgcatcagccattgtcgagctttgtcatttttctagggatatctctgcaaaggttctcgataacgatgagcttgatcaattacaagatcgtattgtttagacattatgtcgtatgaagatgctttttcctccatcatttttcactgtgttggtacatttagtagtacatctcacagtattggcaaaactcggtgggccagttctattttgttggatatatccgattgagtgg

SEQ ID NO: 169953 - DNA, 567 bp, Arabidopsis thaliana landsberg
tagatcttgtgactaggcataggattcagcatattgatattagtgtttttacctgttctggcttcggtgtcataccactaagcttgtatacttgtgatacactcgtacacttaaaactctctcgagtcaccatggttaacgtcgagtttgtttccttgccttgcctgaagattctggacttagattttgttaattttaccaatgagaccacgttggataaaattatctcatgctccccagttctagaagagttaaccattgtcaaatcttctgaagataatgtaaaggttatacaagtacgctctcagacactaaagagagtcgaaatacatcggcggtttgatcgacataatggacttgttatcgatactcctctactccagtttttgagtattaaagctcactcaataaagagcattgaattcatcaatctaggtttcactaccaaggtagatattgacgtcaacttgcttgatccaaacgacttatccaatagaagcataacgcgtgatttcttcaccactatttcaagggtcaggtctctagtcattagacatagtactatca

SEQ ID NO: 169954 - DNA, 540 bp, Arabidopsis thaliana landsberg; identical to SEQ ID NO: 73916

SEQ ID NO: 169955 - DNA, 598 bp, Arabidopsis thaliana landsberg
ttattcgctcgctgcggagcgggctgcgcaacggtgatgcgtttcatccgtttcgccagctctcggatctcttgtacctgaccggcttcgtcgagcccgacgcgacgctcgtcctgcgacccggcgcggagaaagagcgcgtcgtgatgttcgtgcggccgcgcgatccggagatggagacgtgggacggccgccgcgcaggcatcgaaggcgcgcaggcgaagtacggcgccgatatcgcgtatccgtcgagcgagctggcgggcaagcttgccgagctcgtcgcgaactgcgaggagctgcactacagcctcggcctcgacgacgaaatggatctgctcgtcacgcacacgatcgcgaagctccgtaagacggagaagcgcggcaagcggccgcctcgcgccgtcgtcgacccgcgcctcgccctccacgagctgcgcctgcacaagcgtcccgaagagctgacggcgatgcgcaaagcggccgcgatctccaccgacgcccacatcgcggcgatgaaagcgggccgcccgggatcgttcgagcacgagctcgaagcgctcatcaactacacgttccgcagttcttctgcgtccca

SEQ ID NO: 169956 - DNA, 488 bp, Arabidopsis thaliana landsberg
caccacgtgccggacattttcgattgcctggcgcaattgtccaacgacgaggtgcccacgccgcccaagctggcgcgagccatgctggacctgctgcccgaggaggtttggcacaaccccgactacaagtggctagatccgggcaccaaatctggcgtgttcctgcgcgaagtggccgctcgcctgctcaaggggctggccgactgggagccggattttgaaaagcgccgcgagcacatctttcgccacatgctctacggcacctcggtgacggaaatcaccggcatcattgcccgccgcacggtgtactgctcacgcgatgcctccggcccgcacagcgtcattcattttgacgacgaggccggcaaccttcccttcgtgcccaccgagcacgacttcgacaagaaaggccactgcaccatctgcggcgcgcccgaagacctcagaagcaacaaccgcgaaaactacgcctacgccttcattcacgg

SEQ ID NO: 169957 - DNA, 1479 bp, Arabidopsis thaliana landsberg
cctagatctgtcgaagaataatctctctggtacaatacctgaatatatggcgaacttttccaaactgcagaacttgaatctctctttgaacaacttcgacggagctgtgccaacggaaggggtatttcgtaataccagtgcgatgtcggtctttggtaacataaacctctgtggaggcatcccgtcattacagcttcagccatgctctgttgaattaccaagaaggcattcatcagtcagaaagataatcaccatttgtgtcagtgcagttatggcagcacttttgcttctatgtctgtgtgtggtttatctatgctggtacaaactgagagtgaagagtgtcagagctaataataatgagaatgatcggtctttctccccagtgaaatcgttttatgaaaagataagttatgatgagctctacaagacaaccggtggcttctcttccagcaatttgattgggtcgggtaactttggggctgtgtttaaaggatttcttgggtccaagaacaaggctgttgccattaaagttttgaatctctgcaaacgtggtgctgcaaagagtttcatagcagaatgtgaagcattaggaggtataaggcatcgcaaccttgtgaagttggttactatctgttcaagttctgattttgaaggaaatgattttagagctctagtgtatgagttcatgcctaatggaaacttggacatgtggctgcacccggatgaaatagaagaaactggcaatccctcgagaaccctgggcctttttgcaagactcaacattgccatagatgttgcttcggctctggtttatcttcatacttattgtcacaaccctatagcccactgtgatattaagccaagcaatattctactagacaaagatttgactgctcatgtaagcgactttggtttggcacaactcctactaaaatttgatcgggatacattccatattcaattcagctctgcaggtgttcgtggaaccattggctatgctgcaccaggtatgcttattttactttaaaatttataatcgttattaggtaattatctcaagcagagacgagacagtcgtcctaatattctttagtcttgttgttgttattactgaactttgtagaatatggtatgggaggtcatccatcaataatgggagacgtgtacagttttggtattctcctattggagattttcactggaaaaagacccaccaataagttattcgtggacggtttaactctccatagttttactaaatcagcattgcagaaacgacaagcactagaaatcacagacgaaactattctccgtggtgcatatgctcagcatttcaatatggtcgaatgcttgacccttgtgtttcgggtgggagtcagttgttcagaagaatcaccggtaaaccggatatctatggctgaggctataagcaagctggtctctatcagagaaagttttttcagagacgaggagacttaa

SEQ ID NO: 169958 - DNA, 545 bp, Arabidopsis thaliana landsberg; identical to SEQ ID NO: 40822

SEQ ID NO: 169959 - DNA, 859 bp, Arabidopsis thaliana landsberg
ctcataatcaattagttatatatatgctttatgattaagctgtaacagttttgtttggattttgtatggttttgttcacagatcgataagcgaagatggttcaatataatttcaagaggatcacagttgttcccaatgggaaggagttcgttgacatcatcctttcacggactcagcgtcagacaccaactgttgtccacaagggttacaagattaaccgtctccgtcagttctacatgagaaaggttaagtacactcagaccaacttccatgcgaagctctctgcaatcattgacgagtttcctcgccttgaacaaatccatcctttctatggtgatcttcttcatgtgctttacaataaagatcattacaagcttgctttaggccaagtgaacaccgccaggaacttgattagcaaaatctccaaggattatgtgaagctactcaagtatggtgattctttgtaccgctgcaagtgtcttaaggttgctgctcttggtcgtatgtgcactgttttgaagcgaatcactcctagtttggcttatctcgagcagatcaggcagcacatggctaggcttccttccattgatcctaacactcgtactgtcttgatttgtggttaccctaatgttggcaagagttcttttatgaacaaggtcaccagagctgatgttgacgtccagccttatgctttcaccacaaaatccctctttgttggtcatactgattacaagtatctcaggtaccaagtcattgatacccccgggattttggataggccctttgaggaccgcaacatcattgaaatgtacagtatcactgccttggcccatcttcgagctgctgttttgttggtttt

SEQ ID NO: 169960 - DNA, 2494 bp, Arabidopsis thaliana landsberg
taggctaccttgtcacccaacacggcatcgagaccaatcccaaacaaatcttggcaatcattaatcttccctctccaagaaatacccgtgaagttcaacgcctcaccggtcgtattgccgcattaaaccggtttatttcttgatcaattgacaaatgcctccccttttaccaacttttgcggagcaacaagcgtttcgaatgggacgataagtgcgacgaagctttcaaacagctgatctcttctggccaaacccgaccaaggtgagacgttatacctctatatcgcgatctcttcttcagcagttagtggggttctcataaaggaggaccgatgagagcaacgtcctatcttctacgtaagcaagacccttgatggtgctgaacttccttatcccacgttagaaaagctggcatatgctgttctcatttcggctcaaaaactctgaccttattttcagtcacacactatcaaagttctcacgaatcaacctctacggacgatcgttcacagtccaagccagtccgggagattagctaaatgggccgttgagttaagcgagtttgatatcgactacaagactcgcacatgtgctaagtcccaagtcttggcagattttctcgttgaactctctcccgaactcaaacccggcatgtctccaattgaaaaatggactttacacgtagacggcgcgtcttcaaagcacggctcaggtgtcggagtgcacttagcctcgccaaccagcgaaatactctaacagtcatttcgccttgctttcccagcatcgaacaacggagctgagtatgaagcattaatcgctgatttgcgcctagctcacggaattggagtcaaacatatacaagctttttatgattcacaactcgttgctaatcaatttaccggcgattacgaagcaaagaacgaccacatggatgcatatttcaaaatcgtccgcgacctctctcggaattttgaactcttcgaactcaccaaaattcctagaagtgataatgccctagctgacgcattagcgacgctcgcctctacttccgatctcgatctccgccgaatcattcttgtggagagtattgacagccccagtattgaccttcacttaactactgtcaccccaactattgaactgccgactccgtcgcatgccgccatcgccaacaacactacagccgcgtcgtcatcttcgactccaagtattatcttactcgtcgtggaacctgacacagaagaatcaacgacaccaagtgcgcccgtcgtcccttttgaaacaaattggattgatgaaatacggaattacattgctgatgggatcgttccaacagataagtgggcagctcgtcggatacgaacatgcagcgcgctatacacacttattgacggaaatctttatcgtcgaaatgcacaaggaacgcttctcacctgtatttccaacagcgaaacaaacgatattatgtgcgaagtccacgaaggcgcagaaggaaaccattctggcggtcgagcgctcgccctccgaatccgtaagactggccattactggccaaccataaactctgattgtgagaagtttgtagcaaaatgcgagaaatgtcagcgacatgcaccgtttatacataccccaaccgagctcctacgaaccgcctcgcagccttatccgttcatgcggtgggcgatggatatcgttcgtcctcttcctgcctcatgacaaaagaagtatttcctaatcatgacagattattttaccaagtgggtagaggccgaatcatacgctaaaatccaatccaaggaagttcaaaactttgtgtggaaaaacatcatctatcggcacgacgtaccgtacgaaatcgtcacggacaatgggactcaattcacttcgcttcaatttgaaggattttgtgcacggtggagaattcgcttaagtaagtccacgcctcgatacccacaaggcaactgtcaggctgaagcaactaacaagacaatccttgacggcatcaaaaaacgtctcgaggaaaagaaaggggcctgggctgacgaacttgacggagatttgtggtcgcaccgtacttcaccacgacggtcaactggatgcacggtgttttctcttgcttacgggatggaagctctcgcccctgcagaagttagcattccgactatgcgacgctctatacttgttcatgaccctgctcttaacaatcaaatgatgaatgatagccttgattctcttgaggaggaacgtgataaggcgctccttcgcatccaaaactatcaacaatcaaaccccgtcattatctgaaggcgatctagtactccgcaaagttttcaagaacacagttgagctaaacgcaggaaagttaggcgcccactgggaaggaccctatttaatctccaagatcgtcaaacccggcgtgtacgaactcttgacaatggacggtacccaaattctccgctcgtggaactctgccaacctgaaatgatactactat

SEQ ID NO: 169961 - DNA, 624 bp, Arabidopsis thaliana landsberg
  unsure (1)..(624): unsure at all n locations
atggagagacgcgccccaaacgcattccctggtgctccaccaccagttccctactatcataacaactacaacaaccctcctcatcatcagattcatccgccgccgccgccgnnnnnnnnnnnnnnnnnnnnnngattccacaaatacccccaaaacgacaacagggatcagcgtttcaatcaaccgcattactccggccaacagcagaacatgatcgttgatcagagtaataacgctcctccgccgtttccgccgagtccttgcggtggcagcagcttaaggaagagacggtctcaatcagctacaggttatctccaattttgaatttttctgctacgtatccacaaaaggtgtagactttgtctttaactccctttggtactttcgtttgtatacatgaagataatgctgatggtagtattgccaagttatatgttgcgcccatctcaaagacagctactgaatatgatgtgagtttcttggttcactctttatggtttttatgacatgtttccttgatgagtttctgtgtgacttgtgacaatctgtgttatacatcagatccgtcaggtctttgaaaaatatggtaatgtcactgagatcattctacccaaagataagatg

SEQ ID NO: 169962 - DNA, 248 bp, Arabidopsis thaliana landsberg
ctctataaaaacgtcaaaaacagaaactcaaatcacaaaacaaaaaatggcaaacacaaatcctgaatccaccaacaaatccacaacaccatcaacggatatggagctaaagaaagtcttcgacaagttcgatgccaacggcgacgggaaaatctcagtttcagaactcggaaacgttttcaaatccatgggaacgtcgtacactgaggaggagctaaaccgtgtattagacgaaatcgactgcttag

SEQ ID NO: 169963 - DNA, 577 bp, Arabidopsis thaliana landsberg
gcataactatactttgtgtaaagataacgtaccgattacctttaagcatttactccttcatttctttttgtgctcgtttgtttaaaaaaaaaaggcctatatatgatgttccaacaagattaccctcatggcttttcactcgtggaaacatccttaagttacgaaatgttggattactttcaaaacatcgtcgtttcgaactctgaagacgtggcgtcacagcaaaattccatttcgtcctcttcttattcatcagcgacactctcctgctccataacagagcaaaaatctcacttaactgaaaagttatctcctctacgagaaagatatggttgcggtgactttctgtcgcggaagaggagaaggagaagtgaaaaaacgattgtagataaagagaatcaaaggatgaatcacattgccgtcgagcgtaaccggagaaaacagatgaatcattttctgtctatcctcaagtctatgatgcctctctcttattctcaacctgtgagtttctttctatctttaatttagcttataggatataagcaggctaagcaatgttgatagtgtgatatgttcg

SEQ ID NO: 169964 - DNA, 632 bp, Arabidopsis thaliana landsberg
ctatgtatgcaggccaaagtgttcacgtggtcatatagaagacacaccctattcaccctgctaatgcacatatcataagctaaagtttcaagactcacacttttagaacttttcgaacatatactataagttatccaaaccctacatgatgatcatatatacatgcatgattttgtttacagatgcatatgtggggacatggatcacaatacagaaaaggacctgaatctctaaggggaacacaaccaacaggaatgctaaggcttccgtgctattgctgcgccccaggctgtcgcaacaacattgaccatccaagggcaaagcctctcaaagacttcagaacccttcaaacacattacaagagaaaacatgggatcaaacctttcatgtgtaggaaatgtggaaaggctttcgcagtccgaggggactggagaacacatgagaagaattgtggcaaactttggtattgcatatgtggatctgatttcaagcacaagagatctctcaaagatcacatcaaggcttttgggaatggtcatggagcctacggaattgatgggtttgatgaagaagatgagcctgcctctgaggtagaacaattagacaatgatcatgagtcaatgcagtctaaa

SEQ ID NO: 169965 - DNA, 531 bp, Arabidopsis thaliana landsberg
tcactatccaccagcaccgtacgcgttaagtggcgttggtcaaataggtttcggagaacattctgaccctcagatcttgacggtgttaagatccaacgacgtagatggacttgagatttgctcacgtgacggcttgtggatcccaatcccatctgaccctacatgcttcttcgtattggtcggtgactgccttcaggtactaaccacattttgtttcgtaaagacatacaaaatagttttcatcaattaattaattaatgaaataatctttgaaaataggcattgacgaatgggagattcactagcgtgaggcatagggttttagcaaacacagcaaagaagccacgtatgtcggcgatgtactttgcagctccaccgttagaggcgaaaatatcaccgttgccaaaaatggtgtcgccggaaaatccaagacgttataattcattcacatggggtgactacaaaaaagctacatactctctccgtttagatgtccctcgtctcgagtttttcaagactttatagattata

SEQ ID NO: 169966 - DNA, 2105 bp, Arabidopsis thaliana landsberg
atcaaggattgttgacaaatcttccacgaacaaagtagtggatgagagtatggttactgtcaaaagacttagtaacgttaacaagggcgccaaagacatgaatctcgtcgggacgagaagtactacaccaagtagtgcttttgcaaaggttcgaacaaggttttggtaaaggaaggaggatcgtcgaggcttagaaagattgatgcgagaccgtaacagaacaggtgggtcctctctcccaagaagaccaaggagattaaggaattccacacaaagcttgtagtcggtttgccacatgaagaaaaggccagacatgaggaaatttagtagatatcactttgaggcactagtcaatagggagggatctctcacaagagaattgagaagttcatgttgaagcttgatccaaacccggggagtaatggtgaatgggaggttcttgaagttggtcgatatagttgtcagtatgaaatactttgatagagagttttggtgactagcgtcacatctccgacagattggactaagaaacactagaccatgaatcttcaaaacggaatcataaaacattgccctagctaaacctagcaccaaggttctcagataatatttgtaggagcatatcaacgagggtgattcgtcattcaagtggtgtccctagcccctcaaaataaagaaacgatgtctacattgggatagactcggcaaattgcagatggaggaatacctggatttttgtgataataggtttgggtcgcaatttatgggcttgggccgcgagggaaatgggccaacattggagacagggcccatcaaagaaaaccctcgattccagattgttggggaaggagcgttcggagtgcggcggctacggtagagaggtacggattgcacaattgaagcagacgtctccgatgtaaatagagttagggtgagcaagctgcatgacgggtccggcgctgaggctataacaacggctaatggtttggcaaaagaacgtcggagaagccttagggagccgaaaggtcccgcagatctagtaatgatgaggaggcggagacaaggctcaggttggaaggattggtcgcctatgaaattgaaagcttcacaaactgttttttttgattcgcaaggtttggacagagagtgtagctggctcggaggccacattttgcctatgtcggagaatactgcttcaaagaagattcaacagcaaagaagaactcgatagatttggattaaaaggtttgcaacagaagaaaactaaattacagcgaagaagtagatgaaagatagaggaaatagctcgagagatgagagggaggttccgatgccggcgagcattagctccaccgacgtcagaaagatgaagggagatagtttcctcgatattagtgtctattagctccaccgacgtcggaaagatgaagggagatagtttcctcgatattagtgtctgggagagaaactctttaaaatcttagtctcgcaaaaaatttgattggttgctttgatttctatattttttttctcaattacataacttcaattatttcataatatttataaataaacatatcaaaatttacaatttttcattctctataaataaacactatcttcatttgatttggacaaaacaaaaataatatttctttagaaaaaaaaaagtttagtctccaataaacttttgttttagctttaaatatacttttatctaaatggatccaaacaataacctttcaacacccaaaacttttctaattacttttaaactatccaaatcccaacaattattagttgcaggtgtgtcagaaggacattgaacgagcatttgcagtgttgcaggctctatttaaaattattcgcgaaccagctcgactgtgggacatagccgatttgactatcatcatgaggtcgtgtatcatattgcataatatgattgttgatgatgaacgacagacgtatactcaacattggactgattatgatcaatctaaggcaagtgggccgagtacataacaaccattctcgaccaaagtgctacttgtatttgcaaatcatgtgcgtggtagatccaagttgcgtgattcaaatgtacaccg

SEQ ID NO: 169967 - DNA, 509 bp, Arabidopsis thaliana landsberg
atgggtgggtgggcaatcgcagtacacggtggtgccggtatcgaccctaatcttccggcagagagacaagaagaggcgaaacagcttttaactcgttgtctcaacctcggcataatagctttgcgttccaatgtttccgccattgacgtcgttgagctcgtcgtacgttctctttccccacaatgatttcttacggtgttcttgttgaattatatactaaacgattgattaacacagattagagaattggagacggatcctctgtttaattcaggccgtggatctgctttgacggagaaaggaacggttgagatggaagctagcattatggacggtacgaagagacgatgcggtgccgtttcggggataaccaccgtgaaaaatcctatatctcttgctcgtctcgtcatggacaaatctccccactcttaccttgctttctcaggtgcaaaggatttcgcccgcaaacaggtgtttatttactattttacccttccgctttttattct

SEQ ID NO: 169968 - DNA, 1491 bp, Arabidopsis thaliana landsberg; identical to SEQ ID NO: 1985
  unsure (1)..(1491): unsure at all n locations

SEQ ID NO: 169969 - DNA, 635 bp, Arabidopsis thaliana landsberg
gtctgggtggcggtatagtacgtaattgccctctaaactaccgagattgattcatgggcctctattccaccccactcatttagtgaatggtgacatgatatatatatcataatggttttgtaagaaaataaagtgtatattatcataatatcataatttgtttatgcgttttcaggagttactataggtgcacaacacagaagtgtaacgtgaaaaaacgtgtagagagatcgtttcaagatccgtcgatcgtaattacaacctacgaaggaaaacacaaccatccgatcccatcgacgttgagaggaaccgtggcagctgaacatctactagtccaccgtggtggtggaggcagtttactccatagcttccctcgtcaccatcaagattttctcatgatgaaacattctccggccaattatcaatcggtgggatctctgtcgtacgaacatggccatgggacctctagttacaattttaataataatcaaccagttgttgactatggtctttttcaggacattgttccttcaatgttctccaagaacgagtcttgagagaggggtatgtacgtactatagatcgtgtcggtatggttgcattatataagcataaatcatttgtactatatgtat

SEQ ID NO: 169970 - DNA, 2699 bp, Arabidopsis thaliana landsberg
atgtccacgtggggacgacaaggaagaggactgccacgtcagagtcgtagcaaggtgtaaatggatataggtggacaacccatgtgacgtattccaagattttgggctctatccaattggacacgtggcgtaatcgggatgctcacgcgccttgtcttctactgttgtagtgttgtgtgattgcatgtcatgttggttgcttcttcgtgagcttaaatccaaaaatgaaatctacagcttcttgcacgaaactaacagctattaactctttcttcttctttttctccttctgatcaacaacgtaattatcatgatacatttcaaattatatatgtgaaaacaatctatagctttaacggagatatatgttttctgttaagaacataattatacggtaaatacagaatcttgagttttgtgggtgtaaggtctcgtgcttaataagcttaactaaattgtatatatgatgtgtggaagctgatctaagattatgaatattattgtcttacaagatggctggtttaagatcagtccatgttggatctgagaccaaagtcgtctcaaagaacgaatgaacacacgttacgttgtggacggggacggcccaaggaggtcaacacgttacgatagctttactcacacgctaaggtcgagattgattctctgttctcgatcctcagttacgaatttgtttacattgtcatatgtttttattcgttaattctctgatgtggaaataccggtgcttctctaaaagagatttcggttcggttatcgattatttcagaaatgttttaaaaaaccgaaataaatcaaaatgtgttggttttttagcccgtaaaaaaaaaaacttcaccccagcacgaagaaatcgacacgtgtgatttggtgcttcccgccattctggaaagattgcacagcaaaatcagtctctcgtataagaacaagatagtgaagagaaataaaaaaagcggaagatcaataaaacctaactcactctgagatttttgagatttgggcgtcgcgatggagccacactctcaccacaagaatgcgattcttccgtctagtagccaaggtaatcttcttcacaatcctttgacatttctccgtgttgatctttcttgggtttcgttcttaatcttcgggttgccggaaaagtgaattagggtttctatttctgggctcaattgatctgttggggatcgataatttctctccaatttttgttttcccagaatgcaattcttgtgggaaactgtaatttatctcatgtttccttaccaaaattattcgttggtttgtttgaaatagacgagaatctcaaagaagaagaagttcctgatgatgatgattcagtcggcggtgaagttcaaggtaccgcatcgtttctattaggcgtcattgatgctcgatttgctcacacctgtttattttcatcatgtcttgctcacacaggtgaggtcaatgctaatgactatataccaaatcctgccgctcctgcaaacactaaaagaaaatggcagatcatgaaagaaaaggttcagatgacagaggatgatgattttgatgagcagaatgcagtcattgctgaagctgctgagcagcctctagatttgattataccgctactaaagtaccaaaaggagtttttggcttgggctacaatacaggaactatcagccgtaagaggaggcattctcgctgatgagatgggaatggggaaaacaatacaagccatctctctcgttcttgccagacgggaagttgacagagccaaatctaggaaagcagttgggcacacccttgtgcttgttcctcctgttgctctttctcagtggctagatgagatttctcggttgacatccccgggaagcaccagggttcttcaataccatgggccgaagagagacaagaatgttcaaaagttaatgaattacgactttgttttgacaacatctcccatagttgagaatgaatataggaaggatgaaggagtggacgaaacaatgtctcctttacactctattaagtggaatcgtatcatcgtcgatgaggtcagtaccaagacctgctggttcttcttcttttctattttcaagcatgtaaggaaaggggactgtgagatttattgtacagtaaaccacagcaggggaagctcactgcaaatttgctttttgtgaatcttttatccttcaggggaagctcactgcaaatttgatataattcccgtttgtcttcatatcaggctcatgatatcaaaaacagaagtagtcgcactgccaaagctgtttttgctttggaggcgacctacagatgggctctgagtggtacccctctccagaatgttgttgacgagctgtactccctggttagctactctttcctcaactatttctatagcacgtaatgatatctcaacattgctgagtgaaagacccagatacgctttcttcgcgtatcgacatactcatattacttttgcaagagatgtgactgtgatgtgcttgatcggaggcaacatcttaccactctcaattcctggttacttactcctttcccatactgctgactgatagctcataacaatctctgctgatgcattatccctgtgcatagcctttgggcttaggcggagactgcagagcgcaacgcaagtgccccacctgttctcataatgcacatcaacacatcgcttg

SEQ ID NO: 169971 - DNA, 934 bp, Arabidopsis thaliana landsberg
gatattggaggagcgtgtacgacactcacggtgtggagaaaatcgcttctggtgagttgtgaaggattcacggtgatagattcgaatggagatttgatttaccgggtcgataattatgcccgaacccgacccgaggaactcatcctcatggataaagatggaaacctccctcctcctcatgcatcgtaccaaggtaaatatatgtacaaagtatttagaataaacttatttgaatatgttttagaatatggatcattatattcattgtacacatcatccttcaaaattacaatatcacatttattttagattattaagaatcaaacctctactaaatctgtctcacagttgtacttatgaatctgttttgttagcgttgtagttgtaaattagttgtgtagatattagttctaggttgtagttataaaacatccaaatacttgattgatacaaaacaataaatggagcaacaacaaaatgatttataagagttgtgaatttttggtggaatttaccaaaatgatatagaaatactttaaaaattgaaagaagttttcgtcgtccttacggatcactctagcgaagtatcggatcgatttgcttacaaccattagaattgtgatagtttgtaaatagtacttaaggtcggcgatatgttgataataatgaacaatgaatgttgagtattaatttcgctgatagacatgttagccgattttgtagaagacgttttgtttttagccgattgaagatatgtatgaacgaagatattacgaatactatagtatatatattattaagattgagtaggaccaactacactaccgtgacaccgtccacaataggtcacgtcaaaagttcataaatattctgcatgtggacaattgtattggcaagaatttcgtgtaacccgttacattctttgggaataaat

SEQ ID NO: 169972 - DNA, 1607 bp, Arabidopsis thaliana landsberg; identical to SEQ ID NO: 27268
  unsure (1)..(1607): unsure at all n locations

SEQ ID NO: 169973 - DNA, 1226 bp, Arabidopsis thaliana landsberg
agattttgctcttattttgaatgtgaaagcaatgatatggattacgattagctaagatcaatgttcaaaaaatcgttaggcggtagctagaagattaaagaacagagatattttgggagcctcatgctttgtttctgactatcttttgatctcagcttgttatttggctagtaattccagcggccacaaatggaactgctaatcatgccaatagcactctcgcacttatcgttcttgttcaatacattccaagatcattcatcatattcccactcaaccaaaggattatcaaaacaaccgggtttatcgccaagactgcttgggcaggagctgcatacaacctcctattgtacatccttgctagtcacgtaagttttctttatcttgtgttttttttcaaatctttaggtttcttcagttttaagttgctaagaatctctatttgtgggcaggtgttaggagcaatgtggtatctgtcatcaatcgggcggcagttttcgtgctggtccaacgtatgcaagaaagacaacgctttgagagttttggattgtcttcctagcttcttggattgcaagagtttagaacaaccagagcgccagtattggcagaacgttactcaggtcctttctcattgtgatgctacaagcagcactaccaatttcaaattcggaatgtttgctgaagcctttaccacgcaagttgctacaacagattttgtgtccaagtacttgtattgtctttggtggggtttaagaaatctaaggtatgacaaccttttatctaaccagtatctgcttaaattgtcctcctttggttttaataaaggttttgtttcacagttcttatggacagaatataaccacaagtgtataccttggcgagaccttgttctgtataacaatttgtatttttgggttgattctcttcacactcctgattggtaacatgcaagtaagattcagagcttatgcatcactctgcaaaacttttcaatacagagacatttttttgtctttctaacaatagacttcatgatttttaatttggtggaaagtcttctctgcaatcgatgtcagtaagagttgaggaatggagagttaagagaagagacactgaagaatggatgagacatcgtcaactacctccagagaatcaagaacgtgtccgaagatttgtccaatacaaatggcttgcaaccagaggtgtcgacgaagaatcaatcctcc

SEQ ID NO: 169974 - DNA, 439 bp, Arabidopsis thaliana landsberg
cgcgaataaggccggctgccgccgggggagcgttaccgcgaaagagaaatttcacgagcgcgtgttggctttcaccaggggcgccggcgttccgggcgtgtatgatggcgtcggccgcgacacgttcatggattcgctcgactgcctggcgccgttcgggatgatggtgaattacggcagttcatcggggacggtgccgccgttcgacgttggcattctgtcgaagaaaggttcgctctttctgacgcgcccgacactgatgacctataccgcgaagcgcgaggatctggtgaaaagcgcgcgtgaattgttctcggtggtcaaaaagggtgtggtgaaaatttcggtcaatcagacttatccgctgcgcgcggcggcggaagcgcaccgcgatctcgaggcgcgcaaaacgaccggttcgaccgttctactgccgtga

SEQ ID NO: 169975 - DNA, 812 bp, Arabidopsis thaliana landsberg
atggttcatggtgatggtcataattttgacggttagactccaactcatcatatgaacaagttcgctttcgggtgtgccattgttgcttccatcatttctatcatctttggatatggtaacatactaacattctctacatatcaaacaaaagttttctacatatatcatataaagatatattcaatggaattatattaatgattttatattaacgaatatttttttttttgtaatggtgtgttgtccttagatacgggagttatgagcggagctcagatatttataagagatgatctaaaaataaacgacactcagattgaagttttggccggaatcttgaatctttgtgcactcgtcggatcactaacggcggggaaaacgtctgacgtcatcggccgacgttacaccatagctctctccgccgtgatattcttagtgggctcagttcttatgggttacggcccaaactatcccgttttgatggtcggacgatgtattgccggagttggtgtagggtttgctctcatgatagctccggtttactctgccgagatatcctctgcgtcacatagaggctttctcacttctctacctgagctttgtattagtcttgggattttactaggctatgtctcgaattactgttttgggaaactgacgttgaaacttggatggagattgatgcttggaatcgcagcgttcccgtctttgatattggcttttgggatacaagaatgccgagtcgcgaggtggcttgtgatcaaggtaggttaaagaacaaagaaataatggtttggtatcaatcggagaag

SEQ ID NO: 169976 - DNA, 704 bp, Arabidopsis thaliana landsberg
atggaaacaagcgacaatattagctctggtggtgttataggagcagaagttccaccagcgtatcatatggctccgagaccttcagagagccctgctaaccactttatggggtcgtctctcgctcccattgacctcccaatgccttcttcaggtgaagcctcaggaaagaagaggagaggcagacctcgtaaatatgaagctaatggtgctcctttgccttcttcatcagttcctcttgtgaagaaacgagtaagaggcaagctcaatggttttgatatgaagaagatgcataagaccattgggttccattcttctggtaaagttactcttccatttgtcactctacttaactaagcattcctttgtctgtttgattattaacattacttggtcttttgcataaagttatgaaagattattaacaactgttaaaagtttctcaagaagttgcatttgttttgtttaaagtagcatatgggctttaactttgttgagtgagtatctattataattgtttgaagattgtaactttgaatcattgtcttgcaggtgaaaggtttggtggtggtgttggatcaaatttcacaccgcatgtaatcacagtaaacactgctgaggtatgtatattagaagaaaaaggcacaaaactttcacttgggaggagatttgtgtttgttacttagcaacaactgcgtgtttgcttt

SEQ ID NO: 169977 - DNA, 517 bp, Arabidopsis thaliana landsberg; identical to SEQ ID NO: 78381

SEQ ID NO: 169978 - DNA, 576 bp, Arabidopsis thaliana landsberg
  unsure (1)..(576): unsure at all n locations
cgtgacaggaggcactgggcgtggtaccgcccgcgcacctggtcggcgccgtcaaggcgctgccgatcatcgaccagttcgccgagcgactggccgcgcggggcgcgctgtatgacctggacggggacgtctacttcgcgcggctggcgaacgcggagttcggggcgctgtctgggccgcggtccctgtcggggttctcggtggaagacatgacgtcgctggccgccgagcgtggcggcgacccggaccgtgtcggcaagaaggatccccttgacccgctgatgtggctagcggaacgacccggcgagccctcgtgggactcgcggttcnnnnnnnnnnnnnnnnnnnnnnnnnnnnnnnnnnnnnnnnnnnnnnnnnnnnnnnnnnnnnnnnnnnnnnnnnnnnnnnnnnnnnnnnnnnnnnnnnnnnnnnnnnnnnnnnnnnnnnnnnnnnnnnnnnnnnnngtggcctacgggaacgaggggcccccggtcttcgcccgggtgtacgcgcactaaaggcatggtggaaaaccagggtgccaagatgtcgaaatctcttggcaaccgcgttttc

SEQ ID NO: 169979 - DNA, 1446 bp, Arabidopsis thaliana landsberg
gaagcgtcttatagcaatttggctgaatatttgcatcttctgtttttatcaaatccagggacgataacacatatagaaacagagcctgatattgaagatgaaaggaaagagaggtttttatatatgtttttagcttttggggcttcaatacaaggttttaagcatctgagaagggttttggttgtggatggaacacatttgaaaggaaaatacaagggggttttactcacaacaagtggtcaagatgcaaacttccaagtgtatccactcgcatttgctgtggtggatagcgagaacgatgatgcatggacttggttctttacaaagttggagaggataatagctgacagcaacacactcactatattatcagataggcacgaatcgataaaggtaggggtgaagaaggtatttccgcaagcacatcatggtgcatgtattattcacctatgtaggaatatacaagcaaggttcaagaacagaggattgacgcagttagtgaaaaacgctggatatgagtttacgagtggaaagtttaaaacgctttataatcagattaatgccattaaccccctttgcataaagtatctacacgacgtagggatggctcattggacaaggctatatttccctggccagcgtttcaatctgatgactagcaatattgctgaaacgttaaacaaggcgttatcaaaggtcgatggtaacatattgttgagttgataagatttatcaggtctatgttaactagatggtttaatgcgtgtcggaaaaagtctctcggacataaaggtcccgttcctccggaagttgacaagcaaataacaaaaaccatgttaacaactaatgggagcaagtttgggaggatcaccaactggagctacgagataaatggcatgttaggtggaagaaatgttgttgatcttgagaagaagcaatgtacttgcaagaggtatgataaactcaagatcccttgcagtcatgctttggtggctgcgaatagttttaaaatttcctacaaggctttaattgatgactgtttcatgccccacacatgggtttcgagttaccgggaagcagtattccctgaagctattggaagagacgacgaaataccagaagagcttgaacaccgatcgatgttgccaccatatacaaggagaccatcagggaggccaaaggtagccagaattccatcaacaggggaatacaaggtaaggaatttttttagctaaagtagtactttctacttgattgttaaaacctaatgcataatgtggtttgtacatggtaaatgtagaaacctaagactggaaggacgcagcagatccggtgctcgaggtgcaaaggcactggtcataacaggacaagttgtacaaatccaatttgaacaagttgttacggtggatgactttgagattgctatttaggatattagttgttttt

SEQ ID NO: 169980 - DNA, 399 bp, Arabidopsis thaliana landsberg
atttgcaggttgctccagggaagaaacgaaggatttatggggttggttctctgcatcttgaatcatcctcagcccataccggtccaccccttcctcgggatgatccagctttactctctgagaagttggttgtggctgaagcttgtattgcaactcagactgagaagatcaatagcttcagtgtctactttgactaccttgccgacaaggatccagagtttgctgcaatctttcgaggcgcatcctctacaaggactgaacctactagcaccaatgcaacacccgaggtggctaatctgagacctgaggtgggcaacaagacaccaattgctgctatgggagctaacgcgagaacagaagccggtacttgatcctcaccatcagcaaccttctaatttc

SEQ ID NO: 169981 - DNA, 1661 bp, Arabidopsis thaliana landsberg
atggagaaacattattatgacgttggagaatcatcaggaacaagtaattttaccggtgaagaagcaacatggccaccaaattatacaacttttcaagttccagaaaatacgtatgagtattttccatatggaaatgtgggcatcgaacaagagattggggcttcacatgaagaagagaatatgatggaaacaacaaacgaagaaccatatcatgatagcgtttttgaagcttttgaagccgccaaggaacctctttatgacggctatccagaaggaatttctcagttatatctctcttcgcatatgctgaaagcaaaatctgattacaacatggtggaagcttttgtagatgagctatcatagactttcaaagctgtcctgccacaccaaataaagctcctgcatcttattacgagacaaagaagttgacacaagcgcttggcctaccagtacataagattgatgtgtacgaggataattgcatgctcttttggaaaggagaagatcgagagttgttgcggtgtcggttttgtgataaagatagataccatccacacaatggaaaaggaaaaaaaagagctaagcaaagaatgttttacatgccgattaaagatcgattgaagcggctataccagttagaggctaccgcaaaggctatgcgatggcatgctgaacatatgtctcccgaaggagaaatgcaccacccgtccgacggagcagcatggaaacatttcaatgagatatatccgaattttgctgctgaaagtcgcaatatttatctaggcttatcaacagatggatttaatcatgttggtatgaatggtgtggcacactcgatttggcctgtgatagtaactccttataatttaccccccagcatgtgcatgaagagagaatttttctttctatcagtccttgttcctggccaaagcatcccaaaaaaagtttagatatttatctccagccactgatcgaggagttgcagagtctgtggattgacggggcagaagcgtatgacatatcaaagaaagaaaaattcacgatgcgagctgctttgatgtggacaataagtgacttcccggcgtatggcatgctgtctggttggatgacgcatggtcgtttgtcatgtccatattgtctagataataccaaatcattttggttaccaaatggaagaaagcatagttggtttgtttgccacggaatgtttttacctctaggtcatatgtacatgcaaaatgttcaagcatttcgcggagggaaggaagtgagagatgatcctccaccgtggtggactagagaggaaattcttcacgagagaataaacaatatttgttgggttgtttagtacagtcgattgtggagggaacgaacacgagaagtttgcccaaactatcgatggatacgggattcatcacaattgggtgaaaaggagtatattttgggagttaccatattggaaaaatcttattcttcgacataaccttgacttcatgcacataaagaagaatttcttcgatattctcatcaacacagttctgaaagttgttggaaaaacaaaagatataattctttcaagggtggttcttgctactttatgcaacagaggtggctctcttctcaccagagatggatcactgctagtacaaatatttagattc

SEQ ID NO: 169982 - DNA, 1099 bp, Arabidopsis thaliana landsberg
accaaatttgaatgaaatattcttcagtttgagatatggacaaccaaggctaggattatctctggtttactctccaatccgacaatttctctagacgctatttcgatttggtattttttcacttacttatcaaaataccgatgaatctcaatggtttcttgactagttgagtcattttgcagcatgtattacttgaattgggatatgcagttcatgcttggtctaagtgcagcaatcaggtattaacaaaatgatccatttaaatcttcagtcgaaatgatccatttggaagcatcataccgtttttgtgtttttggtcagtgtgcgagtgagcaatgagctaggagcgggaaatccacgagtggctatgttatcagtagtggttgtcaacatcacgactgttctcatcagctcagttctctgtgtcatcgtgcttgtgttccgcgttggccttagcaaagccttcaccagcgatgcagaagttatagcagccgtctctgacctctttcctcttctcgccgtttccattttcttaaacggaatccagccaattctctctggtaaaatcacaaaagagaccctcttgtgaatgcttgattgatgctttggtctttgtggattgatttgttttgttgaattggtaaaaaggggttgctattgggagtgggtggcaagcagtggtggcttatgtgaatcttgttacgtactatgtcattggtcttcctattggctgtgtccttggcttcaaaaccagtcttggagttgctgtataatctctttctctctttctctctttctttgtatttatatgtattgtattatacataacacttgggagatttttctttacaggggatctggtgggggatgattgcaggagtcatacttcaaaccctaactttgattgttcttacacttaaaactaattggacttccgaggtaagacagtgacaaacctctctctctctgtagtccaaagttcttacctttgctctgcatctgttgtaggtagaaaatgcagctcagagagtaaagacttcggcaactgagaatcaagagatggctaacgcaggtgtttaagataacagcaacagtgact

SEQ ID NO: 169983 - DNA, 1125 bp, Arabidopsis thaliana landsberg
ttggaattgtgtacatttctctttatgaaatacagtggaaatatgagaagacctagtcaaatgatgaggcttctattaacatcctttttcggtgttattgttggtttccttatgggtattacttttccaaccttgactttaactaaggttaggttaaatctttgcttcgtgcagcatgtcgataccttttcgttcatttcaaacttgattatgtcattgcttacacggtgatggtttctatcttctttgttttgaaatggttagatgaatcttccatccacattgtttccctcgattgatcttgcatacattgaggataaatactctgacatatcaagacaaagactatttggttcttggtcttcgacaaaaggcctcaaactcaagaatgacatccctgaccctccatataactataatgacactaaggttgtgattctcttgttctcttctttttttaactttctatgttttaataaagaaaattgttgatagaaactttggagctattgcagatatgggttcctactaacccccgtggtgctgagaggctacccccagatattgttacacctgaatcagatttttacctccgtcgactgtggggcgaccctaatgaggttcataaattttaatctacttgcttttatttgagaatggcttcaagatcatgtcacattttgttggtatggcatgcaggatttaacagtcaaacagcggtatcttgtaacatttacggttggctatgatcagaggaaaaatatagacactgtgttgaagaaggtatcctgccttgccaacgtattcttcttctttccttccttttctcattccttgactttacatttctcagttctcagataacttctctataatgctgtttcactacgatggccgggccagcgaatgggaagagtttgaatggtccaagcgagccattcatgtgagcattcggaaacaaacaaaatggttagcggctactttcctaagctggaacgctaatcttcttcctagtaggagtttttgatgtagtgaatatcgaattgaagccattgttagctccttgaaagtgatacttttcaggtactgtttcttctttcagatactcataataccctggtttag

SEQ ID NO: 169984 - DNA, 665 bp, Arabidopsis thaliana landsberg; identical to SEQ ID NO: 43711
  unsure (1)..(665): unsure at all n locations

SEQ ID NO: 169985 - DNA, 1812 bp, Arabidopsis thaliana landsberg
  unsure (1)..(1812): unsure at all n locations
tccattacctattaaattcacacaaaaaaacaancaaatatctgtgagacatgcacatcaaacatgaagctgaattattattttgatgcaaaaacactttgaatattatatttgattcagtggagccaagacaaagaggccacgagagtatagaaatcnctatatcaatatacaatataaaatgatcatgatgctcacaaataaagacaaataggattttcaaacttaaaacgagagatagaaaaactaactggtttgtttggctagtgtagacgagagattgagtcgccgtttgagaagaaattatgaactatgaaaaagccctatattcgttccaaaaaccctatattcgttccaaaatcaactatagtttttaaaacccacacccagtcggttcaaccggttcaatgggtcgtgggttaatagcgggtttttatgggtttttttggttttatagatagtgggttttagcactaaacccaaaccggagaagtgctcgggtcgtggtttaaccggttggaccgggcggttcgggtcgggcgtgaaaacattggttttgattatacgtaaataatctcttcttttataatttctccagttaagccactcaagtagcacactgtttaatctttcaaactggacatgaatattaggagaattttatacaatatttggcaacagaatgcattatttgccatctacgaagtaaacttttatataattaataatgtagtaatatttttattcatgatcataatttttttctcgcatgttttacgttttttaatattaaaggttaatattacaaaatttatgaaaatcttcttagagaaaaaatgggttatttacaactgatgaaatctggtgtaaagttatctataaaagatatgtactttaccaacgaattaagaatcttctccaagaaataaaatacttatgccaaataatctgatgcgtttacaagtatttagacgtaaatctctctatattttcctctccccctataaaatgtattttgttttttttgttaagcgataatttttataaaaccctaatagtttatcttgacaccccaagaatcctatttatacattaatcaatcatagttttaacttttaagacttgcattgtgttgggtagaataagatgggtgcatcatgctcagcaccagtttcttctactatcaagaaaaactggagagatcatcctccttcttcttattctctcaagattcacaacttctcccaacttgagaaaactacttccttctctggtcataaataccaatctcgtcttttctcctctggtgatataactggtatggataattgtattttcagggtttagcattaatcattatatcttatatagccaatgcaatatgttgttttaaaaaaaaaacaggagattgatcatatatccgaaagggaacgtaaaggacaatggaagtggatttatttcgatgtacgtggaattagacagctcaagcttgatggaattcaaaccaccaactgaagtgtttgcggaactccgcttctttgtctacaacaagaaacaaaacaagtactttactaaaggtgaagtatacatctcatgcttctctttctataaattcacatttaaaatcagtaatggatgtatcttatatatctttcagatgttgaaataaagcggttcgatgcacttaaaatggtgtggggattgccaaaagtttttccatatgaaacattcattaaccgcaaaatggatacctattcgagggtaatgaatgtgagtttggtgttgatgtcattgttgctccacctcttacca

SEQ ID NO: 169986 - DNA, 514 bp, Arabidopsis thaliana landsberg
cggtcccctagacaaaaacaaaggaatctgggatttaataagagtcttctcaaaaaataaactattaaatctcgtcatagcaggtacaggcagcgaatatgttccagcattgcaatacatcgaaaagcataatatagaaaatataaaaatacttggatttcaagatcaaaactctctgcgcaatcttatttcagattcaatttgtattcttgtaccttccctttggaacgagaccttcggactaacgatcaccgaatctttctcatatgggaaacccgttatagcctcaagaatcggagggatccctgaggtcgcatcagacagagaagactcaatcttaattgagccaggcaatgagaatgagctaactaatgctttacacttcatgattcaaaacccatctcaagctgccgaaatggggcgtcaagccaggataaacgttgaaatgaaattcaaccctgaactccattatcaaaagcttttggctatctataaaagattcctatagatctaa

SEQ ID NO: 169987 - DNA, 376 bp, Arabidopsis thaliana landsberg
tcatggggaacaccactttttaattatttaaagagatcaacagtcatggtagaggttaaaagcggcgacactacgtctttttggtattgacacacatggagtaacatgggatgtcttagagagaaactaggagaacagggatgcattgatctagggattcctagttcaagcacaatgaaagaggtgatgtccatgacacgaaggagaaaccatcgaaagggtatcttaatccgtgttgaagaagaaataaggaaacaaaagctgaatgggaaactgaacgatcacgatatagatctgttaaaagggaaaaatgaatgttcttggtcacagctgcggttagcaaagccgccgatggagggcccaaatgagataaggt

SEQ ID NO: 169988 - DNA, 997 bp, Arabidopsis thaliana landsberg
aaacacatattgacgtgttttgtcaacatactgaaagtgaaatatgatggcttatttagcatttcaattattttataaattaatattttaatagaagcacctagcatgtatatatcttttcatatatagtaaattgtaatgtgctaatttcttgaaaagctagtcaaatattaatgacgcatttgttaggttttctttgaaaaagaaagtggacttctctgtcacggtttcactttaaccaaactcacaaattatgtctccacttccataatcaaaattattatttgaaaagtcttatttgtagaattgatgaagaattatgaaatttattaaactaataaactttaggagctaatttattagactataaaattttatttgttggaatataaaatttattactctatgaaaaataaactaaacattggaaactttatgaaaacagacgcatggagtactaaatgcggtcagctggggagtactaatgccaatgggagcaatgatggctcggtacatgaaagtcttcgccgatccaacctggttctatctccacatcgcctttcaagtgtcgggttacgtcatcggggtagccggttgggccaccggaatcaagcttggtaacgactcaccaggcacatcttactcaacccatcgtaaccttggaatagcactcttcacatttgccacacttcaagtatttgctctgcttgtaaggccaaagccagaccacaaatatcgaacgtactggaacgtgtaccatcacaccgttggatacacgaccatcatcctctctattgtcaacattttcaaaggattcgacattttggacccggaggataaatggcgatgggcttacattgggatcctcatctttcttggtgcttgtatccttattctcgagccacttacttggttcattgttcttcgccgtaagagccgtggaggtaacacagttgctgcaccgacttcgagcaagtactctaacggcgtcaatggt

SEQ ID NO: 169989 - DNA, 1033 bp, Arabidopsis thaliana landsberg
atgcctcctctgtttcttccttcttcttcctctgctctgtttctacttcttctcctcctcttaactctccaaaccctaacctctatctctctctctcagccacaggctctccgttcaccagaaaagtgtggaaacttctctgtctccttccctttccaactctcttcctcctcctccgcagccgcttttagactctcctgcgaaaactcctccactctgtttcttcacataaaccaccaaagctaccgaatcatcgagttcttcaccgacggtctcctcgtagacttcccttcgtctccttcttgtcgccaattcaacgacttacgctctttccctttctccgcaaaccaattcttctccatctctttcgaaaacgtaatcggtctttacgactgcgaagattcttctctctgtaaattcggttgccccaaccaccgatctcttcggttgtgacggcaaaaaagaaaacgaaacctccggtggagatatcggatgttgctatcctgtgtctgatcatagcgcgtggcgtgtagctgatgatttctctgtgattagtagatatggatgcagaggattctcgtcgtggcttgttccaagagggacgaacagaggaaaaagaggcgttaagttagagtgggctattccaagaaacctcgcggaggctatttgtgatcgtgaggctcgaactgttaacgctacggctattgaaggaagtgttcgttgtgtgtgccgtgatggcttcgtcggcgacggcttcctccatggcaccggttgcttaaaatgtcagttttatttcttcttttcatgtattttcgtgtatgaaacagagtacgtttcaagtaaccttattgtactattctaaacaatgaatagaaatattttgtttcactatgaataattcataactgagtcatatggttcgttgggttactaaaaaacttagttttgattcagctcagtaattcattttgccttagtttaaaaagacaagtgtttcttgagttacaagcaacttacactacttggtttactg

SEQ ID NO: 169990 - DNA, 2416 bp, Arabidopsis thaliana landsberg
  unsure (1)..(2416): unsure at all n locations
acgtactgaaatttatcattctcatccaatttcagataagtaactgtaccatcatttaccttcttcaacatgtataaataacaattgatatccttgtagctttcttccgggctaccttttaaatcataaatcgcatgatattttccccttagcgctgtcgagtatgatactttcacacctaatttcgtctgaactagctccatgataattcttggaaccggagtttccaactgtcccggaaaatgatcatgaaggagagctgcgactaattgtgggttgcctttccatttcctgagcctagtgccacctttacttagccgagtgcaactatgcatcttattgtaccttctaatccataaaatatcagtattactgatattggacgctcgtaaacgccacgaacaactttctttggcacacttaaggacatagcgctccttatccgacttcttaatcacataaccaaaactgttagcaaatgcagctctatccaccacctcgtgcaatgccgccttgtttggaaattcttgacgtaaggtcaacccaattccgtctttccattctttaataaacatacccggttctatagcaggtggcgactcaacatactgttcccccctatcagaattatccatagactcatcatagcgtgtttcatcttcttgagtcccgtgatcctccactattgcctcaagttgatgttgagttccttgttcctcttctaataagacgatgagtgcaccatcatccactctcatttcatcctcctctgaattcaactctgtatagttcttaccaacagaacttttannnnnnnnnnnnnnnnnnnnnnnnnnnnnnnnntgctcgggcggtttagagatctcttccacaaccaaaacacttctccggttattttttgcggatgttacataaacaaagacatcctcatcatcacaaacgttcatttcttcctctactccgaacaaccgtgtattgtacctcatatgcaattttaccttatttgcatctaatccaagcttcgtcattatcctatcttctaacattgagagagtaatcttctcccctaatgtcttcatcatcacattatacatgcgaccttggaatttaaaatatatgatcacgttctctttcattgtaacctgccaaaacaatacacatactcagtcaatattactagtattaccgattctagtacattttcagtaatactagtactaattctgaaatattacatgtgtgagtaatactattacatatatgaaatactacgtgtctaagtaatactggtgctattaaaacatactatctatataaattacggtactactatagctagttcgaccagtattattttcgcgacaagaacaaatattcgatttgagttcaatttagtatgaatcagcatgtgaaatcaattgcttacccattaacagaccaaatgaaacctaaatctatacttaaacttctaatgtaggtgctaaaacacaataacccaaatctaattggattgaatctcaaaatcctcaaaatatgtaattcaaagcttttgaagctctcttcatacctagacttagtagattgatgcagcttgcaggaggagaaaaacgacaatgcggctcgtcggagcttgccggagctcgccggaggaagaatcccgaagaagaagtcgagctcgtgctcgagcttttttttttctttttccgtttttttttttttcaaaatgttttctattaattattctaattattcattcaaaataaattatagggataaattcgtcttaacacaaattattaattcaaaggggatatgaaaactctaaaatggttttgcagattagttgtcccacaaaaaggacacaagagatatgatcattcgtcacgtacgcttatgtgttgacttgtgtgattaaggcgcatgggggcagtgtggatagaccgattcggtttatttatgctgctgattttagaaaccggttagatccaccggttcctttaacatattttgggaattgtgttttaccaattgattttatgattatgaagcgacgacctttttgggagaagatggattcgtcaacggtgttgagattttaagtgattcggtcaaaggtttgggttcacgaagtcttgagtcagtttgggaggtgtacgaggaaggaactaaaaacatgaaggttggtacaaaagtattgactgttaccgggtcgaaccagtttgggctatacgggtcagatttcgggtggggaaaaccatgtaacagtgagattgcgtccattgaccgaaacgaggcgttttcgatgtcggagaggagggatgaacccggaggtgtggagatcggcttgtgtttgaagaaatgtgagatggacatatttatttatctgtttcaaaatggtttagaaatggttctttag

SEQ ID NO: 169991 - DNA, 413 bp, Arabidopsis thaliana landsberg
ttaaacacaatgcgctggttacgattgcaatggttttcaatgtccgccgggctgaagctctggctggacgaaccattcgggcatttcttcaatgcactggtgcttgccgtggcccttgcaatgccctggagcgttgcgcagggcttgagcgccatcatcccgtccatggaccgctgggtgggcgaccccgaaatcagcctgtacttcaaacccgacgccaccaaagaatcggtggacgaagccgccacccgcctgaagcgcgacttcgaccttagcagcgtcaccgtggtgacgcccgaagaagcgctggccaaactgcgcacgcaaagccaaacacccgacctggctgccagcctgccagaaaaccccctgccctacaccgtcgtggtcgtgctggatgtggcagcaaaacc

SEQ ID NO: 169992 - DNA, 807 bp, Arabidopsis thaliana landsberg; identical to SEQ ID NO: 54028

SEQ ID NO: 169993 - DNA, 573 bp, Arabidopsis thaliana landsberg
gacaaatacaaaaacaaaaagatgagggtcgtattatttttattcatcttacttcacaaaggtttctccgtgtatatcatcatcaacgcccttcaatatatctctccacaacacaagatctcgtccccaaagagtatatttgagcttggaattttcaaacaggccctacgttccggtgtcggtgaccgatcatgtggtaccgaaagttgcctaacgaagttgtttgggttgccaacagagacactccagtctccaagcccatcggaacactaaaaatcttgaataacaacctccacctcattgatcatactagtaactctgtttggtcaactcaagtgactagccaaagtctaaagtcggaactgaccgtcgagcttcttgacaacggcaatttggtattgtggtactccaacaacaacgagacaagtggatttttatggcgaagcttcgactttccgacggatacattactccatgatatgaaagtgggttgggataagaagtcgggtctaaataggatattacaatcatggaaaaacaggaatgatccttcaactggcgattacacttata

SEQ ID NO: 169994 - DNA, 895 bp, Arabidopsis thaliana landsberg
gaatgtccttatgaaaaaggataaatggaatgtgtttatctacggcgccggcagggataagaccattatttccggtagcactaacatggtcgacggggttcgtactttcaatacctccacgtttggtacctctctcatctttcttatttatactctctgcttttttgaagtaacatggtcattttaaacactttttaacttgttacgcgcagcaactgaaggcaaaggatttatgatgaaggacatgggaatcataaacaccgccgggccagagaagcatcaagcggtagcattccgatcagattccgatcggtcagtctactatcgatgttcattcgacggctaccaagatactctttatactcactcaaatcgacaatactatcgtaactgtgacgtcaccggaacagttgatttcatcttcggagctggcacagtcgtcttccaaggctgcagcatccgtccgcgtcaacagcttccgaatcagttcaacacaatcaccgctgaaggtacacaagaggccaatcagaacacgggaatatcgatccaccaatgcacaatctctcccaacggaaatgtaactgctacgacgtatcttggccgtccgtggaaattgttttcgaagacggttattatgcaatcggtgattgggtcgttcgtgaatcccgctgggtggattgcgtggaattcgacttatgacccgcctccacgtactatattctatagagagtacaagaattcaggtcctgggtcggatctatccaagagagttaaatgggctgggtataagcccatttcgtctgatgatgaggctgcaaggtttacggttaagtattttctccgaggggatgataattggattccaaaggcggttatgggaatgccccctctgtaa

SEQ ID NO: 169995 - DNA, 2082 bp, Arabidopsis thaliana landsberg
ctccgggtcccgactgttacacaagtgagttctttaaagcgacttggtcaatcactggtcaagacttcatcgctgcaatcaaatcttttttcatcaaaggtttccttcctaaagggctcaatgcaacaatcctagcgctcataccgaaaaaagatgaagctaccttgatgcgagattaccgtcccatttcatgttgtaacgtgatttacaaggtaatctctaaaattatagctaatcgtcttaaagtcatgctgccaacctttatcctccaaaatcaatctgcatttgttagagaaaggctcttgatggaaaatgttcttttggctacggagttagtcaaggactaccacaaagattcaatctctcctcgttgtgcgatgaaaatcgatatatcgaaagcatttgattctgtacaatggcaattcctgttgaacactttagaagctcttaatttcccggaaaaatttcgccattggataaaactctgtatctcgacagccactttctctgtccaagttaacggcgagctggcgggtttctttggtagtaagagaggcctgagacaaggttgtgctctctctccatacctgtttgttatatgcatgaatgttctgtctcatatgattgatgtagctgcagttcaccgaaacattggctatcaccctaaatgcaagaaactcagcctaacgcacttatgttttgcggatgacttaatggtgttcattgatgggcagcagagatcagttgaaggagttatcaatattttcaaggagtttgcgggtaaatcagggctgcacataagtttggagaaatcgaccctttatcttgctgaagtttcggagctaaatagaaataacattctctccgcttttccgttcgctagtggtcagttaccggttcgttatttgggatttcctcttctaacgaaacagatgactactgcggactattcgcctcttcttgacaaagtgagatcaaagataagctcttggacagctcgctccctctcctatgcgggacgtctagctcttatcaattccgtgattgtaagtttgtcaaatttttggatgtctgcatataggctgccagcaggatgtataaaagagattgagaagctatgttctgctttcttgtggtctggaccggagcttaaccccaagaaagcaaaacatggacttcgctatgtaaactgaaacaagaaggaggattgggtatcaaatctctcttggaagcaaataaagttagttgtttgaagctgatttggagactcgtttctcggcagtcttctttgtgggttaattgggtttggacttacattattcggaaaggctcattctggtccgcaaatgatcgttctagtctggggtcttggatgtggaagaagttgcttaagtacagagatgtggctaaatctatgtgtaaggttgagataaaaagtggcagctctacttcgttctggtatgataattggtcacagctacggcaactggttgatgttacaaatgctcgtagaacaatagacatggggataccgttagcagctactgtcgcgactgttttcgcttctcacaagaccaaacagcatcgtactgcaatctacaacaagatagaggcagagattcagagtattcttcaacgagagagatcagaggcaccagacatttttctgtggcgatcctcaggtgataatttcagacaaagtttcataacaaaagtcacttggcacaacatccgggatattcacacgcataggcaatggtataagggtgtttggttctcatacaacacacccaaatactctttcctgctgtggcttgcgatccatgatagataatccatgggtgatcggatcaaaaagtggaattccggacaacaagtcaattgcgttctctgcggcaacgtcgaagaatcaagaaatcacttattcttctcttgccattacaccactgcaatttgggataatctaacaaggcgtctcctatctcatgagtactcaactgactgggaccgcctattagctctactctgcagctccacaatgtcaaaggactctctctttctgtttcgatacgtcttccaagc

SEQ ID NO: 169996 - DNA, 1418 bp, Arabidopsis thaliana landsberg
aaacaactctacttagcttgggtggcttggtgattactccaaaactctaaatcgtttgttcttgtaaatgttttcctgtaagagttatggtcttgcttgttttttattgaagggtttgtgtgtggacggctttgttactattcctaatggcgatattcaacatggcttatatcatcaaccggttcacgaggatcgctggtgagctgtttggtatgttgatcgctgttctatttctccaacaaaccataaaggtatcaataccaaaaggctcaacaaagccacctctcacttctgatgataggtcaaaagatcttttatatgtttcaaatgatattggtagggaatggtgagtgaatttaggattccaaaaggtgaagactcaaaacttgaaaagtatcagtttgagtggctctacacaaacggacttcttggccttattttcacagtcggtcttgtctacaccgctttgaagagcagaaaagcaaggtcttggccatacggaacaggtaagagtgatttattttctcatgcttagtggtaatttctgtttaaaaacaactacaaggccttaatattatgattctttgtaaaggatgttgccgaagcttcgttgcagactacggagttccgttgatggttgtggtttggacagcattgtctttcagtacgccatcaaaactaccctctggtgtcccgagaagactcgttagtcctcttccaccggactctgtttctttaacacattggactgtcatcaaggttacaaaacacaagtacatttaagattttggtttacaatccaaacctctttaggatccgtcttttttctgtacaggacatgggtaaagtctctcccggttacatatttgcagcgtttatacccgcattgatgatcgcaggcctctacttctttgaccacagcgttgtctcgcagctcgcgcagcagaaggagtttaacctcaagaacccttctgcatatcactacgacattctcttgttaggtttcatggtaatcaatcaaactctgtttcttcctctgcaagctaacattaattctctgttaaaatctccaaactgtgttttttttttcaggtattgatctgtggaatgctcggtctaccgccttccaacggagtcctcccgcagtctcctatgcataccaaaagcctagctgttttcaaacgacaggtctaattaatactcagttaatcaacactgaatattcaggttaagcggtctagatgaaacttggtggttctatacagttaatgcggaggaagatggtgatgacagccaaagaaagcatcagacagaaagcaacgtcctctcaagtgtacgaggatatggaacaagtcttcatagaaatggacaaaagcccacttgtaagtagtacactcatgattaatgttcccagtttc

SEQ ID NO: 169997 - DNA, 597 bp, Arabidopsis thaliana landsberg
  unsure (1)..(597): unsure at all n locations
aaactcgcccatgattgttctgtcggactggttcatttctgaaattagtcgagcggattaaattggtggtagtgnaccatgtccgttctacatatattanctcaagtaatgttttgtgataaatcaggcaactaacgggagtggaattaaatggtttgagcgttaaggagttacaaaacatagagagtcaacttgaaatgagtttacgtggaattcgtatgaaaagggtaatatatgaatgctctaggcctctagctggttcgcatgatgcttaaaaattgataatagagcattgaagtttaagctaattattcttttcgaaccttgcaggaacaaattttgaccaatgaaattaaagagctaaccagaaaggtaaactatatgatataacacatgattatgaaaaatcagactcggatgttgttgtttgtgtttacattgtaaaacacataatttgcagatgtgaaatgcaaacgatatttttagtttcttcttcggtttgtgtttgcatttgcaattaacaaaaaaatctgttctttgagaaaaaatactaaagatgttgtgtttaagtttgaaacgcattatagtcaatgtatc

SEQ ID NO: 169998 - DNA, 446 bp, Arabidopsis thaliana landsberg
cttcatcttttatcaagtcaccactcaatgaattttataggtacccaaaaaccgaagcgtgggacataatgctgggaatgaacttatggggcacaatatacaacattatctacatgtttggcttgccacaagggataggattcgaagcaattcagttctgtaagctacacccggaagcggcatgggacattctaaagtattgtatatgcggtgccgtgggacaaaacttcatcttcatgacaataagtaacttcgggtcactagctaacacgaccataaccacgaccaggaagtttgttagcattgttgtatcatcagtaatgagcggaaatccattgtcgttgaagcaatggggatgtgtttcgatggtctttggtggtttggcatatcaaatttatcttaaatggaagaaattgcagagagtggagaagaagaagcaaaagagt

SEQ ID NO: 169999 - DNA, 131 bp, Arabidopsis thaliana landsberg
atacttgaatccaaccttggtttcaagctttaattagtatcttcgagaacgagtcaaggtttgatcatccaatgggtggcttagcgattccttgtcctgaagatacctacatcactgtaatccaacatttt

SEQ ID NO: 170000 - DNA, 556 bp, Arabidopsis thaliana landsberg
  unsure (1)..(556): unsure at all n locations
atggctgtaacaagctcttcttctacttgtgatggtttcttcatcatcagccttattgttgtcgtttcttcattgtttggggcatcatctgctcagttaaacgcaacgttttactcaggcacgtgccctaacgcatctgccatcgttcgcagcactattcagcaagctcttcaatccgatgcaagaatcggaggcagcctaatccgccttcattttcacgactgttttgttaatgtataataagattcttggtttttatattttatcataaatccttctaaattttgttacactaaaccgctactttgcttctttacatcggaaaaagggttgcgatgggtcgctcttgcttgacgacacttcaagcatccagagcgagaagaacgctcctgccaatgcaaactcaactagaggattcaatgttgtcgatagtatcaagacagccctcgagaatgcttgtcccggcattgtttcttgctctgacattttagctcttgcctcagaggcctctgtgtctttggtaataaataacacttcttcnataaacataatctaa

SEQ ID NO: 170001 - DNA, 522 bp, Arabidopsis thaliana landsberg
tttgatccgatgagaaacagtacaaggtgttgttcatggcttacccttctggtcctgatcatcatacagttctaacatttggaactggagaaatgagttggagaaagatagaatgttctgtaaaacatgacattgcgagtgatgggatatgtatcaatggggtcatgtattacttaggcgatacgtctgagtttatgactgcttttgtggttgtttgctttgatgtgaggtctgagacattcagctttatttaccctggaagctattgtgaagtgataaactacaagggaaagttgggtttggttttttgtgatgattacactgatgatgctattgagttgcgtctgtgggttctagaggacaaggagaaaatagagtggtcaaagtatgcctacaagttgaaggatgagaaattaacggctcataacgtttccattgttggagtgagtactaaaggtgagaaggttctgtcaatgactgatttcacgtataaacaaccgttttatgtgtgtaatctcaatc

SEQ ID NO: 170002 - DNA, 565 bp, Arabidopsis thaliana landsberg
atggaaattgcaaccgatacagcaaagcagatgagagacgaagagttgttcaaagcagcggaatggggagattcatcgttgttcatgtcattatctgaagaacagctctctaaatctctcaatttcagaaacgaagatggtcgctctctcctccatgtcgctgcttccttcggccattctcaagtttgttcctttctcttttcaatcatattaagaactaatctgtggttagataacctctttgattactatagctgcagtaaataggttgtttaactgatgagaaagccttaagggaagtttttgagtctcgctttgaaaaccacacgaatctgcgtcgtttgggttcttgagattagtgtgttttaggaacagtgtcagtatgtgtaaaaatgtttatggatgtgggatttgcagatagtgaagttgttatcaagttcagatgaagcaaagactgtaatcaatagcaaggatgatgaaggatgggctcctttgcattccgctgctagcatcggtaatgataagctcgttgaggtgcttttgaccagaggtatgttacatactc

SEQ ID NO: 170003 - DNA, 450 bp, Arabidopsis thaliana landsberg
ctggtggaaggctcgcataccatttttgcattgcctttcgctatgatcgggtttactttgggtgtgatgagaccaggcgtggctttatggtatggcgaaaacccatttttatccaatgctgcattccctcccgatgattcgttctttcattcctatacaggtatcatgctgataaaactgttactggtactggtttgtatggtatcagcaagaagcgcggcgatggcgtttaaccggtatctcgacaggcattttgacgcgaagaacccgcgtactgccatccgtgaaatacctgcgggcgtcatatctgccaacagtgcgctggtgtttacgataggctgctgcgtggtattctgggtggcctgttatttcattaacacgatctgtttttacctggcgccggtggcgcttttcgtggtattggtttacagctataccaaacggttcacg

SEQ ID NO: 170004 - DNA, 791 bp, Arabidopsis thaliana landsberg
  unsure (1)..(791): unsure at all n locations
cttctctatgttcgcgctctttaccaaacccctaaatctcaatcatttcgcatcttctctacacttctacacgatccaccatcaccagatctagtaaacgagatctcccgcgtcctgagcgaccaccggaaccctaaagatgatctcgaacacactcttgtcgcttactctccccgatgttagtcaaatctagtcgaacaagtattgaaacgctgcaaaaatctcggctttcctgctcacagattcttcctatgggcaagaagaatcccagatttcgaacatagcttggaaagttatcacattttggttgagattttgggtagtagtaagcaattcgctttgctttggaacttttaatcgaagctagagaatataattactttgagattagttctaaagtgttgtggattgtgtttagagcttatagtagagctaatttacctagtgaagcttgtagagcgtttaatcgaatggttgagtttgggattaagccttgtgttgatgatcttgatcagcttttgcattcgctttgcgataggagatanggnaatcatgctcaggattttttcgataaagcgaaaggattcgggattgtaccgagtgcgaagacgtatagcattttggttagaggttgggcgagaatccgagacgcgtcgggtgcacgtaaggtgtttgatgaaatgcttgagagaaactgtgttgtggatttgcttgctaacaatgctctgtaagatgctttgtgtaaatctggtgatgttgatggagctatataagattgtttcaagaaatgg

SEQ ID NO: 170005 - DNA, 383 bp, Arabidopsis thaliana landsberg
tttaccttgcctccgccagaagagtaccacgtcgttgattctagctatccaaacatacatggagtttgggctccttacggatcatcaagggggtggaattgtgaggtatcatatgtcgcaatttttttctaaaccacctccaagaaataagatagaaattatcgatgtcatgcatcattacgttcagtaatggagagaaattttggagtttggaagaagaaattgagaattctttgtgatttcgccagatctaggagttaagttctaagaaagtggtaatggttacaaggggattacacaattttatcaaaatttcagatttttcatatgttgatttcgcagaagtaatgacaggctgaaattaacaatacagattgggagcc

SEQ ID NO: 170006 - DNA, 239 bp, Arabidopsis thaliana landsberg
gtccagaactgaatactcgaaaggctaagatttcttggttggaggtatgtaagcctaaacgggaaaggggtctgggtctcaagtctcttagagaattaaatgaagttagcactctacaatttatttggcgaatagtctcggcaaaaaactctctatgggttcaatggatatataagaatttgattcataagggaacactttggtctgtaaaggataacacgagttgcattgtcatagca

SEQ ID NO: 170007 - DNA, 245 bp, Arabidopsis thaliana landsberg
aaagattttttatcatttacaacataggcaagtatacattatctatccttctttttcatctttgtgttacttctaagtctaaaaaacatttggtaacaaaaacagtttgtgaagaacaactcatggggataccttattcaagctggtcagtggttctgttagtagctttgtgtctcgtggtgtcgttcatagttcctcgatctttaccatcgtctcttcttacaaaagatcaaggtttacgttct

SEQ ID NO: 170008 - DNA, 1199 bp, Arabidopsis thaliana landsberg
catcttaggatctcgttctccaaggcacacccatgtattgctgaatatacatatacccatactcgtgtatatattatatcctatacaaacatagtatagagttatacatataaacaaattatctaaatccaacaaaaacaaaacactattttacaaaccgaaagtgctgtaacaacttgcaaaacaccagtttggatacacagacgtcctcatcctaaactggctggaggcctgctaaaccttgatatgtggctggaaaagtgaatatttctaagaaaaaacataacacattaaccattgagaaagtcgcattaagcagaatactggacctgtgaccatcccctccactaacagtgttgcggatcaaaccattagcgtgcaactgcataatagaaagttcatttaattatctaccgcgcaaattataagcctttaaattcttttttatgatgcagacttatcttataatcacaatattccatttgaaggatattatagatgttttttttttttttaatccagttgtgcgtaagtgatcaaattatggttagttataacttttgatggtcacttgatgacttaattaattatttgttcctcaggggttactacaggtgcgcttacaagttcacgcatggttgtaaagctacaaaacaagtccaacggagcgacaccgattcaaacatgttagctattacttacctatctgagcataaccatccacggcccactaaacgcaaggctctcgctgactccactcgttccacttcctcctccatctgctcagccataactacctctgcctcatctagagtcttccaaaacaaagacgaaccaaatcaaccccacttgccttcctcctccactcctcctggaaacgcggctgtcttgtttaaaatgacggacatggaggagtttcaggacaatatgggggtggatattgacgtcctagataaaataatttcaattttggactggtaattgaaattaatttcaatttacataaatcatcgaatatggactggcattgtttccagagtttcaacatcagccggaggaagaagacctatggtcaacattcttcgatgattataatttttgtttttattgagctcactctcatcactgcaagacaagaaaaaataaccagtgagatccaaggatttatgtacacccaaggatttagtttttgcagtgtc

SEQ ID NO: 170009 - DNA, 2187 bp, Arabidopsis thaliana landsberg; identical to SEQ ID NO: 30437

SEQ ID NO: 170010 - DNA, 463 bp, Arabidopsis thaliana landsberg
ataaaggagagggaaaacatcctaaagacaaaacaaacccaatgtgagcagctgaaccgcagcgtcgacgatgtaccacagccacaaccatttcaacacccccatctttacatgatcgctcatcagacttctcctttcctaaatatggggtaacggcagtatttcttgtttttttaagttcttttttcttaccataatgtcaaattctcatatatagtgaagtgttgtcagtcagtcatataggcaatgatagtgaatgcacttcatatatagggtttgtgttaggtatggcgttagaggttgatggatatgcatgcatattattgtattatgattttaatttgctatatatgattgtaatttcagtggtttgtaccaaggagaagaccaaacggcgatgaggaggaacaatctggatctgactcttgaacccatttacaattaccttggctgttacgccgct

SEQ ID NO: 170011 - DNA, 583 bp, Arabidopsis thaliana landsberg
  unsure (1)..(583): unsure at all n locations
atgtataccttcactcaaggtgtgacagaagctttcaaggcagcctgggtttatttcaaggaatatcaacgggactgctagcatcatggcttcagtgaggtacaacttctaggtaccttcttcaaaggagttgattggagatatcagatggctcttgatttaatgagcaatggtaacttcaataccaagtatctggtagatgctacagctttgattgagaaccttgcctgtagcaacagtaccaaaaatgttgactttgagaggaagaagattgcaagagttgtttcaaggaatcagatggctgaggtacatgctaagctagattcagttcacaacttgcatgtacactttgctgctaaagaagagaccattgagcttgagccagagacagaagaaggagtcttctacattgatggttgatatgagtcaaattaccctaatgactactctctcaaataaagaggttgntatagcacttaaaggtcgaattccacaaaattctcggatcacacaatagactaacaatttcgaataaagctaaacagaaaatatataaagttaaagacangaaaagcatgaaagg

SEQ ID NO: 170012 - DNA, 577 bp, Arabidopsis thaliana landsberg
ctcgctcgattcgcaaataggtccgactcgtaattcacttctgactctgtgttcgatagcccgaccgtagtgatgttaattgtggttacatccataagtagcttggtccatctttattccatttcatatatgtccgaggatccgcatagccctcgatttatgtgttatttatccattcttactttttttatgccaatgttggtgactggagataactctcttcaattattcctgggatgggagggagtaggtcttgcttcatatttgttaattcatttttggtttacacgacttcaggcagataaagcagctacaaaagctatgcttgtcaatcgagtaggtgattttggattagctcttgggatttcgggtcgttttactctctttcaaacagtagacttttcaaccatttttgctcgtgctagtgcccccagaaattcttggatttcttgcaatatgagattgaatgccataagtcttatttgtattttacttcttattggtgctgttgggaaatccgcgcagataggatcgcatacttggtcacccgatgctatggagggtcccactccagtat

SEQ ID NO: 170013 - DNA, 622 bp, Arabidopsis thaliana landsberg
atgcaccaccagccgtctgcgctcagcttgtgctcgggctccgggcagctcgacgaagccgtccgcgccgtgtccggttcccgcaccgtcgcctacgccgaaagcgacccgctcgcctccatggtgatggcggcccgcttcccgggcgtgctgaacctgggaagcatcgacgccgtcgactggcggcaggccagggaccggcatgcgccgacggacctgatcgcaggctggccgtgccagggcatcagccacaacgggcaccgcctcggactggacgacccgcgttccgggctgtggcggaacgtcgcccacgccatctcggtgattcggcctgcacgggtgttcctggagaacgtggccgcgttgaagacccggggcctgcccacggtcgcggcgaacctgaacgaactgggctacgacctgttctggacgatcagcagggcgtccgatgtgggcgccccgcacacccggctgcggttcgtcggctacgccaggccgggcgccgggctgacggtggaggtgccagcgcctcccgcccagtacggggcgctgccgatgctgccgacttcgaagggttggacggcccaaacgggggcccgaaccagcgggacggcaagggcgg

SEQ ID NO: 170014 - DNA, 559 bp, Arabidopsis thaliana landsberg; identical to SEQ ID NO: 78785

SEQ ID NO: 170015 - DNA, 1669 bp, Arabidopsis thaliana landsberg
ttttttctgaacaattgaatgattagagagactttagagttctccatgattttctttctatatagagaacaaaacaaaacttgtattatggtcaacaaaagagaacccacttttattattaaaaaaaaagggatggaaaaaaaagagttaaaaacaaagagtgatgacgtggcagaacagaaaatctcaaaacacatgaaaaacgtatcagtcaagtcaactccttcgacccaatcaacacgacacactattcactgtagtcatttctcttcactttccgtgacctcttcttttttccatttttctcagcactctctactcgttaagcttttcatcttttttgcttgaaagcaatgttcactggggtcaaaaagatgaagaagatacatgttcctccagaaacaggcaagttcatgttctgtctcttcttcagcttcttatcttgttgccatgtatgtttctctgagttgtcgttgaaccagacaaacacaatgatcgaactctctagtttccttaatatctcggattggaatcttcctggttctgagaggaatccatgttcatggaacggtgttctctgcagcttaccagacaatagctctgtgattagcctgtctctctctaactttgatctctccaattcttccttcttaccacttgtctgcaatctccagactttggagtctcttgatgtctccaacaacagattgagctcaatcccagaagggttcgttacaaattgcgaaagactcattgctctgaagcatctgaacttcagcacgaacaagttttctacttcccctggtttccgcggtttctccaaattggcggttcttgatttctctcacaacgtgttgagtgggaacgttggagactatggttttgatgggttggttcagttgaggagtttgaatcttagcttcaacagattaactggttctgttccggttcatttgaccaaaagtctagagaagcttgaggtttcagataatagtttgagcggtactattcccgaaggcatcaaagattatcaagaactaacgctgatagatctcagtgataatcagcttaacggctctatcccgagttcgttgggaaacctctccaagttagaaagtttacttctctccaacaactatcttagtggactaatcccagaatcactttcaagcatccagacattgcgtcggtttgcagcgaaccgtaaccgattcacgggagaaattccatcagggctcacaaaacacctcgagaacttagatctcagtttcaacagtttagcggggtcgattccaggtgaccttttgtcgcagcttaaactcgtctctgtggatctgtcatctaatcaacttgttggatggataccacaaagcatttcgtctagcctggttaggctaagactaggaagcaataagctaacagggtcagtaccctctgttgcgtttgaatcgctgcagctcctaacgtatctggagatggacaacaacagtttaactggcttcatacctccttcatttggaaatcttgtgagcttgaatctcctgaacttggctatgaacgagttggccgggatcttacctcctgcatttgccaaccccagcaggcttcaagtgataaaacaacagcaaaacaagcttacgggagaaatcccagatacaatcgcattttt

SEQ ID NO: 170016 - DNA, 692 bp, Arabidopsis thaliana landsberg
taaatataaagaaactattagtatcttataaataaataaataaactaaaaattgaaatataattattttagttttgaattaagaaaatattaaatataaaaaaaattaaacataaagaaactatatatatcttgtaattaaaaaattaaaaaaaaatgaaaaatgagaaaaaaaaatataaactcttcatcatataattaatgaaatttaaaaacttattgcttttaattttttgtacaataattaaggaaatttagaaattaattattaattttagaagaaaaatgttaaaatagtttaatagttttgattcactaaatacatgtgtacatatatgatggtatgaggatcaagaaagtgccgtaaaatgtaaaacttccaatgttccttagtgaaaaatgttaacttttctgttgacaagacgtgtatataaacatcacctataccggagaagaagaagacacaaaacaaagttaaaaagaagaaatttttggtgcagtgaattcgaagagcaatatgaagaatattggttacattattatagccaccgtgcttgttggtctcctcctcatcatggctctagtggcgagtttctattgggccaaacgacatgtcaaatgttgtggcggagagggactgtcgtcaaaggatgtgttcaatttacttatacaattggttgcttttattctgct

SEQ ID NO: 170017 - DNA, 2566 bp, Arabidopsis thaliana landsberg
tcttcactcgattgcaacgacgctcgtgttcattcgacgcatactcgatcgccggactttcgccatctccccgtcacctccgttcactcgacctcaccgttccaacttcaccatttctcaccgctcgcgtctcctcttcactcaaccgctacacgaccaattctcccttctcgccattcgccgttcatccgccaaagcttctctctcattctcacgaacactcaaccgctcatctctccaccggagttcgaagactctcgatcatctatgcttactcgacctcaagccgattcactcgagtgagcttagctcgaccgctcttcaaaccgccactgtttcccagagaagtttactcgacctcgccggacgcaccgcaaacactcgaccatagtccttctaggaacaaaagaccgaagccacaatttcactgtactcgaccgtattactcgaccgcgtacttgaccggtttagtgtttgcgttttatttagactaacatattgatatttggctttgagttacattctttttcaggaaatcaatatgagtaactacagtggcgaatcctccatggatgcggattacaacgtcgatgtagctgaattttggtcaactggaccagagagagagcgacaggcttatgagagcttcagagctgagacccaacgctcagtagctcgacgcaatgagaggacaactgagattgctagaggaaagagagcaatgaccagcagataggagttgatcgacgaagatattgacgtcgagtatgagcctaagtcatggcacagagagacgaagctgttgaacaggcctgatgaagttacagtggaggagtacatcaaacttttcggggtgaactacttctggggaacgaggtacccctgttatcagactttagtccagctggggctactggaggacgtacagcacttattcgagaggtgccatctggagacgctgatgtcttacccgtacatcgcttacaagaaggaaacaatagagtttctctccactctgcaagtggagatgtatcagggacttactgcagatgagctggagagtgaagtgttggggttcttgactttttcagttaacgagcagcgttaccagctatctatcaagagcttggaaggattatttggttttcccagtggaaagggaactaaacccaacttcgagagggaagagttgaaggatttgtggttaaccattgggaacgatttggcactcaactctgcaaggtctaagagcaaccagattcgaagccctgtgatccgctactatcagcgctcggtagcgaatgttctgtaccccagggaatctacaggcaccgtgtctaacacagacatggagatgattgattctgcactcaagggcattctccggagaacaaaggggaagaaggtcctaaagggcgaccttaatgatacaccaccggtcatgcttctgttgatccacctgtgcggataggaagtgggcgcacaccaacgagaggaagaaggtgcgaggaaccctttgtgtaggtggcgttgtgacaccgattctgattgcatgtggtgtacctctcacgtctccagggtttgatccgaggatgatggatttagatcacttgcgtcgttgtgagtttctggagtacgacatggttggcgatttctatcgctacaaattcgagcactccctgacccgaacagccaacattttgcttccctgcatcgaggccacaaccatacttcagggtgagaacattgacttcagacctgcgcgtgattacctctactttgagagcgctccaccgactgatgacaatgtccctacgacggaagctacagaggatgatattactgagatggatgaggatagggaggaggagtatgatacgagcatgtatcatttcagtgagcacgtacctccagcgcgggagagcaagagcttgagtgaagctcacagaaacaacagtaagttgcagaggtggtgcaagaaacaagataggctacttatcaagtgcttcaaagccatcacgtttctgacggacaagataagttgtttctcttctaccacagctattccgcagggagagcgtcctcaggacatgccttcgaggagatatgacgcgccagggccaagtcatcacaggcctgagccaagtcaccacaggcctgagcctagtgaccgagtagtcccaccagtccctgcaaggcattcatcattcgagcctcgggagctcgggagaaagaagaaggctgcactcgctcggtctagcagcaggagtacacgacttctccagtcccgtagcttacgcgacggcggtgctggccgcagcagaagaagagaggtcgagtatcatcagagcggtgctggccgcgacgaaggacgagaggtcgagtaccccagggggaagctgagacacaacagggagattcgtctatggcatgggagcaatcacaggcagccattgattaacaacttctttcattcttcgactgaggtaagcgcctcacttcaccattgtattatatcatctcttgggatttgttcttcattttgtttctgtgattggatttgtcc

SEQ ID NO: 170018 - DNA, 459 bp, Arabidopsis thaliana landsberg
atttttagcttcaccctgccgccggcgccccccagcccacggtaggattccatcgacctacaaaaggccttcaaagggtttggctgtgacagtacaacagtgataaacatacttactcatcgcgattcagtgcagcgtggactcattcaacaggaatacagggctatgtatcatgaggaactctcccatcgcatttcatctgaactcaatggaaaccacaagaaagctatgttgctgcggattcttgatcctgctggacgtgatgcaactgttttgagagaagctctaaatgttgacactatggatctgagagcagccactgatattatatgttccatgaccccatcacagttgcaaataatgaaacagacttattatgctagatttggaacttatcttgaacatgacattggtcaccacacatctggcgatcaccagaagcttttacttgcctatgtg

SEQ ID NO: 170019 - DNA, 444 bp, Arabidopsis thaliana landsberg
ctcggttatatcgagtctccgatgaccgtctctcagcatatcaacacttcttcaaaggctcttatcactcttcaggtctctacatatctcttttcaccaaatacattttctcttctctttttttcaagataaaaaggttttttttttcaggaaatatttttacaggagattcttagggcaaaaggagtagaagagaaggagatggaagagaagataaggtcgtatatcaatagaggaaggttatcatatgaaggagacgatgagaagagagatgtgatgaacaagattgtctctaaactcagatctgagggctataatgcttctctctccaaaacctcatgggactcttcttttgatcatcgtgaaggtaaacaacacactttcaaagaaagtagaaatatatatatgaatatctagaaagatccatatataaaaacaaccttt

SEQ ID NO: 170020 - DNA, 121 bp, Arabidopsis thaliana landsberg
ttaaatgctaagaaccctataagcacgagaacaaggagccgttgcagcagatacgagtgtgtaaccaagcattccaactttagcttactcgaagcaaagctaaggagctcaacgaccgttc

SEQ ID NO: 170021 - DNA, 701 bp, Arabidopsis thaliana landsberg
ttggacctggtgtatcttgtctttaccacgaatgattttccttggttaacaataattgttgtttttccaatatctgctggttcattaatgttatttctcccgcataggggaaataaagtcaataaatggtatactatatgcatttgcatcttagaacttattttaacgacgtacgctttgtgctatagttttaaaatggccgatccattaattcatctgtccgccgattatacatggtgcgatttctgtgatttttactggagaatgggaatagatgggctttcaataggagctattctactgtcgggatttattaccgcgtcagccactttagcggcttttccagttactcggcattccctattttttcatttcctgatgttagcaatgtgcatcggtcaaataggatcactgtcttctggggctcttgtcctgttcttcatcatgtgggaattagatattaattgccgttgatatcttttacccatgtggggtggaaacgaccgtgtgtattcgtgctgcagaactgattttgtactcggcaggaagttctatttctttattaatagtagtcttcggtatcagtttatatggttcgcaggacccaacattccttttacagctcttagcttatacatccaatcttgatacacttgaaataatgttctaccatggagttcttattgcgtaccccgtccaat

SEQ ID NO: 170022 - DNA, 981 bp, Arabidopsis thaliana landsberg
  unsure (1)..(981): unsure at all n locations
taacagagaaggagagaaaagatcaacgagaagattaagactcttcaacaactcattcctcgctgcagcaaggtctggcaaaatttcttatattcctcgttgttttattgaactgaaggttgaatctgattctgtttctactctgatcagtctactaaagtttcaacnnnnnnnnnnnnnnnnnnnnnnnnnnnnnnnntacagagccaaatacaagtatgctcttcaaaacagaatgtgttttaaaccaatggttcaacatggaaagagttcatatgtatctagttttgttgaggttactagagttatttttggtctctatcaaccagcgtctccgcagagtttgaatgtttgatgtccgcagattcatcttcttggaagggttataaagtttcttgggagataaatgcaaatcttataagtctctacttcgaaacactggtacctcctttagatgggatggcctaatagctaattcctcttattatgcactgttcttgaggtcttactcttctgttttgcttcccagtttacaggaggattatgtataatatattaatatctgaatcgatattgttatgtcagatgatgtcgacgggacagggtatgatgtcgccaatgatgaatgccgggaatacgcaacagttcatgccccatatggccatggatatgaaccgacctcctccattcatacctttccccggcacatcttttcctatgccggctcaaatggcaggtgtaggtccatcatatccagcaccgcgctacccttttcccaacattcagacctttgacccatccagagtccgtttaccaagcccgcagcctaacccggtgtcgaaccagcctcagtttccggcttacatgaatccctatagccaatttgctggtccccaccagttgcaacaacctcctcctcctccatttcaggtaactctttaccatggtatccattgtgttgttgcaggtaatccttatgta

SEQ ID NO: 170023 - DNA, 1905 bp, Arabidopsis thaliana landsberg
caatacatcactgttaggacagattcagggtatcagaagaatgtttgaagagttaatgaaccgaattccttaggcagcaccagcagcagctgcaacagctcagcaaccacaagaaaatgttctacctcagcaacaacagccaccacctccaccgccactacctccaccgccaccactaccagctcagatggcagagccttcctattaggagataatgaaggtcatgagaaccatgggcacaaagtactttactggaggtattgatctcgtcaaagcagatgattggaggaagttgttggagaataattttgagaatgctaggtgcccaatggagttccaaaaggacattgctgttcattttttgagagaggaggcacgtcattggtgggatggtgtagtgaggaacacactagtgcaacatgtgatttcctgggaagattttagggaagagttcaacagaaagttttttcctcaagaagcaagggataatttggaggatgacttcgaggagcttcgtcaggaagacagtcagagagtatgagcgggaatttagtcgtcttagcaggttttcagttagagcaggaagaggagagcagtcaatgattcgtagattcatgagaggattgaggccgaacattctgacctgatgtgcttctcgagaattttttagcatgatagacttggttgagaaggtagcaaggatagagagtggacttgttctagaagctaagcacctgaaaagtacttaagctcggacaactcaggtagttggatctcaaaagcgtacatgggataaccgtgaagcaggaccagttcagaaccgtttccccaagtgtactaggtgtaataggcagcatggaggggtttgttggatggattcagacaaatgttttcagtgtggtgaagtggatcatataagggagaattgtccggaaggtaataataagtgtaggaagtgtgggcagccgggccattatgcacgggagtgcactacgtgtctggtggaagggaatcaacggaacataaatgacgggaaccaaacacttcctaagaggcaagccataggacctcgtgtgtacgccgtagaagaaaaggggcttgatgttgagcaagataaagtttgaaattcaaattccaaggtcgaagaagttcacgttggagtggacagtttaatcgttttaagcaaagatttcttttaggaatttattctttttctttattgcagttttcagttgttggcatatgcttaaacatttttattcaattctttaatggtccttttaataattttggacgtctgagaactcaagttttcttttagtctttttatagaactggggtaaaccgaacactttaactttggacgtctgagaactcaagtttctggttcatttgtattcggaatcattttagtctttttatagtatgactctgaactattgcccaatttttttaggaaatgtgggacattggggattcaccttggggagcgcctgtgttatttgtgaagaagaaggacgagagtttcagcttatgtattgactaccgagggttgaaccaggtcacaatgaagaacaagtaccattttccaaggatcgatgagttgttggtggatcagttgaggggtgctatttgacgtcaggttatcaccaaatcccgatagcggaggcagatgttcgcaagactgttttcaggactagatatagacattttgagtttgtgtgatgcctttcggtttgactaatgcaccagcaacgttcatgaggttgatgatcagcgtgttttaggagtttttggacgagtttgtgatcatctttattgataacatcaaaatgtattctaagagtcatgaggagcatgaggtacatctcagcagagtgatggagaagctcgaagaacataccc

SEQ ID NO: 170024 - DNA, 288 bp, Arabidopsis thaliana landsberg
gtgcgttttcgaaagttttatgactggttaaaggatttacgtttatgataggaaaattacgggtttatgtttttggcaagctaattacgggtttacgttttgggcaaaaaaattacgggtttccattttttttgtggaaaaattacggatttacgttttttgacgggaaaattaaaggtttaggttttttggcaggaaaattttgggtttacgtttttagcggcaaaattacgggtttcctttttttggcgggaaaattaagggattacttttttggcaaaaaaatta

SEQ ID NO: 170025 - DNA, 567 bp, Arabidopsis thaliana landsberg
atgaccatggatttagatcaagcgataaaagaaatgtcaattaacgatgatagccctctgatattgtctaatcaagcacagttttgctccattgaaagaaataactgcagtatagtgggcaggtttttgaatccgtctcaccaaaggatgtctaattggatattagacatgcctagaatttggagattgtattcaagggtaagaggtgttgctttatccaagagagatttcaattctttttcaaatcagaagatgatttaattgaaatcttaaaaactggagtatggactcaggatgagtgatgtgtcttgatggagcgttgggtggaaaaaccttctgttgattcactcttgtttcttccagtttggattcgactcagaaatatcccgataaactactacacagaagatactatcaaagaaatcgtaggttgtgttgggaaagtgatgactgtggaactagatttggaaaaatctcaagcacaagactatattagggttcaagtgctacaaagatgttcgaaatcctctgcgtaactttaaggaagttctgcgcccatcgggggaa

SEQ ID NO: 170026 - DNA, 501 bp, Arabidopsis thaliana landsberg
agccttctctttagctcggggtatcatgcaattagggttccaaaaggttatacctaagacagagagtagagtttccgcggtgatgttgatgcaaaccaatgcttctatgattgcaacgttgatatgtttggttggattgtttgtaagcggtgagttcaaagatatcaaggaagatttcgagacgtttaaaacggggaagccactttacgttttgagtcttatcggattatcacttgcatggcaagtaatgtctttagggcttgtgggtcttgtgtgtttggcttcttcccttttctctaatgttgtcagcttctccgcgacacctgtagtaaacattctccttgtgttggcgtttcggtttacggatgccgacgttaaattttttaaggaaggagctctggtagctgggattcttggttttgcatcttatgtgtattccttgtataagtctaccaagaaaaaggaaatagcaagccaaagccaaacaactagagtatgatt

SEQ ID NO: 170027 - DNA, 1151 bp, Arabidopsis thaliana landsberg
ccctgatttatgcttttagtacacctacatctttattgtctttcttgaattttgtgaactcataaaaccttaaaaatagtttcttaaaaagctaaggcagaagaggaatgtctagcagattatttcggaatagagacgttgttttgtttaaatatattccgaagatagatacagctaaaatttattccatgcctaaagaaatctgttgacatgaaataatgaaagctaatgttaatatctacatctccaacttcacttaaaagtgtttaatatttcacatttatatcttacacccttttttttgttaaagcacatttatatcttacataaggttggattattatttttgtaacatgttccgcatgtgttaaaattatttagttcacttttaaataacaacataacatttaatgtttaatgaaataatttttggaaaatattacataagctataaattttaaaaaataattttttttataaatgcttaatgttgataataagtttggctttaaatgtcgatgaaaaaatgatttgactactattcataaacatatgtatattttttcatatctcttaaacatatacacttaaaccaatcttactttttgatttttgatcaaaaacaaccaatattactttaagactgacatctttgttgtatccgtgatctgaaaaacgttttatcatggatgcacatgtggggacacggctcacaatacagaaagggaccagaatccttaagaggaacccaaccaacaggaatgctaagactaccatgtttctgctgtgcacccggttgcaagaacaacattgaccacccacgagccaagcctcttaaggactttcgaaccctccaaacacattacaaacgtaaacatgggtctaaaccatttgcttgtcgtatgtgtggtaaggcctttgcagtgaaaggagattggagaacgcatgagaagaattgtggaaagctttggtattgctcttgtggctcggattttaagcacaagaggtcgcttaaggaccatgtcaaggcctttggaaatggtcatgttccttgtgggattgatagttttggaggagatcatgaggactactatgatgctgcttctgatatcgagcaataagatgatagcaacaacaatgagtgttaatta

SEQ ID NO: 170028 - DNA, 449 bp, Arabidopsis thaliana landsberg
ccaagtctatggaggcaatgatcaagcaaacatcagtacttccaaacgatccaaggaaagaagagttagttcagcttgagactacaaagaagtgtattgacatagaggcacgacgtatagttcaggccgagttatattgtggtctcggtttcctagctgtgcaaactataggctttatgcgtcttaccttttgggaactaagctgggacgtaatggaacccatctgcttctttgtcacaaccattcatttcatcctcggttacgtcttttttcttcggacatcgacggaaccatcattcgaaggactttttcgacagcggtttaagaccaaacagaagaagcttatggagaggcatgggtttgactttctgaggtacaatgagctcaactctttgttcacaacatttccgtctaaatttcattatccggtttagttagccgcatcctct

SEQ ID NO: 170029 - DNA, 582 bp, Arabidopsis thaliana landsberg
  unsure (1)..(582): unsure at all n locations
gcatatcatgttaaagtacgggatatgtgatggcctctgcgccattggctgtatttggagcagtgtcggccgtggtggctgccaaagggctgggcattttaaccctgtatgcctatctgattggttcgttttacctggggcttttgttttttatttttattgtgctgggcattatttgttattcctgccgcatcaattatttcaagctgttgaaacacatcaaagaaccggtattgcttgctttttccaccaccagcagcgaggccgccatgcccaaaacttttgatgcccnnnnnnnnnnnnnnnnnnnnnnnaaagtcaccggttttattttgcctttgggttattcgttcaacctggatggcagcatgatgtacatgacctttgcggctatttcgctggcgcagtattatgacgtgcccatgaccattggcgaccagctcatgatgctgctgatatttatgcttacgagtaaaggtattgccggtgtgccgcgggcatcactcctggtcattgccagcatgcttaacacttaccaaattcccgaagtagggttgagcttaattatggggtcgtcccctg

SEQ ID NO: 170030 - DNA, 391 bp, Arabidopsis thaliana landsberg
atgctgcttatattaaaaaccagggctagcctgcggcaatatcttgatactaaaaaacaggaaggaaagcagatcggttttgtacccactatgggtgccctgcatgccgggcaccttcgcctggtccgtaattcgcgccaggccggccttttcaccgtttgcagtattttcgcgaatcccacccagttcaacgacaaaaaggatttctaaaaatatcccaagaccctcgaacccgatatcaggcttctggaagaagccgggtgcgacctgctattcctccccgaagtggaagaactttatcctcatgggcttcaggagctggagacctatcacctgggtaagctggaagaagtttatgaaggcaagtaccgaccgggtcatttccagggcg

SEQ ID NO: 170031 - DNA, 379 bp, Arabidopsis thaliana landsberg
  unsure (1)..(379): unsure at all n locations
gtgctgagtatcaccgcgttcggcgaaccgaccggaaccggccccgttctgcggagcggcgcccggccggaagactgggttctggcgaccggcacattcggcggcagtattgccggccgacacctcgacttcacgccccgcgtccgcgaggctttgaccctgcacgcccgatgccgtctgcatgcgatgatcgacgtcagtgacggcctgtctgccgacctggggcatattctcgaagagagcaacgtgggggcgattttcgacgaacaaacgattccggtcagcgaggccgcccatggtctggccgacaatcgcacgccgatcgaacacgcgcttaccgatggcnnnnnnnnnnnnnnnnngctgagcgtggctcccg

SEQ ID NO: 170032 - DNA, 2319 bp, Arabidopsis thaliana landsberg
cgaagtcccctggcgccacacctacaagtgacgccttggccagctaacttccgagcagggacctatcccaagtacaacggcagcaccgacccagcgcaatacataatgagttatcaggtcgccgttgcatccgccggaggggacgacgccacaatggcgaagtctttcatcatcgccctagagggcccagcactcacctggttcaccagattgcccccgctgtccattgactcctggagaagtctccgggacaaattcctgctcaacttccaagggtaccgcccaaacaccgacgccttggccgaactctcactctgcaaatagctggaaaaagagactctgcgagagtattaccacaaattcttaacactcaagtcacagctgccctccgtcgatgatcagatcgctatccactacgccatcagtggccttcgggccggcgtcctctacagccactgtatcagagatccgcccaagaacctctaggagttgtatcagctctttgaaaaatatgccaaatccgaagagctccaccagcgcaaggttgagtcacagcggaagcccaaagatgccccgcagtccagccgcacgtggacgaggactccgcagccagactccggtcgagatggccgcagtcagcagcaagtacacaacatcgccaaccagcatcccgctgctgacccccctcgccgccaagaatatcccccccagggccgcggaaatggaactcgtggcaggggccgagggcgcgcgcagccgccgcgccgattctactgcctttttcacggcgaagactgcacccaccaaaccaaagactgccccgaaacgaaggccaccagagacagaatggcgagggcgcagccagccgacaatcccagaattgtcgcgcataactaccagccaccccctccaccatacgtccacgcccccgctccgcatccaccgcaccacgcttaccaacatcatcaggaagtacaaatcgtacctcctccacccccaccaccacaccagcaacaccaaaacattccccatcccccaaagcaagaagacttcgccgatcaaccttatcgcggagtcattcacatgataacaggggggtcaagcaccgacttcgacaccaagcggcagaagcgggaccactaccgcagcatcaaccatgtcgccgtcactggcccagtcgtgcagacgaagtggtcccacataccgctaaccttcgacgcgcgagacgtcgacctacgcagcgccccccacatcgacgcaatggtcatcaactgcagcgtggcaggttgggacttacacaaagtcctcgtcgacaacggcagtcaggcggacatcatcttcctccacgccttcgaccgcatgggcataaccacagcttctgaagcttcggacaacccgttgtatggtttcggcggcaagggcacatttcccgtcggcaaaatagaattgcctctctccttcggtgtagcacccaatgcccgaagtgagcaagtgaccttcgacatcgtggatatggtatattcgtacaacgccattatgggtcggggctctatcaacaagtttgaggcagccattcacggactttacctgtgcatgaagataccaggtccattaggcgccatcacagtctacggcaaccagcagactgcatgcaacatagagcgggacttcgtcgccgggcaaagaaatgtgcactgcctcatggcccagcgcgaggtccctgcgttcgccagcccaaacgacaaagaacacgacaaggcacagctgcagagcaacgacgggaccaagaccgttccccttgaccaggccacgcccaagaagacagtcaccatcagcgaagacctcacttcgcatgacgaggagaaactcctctgctgcttgtccaagaacaaagacatcttcgcctggtccgccctcgacctggtcggagttagccgatccataattgagcacagcctaggaatcgacccttcggtgagaccgaaaaaatagcggctccgcataatgtctgacgaaaagacagaagccgccaaggccgaggtacatcgcctcctggaagccaaatttatcgagccagtggcttaccccacgtggctctccaacgttgtgatggtgcagaaaaagagcggcaagtggcgaatgtgcatcgacttcaccagtctcaacaaggcctgcccaaaggacaacttcccgctgtctcggatcgacaaaatagtcgatagcgcgaccgggtgcgaagtcatgtcactcctcgactgcttctccggttaccatcaaatatatatgaaggaggaagacaagccccgccccagcttcata

SEQ ID NO: 170033 - DNA, 1072 bp, Arabidopsis thaliana landsberg
taacaccaattctctgtgaagatcttcttgtagcttgttgagaatcaagctattatgaccaatgtggaacggtttcgatcgacgacatctctatgatacaactatatgccaagtttgtaagggtggagaagaaacaatacttcatgtgcttagggattgtcctatgacgttgggtataatatatgacagcgtttaatcccgccaaataagcttgattctttcttgccaaagtcgctacttgagtggttgttttgtaacttaggtggaagtggtgagttacacataagatagtggtcgactttgcatgggacggctacgtggtgggggttgaaatggcgttgcaataatgtgtttggtgctccagggaaatgtagagatagagtgcggttcataaatgacatagccggggtattcactgacgcattcctagccatggatgaccgggataggcaagccccaaagacccgagcgaatcatcacaccttcataaatctgaaaagcttatccactgaatcttttcctcaaaagaatgattctacatcatatactatcaaattctagttaatgattaattaggcactccgcactcgtcatagttttatgttcatgtcgcttttgcttgccttaacgattgtcaaacggcgagcagtaaccatcacacacgaagtttggtctcttgttttgaataatgatttatcatcaactgaaatagtaaataaccaaccatggatagtactatagtagatactgactaagatacacgtcacgttttactttgccataccacgtcgtgtgccatagtatgtactttataatttactatatatattcagacaaaacaaagtactacttatctcagaagttagtacaaactgctttctcgtttttactttttcatatgttttgtctactattctccgtatacatatttgagatttacaatatgggccttttcgcgatttacaatatgggcctataacaaggaaataagcccacttatttagtggatttaagaaaatatcaaatatttactacaaaattcgtccatcataactacacaaaagtaatgtaa

SEQ ID NO: 170034 - DNA, 797 bp, Arabidopsis thaliana landsberg
  unsure (1)..(797): unsure at all n locations
aaacaagttttgtcnagcgtgtgttcttcctatctttgaaggtaatttctactcatgtatggagtgtgatttcatcctccatgaaacatgcgcaaattcttgctgcataatacaacatgcgttacatccgcatcaacttacattggaacatgtggagtacgattcttatagattcatgtgcaatgcttgtgaacgtttttgtggtggttttatctatggatgtcacataagggaatgcaaattctatcttgatgtacggtgtgcttccatttatgagccatttaattacaaatatcatgaacattccatgttcctcgcttcagatccaaaagaagaactactttgtcaagtatgcaaagcaatatgtcataaacaattaaattgcatcaaatgtgattttttttgtatgcatcaagtgtgctaccttgccagaaaaagtaaggtataaacatgacaaacactttctcaaagttttatttggagaagaattatgtaatagagactggtgcaaagtatgtgaacgtaatttaagagctacagacacaaaagtgttctattggtgcaacgagtgtggcaccacatttcatattgaatgcttatttggtggagacctaatatatgtgaagcatggtcaaactttaaagttttttgatagggatgctcaaattcttggcaaaagtaatcgttctcgaccgttatgcatgaaccaggattgcaagaacccttgccaaggcaaaatattgaagagatacaacgatatagtatgttcagttaaatgtgggaatcaagttttttat

SEQ ID NO: 170035 - DNA, 856 bp, Arabidopsis thaliana landsberg
atggctggtggtggtaaaggaaaatcgtcaagaagtcgaggtcgaggtagggaatcgacgccgaaggcaaaggttttttacggtaaaaatcctctcggccgtgggagtgaagtcggaggttcttctctgtcctcaaaccctaatggcgatgctctccgttacacattcaaatagaagtcttccttcccaatatctgccggcgacacgaccccagaaatcaccaccccaaacgacacaaaccccgactcctgctcgttctcactcgcaatttggctctcaacaaccgcttcttattcgtcgaaagcaaccacaacctcctgctcgtcaacatcagattcctcatcttcaagaacagcttgctcaggatccaccggagacacagttcataccaaaacttcaaaatcatgaagaggaagatgaggaggacgatggggaaacagatagggaggaagtcggggaagaagatggagaggaagtcgacaaagaagaacaaaaccctaatgtcgactaccaagagctgttggatcgcttacttgccctgcctggccgacaacacctttcggttctgtctcaggagcctattccagaagtcgagactctctggtaagctctatctttctctccttctagaaacagatgaagattatgaatggtgattaagctaagtatggtctggagtctttgtattggtctgcactctttgttttgtgttggctctagacaaatttttatttggctttagtgttggctctagcgcaatgatttggtctacagtctttgtttggtctgaaactttttgttttatgttggctcacacattcatcgaattggtctgcagtctgtgtttggtctgctt

SEQ ID NO: 170036 - DNA, 876 bp, Arabidopsis thaliana landsberg; identical to SEQ ID NO: 11439

SEQ ID NO: 170037 - DNA, 1787 bp, Arabidopsis thaliana landsberg
  unsure (1)..(1787): unsure at all n locations
acctcgactctagaggatcccctggcctccagaaagcttcggcattattttcaaggataccacataattgttccttcgtcacaacctctaaaggacatcatgaggaacagagaggctactggaaggattggaaaatgggctgtagagcttaatgaattcaccattgattatgtgcatagatcttcaattcagtcccaggcgttacaggcttcatcgctgactggacgccagaggtcaggaagcagagacaaataaagatgcccaagcttggacagtgttctgctatggttcttggggaacttcggcgcaggagcagctgctgttctagtagcaccttcgaaagtcagaacatgttatgcagccaagctagactttagttgtacaaataatattgccgaattcgaagcactcctgttagggcttcggaagttaagggcaatgggaataagaagggctattctgaaaactgattctcaagtcatttctggccatgtagataaaagtagcaagacaagagatccgaaacttgaaaatatctggatacagtacgaagttggaggcttctttcgaaggtttttctgtcaagaatattccaagagggaaaatgagcatgcacatttgctagccaaatcggccgctcaaggctccctctaccttcggaagtattttttgaaacaataaagacacctttggttgaactcatggagagagcagtgcttactatttctccagtacatagtgaagattggaggactgaaattatatccttcctccaaggtaattgtctttcagatgaggaatcttataataagagaatggaggcaaggacaagaccatatgtgataatagaaggggaattgtttaaacatggagtctgttctccacttctcaagtgtttatcaagagctgaaggtattgaattaatgaaggagatacacgcaggtctgtgtggatctcacattgggtctaagcctttgctgggaaaagtgtttcgacannnnnnnnnnnnnnnnnnnnnngcttcggatgcagaagagctagtccaaaaatgtgaaaattgtcaaaaatgcgcaagagaccagaaacaaccttcatcactcactctgttaatacggcccacctggtcgctgcaaagatggggcctcgatttgctaggcccactaccaccagcacaagacaatttaagatatgttgtggtggccatagaatatttttccaagtggattgaggcgaagcctttagccacaataacttcggtcattgtccagaagttcttctagcaaaacattgtttgtcgctttggcgtgttgaaggctataactgtggacaatggaacacagtttgatgtcgaaacgttcaaggaattctgtgatcaaattggtacaaaaatatactttgcattagtcaggcatccggagtcaaacggactagtagaaagagcaaatggaatcataataacaggcataatgaagtcattcttcaatcagcccagaggaaagtggctagatgaattgaaaaaagtggtatggaaccacaatactgttgtctcgaggtcaatagaatttaccccgtttaagcttctgtttggtgacgaagcaataacactagaagaagcaagaatgggttcaataaggacttcagcttcggcagaagatgaagaggattgcaaaataataaaagacaccatagaagggaccagacttcaggcaatagagcatatcagcaaatatcaagctgaaacagtcaaatggcgggatcggttggtaagattaaagaatataaagcca

SEQ ID NO: 170038 - DNA, 1594 bp, Arabidopsis thaliana landsberg; identical to SEQ ID NO: 50515

SEQ ID NO: 170039 - DNA, 787 bp, Arabidopsis thaliana landsberg
tgttataagtttagtcgatgcggcttttaaggtttttaggggaggaggagctcataacggttgccatagaaatgaggtttcttacactcagcttatatatggtctatttgaagcaaagaagatcgatgaagctttgagcttattggtgaaaatgaaagatgacaattgttgtcctaatgttcgaacatacacagtgcttatagatgctttgtgtggatcaggacagaagtcagaagctatgaatttgtttaagcagatgtcagagagtggcattaagcctgatgattgtatgtatactgtgcttattcagagattttgtagtggagatacacttgatgaagcaagtggattgctagaacatatgttggagaatgggttgatgccaaatgttattacatacaatgcatcgatcaaaggtttttgtaagaagaatgtgcacaaagcaatgggactgcttagtaagatgctagagcagaatttggttccagacttgataacttataatacattgatcgctggacagtgtagctctggtaatttagatagtgcatatagattgcttagtttgatggaagaaagtggattggttccaaaccagcgtacagtatgaggaatatcgttaagtgagaagatttgtaatggtcttcttagatgttactacaagctgcaaaagtatgaggaagctgcaaaagttgtggaagatatgatatgtaatggtcattcaccacaactagagttttgcaaaatgttgatttgcaagctgtgtgaagaaggagaaaaagagaga

SEQ ID NO: 170040 - DNA, 534 bp, Arabidopsis thaliana landsberg
cggcataccgaaagcagaagattggccacgcttgggatctgtgataacgcccccatcatcgtataaacctgatctcgtttcgatgaaaggacaagtgattgagcctcagactattgaggaagcatgtgacatggtggtggatcaaccagtaggagcaaaattgcatgtgttcaagccacacattgaacttcaacaagacgcaagtgctataactgttagttaagattcaatataaaacgagagagagagagacatttgatctataatatttgtgtttttgtgtggtagggcatttactgtggcacgtcaggtgagccagccagctatgtcggacttagagatgccatcatcgttggagtcgagaagatccaagggaagtctattggaactgtgaaggtatggtacaagaagttcatatttctgaaagtggctatgagcaggtggtttcagttatactctccggatggcacacacacgggcataaagcgaacagattaccttgttgatttttgtgtcccacgcctatccatggat

SEQ ID NO: 170041 - DNA, 884 bp, Arabidopsis thaliana landsberg; identical to SEQ ID NO: 5536
  unsure (1)..(884): unsure at all n locations

SEQ ID NO: 170042 - DNA, 423 bp, Arabidopsis thaliana landsberg
tgtgttttctttatcagacggcaattccgattctaataggaacaaaattcgatgactttgttctgctcccacccaatcttcagtggaccatcgtcactcaggtaataccaatcatacaacttaatcataccacgttaccaattaagacccttttcatattttacgttttcatgatgatttagacatttcgatttattgtgataattcatttctataaaaaaatagttaatttggttctatatgatttattaggcaagagcatatgcgaaggtgatgaatgcgtcattgttcttctcaagtgcgacacacaacataaatgtgaacaagatcttcaaattcattttggctagactttttaatttgccttggaagattgacagaaatttgaccttaggtgaacccattatcgactacgattcctaa

SEQ ID NO: 170043 - DNA, 432 bp, Arabidopsis thaliana landsberg
  unsure (1)..(432): unsure at all n locations
gcacaccgtaaggggnnnnnnnnnnnnnnnnnnnnnnnnnnnnnnnnnnnnnnnnnnnnnnnnnnnnnnnnnnnnnnnnnnnnnnnnnnnnnnnnnnnnnnnnnnnnnnnnnnnnnnnnnnnnnnntataccgtgcataaacttgaaagcgatctgaacattgaactgctggatcgctccgggcatcgcgcgcgttttacgcgaaccggacagatgctgctggaaaaggggcgtgacgttctccatacggttcgtgaactggaaaaacaggccatcaaacttcatcagggctgggaaaacgaactggtgatcggcgtggatgatacctttcccttttctcttctgacgccgccgcatcgaagcgttctatcagcgccacagcgaaacccggataatcttcattaatggtgtgctgggcggctcctgggatgc

SEQ ID NO: 170044 - DNA, 457 bp, Arabidopsis thaliana landsberg; identical to SEQ ID NO: 68931

SEQ ID NO: 170045 - DNA, 461 bp, Arabidopsis thaliana landsberg
ccgacaaacacttttttgattatggatctactaccatcaatggaatgtgtaatcttcacatctaatatgtatttctgaataatctcattttttcaattattcaactatttcattttaccaagttcaatgttaaccagattagtcaatatttatatatttcgatacaataacaaaatgttatttgtaacatatataagagatatgaattgatcaccactaattatcaattgattttaatttgcaaactcattatattaattatcgggtcttgatcgggtagtcttgtcactggggtagctgtatttcctcagcctcagtctctaatccagcaataacactctggtttggtctcttccatgatcccactccaaactagtcttctgtgtctctttgcctacgtatgggttgtactaattagctctgtgctcttattcctatctgcttttattctcctccaagta

SEQ ID NO: 170046 - DNA, 534 bp, Arabidopsis thaliana landsberg
atgaaacagggtcttgatccaaaatcaacggctaatctatttgcaagatcagtatgcatgggagagaagaagataaatgatgaagactgtttcatactcaaacttgatgctgagccatcggcgcttaaggcgagaagcagcagcaatgttgagatcatacggcacactgtgtggggatgtttcagccagagaacaggtcttttgattcaacttgaagactctcaccttctaagaatcaaagctcaagacgataacagtatattttgggagacaacaatggagtctttgatccaagattacaggaccgttgatggtatcctggtagcacacgctggtaaaagctcggtgtctctgtttcggtttggtgagaactcggataatcattcgaggactcggatggaagagacttgggagattgaggaaatggattttaacattaagggtctgtctatggattgttttttaccgccttctgacctcaagaaggacgatgatgaagaagaagaaatcgaatgtggtttagctgctaataat

SEQ ID NO: 170047 - DNA, 377 bp, Arabidopsis thaliana landsberg; identical to SEQ ID NO: 62166

SEQ ID NO: 170048 - DNA, 334 bp, Arabidopsis thaliana landsberg
ttttttgtgtgggggatagatattctacgtaagaggcgtgtcataaggacatcgaacgtgcatttggagtgctgcaagctcgatttaaaatcattcgtaaaccagctggcctgtgggacatattcgagttggctatcatcatgagatcgtgtatcatattgcataatatgattgttgaggatgaacgagagacatatgctcaacactggacggattatgatcaatttgaggcaagtgggtcgagtacacaacaaccattctcgacccaagtgctactcatatttgcaaatcatgtgcgtgatagatccgaattgcgtgattcaaatgtacatca

SEQ ID NO: 170049 - DNA, 932 bp, Arabidopsis thaliana landsberg; identical to SEQ ID NO: 195

SEQ ID NO: 170050 - DNA, 1109 bp, Arabidopsis thaliana landsberg
cactatctaaactagggtccagtcgggcccaggttccaccaggggtttttgtccaggagataaagcaaccaagtgtcaccacagatcaaatgaaggaatgacacgttccgagtcaggtagaagtagatcgcaatgacaggagggagccaatcatcagatacataagaaactaggaagaaccatatgacaggacggaacgcatcccgagacagtcggcccactataccattatagggggtctactgtatagaagaggtgcaggaggagtcctcatgaagtgtattcactcagctactggaaagcagctgttggacgagatccatgttgggcaatgtggcgtgcatgcagcgtcacagactctagtagggaaagctttcaggtctgggttttactggccaatagcgaagaacgatgtagcagagttagtccagaagtgcgaggcatgccagttcttacgaaagcagcatcatctacccgcggaacagttgcagactattcctatgacatggtcgtttgcatgctgggggctggacatgattgtacctttcaagaaggctcaggaggctatactcatatactggtagccattgacaaattcacaaaatggatagagtataagtcaattgcctccttgacctcatcaaaagtagtggagtttatccaggatataatatccaggttcagaataccgaatagcatcatcactgacctaggatccaacttcaccagctctgagttcttcgattactgcgagcaaaggagcatccagatcaagtacgcatcagtggcacatccaagaaccaatggctaggtggaaagggccaacggaatgatactggaagcacttagaaaaaaggtattcgacaagagcgaaaaacttgcaggaaaatggatcaaagaactattgtacgtggtctggagcctgcgaactcaacccagtcgagctctgcatggaaataccctgttcttcatggtttatgggtcggaagtagtgctgcctgccgatctgatctttggggcgcctaagttgactttcgaaaacatagctgaggcagaagcaaccaggctggaagacattgatgtgctggaagaagaatgattgaacacat

SEQ ID NO: 170051 - DNA, 610 bp, Arabidopsis thaliana landsberg
tcgccactccctatcatccacagacgagcaggcaggttgagatctccaattgggagataaaaacaattctggaaaagactggtctacaaagctcaatgacgcactttgggcttacacgatagctttcaagacacccattggtacaactcctttcaaccttctctatggaaaagcatgtcacctactcgttgagctcgagtacaaagcaatgtgggcagtaaaacttctgaactttgaaataaaaactgctgaggagaagcgattgatccaactcagtgaccttgacgagattcgtttagaagcttatgagagcactaaaatctacaaggagagaactaagcttttccatgacaaaaagatcatcaccaaggattttcaggttggtgatcaggtgctgctattcaactctcgtttaaaactctctccaggaaagcttaaatccagatggtctggccccttctgtatcactgaggttcgtccttatggagcagtcactctagctggtaagagtggagatttcacagtaaatggtcaaaggctcaagaaatacttagcagatcaaatccttcaagaggtgacatcggttcatctctaggagcttcttgatgat

SEQ ID NO: 170052 - DNA, 349 bp, Arabidopsis thaliana landsberg; identical to SEQ ID NO: 55248

SEQ ID NO: 170053 - DNA, 564 bp, Arabidopsis thaliana landsberg
  unsure (1)..(564): unsure at all n locations
atcacatgctagtttcctctcaaggcgtgcttggttgttctgttgcctactgatgatataagtttccgtgtgtggagtagatgcaatagcatggtgaaatcgtggattcttaatgtcgtgaacaaggagatatatgatagtatnctgtattatcaggatgctatggaaatgtgggatgatctattcactaggttcaaggttaatnnnnnnnnnnnnnnnnnnnnnnnnnnnnnnnnnnnnnnnnnnnnnnnnnnnnnnnnnnnngatttatcaacatacttcactaagaagaagacattgtgggaacaattgtcaaacacaagaattaagactgtgaagaaatgtgattgtgatcaggttaaagaacttcttgaggaagcagagacaagtcgtgtgatacagtttttgatgggattgaatgataacttcaataacattcgtggtcagattctgaatatgaaaccaagacctggattgaatgacatttataacctgctggatcaagatgagagtcaaagaattgaaggatattcaaaaccagtgatgtctactccttgggctttt

SEQ ID NO: 170054 - DNA, 1792 bp, Arabidopsis thaliana landsberg
caacaagaaggaggcgacaaggcagaagagttccccgaggtccacgactgcttcatgatctacggtgggcaagtggcgaacgcctcggctcagcaccgcaagcagcagcgcctggaggtctgctcggtgaaggtagcggcgccagtctacctagactagtccgataagcccatcaccttcgaccaaggcgaccaccccgactgcgtgccgagcccaggaaggtacccgctcgttgtcgaccccgtcatcggcaacgccaggctcaccaaggtcctcatagacggaggcagcagcctcaacatcatctacgtcgagaccctcgggctcttggagatcgatctatccacgatccggccggtgcggcgccctttcacgggatcatccccagaaagcgtgtcctgccccttggacaactcgatttgcccgtttgcttcgaaactccctccaacttccgaaaggaaaccctcacgttcgaggtggtcggttccgaggacctaccacgcagtgctgggagaccatgtacgccaagttcatgccatccccaactactcctacctcaagctcaagatgccgggcccaacggggtcatcaccatcggctccatgtaccgacacgcgtacgaatgcacgtggagtgcatggagtacgccgaggccctcgccgaatccgaggccctcatcgccgacctggagagcctctccaaggaggcgccagatgcgaagcgccacgccggcaacttcgagccagcagagacggttaagtccgtccctctcgaccccagcaacgacgcctccaagcaagtccggatcggctccgagctcgaccccaaataggaagcagtgctcgtcgactttctccgcgcgaacgccgaggtttttgcgtggagtcccttggacatgcctggcataccgagggatgtcgtcgagcactcgctggatatccgagctggagcccgacccatgaagcagcctctgcgccgattcgacgaggagaagcgcagagtgattggcgaggagatccacaagctgatggcagcagggttcatcaaagaggtattccatcccaaatggcttgccaaccctgtgcttgtgaggaagaaaggggggaaatggcggatgtgtgtagactacactggtctaaacaaagcatgtccgaaggttccctaccctctgcctcgcatcgatcaaatcgtggattccactgctaggtgcgaaaccctgtccttcctcgatgcctactcagggtatcaccagatccggatgaaagagtccgaccagctcgcgacttctttcatcacgccgttcggcatgtactgctatgtcaccatgccgttcggtttgaggaatgcgggcgcgacgtaccagcggtgcatgaaccatgtgttcggcgaacacatcggtcgcacagtcgaggcctacgtcgatgacatcgtagtcaagacaaggaaggcttccgacctcctctccgaccttgaagtgacattccgatgtctcaaggcgaaaggggtcaagctcaatcctgagaagtgtgtctgtcggggtgccccggggcatgctcctggggttcatcgtctccgagcgaggcatcgaagccaacccggagaagatcgcagccatcaccagcatgggacccatcaaggacttgaagggcatacagagggtcatgggatcgcgtccggccctgagccgcttcatctcacgcctcggcaaaagaggtctgcctctgtgccgcctcttaaggaagaccgagtgtttcgcttggacccctgaggccgaggaagccctcgagaacct

SEQ ID NO: 170055 - DNA, 1001 bp, Arabidopsis thaliana landsberg
ttatgcaaatatgggagatatgaaagcatgtgaaagggtttttgatgatatgccagagagaaatgtgttctcttggaatggtttgatcaagggatatgctcaaaatgggcgggtttctgaagtgttggattcgtttaagagaatggtagatgaagggaatgttgttcctaacgatgcaacattgactttagtcttatccgcttgtgcaaagttaggagcttttgatttcgggaaatgggtacataagtatggagaaaatcttggttacaataaggtagatgttaatgttaagaatgctttgattgatatgtatggaaaatgcggagctatagagatagctatggaagtcttcaaaggcataaagagaagagatttgataagttggaataccatgatcaacggtttagctgcacatggacatggaactgaggccttagatttattccatgagatgaaaaattccggaattagagcggacaaggtaacattcgtcggtgttttatgtgcctgtaaacacatgggtttggttgaagatggcttggcttattttaattccatgtttactgatttctcaataatgcctgagattgagcattgcggttgtgtagtggatctactatcacgggctggatttttaacactagctgttgagtttataaacaaaatgccggtaaaagcggatgctgttatatgggctactcttcttggagcgtcaaaggtttataagaaggtggacattggcgaacttgcgcttgaagagttgaacaagattgaaccaagaaacccggctaatttcgttatgctctcaaacatatatggagatgcaggaagatttgatgatgctgcaaggctaaaagttgctatgagagacacagggtttaagaaagaagcaggtgttagctggattgagaccgatgatggtttagaaaagaataattctccgggagagaagcatcctcgaccaaaggaattacacaggatcttagagagctgaagagctt

SEQ ID NO: 170056 - DNA, 1382 bp, Arabidopsis thaliana landsberg
acagatcgtgtatgttgtgaatggatcaaagtcaaaaataaagaaggggtaacaaaaagacaatgctgattcagatggattagagataaagaagaagaatgaagtgaagactttatgaattcctggtatgttttattaaaaggttattagtattaatactatatatatatatatgttccttttggttgtataattttgaatttcagatatgtttcttcttccaaagcagcctcaagaatattaaaatatcctatacattatagatgtacggttgtttcgaagctttcgttccatttgccaggggaacaacttattgttttcaaacatgatgaagaagtaaaaacagtgttaaaatcggactgatctacatggctctatgttccttgcttggttcgaattaaataaagttagtaagattgctaggaagctgacttatgcagacatccccactagatttacctatgatgcacaagaaaagaagtttaacctcagaaacaaaggttttgctatagaaataataaactatgttcctcgtgatatagaagatcaatactatttgagaataatcctcaatgttcaaccacgaccaagatgttttgaagagctctagagagttaatggtgtggtatataaagagttgaaagatgcttgtaaagcattaggcttattcgataataatctggaatacattgatgatttaaagagaacaatattttggagcagtggatggtatctacgtcagttactagagcagaagtctatttacgacgacattattgttgcagtgattgaaaacgttggaggagtaatttttgtttctggatttggaggaacacgtaaaacttttcttcggaaaacactctatgatgcacctaggtcaaagggtgacattgttcttaatgtttcttccagtggtattgcttctcttcttttagaaggtggtaggacagctcactctagatttggaattcctctcaattcttatgagtttactacatgtaatatgaaagctggttcagataggaaaaatttagtcaacgaatcttctctgataatatgggatgaagctccaatgatgagcaaatactgttttgagtcattggatagtagtttgtcagatatttgtgggcatggtgagaacaaactcgtttggtggcaaggatgttgtctttgaaggtgatttttgataagttttactagtaaatgactcttacctttggagtcattgccatagcctctgacacagagtatgcgtctttttctcactatttaagtgttagttaagcgaaagatattaaagagttttcatagtggatattagtagtgggtgatggagtataaaatattccttatgaatttgtgattaccacagcaaaagatcc

SEQ ID NO: 170057 - DNA, 216 bp, Arabidopsis thaliana landsberg
aataagagaaaatcccgttttgatattttcaattggattagggatgttcaagcttcgaagaaacgatttcaggagtgcagattcacatgggtcaatcgaaaacagaacaaaccgacggatattcttgccaagggtcgcttactccagaatgaacaatttaaattttattcttacgttccgattgtaatttcctcagccttatagctagacaactct

SEQ ID NO: 170058 - DNA, 1273 bp, Arabidopsis thaliana landsberg
atggacgctaccaaacttgttctacgtgaatctttccttcttttctttcatcggtttccaaagaccaaagaggcgtgaaccatctatggaacacttgcttggctccaacaataacttcaccggcaagattccttctttcatatgtgagttgcgttctctagaaactctcgatttatcagacaacaactttagtggttcaatccctcgttgtatgggaaatctcaagagtaatctttcacatctaaaccttcgtcaaaataatcttagcggaggtcttccaaagcacatatttgaaatactgaggtctctagatgtcggccataaccagctagtgggaaagcttccaagatctttgagatttttctctactcttgaagttttgaacgtggaaagcaacagaatcaatgacacgtttccgttctggttgacttctctaccaaagctacaagttctagtccttcgctccaatgcattccatggaccaatacatgaagcctcgttccttaagttacgaatcatcgacatatcgcataatcatttcaatggaactttgccatcagattattttgtgaagtggagtgctatgtcatcacttgggacagacgaagatcggtcgaatgcaaactacatgggatcaggctattaccaagattcaatggttttgatgaataaaggtgtagagtcggagctggtacgtattctaacaatctacacagcactcgacttttccggaaacaaatttgaaggagagattccaaagtccattggtctattgaaagagcttctcgtgctcaacttgtcaaacaatgcttttggtggccacatcccatcatctatggggaacctgacagctctcgagtcattggacgtttcccagaacaagcttacaggagagattccacaagagctaggggacctttcgttccttgcgtatatgaacttctctcataaccagcttgcaggcctagtaccaggaggtacgcagtttcgaaggcaaaattgctctgcctttgagaataacctgggactttttggcccttctcttgacgaagtctgcagagataaacatacgccagcatcacaacagaatgaaacgacagaaacagaggaagaagacgaagaagagataagctggatagcagccgcaataggattcatacctggaattgtctttggattaacgattggatacatattggtttcctacaaaccagagtggttcatgaacccttttggccgaaacaatcgtcgacgcagaaacaccaccacccac

SEQ ID NO: 170059 - DNA, 257 bp, Arabidopsis thaliana landsberg
aatttgtttgaatttctttaactgactgaccactttatatttctgcagtctttacgttacttgtttcattgtttgtcgatttgatcagctaggggcgataaatttttaagccaagctgttgaagaggcatatattggagttgagtgtggtgatggttatccgtttgggctgttattgttcataagaacgatattgtagtgagctgccacaacatggttttcaaatacaaagatccaacggcacatgcagaagtcaaa

SEQ ID NO: 170060 - DNA, 551 bp, Arabidopsis thaliana landsberg
ctcctgatcgttttgatcgcgattcttgtctttaccgtactggcgtaagcctcatcttcctaatggttaatcgtcaaaactcagctgttgaatcattgaagatctcagcttttgttttacaggttcattgtaacaaacaatggttctggccatactaaccctggtttaaggtaactataacttatttctctgcggttacgtaccagttttcatgtgtaaattcttgaaactttctgcataaaatcaggtacaaggagtataagctgaatgattacagctcatggtttctaaaacaggtactataatttacagtggcactgatatagaatagaaaaaacttgctttcaatttctctttttctaattcttgatgtttcagcttaacaacaccagtaactggataagactaaagagttgtcttgttaaatccgagcaatgtcggaagctttccaagaaatacaaggtctattatctttccaccaacaaaaagatgccttatattattgaatattagacactcatgatctctgaaatgatctcagaccatcaaac

SEQ ID NO: 170061 - DNA, 514 bp, Arabidopsis thaliana landsberg
ctatataatgctacaactttgatagagaatcttgcatgtagcaacaatatgtagaatgcagacttcgagaggaagaagatagcagtagttgtttcaagaaaccagatggttgaggtaaatgctaagcatgattcagagcatagtctacttacagggaagaagcaagttcacttcgttgtagaagtagagactattgagcctgagccagagtcagaagaaagtgttttctacattgatggtcaaggttacataaaggttggactaccacagggcaactttagtggcaataggtttacaagaaaccagagttcttcaagtttcgccccaatacctgccttctaaaaaatgttttcttagtaagacttgcaaaggtcttatggtaattcattttgccacccctcctccaccctcagctaagagtaagatggaatcaatgctttaacagattctagagggtcagtcctagagtgtagttgtaggaaattcaatggcaagtttgatgctatctacacag

SEQ ID NO: 170062 - DNA, 1368 bp, Arabidopsis thaliana landsberg; identical to SEQ ID NO: 20486

SEQ ID NO: 170063 - DNA, 575 bp, Arabidopsis thaliana landsberg
attctcaacaaatgtgcccatttcttggcagtaacatctagttctgacattgcttcatctttttttttaggacatggctgctcattcaggctgtgactttgaaggtggcaaagcagaaaaactggcgctggcaaaatatcgccaggtgatctggcaaggaagggtcttaaattcacagttcacagatgaggagctaagaaacaaaggtcgctgcccgttgacaccagaagagattggtttactgctgtcagctttgggtttcagtaacaatacccgtctctatctagcgtcacaccaggtttacggaggagaagcaagaatctcaacgctgcgtaaactgttccccgggattgaaaacaagaaaagcctagcctctgctgaggaactagctgatgtacaagggaaagcttctctgatggctgcagtcgattactacgtgagtatgaagagcgacatcttcatctctgcatctcccgggaacatgcacaacgcattactggcgcatagagcctacttgaatctcaaaaccataagacccaacatgatactgttaggacaagtctttgtaacgaagc

SEQ ID NO: 170064 - DNA, 1150 bp, Arabidopsis thaliana landsberg
atgagaaatgtaccaaactatcaccattcttacttcgtattattcatcataattctgtttcttgctttctctgtttctgcaagcaacttttcagccacagaatctctcactatctcaagcaacaaaaccattatatctcctagtcaaatcttcgagctcggtttcttcaatcccgactcaagttcacgttggtatctcggcatatggtacaagataatccctataagaacctacgtatgggttgcaaacagagacaatcctctctctagctccaacggaactctcaaaatatccggcaataacctcgtcattttcgatcaatccgatagaccggtttggtcgacgaatataaccggaggagatgtgagatcaccagtggttgcagagcttcttgacaacggtaattttgttcttagagactccaaaaataataaaccaagtggatttttgtggcagagttttgatttcccgacagatactttactatcgcatatgaaaatgggatgggataacgaaaccgtaggatcctctagaatcttgagatcttggagaaccacagatgatctgtccagcggagatttctcgactaatatccgaaccatcgggttaccgaagttttacatatacaacaaagagtccattacgcccacgatcggtgcatggctcggaaatcggttagcagcgtaccggggatgaaaccagttgattacatagacaacagtttcacagagaataatcaacaagttgtttactcataccgagtcaacaaaaccaacatttactcgatattaagcctaagctccacgggactattacaacgattaacttggatggaggcagcacagagttggaaacagttatggtactcaccaaaggacctatgtgataactacaaagagtgtgggaattacggttattgcgatgcgaacacttcacctatttgtaattgtatcaaagggtttgagccaatgaatgagcaagcggctttgagagatgattctgttggttgcgtgaggaagacgaagctgagctgtgaccgtagagatgggtttgtgcggttgaagagatgagactgccagatactacagagactattgtggacaaaggaattgggttgaaagaatgtgaagagaggtgcctaaaggcttgt

SEQ ID NO: 170065 - DNA, 450 bp, Arabidopsis thaliana landsberg
aggggagagtgggaatttccgtattatgtggttttggttcggttctatttggtttgatgcagttgttctattcattttctagttatttcaactcggtcgtttgatttgttgttctgtaatttgtgtaagtatgtaatgtactcatttaaaaaaaaaactgcttgctgacggaaacttcgctatcaagaacacaggggataacgacacagcgaggtttcttatggcaaagcttccatttcccgacggatacttacttccaaaaatggcattgggttggaattttcattggggcgtcaatcaatatttggtggcgtgggaaacccctgataatccgtccaaatcgagttacacgctaaacctcgaacctaaaagatgaggagaggaatatgttgcctctagcttccctcagcttttcgtttctaactatgggggccgactgtataggactgg

SEQ ID NO: 170066 - DNA, 544 bp, Arabidopsis thaliana landsberg; identical to SEQ ID NO: 57966

SEQ ID NO: 170067 - DNA, 857 bp, Arabidopsis thaliana landsberg
aatatagccgaaacaagaaaagctttggtcaaaagaaaacgaaatgcagaagcgtataattcacctgagagagtaagtaatctctttaagatacaaagcatagtgaacactgaatctgatacaacggtataatggtattgtgcaacacagaatcaaagaaatgatatcaacaagaaaatgcgtactttgcaaaatctactacctaactctcacaaggtttatcataagaaccaactttttcatttatttcgaaagagatcaaaagctttttaaagagtctatacttacatttccctaaatactcaatattgtccataggacgacaacgaatcgatgttggatgaagcaatcaattatatgacaaaccttcaacttcaagttcaggtataataaacaaatacttcaaacactttttcacatcaaaaacagattcaatctaaagattctttgtcctaacctgtataaatgttggatggtagatgatgacgatgggtaacagatttgttacaccatcaatgatgatgccttttgggccgaactactctcagatgggtctagcaatgggtgtgggaatgcaaatgggcgaacaacagtttctgcctgcacatgttctaggagctggcttgcctgggattaatgattcagcagatatgctaaggtttcttaaccatcctggactaatgccaatgcaaaactctgcacctttcattccaacggaaaattgttccccacaatctgtccctccatcgtgcgctgctttccctaaccaaataccaaatcccaactctttgtcaaatttagatggtgcaaccttacacaagaaatcaaggaaaactaacagatgaaggaattctccc

SEQ ID NO: 170068 - DNA, 597 bp, Arabidopsis thaliana landsberg; identical to SEQ ID NO: 1228

SEQ ID NO: 170069 - DNA, 1324 bp, Arabidopsis thaliana landsberg
  unsure (1)..(1324): unsure at all n locations
gactctgaattcactgtttaagtcagtccaactctgggcatgggagagattttagagtaccagtcctttagctagagtgataccaaaaggtgaacctaggatatcttggtggcactcacaaacatctaagaatgtgagattgaatcttgttgattttgattggcgttcttacactaaacctttacagatttggaacccttctcggttttannnnnnnnnnnnnnnnnnnnnnnnnnnnnnnnnnnnnnttgatgatggattcgtttcctttgctcgatgtatgagagtttctcagcttgttggggttggtattgtggaggattactatccaaaccgagtggcaatgcagttcgggctggctcaagatcttcctggtttggttactgatcatagcagcttcacagaaaaagaagcatgggatggttacaataagtctcttgatggtttaatgctttacataccttctcgtgtcgctacgacttctgttactgaaagatatcgtgactggtggttgaaatctatttcaaagttttttctggattcttcagaatcaactgaaacgtttgatgcaagtaacccaattgatcattatgataataatgatgaggatgatgagctactgcctttgggtcaagtgcttcagaattttggagagagctttcttaagaaactcgaaagatgtagggcgcgtaggctagctaaaaatcatcgattcaagataaataaagacaagattggtgatggtggtgcatcagcttcaacagaattaccacttagccagttgtttaaaaaggaggtgatgaagagaacaagtgagcatttgaaaaacaagggacggaagcgagctcgtgaggatgatgtaagttctatggatcacaaagatgatgacgttaccatcgctcagatgatcaaatctagaaggaatgatgaaagtggaagcaaaggaaagaagagtagtatggttcaaagaccatctaacgaaaacaactcttcagatcctcttgttgattctaatggaggtataattgacatttctgtgtcaccatcagagacaaggcaaacgtgtgatgatgagcttcatgtagatagaagcaagaaagaagagttggtccatgaagatgaagaaaagcaaagaagcaatgagaatttgtgcagtgaagctgagaaagaagaagatattgatgaaagattgaaacagagaaagcttgctatagaggagatagcattgaagctggagacacgtgttatggaggttgagaagagtttgacaatgattagaaaatggaaaaccagaggcaaccagaccaatcatagagtttctgct

SEQ ID NO: 170070 - DNA, 3980 bp, Arabidopsis thaliana landsberg
  unsure (1)..(3980): unsure at all n locations
aattacttagtaaaacttttttctgtanaacgtcttaatgagtgaccgatactacgtattcgttttgtcactacctacgacgaaactatagtctcaaaccgtcgcatttagttacttaaaacatgtctcttattcgtcacaactaccaactaaaaaactgtcccaaaatcgtcatattttatcattcgttgtgacccttttttttgtcttaaactatcacaaataaaaactaaacaatttgtcaccaattggtcgcatataccaactaaaattattgatgcaaaaccgtcaagttttgtgactttcctaactttctaattatgtcactcatcaagactaaactatagtctcaaaccgtcacatatgatgacccaaaaattcactacaagaatattgatttttcttagcgtccgaataacgctatctaacgatattatagcgttttaacaagcgctctatcatcgtccgtcattataagtcgaagtcataacatagcggttattggtattgctatagcttctttatgaagtatagcattttctttgattctatcatatattttacaatagcatttagtttctgttattaatatttttattaccaatctaattttgaattttgaattttgaatattatattttgtattttgtattttaagaactccaattttaatttacaaagacaaaaatcaataatagtactactattttatacatgaatttttttttgtacaaaaactttaaatgtcctactaactcttacaaatttacacgattacatcttgaccatgacttgtaaacttcgaacatttcatcctcttcttcttaagcttcttctctgttcacttacgactcttcaccttatcacccaatctcattggtctctccagcttgttttttcgacttcagtcctcttatacttagcttgttttcgtaggaacatccacatgagacgtgcacgaaattgatttcttcaagtgatagaaaacctacacagacaaagtaaaatgtttatcactttcagccaaataacaagccaagtagcgactccacccatgaatttgagatacatgttttccgttaagaaaaattcttagaaataaaggtaccttaagaacatgactagcacaaactgcaatttcaaccaaaatatcttagatgattctaaaatcaaacctatttcatggctgaaacatacattaaatcaaaattcaaaaactatcacgaaacaattaataaaataaaaatcaagaacacacaaaaacaattatggagaagaagtggataaaattggaattgagagaagcaaatatggagaagtaatagagtgagactgaccggtttggagatggcgtcagatctaggaaatagcaacggagaaatagagtgagactcaccggcttggagatggaaacagatctagaaaaaggtgacggaggagacgcgaagggtcccgaaaactaacttgtcgttgcccaatgtcgtcgagatctcaccggagaaacagttgtacgagaggatgatgaggtggagttgatttcgtcgataaatttgccaaaaactcaccggagaaagcatcagaagacagatctaatcttatgagttatgagagagagaggaagagttagaagaagatgaagaaggagacggcaggaccaaagaagagagaaaagaaataaataactttaggtcaaatgttaaatagtttttggaatttaatattttattttttatttagatagcgattagtatttggtatgtgctatcaaataattaatcgaaaccaaaaacattgatccacgtcagtttttttttccaacacataaattatagcgtttcattttcaccaaacgctataacatattaaaggaaatgttaatcatagcaaaactatgttaattgctattttctattgctattaatgctctatattcttgtagtgatgcttttctttcttagaatatcaaacaatttcagttttaatcagaattcatatttacttttgatttctgttttttttccgatttacttttaatgttaaattcaaacaaaaagtccaatttgtgaaactgggtttaaattggattcttgaactatccctggcaaattcctcgctctacacgacacacttacttgcatattcatcgcaacattgcatgtactttgcgacgtttatattccgtaggctctacgagggacctgtttcttcgcaacagtgacgaaacaattgcgacaaattttgttttgcgatgagagattcgcgacgaattcaaatgcgtcgcaaagtacatgcaaagtgatatttacgacgcatccgcgaggaggactacctaccttgcaaatgacctgttttcttgtagtgattgtgagatgtgaagataaagatacgtaggcgtggtttacgagaaagctgaaggttgaccttggattgcaattgggagataacctaaccatcatctcaaataagcaaaaagttttgtttttaatgaaaaaatctattagattataattgaataaccatcatctgtttttaacaaatgtttatgtagggaattgtgaatgtaattgcatccgagcttccaattgtggataatagaatttgttcgagacatatatattcaaattggaaaaagaattatgcatcttcagagtacaaagtcatgttctggtctgttgcttatagttacaatacgagggaatttgattataaagatgaagttattactaaactatgatcctaaagcatatgaggccttgttgaatacacaacctaagacatggtcacgtgcatacttcaatctgggttctcaatgcatggatgttcacaaagatattttagaaagttttaacaagacaatcannnnnnnnnnnnnnnnnnnnnnnnnnnatctattggaaactctaagaaggcaaataatggagaggatctctcggaggttaaaacagtgtttggcatcggatgtccagttctcacttataacacttaaaagtgttggagaagtcgagggttgatgagaggtattgtgctactttatgtagtactgccactttgtatgaggttgttgagtttgagagtgggtatactgtgagcttctcaaaccatcaatatgcatgtcgtcggtgagatctcacaggtaagtgattatattcatgtttttcttgttttcgaaatatgatttgtctcacttttcatattgtttaaggtattccttgtatgcatgctttaactatcataaatgacaatgaggacgatgttaacaagtatgttatctcaatattattactcaaaaatttggacgggaacatatacaagaatcatttatcctgttaatgaagtgaaactttggggaaaaacagggaaaatacccattcgagtgcgtaattttcgcatgccaccaagaagaccaaagggttacaaaaaggaagaaagagcctaatgaatctaagaccaactctggaaattcaataagacatgggagaatcatacattgttcaaattattgtgaagcaagctataacaaaaccaaatgcaaaaatacgaagaacccaattctgcgtaagaaaaaaagagatcgacttcctaagaatcctcaagaggtaatatattgtgatatctcctatttagatcatttttacatatacagtctcttatcttggtgtcatttcctctatagataccagttcgtaggcctccaagatcagcatgtaatacaaatccaaataaaacttctaaaaaagcatcaaatacagcttaaggataatctcatcgactttcaaaaaagaaaaaaaatcaatgcaattgctagtgtcagtaaaccatcacatattggtgaatcaactatatcaatgcttctagctgcttcaagttctcctcagctatcaatctcatcaaaacaaccacctgcacctagaagtagctaacacattgatggtaaaaaaaaaagtgttaagattccagctggtcgtaggagagtgcactgt

SEQ ID NO: 170071 - DNA, 1409 bp, Arabidopsis thaliana landsberg
  unsure (1)..(1409): unsure at all n locations
agaagaaatgccttaaccttgtcaaagtttaaaaccaaatccgctagactcttgaatcgttttaaagaagcaccccttagaacttaaaccaaaaaagagaaagaatgggaaaaagggtagagttaggacacctaagggagtgggatcatcttctaagctatcacactatgtgtccgttggcttttatctttagcattctggctaaagctcaagctgctaagtgcacaaccataatggagaagatcctccattctcttcctaaggatgcatttgagacatcttcaaaacctctcaagaggtatgtcaagctactttttgacaatggaattaactcagatgaagcaaagctgctgtccatggacatcagtgcaatcatgctgcctaaggtcaagaaggagaaggcacaaagagtggacattgttgtgtacatccgcaccatcactcctggtgagactactgagaagcttcgagatccatgtagttttgttcttgattgctctacctccacaagtaggttcagccgctctttgtgtcatatgggatcaagcatcaacgtcatgcctaagtttgttgtagagagactaggcatgactaactacaggccgactcgcatcactctcctattcgcggatcgttccaaacgaatccctgaaggaatccttgaagatgttcttgttaaggttggtaactctcttatccctactgatttcatggtcctggattatgagaagaaacccaaggatcctcttatccttggaagagcgttcctagctacagctggtgctaggtttgatgttatatttagcgagaatctctctcaaggtttgggattgagagattgagtttggcatggatggttcagagcttattaagcctatcagtggcattgcttccagcacagacacacctcctcagactgctcagaatcccaccacagcgccacacacaacgctcccttttgttcagctcgccaatgagagttgtagagcaacggtgtcgatcgacaccactacccctgtagattgacaccctcgggtttcacagacagatgcttctgcacattctcatcagcccacaccacttgaggaccttcgngataagttctcttctctctcttctcgttctttaccttcgattaattccttagattctttgaagtttgcttcacaagataacaagcctagagttcctcgaaagcttgtttctcctattgttcttgtagctgctccaaccagatccgcttacgtaccgccttggaaggcgaggaggcagcagcaatccaccaccaccactccacccacatcctaaactccaccaaagtcaagctattgactcaaaacaagcgcttagtgcgaggcaacccactagtatggttttctttttcttgttcttttcttttacgttttttt

SEQ ID NO: 170072 - DNA, 953 bp, Arabidopsis thaliana landsberg
ttgaaggagagccagaagaagacatggatgaagaagttgagccgtttgtgacgataagcgaaggaattatacaacatttcagtcatgaacatcatcatatgaagcttgatgtcaacacggacagagattacgacgagaataacttgtgtcaaccatgtaccacgccaatctattttggtaacttcttctcctgtatgcaatgtgatttcattctccacgaggaatgtgcgagttttcgtcgtaaaatatatcacccgatacatccgcatctgctcactctatcgagagcacacaaaagtgaccatcaggagtttttctgttcagcttgttcttcgtcgtgcacaattggtttcttctatgagtgtaatgaagaaaattgttattttaaggtacatgtggagtgcgccacaatttctgagccgttagtccatgaaagtcatatgcatcctttattcctaacatccaaacctgaagaggatccaagaagatgttcggtttgcaaagagagcagatatgctaggacaaatgaaacattcaattgcattgagtgtgactttgctttatgttttgtatgcgctactttacctcaaaaggtgaggtataagcatgataagcatgtgctcactcttttttatgggaacgagacaagtaccataacgtattggtgcgaaatttgcgagggaacaatagatccaacaaagcggttttatgtgtgtgatgagtactgttgtctcactctacacattaaatgtttgcttgggtgggacttatacatgaagcatggttcatcttcattttatttagagaaaaaggtagacgttctgtccaataatcatcatatgactcgacctatttgctgctattgtgagaagcgttgtccatacaaaatatgtttggagtggtctggatcaatatattgttcgtcagattgtatttttactttcttgatattt

SEQ ID NO: 170073 - DNA, 541 bp, Arabidopsis thaliana landsberg
gttaaccaatgagttgagtcatttaacttgtcaaaagcttattaggttatctctgttttgcttaggtattatcatctccctccttaggattgcgactaaagcttcgctgccacaaacaccgcaggggatgcgaaccagtgctcattcctatttcatagtcagctctaccatcctcctatgttgcttcatttcttgtaacgtgctacacaagctaccagtaatgcaacaacacctcaagtttcatcaacctttgcattcgactctgacaatatggatggttgggagaaaaatcaagtggccagcttcgggtatgctaataatctactctgttaccttatcgatatttccaggatttatagctgagaatttgaagtcccaacttctccaaagttggtatcccattttgctcatcactgtgtacaacatatcggatttcgtaggcaagtcactcaccgcactctatatatggccaagcataaaatcggctacatgggcttgtatagttagacttctcttttatcctcttttctctgcatgtctc

SEQ ID NO: 170074 - DNA, 924 bp, Arabidopsis thaliana landsberg
cttgattcagggagctctcccagttcgctatttcggggttcctcttatgtctcaaaagatgagaagacaggattatcaacctctcattgacaggatcaaccaaagatttacttcttggacagctagacatctctcctatgcaggaagacttcagcttttgaagtctgttatttattccactataaatttttggtcttctgtcttcatcttccccaatcagtgcctgcaaaaacttgagcaaatgtgtaatgctttcctgtggtctggagctccaaactctgctagaggagcaaaaatctcttggaacattgtgtgctctcctaaagaggctggcgggctaggcttgaagcgcctctcctcctggaacagaattcttgctctgaagcttatttggcttctcttcacctctgctggttctctatgggtttcctgggttagactgcatctcattgggcgccggaacttctgggaacttaatccttctctgtctggcagctggatatggcgtaagttgtgcaagctacgaccttttgctcgtcctttcatcatttgtgaggttggatccggggtgactgctagtttctggcatgataattggactgatcatgggcctctccttcacctgactggtcccgctggtcctctcttagccggcctgcctttaaattcggttgtcagagatgctctccgcgatgatacctggaggatctcttcgagtagaagccgcaatccggtaatcactttgcttcaacgagttcttccttctgctgcgagtctaattgattgtccgcatgatgatacttacctttggaaaattggtcatcatgcaccgtcaaatagattctctacagcggacacttgtagctaccttcagccttttagtacttcagttctgtggtctaaggcggtatggtttaaggatca

SEQ ID NO: 170075 - DNA, 1029 bp, Arabidopsis thaliana landsberg
ctccttaatatcatgtttgggcgaggaaaaaagaagcgaaccagtcctaaccttgctcagagagcctccacatccacggctggtcgacgacctcgttctcttctatctcagtacgatttcacgccggcagcagaacggtctcctcagctatagaagcatgcatcagaagccgccattcctcctttacagtcaacggcagctcatgttcaaaactatctgccgcctctagagttgttccagcactctggcagtcgacaacctgaagtgcaaaggactgcctccttagaagtgcagaacaatccagcgactcaagccgcgactactctgtaggttccttagactcctcaacaagaccctccgccttctcagcaagaccctccgccttctccagttcaagagtctcgggctcacagtcacccatcctctcaaggcaacaacttcgaagaatatccacctctgtcgccggatctccaggaggacacacttcaatccctaaatgatctgcttatgttgccggagagggataagttcgtcaccgtcctctctcccattcctcgaccgaatacgacatggtatgatcttcttcttctcttgtttatgatcccatgttgtgttcaatgtcggtttagttgagtaatgagctttgtgagattgattagattgagaaaatgtctgaattgtttatttgttgtgtttcgtgttgtgttggtctaaaagtctgaaagtctttgatattatagttgttactttgcagccacaatctattttgttgtttaaagagtcttgttgtgttggtcttattttgttgtttgcgagaacaagtagtttaagttgtgttttgatcttagggtttagttgggtaatgagctttgtgagattgattagattgagaaaatgtctgaattgtttctcgttttagtctcgtgttgtgttggtctttggtctttgatatttagatgttactttgcagccacaatctattgcaatgtgtttgaagagtcgtgttgtctaggtctctacttgttgttt

SEQ ID NO: 170076 - DNA, 810 bp, Arabidopsis thaliana landsberg; identical to SEQ ID NO: 16212

SEQ ID NO: 170077 - DNA, 327 bp, Arabidopsis thaliana landsberg
gatgttttaaagcctcggcttcgatccttctccgataaagatagttgcaaggatgtcaatatcttgccaaaagttgacgttgttcctttacatcttggactcaacaacaattatgtttgtgaaagtagtattacatgtaacaaagatgagcaaaaagataagcttattaatattaatctattggatggagataatatgtggtgggaaagtttactgtaggcagatgtgttgggtccagaagctacggaaacagcaaagggtgtgaccttaccgcttgactttgagcaaatttgggctcggtttgatgaagagactttagaactgaat

SEQ ID NO: 170078 - DNA, 1171 bp, Arabidopsis thaliana landsberg
cgccggggccgacacccggatccaaaactccttgatcttttattgttttatggctagtgaacgctgatcaaggaccgggttgttggaaacttattcaaaagatcatcacgaccacataaacatcgtatattcattcttacacatctccagttccatatcccaaatattctacttatgatacagtgatcaaataatggggtattgcaacggaatagtctgcatctacgatctcggttacgtttatatgattaacgccgccacgagaaaactccggattctttctccccagtttttgcgagagtatacaggccgcactggtatgaaacacttttatttctaaatttttatgctgattatatacaatatacaatatatctattataaataaattgtttcacaaaaaaaataaaaatattataaatataaattgcaaagtaaattttataaagggctatattaatttaatgtctattgttacaaaaaagtatagacgttgactagttgttatagtactttaatgtctatttttttttctttaggttggtcgaatgatttgccaattaatgtgggatttggaagagacatggttacaggaacatacaaagtaatcttgatgtatttattcgatcgtcattttgtcaagaccgaagccttaaacctaaaaaatggcgaacgaagatacgtatatttccccatttcttacggtcaacttggcaatgataaaagatcaatctttgcaaatggatcgctttattggttgccaaagccagacgttgatttttacactaatcaactaataaagctggcagccatcgatcttcacacagaaacatttcgttatgtgccactaccgagttggtacaccaaatactgcaaaagtgtgtacttatggagtctaaaagatagcttatgtgtatctgatgtgctacaaaatccgagtgtggacgtatggagtttgcagcaagaagagcctagtgtgaagtgggaaaagatgttttcagttaatatcttaagcacgaattgtttagacgcaaacttttggaagctctgtctagctgcttattattttaggtcgaccggaagagatccagctaataatactttagatcaagtccccgatgatcactgcaccaacgttttgtatacggagaaattgggttcttcggtctag

SEQ ID NO: 170079 - DNA, 546 bp, Arabidopsis thaliana landsberg
  unsure (1)..(546): unsure at all n locations
ctgcgcgaggatatgccgctcgcgctcaacgtgctggccgatattatccagaaccctgtcctgcccgaagaagagatcgcccgcgagcgttcggtgatcgtgcaggaaatcggcatgacgctcgatacgcccgacgactgggtgttcgatctgcatcaggaagtttctttcccgaaccagacgctcggcgcgccgatcctcggcaagaccgaaatcgtgcagaatatgagccgcgagacgctggcnnnnnnnnnnnnnnnnnnnnnnnnnnnnnnncgccttgtggtttcggcctcgggcaatctcgagcacgccgacatcgtgaagcgcgtgcaggattcgctgtcgaacctgccggcggatacgaaatccgacatcatgcccgccgcctacaaaggcggcgaagtgcgcgtcgaaaaggaactggagcagagccatgtcgtgcttggcttcgaaggcctttcccgcaccgataaggactattacgcaacagaccgcgctcgccacgctgcttggcggcggcatggcgtcgcgggtctaccagga

SEQ ID NO: 170080 - DNA, 675 bp, Arabidopsis thaliana landsberg
ttctttatcctcttctaactttttctactctattttgtgtgtgtgtgtaaaagggtattgtggactatgagaatgaaacgaaattgacctatagatctgactgggatgccttgtaccgttatatcaaagattgtgtataaccaaagttttcgaagattcagctcatcaataaggtcaagaacatgaagagaaagtttacatacaatcaggggagatctaaccatggggaacaactttcttttactaatactgatgatgatgaaatcttcaaattgtcattgatcatatgggacaagaatgaatcagagtatgtttctaatgagaatatagaccaagctaaggtgagtgtctttgttctgtttttcaacaatctcttagactcctagtcaccatctcaaaacatgatgtaatttttttagtactaatgtgcaatgaattaatgatcttgttttcttgttttgcataaggatgttccttctggtgagccagagactaatgatgtgccttgtgaggagcaagacgatagggatgtgccttgtgaggagcaagagcgagcgagtatcgagattgataatggtctcagagcccaattggaccaagccaaggtgagtgtgatagttaatgttttttctaccaatctccatgttaccatcttaaaccatgggtgtaaggaat

SEQ ID NO: 170081 - DNA, 873 bp, Arabidopsis thaliana landsberg
gctgtttgctgcagtcctaggtacgtggagaaacttgctggaaagatcgagatgaagggtggtgttcgctacatgtttttgacacacaggtagaattgataacacctaaaggagaaaatccgtgttttctcttgtaatctctgttaatcaggataagcgatttcattgttcagggatgatgttgcagatcacaagaaatgggcagacagattcaagtctaccagaattctgcattctgatgatgtatgtccttgaatttttcacacctctctgcacattcttgataggttttttcaacatctagatttcgtgaaaaatgaaaaagcttgcttacatagttacaagaaccttgggctgcttatatgctctgtagaaaatagaaaaagattatgaggttggataaaagtaaaaagtaaactagccacgcaaacaattttgttactaaacccatctctgatcgaccattaagggaattttttttttgttaggttgaaccttcgacctctgatgtggagttaaagctggaaggaagtggaccatggagtatctatgaagatgtcgaacttatacacactcctggtcattcacaagtaagtttgtccaactgcaagaacatacataaaaacaaatgttcaatttttgttaaaaagaattccatcatgatcttgggataagagcttcgtacaaatttgcagggatcagtgtgcatgttccataagtccctcaaggcattattcactggcgaccatgtaataatgaccgaatctggattgagcattttagagcagtacaatcacggttcaggtaaagactcaactgaaaaatgtctatgggttaatgtttttgaatattcattcaagaacgtagaaagat

SEQ ID NO: 170082 - DNA, 480 bp, Arabidopsis thaliana landsberg
cgtgatgatccctgctgtcgggtggcgatcagccacgcctgctgtgggccgaccctgcacaacccgttacgtgtggctcgtgctggcggtgacgctgggtttcggcgcgatcggcttctacgacgactaccgcaagatcgtcctgcgcgacagccgcggactggcctcgcgctggaagtacttctggcagtcggtgttcggcctgatcgccgcctggttcctgttccacaccgcgcagctgccggcggaaaccgcgctgtacgtgccgctgttcaagcaggtagcgataccgctgggcgcgctgttcgtggtgttggcctacttcatgatcgtgggcttctccaacgccgtgaacctcaccgacggcctcgatggtctggcgatcatgccgaccgtgttggtctccggcgcgctgcgcgtgaacgcgtatctcgccggcaacaaggagttctccgagtacctgggcatgccctctattgt

SEQ ID NO: 170083 - DNA, 996 bp, Arabidopsis thaliana landsberg; identical to SEQ ID NO: 51617

SEQ ID NO: 170084 - DNA, 565 bp, Arabidopsis thaliana landsberg; identical to SEQ ID NO: 78801

SEQ ID NO: 170085 - DNA, 452 bp, Arabidopsis thaliana landsberg; identical to SEQ ID NO: 53966

SEQ ID NO: 170086 - DNA, 757 bp, Arabidopsis thaliana landsberg
atggaaactctcaacgttgatcatgaagatactatttcctcagaacaagaacatcgagcacataccaaatccgacaccgacatgcctccgatctccggcggtagagacttcattcgacagtttgcggctgagtcaaagaagttgtggtggctcgctggtcctgcgatattcacatctttctgccaatactctcttggcgccgtcacgcagatcctcgccggacacgtcaacacgctggctttagctgctgtctccatacagaactccgtcatctccggcttctctgtcggcattatggtaatataattagttactttaagcatacatatctatgacaaatgtgttacacattttttagttgatccattgttcataatttattcttttaaacttaaaattgatttaagcttgggatgggaagtgcactagcgacgctttgtgggcaagcgtacggagcagggcaactagagatgatgggaatatatcttcagaggtcttggatcatccttaactcttgtgcccttcttctttgtcttttttacgtgtttgccactccactgttgagtctcctcggacagtctccggagatctctaaagcagccgggaaattctccctctggatgattcctcagctctttgcttacgctgttaacttcgccaccgccaagttcttgcaggtaacaacaaatcagtttacttgaggtaaattcaagttgtctggttatgagattgattaattattataggcacaaagcaa

SEQ ID NO: 170087 - DNA, 577 bp, Arabidopsis thaliana landsberg; identical to SEQ ID NO: 76079
  unsure (1)..(577): unsure at all n locations

SEQ ID NO: 170088 - DNA, 946 bp, Arabidopsis thaliana landsberg
atggcgatgcttcagacgaatcttggcttcattacttctccgacatttctgtgtccgaagcttaaagtcaaattgaactcttatctggggtttagctatcgttctcaaggcaatttctcatactctttatatacgttcaaaccaatgaatctctggttcggtgaggagatttttgattgtttctgaatgttgatttttcagttcaaaaactggatttttcgaaaagggttaatagaagctacaaaagagatgctttattattgtcaatcaagtgttcttcatcgactggatttgataatgtaagtgttagttcaaaacttggaatcacttagttttgaagctttatctctagtttaagttttttttgtttttcagagcaatgctgtgaatgtaagtttaaagttttgaatcaactcaaattttgaagctttttttttatctcttatgtttttcagagcaatgttgttgtgaaggagaagagtgtatctgtgattcttttagctggaggtcaaggcaagagaatgaaagtaagtgtttttgggatgaaagtttcaaactttatgctcgagttttaattgtttgttctgttgagttgtttgtttttctatgtaatgtgaatagatgagtatgccaaagcagtatataccacttcttggtcagccaattgctttgtataggtaacatttcttacttgaaagtcagttgattggttaagtcttgtatgttgtttgaatctgtttctgataactaattacagtctcgtttgattgatggaagagttgtaatttgactgttttttcattctgcggaatctacttgtctattagtattgaaccatctttgctttgtgatcgttgaattttatgtttcattgttgcagctttttcacgttgtgccatttgcctgaagggaaggaaatcgaagttgtatgtggatccttttttca

SEQ ID NO: 170089 - DNA, 789 bp, Arabidopsis thaliana landsberg; identical to SEQ ID NO: 50514

SEQ ID NO: 170090 - DNA, 579 bp, Arabidopsis thaliana landsberg
  unsure (1)..(579): unsure at all n locations
cagcatcccgctgccgctgcgttgggccattgccgcgggtatcggcctgttcctggcattgatcgccntgcataacgcaggcatcgtcgtcgataacaaagccaccctggtgggcctgggggacttcaagcagccggcaccgatcctcgccaccctgggcttcttcctgatcgtcggcctcgagtcgctgaaagtgcgcggcgccgtgctgatcggcattctagcagtcaccatcgcctnnnnnnnnnnnnnnnnnnnncccttcggcggcgtggtctcgatgccgccatcgctggccccgaccttcctgcagatggacatcgccggcgcgctgaacgtgggcctggtcagcgtgatcttcgccttcctgttcgtcgacctgttcgacaactccggcaccctgatcggcgtggctaagcgcgccgggctgatgggcaaggacggccacatgctgaagatgggccgtgccctgatcgctgacagtaccgcagccatggccggctcccccctgggcacctcgaccaccaccagatgattaaaatccgccgccggcgtgagcgccggtggccgcaccggcct

SEQ ID NO: 170091 - DNA, 438 bp, Arabidopsis thaliana landsberg
gttgcggcatatcgatcacgcgtctttccgcacctatgtgcgcctcgaccgcctgatgcagaagctgggctacccctgctggcagcgtgtgtggatctacatggccgacatcacccgcggcgaaggcgatgcggagcgctaccggcagttcagcgtcggccgtcatcgtgcgctgtcgctcaagccggggttcgagcagaacctgccggccgccaccgccatcggcacccatggcagcgggctgaatatttttttcctcgcaggcaaatcgccgggggtgcaggtggaaaacccgcgacaggtcagcgccttcagctatccccgcgaatacggcccgcgcagtccgagcttttcgcgcgccacgctgcggcgctggaatgatggcgcgcacctgtatgtttccggcaccgccagcatcgtcgggcgcagcagccagca

SEQ ID NO: 170092 - DNA, 1248 bp, Arabidopsis thaliana landsberg
  unsure (1)..(1248): unsure at all n locations
agctcatgcatgcactgctgattgaagtctatgactacctcagccacctctgtatgctttcaaatcttaacttattaaaataagttgaatattatcagctaaactgtgtttttttttttgttggttaaaaggatgggattgaagaatgtcgtaagttatgtggtggacatggatacttgtggtgtagtgggcttcctgaattgtttgctgtatatgttcctgcnnnnnnnnnnnnnnnnnnnnnnnnnnnnnnnnnnnnnnnngtattcttaaacttatcttcttgaatatcacttttaagaatcatttcaagcccctactctttataatggcaaatgaaatggtcttaaaattttgttatatatgttttaaaacaatggatcttcaggttgctagatttctgatgaagacagtttcacagttgggttctggaaaggctccttctgggacaactgcttatatgggcagagcaaaacaccttttgcaatgcagttccggagttcgaaactggtgattttttcatggatactaccataatatttatactctttatatctacctgttttctgaatttatcttggttgagaatgtagctagggactggttaaaccctggtatggtgttggaagcttttgaagcaagagctttgaaaatggctgttacttgtgctaacaatctaagcaagtttgagaatcaagaacaaggattctcagaactcttggctgatcttgttgaggctgctactgctcattgccagttaattgttgtttctaagtaagtaaataagcttcttcactaaaattttacaaactaatcaacagactcaaatcataacttacgtgaaaattcacaggtttatagcccaaagtagagggagatattgaaggaaaaggagtgaagaaacagctcaagaatctatgctacatctacgcactctatctccttcacaaacaccttggtgatttcctcagtacaaactctgttactcctgaacaagcctcacttgcgaaccagcagcttcgatcactctactctcaggttcgaccaaacgcagtggccctagtggacgccttcgactacacggaccagtatcttggctctgtcttaggccgctatgacggaaacgtttatccaaagcttttcgaggaagcgttgaaggatccactcaatgactcggtggttcctgacggctaccgtgagtacatccgaccgttgattaagcaacgcttccgctctgccaaactctaa

SEQ ID NO: 170093 - DNA, 1217 bp, Arabidopsis thaliana landsberg
  unsure (1)..(1217): unsure at all n locations
atggggagagtaaaaatacagattaaaagaataaatgataggcaacaaagaaatattgcattcgccaaaagaaaaaatgggcttttaaagaaagcttatgaactctttgttctatgtaatgtaccagttgctctcattcttttctctccttctggtaaactcttcgtcttttatgccaaagagaggtatattatattaataaattacgttttcattttcttcttcttcttgtagctccaatattttattatttcatcatatatattattactatcaactgttttatcactaatctgatatcanatcatcgttattgttcatgattatagacccgaagagattatatgcaagtttcttgctcgggctgtacgcacacggtaaattcattgtgttaaggcatgcatttatatataagaacataaagtaataggtctgtttaattttattgtatgagttctaatattcttattttatacatatgcatgaactcctgatattgtactcggttggtccatctgatcgaacacagcctccctcatgaaccggtaaaaaaatcaaaactatctaacggttaattcatctcgattttcgtatagtgattttgtttaacgttacctaaaatttttgtttttcttgattggtatggagaatctagaatatacaacggttggtcatgcagatgcgttcagaaaccaagtgcagtgacgagagtcttgacgatgggcttcgttatctaattcaaccaaaggcatgttgattaaaataaaataaaaatctcatgatttggcaatagataggtatataaacaaaaaaaagttaaagtacttatgcatgcttttttttttcttaaaataggagatcgaagatgagatcgaagaagtcaatgcacgactggccgaagtggaaaaacaattggagtaaatatcttattttatagatatgcttattaaatatttctaatagacatggataatgtatttttggataaatcgttaatattggtttctctaattttcttttttaaggcgtttcctggaaataccagatcagtgggaatcactagctgaacttaaacgtcgagaggaagatttccagaagacgttggatatagttcaatctcggaaggtaaatttatatagataacaatgattatttatgaaagtcacagttaaagaacaacaacgagcattttagtcacgtatcattcacnattcaca

SEQ ID NO: 170094 - DNA, 411 bp, Arabidopsis thaliana landsberg
gaacgggggacgggcatgcgtgaacttgaggggtccagagccagcgtcaccttcgtctgctgaggccgcgatgggagactgctccgtcgccgaggccgacgggatcatcacggtcacgttcgaccggcaggacaagcgcaacgcgatcagcccggaaatgaccgccgccctgtgggaggcggcgaacgctctcgcggaccgggacgacctgcgcgtgctcgtgatcaccggcgtgggaccgtacttcacggccggcatcgacatgcgcgccggggccggaaaccggccgggcaacccggagaccgggcacctgcatcccggctggaacccccgccggaactaccgaagtcaccacctcctaaacgaaaagttcgaggcgatcgagaagccggtcgttctcgcggcccaggg

SEQ ID NO: 170095 - DNA, 537 bp, Arabidopsis thaliana landsberg
aagcacgcctgattccgaaagcaagcctgccggcccaaagcggcagcagctgtccaaaggcatggaacacttgcgcggggtggtgaccgtcgacgatcccgttgcgcccaacacgatccaggagaccgaacgagcgtcacgcgccttcgatcccgttcgggtgtcgcagaaccgcccacacgaccccgaaaacaaccttaagcgcagcgacccgttccagtttggctcccgctacctcgctgagggggacgacatcttcgagttcaatgcttgggaccacgtcgagaccgacgatgcctacaaggagttcatgcagtcgcagttcgagaagcagcgggaatcgcccgtctccgaagaagaccgacgcaagtacaacgctgctcccgagaagtggtgggaccgcttctacgcggccaacacggcgaacttcttcaagaaccggaaatggttgttccagaaattcccaatgctccgcgatgtcacgcgggcgaccgccggtcccaccgtcctgctcgagattggcgctggcgcaggcaa

SEQ ID NO: 170096 - DNA, 402 bp, Arabidopsis thaliana landsberg
tctctgtcaccggcttaatgcaggagctgttggtgcagtgtctaattatatggtcaagtctgttccgcaggtatgcatctgatttctgaacctcacactaataaccaatcacttgcaaacttgtcactaggtttctcagcttaagtaggagagaatgatacagcagtctagctttacggattgatttggtttttgttggtaatctggtttataatgtctgagtattcgacttggtagggggcggcaacaacttgctatgtggcattgaatccacaggttgcaggagttacaggggaatacttctcagatagcaacattgctaaaccaatagaacttgtcaaagatacagaattggcgaagaagctttgggatttcagcactaagcttactgattcgcaatga

SEQ ID NO: 170097 - DNA, 950 bp, Arabidopsis thaliana landsberg
  unsure (1)..(950): unsure at all n locations
aagacgaggacccaacaacaacaacaagcactagctcatcgtgacttgagagccgccctgtttcaccaaactgataccaaagacctcttacttcaactaactcacaacacccgtcgtcgtcctcaacaatctcacgccatccacataaatgtcctacctccatgagcaccaacgcaacaactaccactccacagtctcaccaaagtggatacacaaggttcccacatacgctttacccaagtctgttcagggtgaaaacacaaagaggatgtgcgttaagtatatggaagaattagtttttcaaaggcggacgaagagagtgcacaaaagtcttgtgattttcttaaaatgtttttttttggttctatgttgcacccaaaaaagctctctttctatactattctaagatctcatcaatatcaactttggaatgtgattctctttaaaatttacagcttgtaaggatgaatacaacatatataaggaatcttggtgaagaacaaaatcaaaacccttttggaccatgtgaaaactgtcttatcgtcaattcatcatttatgctcgaatcaaatctttagtgcataatctcataaactcaaaagtacgaagacacaacacatttcaaatatagagtaaagtagtttctttaatccgaagaagttaaagtagagagtgtatttaattaaattttattctcaaagctaatcaaaagtaagcatttctgaatgatctagaaggccataacggctaaggcgtttgctgctattaatttcgtttctgttggaaattgagatctgcaggtagaccaacgggagtagattcaagcttgtgtgaagtatctctgggattttttggcggaagaagcggttcctttacaaaaccgggtggtcgaatatccggtacatcctcatccgctggagtctttngggttcgctacatcatccaaaccc

SEQ ID NO: 170098 - DNA, 446 bp, Arabidopsis thaliana landsberg
atgaatgccgtactgaaggaaatcgcatccaccgccgcaccgctcgccgtgcgcggcctcgcgcattgctacgagggcagcaacgtgctgaccggcatggatctcgcactggaaccgggcagcgtgctgggcctgatcggacgcaacggcgcgggcaagtccacgctgatccgcgccatgctcggcctgctcgaaccgctggccggcgaggctttcgtgttcggcgagccggcactgaagttgtccgacgacagcaaggcccgcctcgcctacgtgccgcagcagccggaagcgctggcctggctcaccgcgcagcagatgctcgattacgtgggccgcttctacccgcgctgggacgcgaatttcgccccccccacgctggaacgctggaagatcgcacagaaaaagctgctggccaagctgtcgccgggcgaacgccagcgcgg

SEQ ID NO: 170099 - DNA, 2976 bp, Arabidopsis thaliana landsberg; identical to SEQ ID NO: 73524

SEQ ID NO: 170100 - DNA, 1316 bp, Arabidopsis thaliana landsberg
cgcataccaatgaatttcggaaattgaaaatttacaggctatgctcttagctctgttgaaggaagggttgcaatggagttttttgatctgtcagaggctgctcaagctaaaaagtatattccttgtgttcttcttttctcttttccatgactttgactgacaaatgtatttgaacttattctcagatatgctttcaaatgtcatcggaaatcagaggctggaagggacattgtttaccctgtaaattccattgccttccatccaatgtgagttcttgtcttagaaggagcccaactgtttcatagatttctatatttactactttttcaaaacacaagaaggttaagataatactccaactaaataagaaagtaggaaaaatattttcgtgtaaagttgttcagcccttgtctgctgattgatatgttaaagatgaaattctaatgatgaagagaacaaatcgacttggaaagctgcttggatgcttggtctgagaacttatgggatataagagcaaatgaactaatgctaatatgctgtgtctgtaaacagtttctgtaattagacaaaatgttagcttatgctttgtctgagaactaatgggaaaaatacaatgctgagaaatatctcctgtatagctactttcctgtgtaatcatctgagatttttaattgcagctatggcacctttgcaactggaggctgtgatggtttcgtcaacatttgggatggtaacaacaagaagaggctatatcaggttagtaatgagcaagatctcttggttattattctttcaatgttagtgtggcacaaaatttatttgcctccttgttccttttgtagtactcaaagtatccaacgagtatctcggcactgtcattcagtcgagatggtcagctgctggctgttgcttcaagttacacatttgaagagggagagaaatcgtaagtaacttgttccctttctaatcctttgaagttttagaatagtatgtctttgaaatctctgatgatttgtgcattggtttgattggttgcttattgagataacatagcagagagtaaccctgtgccttaatcttacagagattatcacaaacaaattaatgctttaaaggcaccctttttgtctttgtcacaaaaccgcacacttaaggatagtaatctctttgtatttggtttcaagttagaattctctttgattgggtctctgtgtgagaggttttgcaggcaagaaccggaggccatctttgtaagaagcgtgaatgaaatcgaagtgaaaccaaaaccgaaagtatacccgaatcctgcggcgtag

SEQ ID NO: 170101 - DNA, 677 bp, Arabidopsis thaliana landsberg
gcaatggaacttgaccttctctctttagattccgtcgtcagatttagcaatgcgtggaatgcacggctagcccctttgcatgttctgataaataatgccggcatgtttgctatgggaggttagtagtttctaatttatttacatgcatttttaatcttcttcctgttgtcatattgctattgatgaggtcctaaagtcatatgcttttgcaccattcatatttcaatttcatcatatgcaggggcacaaaaattctcagaagatggatatgaacagcacatgcaagtgaaccatttagctccagctctgctttcactactccttttgccttcgcttatccgagcttcccggagtcgaatcattaatgttaattctgttgtaagtttcatcaatatcatcaaatcaaaaaagttcaatgattatctctatgaaattatgccttgtttgggttttcgtttatgtagatgcattatgttggttttgttgatccaaatgatatgaattttgtttctggtaaacgaaagttttcaagcttgagcgcatattctagcagcaaactcgctcaggtaaacttatagatgaaaaaatatcatttctagataaattctgaaaatgtttctataatctgaaacgtttttatcttgttttgtttcatttgtcaaggttatgtttgcaat

SEQ ID NO: 170102 - DNA, 524 bp, Arabidopsis thaliana landsberg; identical to SEQ ID NO: 68649

SEQ ID NO: 170103 - DNA, 2630 bp, Arabidopsis thaliana landsberg
gttatgttcgccagtataattcagtgaattctcagcccgatgtcttaaattcattatattctcctcttcaaccagctgctttggaaggattgaggtactgaatgtccttaatgtatctgattttataaatttatgcagcttcagcaaataatgtacaagtttgcatctttcatttttgtttggtatcaaaggtattatgaagggcggctttctgatcaacaaacggctttgttacaatatcaacgcgaaaatctccattttctaaacgaggaggtaagtgatgctaccgatacaaacactcttcttaaaatattttccatctacgttgcttgattttctctttggcctttgctgttttgtgagccactatagtatctgaatcactcttgtctttgttatttgtgcttttcaaagattctgtgcttgcaagagaaacttagcaaatatgaacaatctgatgatggaagcacacctcaggtgaggattctggtttcctttataatatatcaaatagctgaattcctcattggttcatttaaatgtataataatgcttgataggttgatctcgcacatcttttagctgctcgagatcaagagctgaggacactttcagctgaggtaatacttaatttctgaagcttccatctctataatatgataaaacaaaaactctaaaaatatgtaaatctcaacaatgcagatgaatcagcttcagtctgagctacggcttgctcgttctttaatagccgagagagatgcagaggtgcagcgtgtcaacagtaccaacaaccaggttctgcaaaaaccggcattgtaggaaaaaaactcatttagattttagtcaagactctcttaagtaatcttgtttgcgggtggtgcagtatatcgaagaaaacgaaagactaagggcaattttgagtgaatggagcatgcgggcagcgaatgtaatcttaagaaacaaacctttgatcttttctagtagaccaatttgattaatgaatcagttttttttgtttataatatcagcttgagagagctttggaagtggaacggatgtcgaactcagaactacagaaggaagtagcaagcacgcgtagaaagcagatgcttgggacaacaacatctgagcaaccttaaattctaaaatgggaatcaaagcttatattggtttttaacataatctctaaagtttgatggtgtagctataaagatcatggcatctctctactgaaacaagtttgtgtagtaaacggctcttttttttttttacatttctcttgaaatagctttcttacttgtattttatgcttgggtaaataaaccgaaccgaatgtactgaaccaaaacaaaagaaaaatatcaaaccaaactgaagcgaaaatttgaaaataaccgaatgaatactaaattctataatcataataatcaaaaccgaaccggtaatgaacaaaagtatttcgggtaaccgaaaatgtccaaaatataattatactttcaaaaatattagttttttttttttttttgtcggccaactattccattaaacaaggaaactgagtacaaaaaaacattcagaaagtacaattttgacatatgtttaggtagaccatgatacaatataaggtaagttcaactgcctagctgttttggctaacttgtctgaatggatgttctcttgccgagagatatgacagaaatcgtaagagtgattagccatgcccaatatatcttctatgtatccctagatttctgaaggtccatagtcaggtgggttttgtttactaaccttctccaaatggccatagagtatgcgtgagtcaccacagaaggtgacttgcttataactaagccgcctcatttgtactaatgcttctcgtaacgcaatagcctccgtctccaacgctgagttcattggttctagtgctgccgagcctttaagaaggcaggtaccttgagcatcatagagcacccatcctattcccgccgtactattagaatctacccacgatccatctgtgtagcagtagaaaggagaattaggtcgaggcttttggctattttgagtatttggtggcttgggatctccttcatgatgaggctcttggttgacagtagtttgttgagctaacttccacagatcaaaatccataatggctttgttaatgatgtctgggatcgcccacctcttattattatacaagagatcattcctagctttccacatatgccaaccaatatacggaaacagatagtccttttcacgactagatcgatgggtagttataaggtcatgcattatatataaaagagaggaggattcttcatactgacctgatggtatgtgtaggggggatagtgcacatatctcttttgcaaggcgacattgaaagagaaggtgcatagtggtttcatcagcttcaccacaaaagagacattccggggagaatttgatgtgcctacgagctatattggctgccacagggattgcattatgtaatactctccaccaaaagatcttaatctttgctgggatatttagagtccagagctttttacacaaaccttggaattgagtagaattaaatgagcaatctgctgaaggtttggaaagctggtgataaccggact

SEQ ID NO: 170104 - DNA, 2396 bp, Arabidopsis thaliana landsberg
atcgggattatcggggattcaagagcagtattgggtgtgaggaacaaagacaataaacttgttccttttcaattaactgaagatctcaaaccagatgttccaggtaatctacttggcctctacaagccttttttggttataccatctgatttatcaattaaagattgagttttgttgtttccagctgaagcagaaaggataaagagatgcagaggacgtatatttgctcttcgagatgaaccgggagttgcccgtctgtggcttcctaaccacaactcacctggtctagccatggcacgtgcttttggagatttttgcctcaaagacttcggtctaatttctgtacctgacgtctcctaccgacgcctcactgagaaggatgaatttgttgtcttggcaactgatggggtaagaaacatccaagctcaatgtcagaataagtctggactagtgagctcattctcttaagaactttggatatatgtgttatggacgtagcaacctatactcttctagctgttaagtacatttttctctcttaaaaatttgctagatttgggatgcattgacgaatgaagaggttgtaaagatagtagcgaaagctccaacgcgttcctcagcaggtcgagcattggtggaggctgcagtgcgtaactggagatggaagttcccgacttcaaaagtcgatgactgtgccgtagtttgcctattccttgactccgaaccaaacagattgtcaactgcttctttctcaaaagaaaaacacatcaacaatggcgttactgaacctgaaccagacacagcatcatcatcaactccagactcaggaaccggatcgcctgagctcaatggagtcaacagaatcgatacacttgtgaatctcccagtatatgtcccaaccaaagagtaggaagatagaacagagccaggagctcaatgtctcctatgctctatgtttctatcaacagttactgttttggtcatttacctcgggtaaaattactgttacacgcccgtgctcgtgtgtgactcattgtatatatcttctttttcaaatcattgtaatacttttgctacagactctctttactttgttaataaatttctgatgctccaattgagtttttcgtagcacttgtttgagcaaattttgtttgttggaaaaagaacacatcaagccttttgagtaacgccattatggtttgagtaaacactcattagtatttgtagttagtgttacattatatggcaatgttagtgttagtacactgagtatggacataacagtttgtcatttttggcattttactttacttttgtcaaatttcagttacattacaataacattgcaaaactagttagtacttcttttctggttgccaaacataacatcacaaaatagttacgtagatgtttttagtccttacgtaaattacaaagacttaagagttaagaccaaaagagtacatatatatatctttgggagtatacaacaaagaatgagtaagttgtctatgtaaagttacatgacccaaaaagccaaaccacacccacaaaggatcaaatgaatcaaaacccaaaccatctccttgttagcaaaactatgaagtaaaagaatggaaaacccaaattagtatggacaataacgttacaagtgttccgttcataaccgaagaagccgccgatatgagattttctgctccgagttggtaagccgctcctgatccatctttgactttgatgcttgacgaacctaacgaaacaaaacatttttggtgtgtttgacttcttctttgatcatccatcgtcatttaactagttcttgagttttagagacttacagttgtggtcagcccatccaatgacctcattctccaaatcgtatactactaacttgtttgaaagcaccaaatctatagatgaagaaaccaaatctcaagtcagacacatgaagtgtaatacatggtttagtagtatgatatgaattttacctcccaaaaggattacatcagctccgtcctgagtcgtcattccaccagattgccaaccaaagcaatacatgtcttcctgtttaagaaaatcattacattgtgcatgagacaattcatgaaggttgacaataacaccatctataactatgttgttaaaactctattgatcaaaactcagttaaagtaggaatattctgttgaactaaacacatcaaagtaggaagcgactgacttacacgaagtgagaaaagatagtcatgcggatacacactcagtttcagtgagtcttcgaaatgaagattgaccacgggaaacgctttatctgtgctgcaagtacaagaaagatagtttagcatcgcacatagtacaacaaaaaaactcacaacatgtaatgatccagatcca

SEQ ID NO: 170105 - DNA, 1412 bp, Arabidopsis thaliana landsberg
  unsure (1)..(1412): unsure at all n locations
gggtttggttttaccatccacagtttcatctccctctcagcctcaaccgacaatacgttaaacatctaggatattgaaaattgcaaaatcatacaacggtcacgatgttacagaaggcttaactgggaacctctcagcaaccttggagcaactctatgcttgggaaaagaaactgtacaaagaagtcaaggtatgtatgtgtttcttgattttgaatggattaatctccttagattggagcatcttttgacagatgtagttgtttgttgatggcaggatgaagagaagcttcgtgttgtctatgaagaaaagtgcagaacactgaaaaaactggatagtcttggtgcggaatctagcaagattgatactactcgagcagccattagaaagctgctaaccaaactcgacgtctgtataagatctgttgattccatttccagcaggatacataaactgagagacgaagaattacagcctcaactaacacaattgattcacgggtataaattgatctcaattcttttactattcctacatttaatatattttcgtttgtgtgatccgatacttgggatttgaaggttgataagaatgtggagatcaatgctcaagtgccaccagaagcagttccaggcaatcatggagagcaaggttcgatctctcagggcaaacaccggcttacaaagagactccggtttgaaagctattcttgatttggagatggagcccngccaatggtgcattagcttcaacgactgggtcaatacttataatttatacgtggagcctctaaatggatggctctcaagatggcttcactatgaacctgaatcaacggaggacggaattgcccctttctctcctagccgtgctggagctccacaggttttcgttatatgcaaagattggcaagaagcaatggcgagaatctctggagagaacgtttcaaacgcaatgcaaggctttgcctcgagtctgcatgaactatgggagagacaagatgaggagcaaaggcagagagtgaaagcagagtatgtgtcacacgatttcgagaaacggttgaatgatcttcggatggagagggcgagagtgagaatgagaaacgatcagctacaagacggtgcatcagagaaaagcgtggtcttgtccgagagcgggatctcggcgttggatgatttgaaagtggacttggattcaatgaggaagaagctagaagaagaaagagcaagacacaaggaaacaattaaacttgtgaacaatgcagcttcaagcagcttacaagctggtttagaaccaatctttgaggctttggggaatttcacttcacaagttgtgaaagctcatgaagatgttaggtttcaacaacaacaacagcctgagtctgaagattgattttgcacgaattaaaaagt

SEQ ID NO: 170106 - DNA, 2365 bp, Arabidopsis thaliana landsberg
aaaagaaaaagtgtataagtatgcgtcaatggtttgctttcaggatacaagagagaccaaatgagtgtaaaaccttgacacgctcaaagaggttatttcaacaatttctctgtgatgcttatacaactattgaatctaaccgcctttcttatatcaagtttaaacaatcaaagctacgatgtgagaactacaacagtttgaaaaaggcctctgaagctggaactacctctatgaatgaagaaggtaaccaggttttaattccatcttccttcactggaggaccacgctatatggtccagaactactatgatgcaatggccatctgcaagcattacggtttccctgaccttttcataacctttacatgtaatccaaagtggcctgagataactagacattgccaagcaagaggtctttctgttgatgatagacccgatattgttgcaaggatattcaaaatcaagcttgattctctaatgaaagatttgacagatgggaaaatgctgggaaagacagttgcctgtaagatttattctacttcactttatacttaataaacgttttaagtaattcatgaattagtctaattgtttttcattttgtttcaaaccagctatgcataccgttgaatttcagaaaagaggattaccccatgctcatatcctgttattcatggatgctaaaagtaagcttccaacagctgatgatatcgataagattatttctgcagagatcccagataaagataaagaacccgagctttatgaagtaatcaagaattcaatgattcatggtccatgtggtgctgcaaatatgaattccccatgtatggttgaaggtaaatgttctaaacaatacccaaagaaacatcaggatattaccaaagttggtaaggatggttatcccatctatcgaaggaggatgacagaagactatattgagaagggtggttttaaatgtgataatggttatgttgtcccttataataagaagctgtcacttcgatatcaagctcatatcaacgtggaatggtgtaaccagagtggttctatcaaatacttatttaagtatatcaacaaaggagcatatcgtgttgtatttattgtagagccagtcaaccaggacaaaacaacagagaatgcgacctctggagaacctccaaattctactgagaaaaaaaaggatgagatcaaagattggtttgactgcaggtaattgtttaaaccgtcacccatttcatagattggcattgttaatatgcgatatttaaacttaattttattatgtttaggtacgtatccgcgtcggaagctgtttggaggatttacaaatttccacttcaggatcgatctacagcagttcaaagactatctttccatgatgaagggaagcaacctgtttatgccaaaccagatgctgatattgaagatgtcctcgaacgtataagcaatgaagattcaatgttcatggcttggttgactttgaataagaataatgatgttggaaaaaatggtaaacgtgctagagaacttctatattctcaaatccctgcctattttacttgggatggaaagaataagcagtgggttaagagaattagaggattttctttgggtcgtattaactacgtgtgtaggaaaatggaagttgaatactatcttcaagtgcttcttaacatagtcagaggtcctatgagttgtgaagacatcaaaacatttaatggtgtcttatatccatcattcaaagaagcatgttttgcaagaggaattttggatgatgatcaagtttatatagatggtctacttgaagccagtgagttctgttttgaagattacttgagaattttttttgctatgttgcttctatcagactctctagcaagattgaagtatgtatggtcagaaacataacaccttttggcggaggatattgagaacaagaaaagagaagaatataagaatccaggtattctatttttttttttaaatctgaatcattgcacttaatagtaaatcgtcttcattatttcgtttttttcaaaatctaacaatgcttatcaatttcatttttgatgaccacgtgcagaactaaaacttacagtggctgaaataaggaactacactctgcaagaaattgagaagattatgttatttaacggtgcaacactcaaaaatattcaggatttcctgcagccttctagagaaagtattgataactccaaccgtttagttgttgatgagctgagatataacatagattccaacttgaaagaaaagcatgacgagtggtttcaaatgctcaatacggagcacagaggcatatatgatgagatcaccggagctattttcaatgatttgggaggtgt

SEQ ID NO: 170107 - DNA, 1118 bp, Arabidopsis thaliana landsberg
tttgatcctcatgacttagtgaatgactgtcgtctaggccctacagatctgaaagtgttggttgaaacaactagtaaagcagatgcattcctctggagaccagcaactaagatgtttactatggaggaagttgttggacagattattgcatgccgagcgactaagtgtgttcttttggacaaggaaatccaaatagaagacattgggcatttggtaaatttcttattgttgcttcgttgtactcaacctatttatgagttggtatttgcggagttgttttctaaattatgtttgtgacagggccgacgagcaaactctccgaataaatgtaaactgctggatttgtctaatgatgatgtgattgttgttgagggtcgttggcagacacaagaagaaactacattggttaatggactacctcttggaccaaagacagtaaaggtatttgtcgattcagtgcttcaaccagaaacattcatatggaggcctacaatggatatgacctaccttgaagactgtttgatgacttttgtttcatgacctgtcaataaagttagctttgagaatccatctgctagacagcattctgcatcaacagatataccattaggatctaaaactgctgttgggacaaaatctacagagacaagtgcctctaaatcctcacgatcaggttctgaatcacttattgagactgcaacacgaccaagctctccagtaaagaaatctataccagattcacagtctcctatccggaaatcacaggtaagtactctattttattttgttctggttatttttgtcaaatcttttgacttttgttttatgttgtaacatggcagcgtatcatgcaaaatggttcaaaggaaaataagaagcgcatgttgatagacattaccgacaagaatcaagttgttgttgaaggccgatgggcaacaaatgatccaaaccagaaggttcactttgcttctttgggttctaatgcagataaagtgtgggtcgacattgtcaaagttagcgatgcagaagtttggaggaaatcagatgaaatagacattatggaagatgcccttgggacagttattgcttggcctgaagacaaagcgatcatggcatga

SEQ ID NO: 170108 - DNA, 587 bp, Arabidopsis thaliana landsberg
  unsure (1)..(587): unsure at all n locations
tccccgtgcgcgcagcgtggtcggcacctatcgtccggcgcgcgaagcaggcaagtcgctgatcatccagggccactgcgacgtggtgccggcggggccgctcgacatgtgggagacgccgccgtaccagccgaccatcaaggacggcaggatgtatggccgcggcgcctgcgacatgaaatccggcaccatcgccgcgctttatgcgctcgatgccatcaaggcggcgggcctgaagccgaccgcgcggattcattttcagtcggtgatcgaggaggagagcaccggggtcggtgcgctctcgaccatccagcgtggctatcgcgccgatgcctgttttattcnnnnnnnnnnnnnnnnnnnnnnnnnnnnnncgcaggtcggggtgatctggttccgcatccgcgtgcgcggcttcccggtgcatgtgttcgaggcgggggcgggctccaacgcgatcatggccgcctatcatctcatccacgcgatggagaagctcgagatcgagtgaaacaagcaaacggtcaacgacaagcatttcaaggacgtcaatcacccgatcaatttcaatccgggcaacatcaagg

SEQ ID NO: 170109 - DNA, 486 bp, Arabidopsis thaliana landsberg
atgtcgacgcgaagacgaactttactcaaagttataattcttggagacagcgggttagcttatttttctacctaactgtgttttttttttaatgtttgatccgttaatcattctcttgttgttgtttttgtgtacaaatatcacagggttggcaaaacatcgttgatgaatcagtatcctaactaaactttttgatttttctttctttggattttcttcttttcgtaattttgatttttgtagctgtcggtgagaaaaaaaaaacttagctttttttttttttcaatttgtagatatgtgaataacaagtttagtcaacagtacaaagctacgatcggagctgattttgtcactaaggagcttcaaattgatgacaggcttgtcacattgcaagtgagtttctttgtttgtttttttttggtttaaattgttgtcgatcttttaagagaagagtgcatatgaattattattattattgtgattgtg

SEQ ID NO: 170110 - DNA, 1236 bp, Arabidopsis thaliana landsberg
ttacttatagatgtcctctcaagcctttcaattgcacttttcttctcctttggctatcacattttcaggctgctcaatcgttcacaaacttcatatttggagactcattggtagatgttggaaacaacaactatatcttcacattgtcaaaagctgattcttcgccttatggcatcgattttgcaccttccaacggccaacccacgggaagattcactaatggtcgaaccatttccgatattgtgggtatgtaatatgtttattttagaggcgacatagaacatagatcttattttttttttatattcgtttatattcactttagagcttgttagatattcgaccatatatatatctgatacaatattcaaaaaaaacaatcacaagtaatagatgtaaaacatcgcatatgttttttcaaaaaataataacaataattagtatttgttatatatatattgccctgccttagtttattcatgcagaaaaagtgaaagcgagtactacgtaattagaaataaatgtgcttgatttaacggttagttataaacttataataatatgaatttaattctctaaagtatctaacagaacaaaacccttgtacacacttgaagtcaactaattgataagttgactcttcttaaagcatgtaaagtcataactgaattggattggaccaataaattagttaagagtaattaaaattttgtaatgtgagagaagtcaaaggcaaattccataaatgcaacattcatggagtttggtaaggagttctatttaattttcataatttagtaaaccgtttctgaattggtcctagctctcttcaatcactcaatgtttttcttagtttaagatgatgccactctgtgtttatttgttttacacatactacataatcattactcataaatataagatagactaatatatagttttattggaataaattaaaacattaggtgaagccttaggagcaaaatcaccaccaccaccatatcttgaaccaaacactgaggctaacacaattctcaatggaatcaactatgcttctggtgctgctggaatcttggacgacactggacttctgttcgtaagctccatctactaacattttcaaataaaatttatgtttataaatcgataattttgtgaaacaaaaataaaattttaaaaactagtttttatttgttacgaaacgaaaattttgcgaatatgcgacagatcgggcga

SEQ ID NO: 170111 - DNA, 2107 bp, Arabidopsis thaliana landsberg
ttgtactacttcttttaactctcttgcatcagctcatcaggatttgcttgggagacattgtttctcatgccaaaaatgtggtacttacgaccgggcgagcctatagacttcacaaatccgatcaatccaatctatgctggggttgttcatctgatcactgctctattgctttatggatatttgattccaatctctctttatgtttcgatcgaggttgtcaaagtctggcaagcaagtttcatcaatcaagacttacacatgtatgatgatgagagtggagtccctgcaaatgcgcgcacatcgaatctaaacgaagagcttggtcaggttcatactatcctctctgacaaaacaggaactttgacatgtaatcagatggatttcttgaaatgctccattgctggtacttcttatggtgtgcgttccagcgaagtagaagttgctgctgcaaagcagatggctgtggatcttgaagagcacggtgagatatcgagtactcctcagtctcagactaaagtgtatggtacatgggacagtagccgtacgcaagaaatcgaggtggaaagggataataactataatactcctagagctcctataaagggattggttttgaggataacagacttatgaatggtaattggttgagggaatcacaaccaaatgacattttgctgttctttcgcatattagctatatgtcacacagctattcccgagctgaacgaggagactggcaagtacacttatgaagcagagtcaccagatgaagcttcttttcttactgctgctagtgagtttggttttgtgttcttcaagagaacccaatcaagcgtttatgttcatgaaaggctatctcattcagggcaaactattgaaaggtgagacttcttagagatctattcttgattctttgattattggttttaagtacacatcctgaatgtgtaccagaaacaatacagggagtataaagttctgaatttgttggacttcactagcaaacgaaagcgaatgtcagtagttgtacgtgacgaggaagggcagattcttctgctatgcaaaggagctgacaggttagaagaaaagctaggaagatataatccatttgattttcaaccttcatgtaagtttgaagcagtccttgttaatttttttttttttgcagtatcatttttgagcgactggctaaaaatgggaaagtatacttgggacctaccactaagcatttaaatgaatatggagaagcaggactccgtactcttgcactttcatacagaaagcttgacgaggaagaatattcagcttggaacgctgagtttcacaaggccaaaacttctataggttcggatagagatgagttgcttgagaggatatcggatatgatcgaaaaagaccttattcttgtaggtgcaactgctgtggaggacaaactccagaaaggggtatatatatcagacaagtcaccttagtttccatctcctccatcttggttttgtgaaattgagatttcttttttatttgacttaggtgccccaatgcattgataaacttgcccaagctggcctcaaattatgggttttaactggggataagatggaaacagcaatcaacatcgggttagaacgactacaataccttgaagcagatttatcttgaaagttctttgaccaacttagcttttttttttgaactgcagatactcgtgtagtttacttcggcaaggcatgaaacagatatgcataactgtggtgaactcagaaggagcatctcaagatgcaaaagtaatataaagctaaaatcatttccctttcttaatcacaaggacctacattgtgaagtttcaaattgatatatctgttgatgtaatcaggctgtgaaggacaatattttgaatcaaatcacaaaagctgtgcaaatggtgaagctggagaaagatccacacgcggcatttgctttgatcattgacgggaaaaccctaacgtatgcattggaggatgagatgaagtatcagtttcttgctttggcggtcgattgtgcctcagtcatttgctgtcgtgtgtctccaaagcagaaagctttggtatttcccctcttcccttattgcc

SEQ ID NO: 170112 - DNA, 995 bp, Arabidopsis thaliana landsberg
atggtgtccactatctccggttttagcttaattttgttcatagctgccgtcgctagtagcatttcagccgccccttcagccgctctcgtcggaagaaaagtcttcgatgttcgaagctatggtgctcgtggtgacggcaaaacagacaatactatggtagtgaaatttctagttttgcttttgatccaactaattcaacattaatgttttgaatttgttaattaattctaacacatgtttgatttattgtcttgatttggcgttatatgcgtttacaaaggcgtggaaagacgcgtgccaatggaaaggattacctatagtgtatataccatttggaaccttctacgtcggtgccggagccttcacgggaccatgtaaaagtcggattagtttcatcatcaaaggaactttgttagctccgaaagatcctaacgccatcaaacaagacagctggatcatttttaggtacgttgactatctcacggtctcaggcggcggtattcttgacggacaaggaagctactcttggccagtcaacaattgccgacaaacccataattgccgtgctctaccgatgaacatggggttccagctcgcgagattctttagactcacgcgcatcaaatgggtcaatagcaaaacgggccacgtcaacttcttctcagtccaacactttgatatcacacgcgtcaacattaaggcttccggagacagccctaacactgatggaatcaagataggttcatcaaaccacatgaagatccaccacgttgacatagcaactggcgacgactgcatcgctatcttggcggcaaccttcaatttggatatcaacaaagtcaactgtggaccggtccatggaatcagcgttggaagtcttgggatgtttaaaggtgagaagagcgttctgggattaattgctaggaatttaacctttaatggtacgagtaatggagttctaaacaagacatggccttcgccgggtgaaccgaatt

SEQ ID NO: 170113 - DNA, 655 bp, Arabidopsis thaliana landsberg
acaatgccaagaaacgacaattcatgtccctttgtcgttgagaagtcagaagtggttcttgtgaaaccctcaaagccaacacctgatgtcactttgtctctctctaccattgacaacgatcctaacaacgaagtaatcctggacatcctatgcgtcttctccccaaacccatacgttcgagatcacaccaactaccatccggcttcttttattcaactcgccctctctaatgcccttgtatattattaccctctcgccggaaaacttcaccgacggacgagcgaccagacactccaattagattgtacgcaaggcgatggagtccccttgataaaggcaacggcctcgtgcactctctcttctctcaattacttggagagtggtaatcacttggaagcaacataccaacttgttccttcacacgacactttgaaaggttgtaatcttgggtataggcctctggctctacagatcactaagttcacatgtggaggaatgactattggctctgttcattctcacactgtttgtgatggtattggcatggcccagttttctcaagccatacttgaactggccgccggaagagcccaacccacggtcatccccgtctgggacagacacatgatcacttctaaccaaattagtactctgt

SEQ ID NO: 170114 - DNA, 2026 bp, Arabidopsis thaliana landsberg
  unsure (1)..(2026): unsure at all n locations
ttgctgcgtagcttgtgattcatctggactttatttttggcaaattgtttacacagcgggattgaaatatggcgcatcgagaacttcaaacctgtcactgttccacaagagtctcatgggaaatttttcaccggggattcctatatagtcttaaaggtcagtagttttttcatgttccttctttggtttattgatatatagttcttaatagtgtcttataccttcttatctaactatctcatgccagaccacagcgtcaagaagcggttctttgcatcatgatattcactactggctcggtaaagattccagccaggtacagtctcttcatattctctagtcttttgttttcttttttgtatattcttcgacaaataagaaccatggtgttgtgttgatgaaaataggatgaagcaggtgctgtagccgtcatgactgttgaattagattcagcattaggtggacgtgctgttcagtaccgagaagtacagggtcacgaaaccgagaagtttctttcctacttcaaaccttgcataatacctcaagaaggtggagttgcttcagggttcaaccatgtaaagcccgaggagcatcagacgcgtctgtatatctgcaaaggcaaacatgtcgtccgtgttaaagaggcaagttaattagcatatcttgaaatgtcttttctctcaactggttctttatgtttcatcttggtttgcattgattttcttattcacaggttccgtttgttcgatcgactctcaaccacgaagacgtttttattcttgatacagagtctaaaatttttcaattcagtggttccaagtcgagtattcaagaaagagcaaaagctcttgaggttgttcagtacattanagacacttaccatgatggaaagtgcgatatcgcagctgttggtaagtgaactaaaccgtaaaaaacaatgaaggctaagattataccaactatattgagtttaatggctttccttttgttgtagaggatgggaggatgatggctgatgctgaagctggagagttttggggcttgtttggtgggtttgctccgcttcctaagaaaccagcagtcaatgatgacgaaaccgctgcatctgatggtatcaaacttttcaggtagaacaccttttactttaatagaggctccctaataattgactaattactgcagcaagatgattatgttctgacttgagacatgtttggtctttcaagtgtcgagaagggacagacagatgccgtagaggctgagtgtttgacgaaagagcttctggacactaacaaatgttatattctcgattgcggtcttgaattgttcgtttggaagggacgaggtacttcaatcgaccaaagaaagagcgcaactgaagctgcagaagtaaatatctcctcatgcactgaaacaaaagtcttgttttgatttgtttcttaatgttcactgtcatattattaattttcattttttcaggaatttttccgttcgtctgaaccgccaaaatcaaacctggtcagtgtgatggaagggtatgaaacagtgatgttccgatctaagtttgattcatggccggcttcaagtaccatagctgagccccaacaaggcagaggcaaagtcgcaggttgagtatactgatactatccacattgatcattactgaaatttttagactttcaattatgagatacttattctctttttgttctttcaccagctcttttgcagcggcaaggagttaacgttcaaggcctggttaagacttcttcttcttcttctaaagacgaaccgaagccatacattgatggtacaggaaatctccaggtagtgacgatgtcttagttgataccgtcattaatgtatttgaatatgtggacataaccaaaacatagtgttttgattgctaactttaaaaaaattcaggtctggcgaatcaattgtgaagaaaagatccttctcgaagcagcagagcaatcaaagttctatagcggggattgttatatactccagtactcatacccag

SEQ ID NO: 170115 - DNA, 704 bp, Arabidopsis thaliana landsberg
catctgtaaattagctttcaacgttgattcagcttgtctcgctgacgacggagcagccggtgaaacttcatgcaggcctttgaaacggcggcgacgatcatctcgcaacggtttcagtctgtgatttcgtattcatggaagattaaaaagaaactcaacattggatcagcgagagttctgagagaatcaatcatgatcgtccataaattcgcagacgagatcgtgcgtaacaggattgaacaaggaaaggtaagtgatcacaaggaagatttgctttctcggtttatcagcaaggaggagatgaattctccggagatacttcgtgatattgtcataagtttcatacttgcaggacgagacactacttcctctgctttgagctggttcttttggttgctctctatgcatccagaagtgaaagataagattctacaagagctaaactcgattcgagaacgaacagggaagcgaatcggggaagtttacgggtttgaagatcttaaactgatgaattatcttcacgcagcgataactgaatctctacgattgtatccgccagtgccagtggatacaatgagttgtgctgaggacaatgtgttgcctgatgggacatttatagggaaagattgggggataagctataacgcgaatgcgatggggaggatggagagtatttgggggaaagattgcgatgggtttcgcct

SEQ ID NO: 170116 - DNA, 275 bp, Arabidopsis thaliana landsberg
aaccaaaaacaagcaaagaacatgaacaatagtctgattgctgcgttaatggctaagattgactttgtgcacaatcttcttctggagaatgtcaattttgttggtggaacatggttttattggaatggtcctgactagttacactcagaagtctaaattccagaaactatttcagagtagtagcaacttcagcttcacgagaaatatgatctttcttgttacaatgcccccattcaccacaccatcaagtcagatagaaagtttctttgaaaaaa

SEQ ID NO: 170117 - DNA, 641 bp, Arabidopsis thaliana landsberg
cttttgttttcatataacctattattttgtttagaaaataaacatgtatatattatatatggtcctcgaaacatgagatcatatcctaacttttgggaacaatgcaactaagccatatctgcatgattctctgtgattctcttcgttcacagttcagtttcaatatttaacggtcataaatcatgatgatatatattctaaatgtcaataaataaatagaatttatttatttagtcacataaatatatacttttcacacatatatgcatatatagcttctattggtttcgactccacattttcgtttcttttattttcatttgattcatttcagtatagcagcaacaattgaacgctatcagagacgaataaaagaaattgggaataatcataagagaaatgataattctcaggtaaattctcattcatatttcgggttttacatattgtaaacgtatgatattttttataaatattttttttgtgtgttccaaatatttaaccgactatactacttttacttgacagcaagcgagagacgaaacatctggattgacaaaaaagattgaacagctagagatatctaaacggttttgaaactcaaaatttcttatgagaaacgtttatataaattaaacgag

SEQ ID NO: 170118 - DNA, 1602 bp, Arabidopsis thaliana landsberg
  unsure (1)..(1602): unsure at all n locations
agtaaaaaggttcccatggttgctatcgcagcgtcagtggctggcgtgttcgctctgctcgttatcttagccatattttttgtcattaaaaggaaaaatgtgaaagctcataagtgtatgaatctccaccaggtcttgatattagtgaaaaatgaaaacttttgctctttcatttcacatgtttttatcttattttacagctccaggaccacccccattagtcactcccggtatagttaaaagtgagacaagatcatccaatccatcaatcataacaagggaacgcaagatcannnnnnnnnnnnnnnnnnnnnnnnnnnnnnnnnnnnnnnnnnnnnntggcaaaggaggctttggaacagtgtatcatggaaacttggatggtgctgaagtggcagtgaaaatgctttctcattcatcagctcaaggttataaagagttcaaagcagaggtacttcaagaaaaaatggttttgttaatcctttttttaaaaatattactttctcagttatgaagttgtcatgggacactttgatatctttcgtaggttgaactttttttaacagttcaccatacaaatttggtgggttttgtgggttactgtgatgatggagataactgggctttgatttatgaatacatggctaatggagatctcaaggagaatatgtcaggtaacattttaaatttagagactctaatttaatcgaatccatatctttctgcggtttaaaatatcctagtataggaaaacgtggaggcaatgtccttacctgggaaaacaggatgcaaatagctgtagaggctgcacaaggtgaacaaaattatgacttgttttcttattacacaacaaactgcgtttggttatcttagagaaagattgacagatacaataacaacttgtaacaggattggagtatcttcacaatggatgtacgcctcctatggtccatagagatgttaaaactaccaacatcttattgaatgagcggtatggagcaaaactagccgactttgggctctcaagatctttcccagttgatggcgaaagtcatgtctcgacagtggttgcgggcacacctggttaccttgaccctgagtaagtgaatcaaccagttatcatcactcatgttagttgtgtttctcaaataaatattcaatgatgtcaatgtaatatttcaattctctctcaggtactacagaacaaactggctaagcgagaagagtgatgtgtacagcttcggtgtagtcctattagagatagtcacaaaccagcctgtgacagataaaacaagagagagaactcacatcaatgaatgggttgggtccatgctcactaaaggggacatcaagagcatccttgacccaaaactgatgggggactatgacacaaacggtgcctggaagattgttgagctggctcttgcatgtgtgaacccgtcttcaaaccggagaccaacaatggcacacgtcgtgactgagctaaacgaatgtgtggccttagaaaatgcaaggcgacaaggtagtgaagagatgcacacaagtggttatgttgactttagtcgctcttctgcttccgaattttcccctggagccagataa

SEQ ID NO: 170119 - DNA, 679 bp, Arabidopsis thaliana landsberg
gctgggaaccatagcctcacgggattagctgcggtggaaatctagtaaaggaatgtgaagaggaagctgggatttccagagccattgctgataggtaagacatactctgcagtcttgaacaaagtagtatgtataggctctcttgatgatttcaacctgttgcattttatgtttatgaaagggcaatagcggttggtgctgtctcatatttggacatcgatcagtactgtttcaaacgtgatgtgctgttttgttatgatttggaactccctgaagattttgttcccaaaaatcaaggttaggcaatcactagtaaggcaatgagtaattctgaattgctgcttagagagactctttcataacattgtagtccaaactacattgcagatggagaagttgagagcttcaagttgattccagtagcccaagttgctagtgtgattaagaaaactagtttcttcaaggcgaactgttcccttgtcattattgacttcttgtttcggcacgggtactaactcctatctcccaaaatttctaccttaaaagaaacaatttacttacgttaatattccgtgattttaatgctctcgcccctgaacacattatgttccattttgtctattatgcaggtttatcagaccagaatcatcgggttacttggatctataccaacgcctga

SEQ ID NO: 170120 - DNA, 1091 bp, Arabidopsis thaliana landsberg
cagaaaaactggagaatgccagacatggcgattaagaaatggacagagactatggaaacgaagagatagatgaatatgatgagtaagtagaagaacatgatgaatataatgaggctgctgatcaggaagcgtatattaatttgtcagatgatgaagataatgatactgcgcccagagagaaagaatcacagataaaatgaaaaaaaacagatgtctgctttccttaactttttaaacagacatgataaaattgtcaaaaaataaaaattttgttttgatgttttggtttacatgttttaaaagaagaaaacgtagaagaacatgatgaacatgatgagactgaagatcaagaagcatatgtaattttgtcagatgatgaagataacgggactgcacccacagaaaaagaatcacaacctcaaaaagaagaaacaatagaggtctgcattccttaattgtttaaaaagacatgataaaattgtcaaaaaataaaaatttgttttgatgtttttgtttacaggttccaagagagaccaagaaagattataaagatgttaatcaaacaccactctctacgcaagaagaagaaatcacccagggacaaagcagtcgtaagttctttttacattcacagatgatttgccttgataaacaacttctaaatatatttttttttggttttgtatcagtttaaactcctttgacgccggtcatgttgagtcaggaagtaatggaaaaaattgacctaaaagttaaaaaatgggcgaaaaacaaattaataagagatctactatcgtcacttgaagaagtaagttaaattacatcattgttttgctgcaaaagattttaattctaatcattttgaaatttttacatttcagattctttggcccgacaataaatggcaaaaaatcgaaatttgggatatgtgggacgagaagaaatacaaattagcattaaagaaaccaacgttactcattcatcctgacaaactgcctcgagctcatccagaagtgaaatacctagctgaacaaatctgcaagataataatggttagtgttaaactcttcttttgtataccgatatatctt

SEQ ID NO: 170121 - DNA, 457 bp, Arabidopsis thaliana landsberg
  unsure (1)..(457): unsure at all n locations
ctttcaccatggctgatggcccctacgacaagggcttgtcgcgccatctcntgatccgcgcctgcgaagccagtctcaagcgattgggcactgactatatcgacgtttacgtcatgcacggcttcgacgccctgacgccggtcgagaaaacgctgcgcgcgctaaacgacctggtcacgagtggcaagatcggctatatcggcgcgtccaacttctcgggctggcatctgatgaaatcgctggcaacctcggagaaatacggcctcgcgcgctatgtcgtctatcagggctattattcactggtcgggcgccatcacgagtgggagttgatcccgctcggtctggaccagggcgtcggtctcatggtgtggagcccgttgggctgggaccggcagaccggcaagattcgccgcggccagccggtgcagcaaggccgtatccaagcggncggtgcctg

SEQ ID NO: 170122 - DNA, 522 bp, Arabidopsis thaliana landsberg
aatttgagggttttgatttggaattgtgtagactggagataggatatttcttgtgttggagtattgtagtggaggtgatcttgctggctatatcaatcgccatggcaaagtacctgaagctgttgctaaacattttatgaggcaattgggtaactaatttatctgcttttttggtgtttttcatatttgtaatttggagtttttttgttgatctttgaatctctgttttttttttgtttcttgtgttgtgtagctttagggttacaagtacttcaagagaagcattttattcaccgagatttaaagcctcaggtaaaactcccagtgattctctcttatgttgtagtttgatgattgtatttgtaatcactgttctgttcttcttcaatattttcagaatttacttttatcttccaaggaagtaactccattgctaaagataggagattttgggtttgcaaggtaagatttagatcttatttttcatgaaagtgttttctttttatggttagtttggtgata

SEQ ID NO: 170123 - DNA, 2644 bp, Arabidopsis thaliana landsberg; identical to SEQ ID NO: 6766
  unsure (1)..(2644): unsure at all n locations

SEQ ID NO: 170124 - DNA, 528 bp, Arabidopsis thaliana landsberg
  unsure (1)..(528): unsure at all n locations
tagtattgatcgtagagaacanncagagtccgcaatggaatctgttagtgtttcaaaacaagctaagctatctgaatacataaaagactaatgcagaaaacatttgacattcttcttttttatcttgaaaggttaagctcgcattggaaatgagagatgtcggggtagttggtatcgatctttcagggaatcttcttgttggagaatggtaaactgttcgtagttctcttctttgtcttttgcttcgctttatgagttggttttgaaatcttccatgttcttgtaggagcactttcttgcctgcattacaatttgccaaagacaatgatcttcacatcactcttcactgtggagaggtattaactcttaaaaaatccacttaaccgattttcaaatgtttatttttcagattgtgtactacgtgctgtatcttagtgcctttgtagcctcccactccgaaagagatccaagccatgcttaattttaaaccgcatcgaattggacatgcctgtttcttcaaagatgaag

SEQ ID NO: 170125 - DNA, 1603 bp, Arabidopsis thaliana landsberg
cgtgatgcggagaggatgtgccagactctaaaacacgtttctcctgaaatcaattgtaaaccgagtttaaggccatgcaccttttgtggaggacctacagccacaagttcttttcatatcctatcgaatgaggcagacagtgtgaaaggaatggagcttggtgagttgactatgactacgactacgacagagcaagtaaggaattcttctgtctttccctgatctaggcataggatgtggttatctgttatttcttctgtccagtggagaggatcgtttcaactaacattacaaactgatatagaagtctccactgcatttcttctcagtttttcacctggtcctgacagataaagacttcttttactttaatgggatacaaattgaacttttgaagtggcagtctgattgtctgatactgcatagacttgtatagttttgtttactcggtacagttttaaaccatcattaatgatttgtagcaccatattcgacaattcagtatagttaactaagatttttcacttttgtgctagtgattagaagtagcaatgcttgattttaattagtcacaatatagaatagcttactaaagccacaaaattttctgcgttttgcaggaacgttcagctgcttttgtgttttttaagactcgctatgatgctcttgttgtttcggaggttctacaatcatcaaatcctatgttatgggtgacagacttagccccagaacctcatgatgtgtactggaagaatctcaacattccttatcgacaactttggatacggaaaatagcaacccttgttggtgcagttgctttcatgtttgtgtttcttattcccgttaccttcattcaagggctgactcaactagtgcagctgtctcacgcatttccttttctaagaggcatcttgagcaagtgagtgccctgctggttccttacgcatgtatatatatatggttttgtttcttctggacatgatattagaattggcgttaaaaagtaggcggaactccggtgcagtatagaacatacgagccttctctatagctttcaaaccattggagaaatcaaaatttatgttcttgatgggttttatcatctttcaagttaatcgggccaccaaaaccattttgcaggaactttataaaccaggtcatcacagggtacttacccagtgtgatcttgattctatttttctatgccgttccaccattgatgatgtatttttcggccttggagggatgtatttcacggagtataaggaagaagagtgcttgcatcaaagtcttatattttaccatttggaatgtgttcttcgtgaatatattatcagggtctgttatcaggcaactgaatgtcttttctagtgtcagagacatacctgcacaacttgcaagagcagtgccaacacaggtaatttaccccatagtccttttacatttcagagcaaaagtttgaattttgctaatgttcaagtttctacagtctctgaacattagctaggttacatcttgccaagatcttgcagctttcggattggatatagagttttcttgcgctggaactttaatagtttagtctttttcctcgttccatgat

SEQ ID NO: 170126 - DNA, 1863 bp, Arabidopsis thaliana landsberg
cctactgtgtagtttgatcagatttcgccgagaattcagaccgccgccgccgccacagctgatgatggtcaatccaatgtcgtggatagtagtaagaatgagatgattgtgacggcggaggcagacaagaaaaagaaaaagaagaagaagaaaaagaaagtggctccggcggcggcggaatcaatgagctctgaagttacggactcgaatccaaagctggagcagagagtgagtccgttgctgaagctcgactacgatggggttttagaggcttggtcaggtaaggagtcaccgttctccgacgagattcttggttcggacgctgacggagtcgattttcatgtacgttacttcaattctctattttctcatttatattagccttatcttaataatttgaatcgaaataaaaacgttttgatgaccaattgttggcaacaaacaattcattatgaatttctgaacctgacaagaattgaaaatggttcttatgtagttcttgtcatttctgacttacaatgttttgttacaagtagattatcaagtgaatttagttgacaatttagtgagtgaatttgacgtaagatgaatgatgtttggggacaggtaaggttgggtgagatagacttgctaatggaccggcgtatgaggtgccaactgggcggagagatggtcgggtttcgaacatgtcattggctaaggacatgccggaggtgagtgactcgattgagagtgcgggaggctaagttcatgcatattggacttatctccaaatacctcgtgcttctcagtgatatgtatctcttcttcttcttcgtcttctctctcattcatgtttgtttggtggtttcgaatttctcaaagtttttggttcgaagttcaagttatatgattttcaattcccggatccatgatacgtttcgcatgtttcgtccgtttcctctcttcttcgtgtgttagtgtcacgtgcgttaggaaattctggtagaccaatacaagaaaacattattggaattttttccagctaagccagcagtgtttctttgtgcagaaaaataatttcgtgaaatttaaaattttaaacttgtgagaattttcttctaacgataacaaattatccaatatttacctatacgttgcgaaacttaaagaatcgttcgtaaaaaaaaaaaatcaggctttttgggtcaactttaggcatttatacaaatgttttgatgttctgtcatcttaaccactaaatctggtatagcacagaaatgttgattcaccccgaaaatgggcctgttacacgatcggcaattaatctgataaaacgtcataaatatctaacggccccattctatagagtattgatttttttttattttttttttcatcaaaaaccaatactgatctcgatacgatcgtgaaattatcaactttcacgtgtgactaaacaaagacgaaaccatcaacatgctgagtctaagccagtagtgatcatgcattttgaacctggtccggctcagtttgcgtcatttttttatttagtttacatttcaagttcaatatgagaaaactttgacaaaaaaaattgttactagttttaagaatttaagagatctaaacctgagtggtctactttccgtatcagctgctcacactatcggaacaacggcctgcttcttcatgtccaaacggctctatgatttcttacctggtggccaacctgacccgactatcaatccaacattcctacccgaattaaccactcagtgcccacaaaatggtgacataaacgtccgtttaccaattgaccggttcagcgaacggctattcgacaagcagattctgcaaaacataaaggatggtgttgctgtg

SEQ ID NO: 170127 - DNA, 1136 bp, Arabidopsis thaliana landsberg; identical to SEQ ID NO: 10822
  unsure (1)..(1136): unsure at all n locations

SEQ ID NO: 170128 - DNA, 889 bp, Arabidopsis thaliana landsberg
cggttatatcattcgcatgatctgtttcagcacactctgttgagttggttgctgaatgctaaaacttagatggggaatggccggaggagccgttgtattgaatatgtcgtggtggttaatagatgttactcaaatagtttatatttgtggtggttcttctggcagagcttggtcagggctctcttggatggcgttcaagaatctcagaggctttgcaagattgtctcttgcctctgcagtcatggtttggtgagatatcggaacactttggagtcagatcgatacataaatggttcattgatgggtacacctagtgacttgctgtttattggtttcagcctagaggtttggtatttcatggcgttgattctgtttgcgggttacctcaagaaccctcaagtctctgtagctgctctttcgatatggtgagttctaagtccctgtgaaagcttctgttttggttaggaacggaattaacggtttggttatagcatgaacatattgggatggccgatcatggtggcctttggcttcaatgcggctgtgaggtatatcacaaagtctcttaacagaaaagaaaaaaaaaagcttaatgattggaaaaaatgatgtgttatatgtgcagtgtaagagtgtcgaatgagctaggagctgaacacccaagaagagcaaagttcttattgatagtggctatgataacttctgtatcgatcggaattgtgatatcagtgactctcattgtgttgcgagacaagtatccagcaatgttctcagatgatgaagaagtgagagtactcgtgaagcagctgactccgttgctggctctcaccatcgtcatcaacaacattcagcctgttctttctggtagtttctctaacaacactcaaaa

SEQ ID NO: 170129 - DNA, 488 bp, Arabidopsis thaliana landsberg
atgacagagttcaaagcgcggcagggacgtagtggggcactactgccttacaatcgccaagagccgcttttctttggtcagaatattgaagaagatgtaaagaaaatcaatgatcgctccggagggggttccatgcggaatcgcattctccttgttgcgatcgctttgtttgcggaacgcggttacgaaaacctcagtatgcgaactctcgccagttgggttggcttgaagccgtctactttatacaactaccaccaatcaaaacaggcactgcttatcgatgccatagaacttatcatggatgacttcttcggattcattctgaatgacatcgaggccattccacgtgcacagcgacttttcgagatcattcggcgtcatgccagctacaaaatgacctaccagcttatatcgcgcgccaatgaccgcctgattgatccaggctttaccaagatgtttcttccggaagatgccgcgcgtcattttac

SEQ ID NO: 170130 - DNA, 645 bp, Arabidopsis thaliana landsberg
atggagcagcccacaggttcgttgcgcgaccgtcgcctggacgcggtacgcgcatggaccgcgttcgtcacagagggcgacgacgcggtacgggtgcggccggagattctctcgagttggcagcgctcggcacagggagctgcgctggacgtgaccggcgctcccctcgcggacgagcacgacaccgctgcgttctggcaggactcaccattacaggcggcggtgtcggcggtggagccggagttgcggcgcagcgcagaagacggcgacctcgtgcttgcgctcaccgacacccggacccgcatcctgtggacgtatggcggcagggtgatgcgtcgcaaggcggagtccgtcaacttcgtcgcgggcggacgctgggatgacacgagtgtgggcaccaacgcgttggatctggccagtcggctcgatgcgccggcgacggtcttctccgccgagcactattcgccgatcgtgcacaactgggtctgctgggccccacccgtgcacgacccggtgagcggcgaacgcctcggcgtgatcgacctgtcgacgacctgggaccgtgcgcacccgatcggtctggcgaccgcccggatgaaggcacggatgatcgaaagcgccaaccccgatacccggcaacatccc

SEQ ID NO: 170131 - DNA, 806 bp, Arabidopsis thaliana landsberg
  unsure (1)..(806): unsure at all n locations
agctgcaaggacgaaagctggatcgaaatagccaagcatttgaaggannnnnnnnnnnnnnnnnnaagttcacagcatgtagattctgtggagaaaatcatatcagttgtgttcaagtcacttccatcaaatttcaaccaatttatcaaatggatggctgagattcgaagaacagaggatgtaaatcaaaatctcagctcagaagagaaatcaaggctcaaattaaaggtattatcttgtccatttgcttctgaactttagttttccatgtttatattccatcagtttattcatcactgttctatggttcgttttgctgtagcaagagttactgaaacaagtgcaagaaactaaactgttcaagcatgtggataagtttctctcctctgtgtacgaagacaatctgccatatgttgctgctaaggtttattgtgacggagatgaaatcttatcgggatatgaatcagatgaatcctgttgtaaggaaacttgtgtcaaatgtatcaaaggtatgtttgttcttacattctggttatctttctaagcgcttcagaaaccttggcttgaagttagtagtgtgcaaagttctaatcaagaaatcacttttttctttgaatttcttgttttacatcaaggtcttggtgaggagaaagtgacagtggtagcttacccatccgggaacgatgtgttcactgctcttctgttggctttacctccacagacgtggtcaggtatcaaagaccagtcacttttgcaagaaatgaaacagctcatttccatggttagccacccgactttgcttcaac

SEQ ID NO: 170132 - DNA, 1372 bp, Arabidopsis thaliana landsberg
ggacttctccatgacattggccatgggcctttcagtcatatgtttgagcgtgagttcctcccaaaggtcataagtggctgtcagtggtatgttcaatgccatggtgttacttgataatttgatatgatacaagaaatattactacattgctgatgtacaaacgctttttcgaataaattttacattttcttcaaaaataaaataaaaatatttactactttggctctatggatttattcttctttctagctcttctttatatgccagttcttgtatgcaggtctcatgagttaatgtctataaacatgattgactatatagtcgatacacatcacatagatgttgatgcaaaaatgctaaaaagagtcaaagtaattttctttctcaagactgtttaacttctctcaaatgacctttagtattaaatattttccactttggtgatgattttctcaaatgtttacttaacactacaggacatgatactagctagtactgaagtttcagagctgaaagtaaattttataacaggcatgttctctattctaatcaaacatgaacaactaattaagctttgtatatattttctttttttcataatttgtagggcaatgcagagaagcgtttcttgtatgacattgttgctaatggtcgaaatgggattgatgtggataagtaattctatctttcccttagtttctttctttcttttttcactcatcatgatgcttacgaaatcaactgaaaattttgtaggtttgactacattgtccgagactctcgagcttgtggactagggtgcaactttcagtttcaaaggtcttcatactactttatagtcatttcagtttttgttttgatattcactgattcttagtagtttatagactaacagaaccaatgagagtcatagacaatgaaatctgctaccccgccaaggaatgtgagttttgtccacctgatacatatttattctgcatttgcatttgcctcttatgtaaaatcgggtgacttttttttgcagatcgtactgtccacaagttgtttgcaactcgagctgatctttgtggaaccgtctacatgcatcccaaaaaaatggtattgtaccattatcattctctctgtaccttgtctattctttctctctttcccatttgtttctttgcaggccatagagcttatgatagtagatgcaatggtcaaagccaacaatgtcttggagatttcttctatgattaatgatccttctcaatactggaaggtacacaaatctttccctctctgcatcaaaactcttttgcttgtagtttacatcatttttttctccacacaaatgcagttagacgacacaatcctcaaaacgattgaaaga

SEQ ID NO: 170133 - DNA, 346 bp, Arabidopsis thaliana landsberg
ccagcgtttgttctggtcagcaaaggcgcacaagaacgatcggtgcggcacagagcatcctaccgtcgagccgatcaggcgtatgtggtggctggcaaggcttgtcacgccgcccggcggactcgtctgtgatccattcgcaggcacggggacaacgggcgaagcatgcgcctactaaggcttacagtgcgtcctgatcgagatgagccctggctatgccaaggacatagaaaaacgcatgcagcacgttcgcaagctgcgcaggccgccctcgttcaatgccccattgcgcgcagcagccaagcgggacaacgggaagcatgcgggattcttcgggagctactag

SEQ ID NO: 170134 - DNA, 1356 bp, Arabidopsis thaliana landsberg
attcatcatatagggtttttttttttaataataatcatagccaaatcaaagagcgagtgggctgataatatgcgtatggttcttctttagttgtgatgaatataacgaacaaatattgcacacgaattctggttattgtaaagaaactgtatcctactcaccaatcattgactagtggataactagtaatggtgttaaaattggtgagaaacaagttttggttttccaatcgtataaaaacatcaatggatccacatccgattgggtaatgcacgtgtatcaaccaacgtttttgcctcctaatcaggtaatattccgaatttataatgtttaatcaccgtgtccttttttctcaacgatgttatgaaagaatctgccgattagccctaaaacaatcaaattttaggttatttggtacatatatatatatatatatatatatatattatcttacttaattaacacgatcatatattatatcctatttggtttaggttgtcgagaaatagttaaacaaatcgtacgtgcatgttatttgtaaaaattaccatccatcttagttaaactattgcctaaagctgagagtgttgtgtttcaaacatcaggaccacctcttcaaatcacaatctgatatatctctacacaatggttactaagatacatgtcgtatattttctttataaatttgttaaaaataaaacttgaaacaaagatcagcctgagtaggttcaatttttgtctacgtgtggtatatgatcttatacgtagagtgagtttgaacgttttagtgagatatcttatgggctttgacgacagagagcatatattgtctgcaaagtagagttcaaaagtgaagataaggaaggatattagtcgttgtggtaaatctggtataattgagcttaatcactcttcaacctctcgtattgaccataacggaacttggctactaaggtcggttgaacattgattagttgtgtcattggatatgaatcttttgaatataaaaagatatgcgcctaccacttctatttatatttaaaatattcatgaaaggtcgtgaaatatagtacaacaaagcaatactataatagaagaaatttgtaaaaagattttaaagattccaaatagcttttttggttttggatttttctcgaggtagttgaaactgtgccattcgttgaaaagtaaatgcggcgcgttaaatttgatgcatccacgtgacccaatgaaatctacatgcctagatttggtcgttactggcgtttggaaacataacttgggccaccactactacttcacattccctactcccaactcttgcgaaacagagaatcacaactataataatatttt

SEQ ID NO: 170135 - DNA, 838 bp, Arabidopsis thaliana landsberg
  unsure (1)..(838): unsure at all n locations
atgagcaattacagtggcagctcttctgttgatcctgactacaacatggatgagacagagtcgtcatcttcaaggcaagagagagaacatagagaatatgaaagcttcagaaggaaagctgagatagcccgatggaagagagcgatgacagagaggtatgagcttatagacgaagatctggaagacgagtacatgcctgaacagactcgcagatctaccaaacttctgcacaagcccgatgtattgcctgctgaggaatatggtaggcttttcaagctgaatgagttatgtagcacgaggtatccttgctcgacctcacttgcacaactcggattgttggaagatgttcagcacctgtaccagagttgtcatctggacactctgatggcttatccgtatgcagcgtatgaagatgagacagtacaattcctctccacgctgcaagtagagctctaccaaggtatgacctctgatgagttagattgtgaaggattgggattcttgcgattctctgtgtatggtcatgagtataggttatcaatcaagcgcttggaaggattgtttggcttccccagtggaacgggatctaagcccaagtatgacagagaagagnnnnnnnnnnnnnnnnnnnnnnnnnncagctctgtaccgttgaatgcttccaggtcaaagagcaatcagatacgcagccctgtcatcaggtacttccagcgttctatagccaatgtactctactcccgagagatcacagggactgttactaactctgatatggagatgattgcaacggccctcaagggaactcttcaccaaactaagaatggtatgcccctccagg

SEQ ID NO: 170136 - DNA, 1037 bp, Arabidopsis thaliana landsberg
acctaattagaatcatttttgaaatggcgacacagtcagttaacgcagtgatcgttgatcttcccggagatgttaacgacgacggcgataattccgattgtttcatcttctccactcctcctctctctgcacgtggttccacaaagcgtgatgctatttccgttgagaattacgatcgtgatcggaaacttcaacgtctctgggtctaccctcctcacaaaaccgtaatcaagtcagaatctccaatttacatagatcttgatctttacgatgatgaagacgatgatatcagaatcctctgtttcgcaccaccaatccacagagaaaagggacagtcttcttcgtcaaagacggcgactttcgactgtgagatatgtgttgattcaaaatccataattgagtcgtttcgtatcggtggatgctctcacttctactgcaacgactgtgtttcgaaatatatagcagctaaattacaagacaacattctctcaatcgaatgtcctgtctctggttgttctggtcggctcgagccagatcagtgtcgtcagattttgcctaaagaggtttttgatcggtggggtgatgctttgtgtgaagcagtagtgatgcgttcgaagaaattctactgtccttacaaggattgctctgctttggttttcttagaagagagtgaagtaaagatgaaagattcggagtgtcctcattgtcatagaatggtgtgtgtggagtgtgggactcagtggcatccggagatgacttgcgaggagtttcagaagctagcggcgaacgagagaggaagagatgatattttgcttgcgacgatggcaaagcaaaagaaatggaagagatgtccttcttgcaaattctatattgagagatctcagggttgcttatacatgaagtgcaggtatatatatgtatcgtcttcttcttagcaagagtgtttttaaaaaacattggtttatatatctttttaaacacattttggcaggtgtgggttggctttttgctacaactgtggaactccatcgagggac

SEQ ID NO: 170137 - DNA, 2577 bp, Arabidopsis thaliana landsberg; identical to SEQ ID NO: 26866

SEQ ID NO: 170138 - DNA, 2301 bp, Arabidopsis thaliana landsberg; identical to SEQ ID NO: 17133

SEQ ID NO: 170139 - DNA, 1382 bp, Arabidopsis thaliana landsberg
acaggcattgggttcttatatggtaagagtgatcttctacattccatgcctccattcttaggtaagcagtctatctaatatttctttatgaaaacagtttatcatatctgtttaatcaaggatgggactggactgagtcccacttctttttttccttgtatttcgatcctcttttaggtggcggagaaatgatctcagatgtatttcttgaccattcaacttatgcggaacctccatccaggtagggattctacatatattagttactaatctgcataattgctgcagtttagaaataaatatatttaagtttgtatcagatttgaagctggaacacctgcaataggagaagcaattgcccttggagcagcagttgattacttgtcaggaattggcatgccgaaaatccatgaatatgaggtttgattttattttcctacaactagacgtcaatgacgtacatacagtcacggagattctcacatgttttctaactgtagattttaatttcttgtgtcatccaggtagagattggtaagtatttgtacgagaaactgtcttccctgcctgatgtgcggatatacggtcccagaccttctgaaagtgttcacaggggtgctctttgttccttcaatgtggagggcttgcacccaactgatttggcaacctttcttgatcagcaggtttgttataattgggagctatctgtcccatcacatactggttttctcttatcttgaacgtattcttttaatatgaggtagtacctcaagtaggataagggcactacctaccacctctttctcttcttagtgggtaatgttaccacttagtggtcaaagcgaatctcagatgcctaccttaggatatcttgtggtagcagcctataattgaggttgatcttctttattccaagatttaggtgaaatctcatgtgtgaacactagcctggactctgttgataactaggttaaaacaaaacccctagatcatctaggttacatgatacctgtccaagtacttgatccgagtgattctcatacattagtaatgagttcagctgtaagaagttttaactgatctagattaaacaaattcatcttgatcgttctaatgttaaccgtccacctcaaacccctactttactctctcatcagaatatccatagtgggatgaaaactgaaaacgaatattgtatgttgcagcacggagttgcaataaggtcaggacaccactgcgcacagccactccaccggtatcttggagtgaatgcaagtgcacgcgccagcctctacttttacaacacaaaggatgacgttgacgccttcatcgttgcgctggcagacactgtgagctttttcaactctttcaaataagtggaa

SEQ ID NO: 170140 - DNA, 1029 bp, Arabidopsis thaliana landsberg
atggattcaaaattgcttttggttactcaatcgggtagtgttgatgatttatattctcttattcaagcggctcccgatattcttcaaaaagttgacgttttacctatcatccacacacctctccatgaagcgtcatctgctgggaagttaaatttggcaatggaactgatgattctaaagccatcttttgccaaaaaacttaacgagtatgggttaagtccgttgcatctcgctgtcgaaaacgaccaggttgagttagctctagagctagtcaaggttgatcccagtcttgttcgtattcgtggtagaggaggtatagcttcttcaaaatcattttttaatataagtttcaaaatctttaacagaatttatttgaaacatataatataaagttacttgataagctagagactttttatatggttataatgacgacaggcatgacaccattgcatcttgtagcaaagaaaggtgacgtagaccttcttacagattttctcctagcatgtcctgaaagcattaaagatgtgaatgtaaatggagaaacgattttacacatcacgattatgaacgataaatacgaacagctcaaagttctcacagggtggatgcagaaaatgcgcgatagtgatgatgtgttcatcgacgtcctaaacagacgtgatcgtggaggcaacacggttttgcacctagctgcatacgagaacaatgacaaggtatgtactttctcttttattttttttgtcttttaaagtcagtcattcaaatttggtttgaacttttttgttttatcgtccataagatgtttaaatggttgatccgtgttctctttaattatacgctagtatatttgggatgtgaatatgtgattcaatataaccacatactatcagaaattaaattgaccaagaagttgttagaccaaacactcatttatgtcattcttaagtcttaacatcattaaactcacatcctctttgaataatttatgttattattcaggtagtaaaacagctggtaaaatgcctg

SEQ ID NO: 170141 - DNA, 416 bp, Arabidopsis thaliana landsberg
ggattgtgagggatcgtcttatgcagacattgcttctactgttactccaaactttgtcaactagtattgcagcgatcaaaccttttcttctttccatggcgatcaaaaccctaacctctcgtctccgtcttttgatcaggactgttactcctctctctatcagatctgtggagaatcatcttcacaagttgcttcttttgatcaaaaccctagctccgagatccaaggatttgaaacagaggaagagaataaccaaatcaatctactactacaagaaacacaaacagaggccaatgtcaatttggatgatgagatctgcttttggaatgatctatccaacgatgatgtgtttggtctaaacagctacttctgtctcgataccaccaatgcaagattccgactttagacgtcatgtc

SEQ ID NO: 170142 - DNA, 676 bp, Arabidopsis thaliana landsberg
ttttttattagtcggatttgagttggaatgtaatgtgttgatgtggttttgttgggacaggacgttcaccaatctgagtaaatcagcaaaagctgattgccctgcggtgtgctttgagaagttcatggagtttcaccagcagatggcacaaaccattggcgaactcacttccattgaagtagctgctactccagatgctgagaacaagtcacagaacataaacgcaagaaccgaaaatcagaaaccaacagaagaagggtcttcttcgatcctgcatgaaatcgcttataattctattgatcaggagaaaaggagatcaaagagacggattgtcctgaagcagcagagcgaagggaagacagtgagatcaaatgatgagaacaagaacccagcttctggcggtataagcaacacgattaggttagcaaaggagatcgaggatgaagctgcaaactggttcatggagttcatcgaaatagctctggagaaaggtatgaagaaatctagaggccctgatgatgcagacgttaagaaggttccgcaatctctgattctcggggttttaaactggattgaagtcgaacagtctgatagcaacaacaacaagagacgcagagtccatccaaaagcatcaaagatcactaaaaagctcagaattaaactgaagaatccttga

SEQ ID NO: 170143 - DNA, 579 bp, Arabidopsis thaliana landsberg; identical to SEQ ID NO: 80256
  unsure (1)..(579): unsure at all n locations

SEQ ID NO: 170144 - DNA, 3836 bp, Arabidopsis thaliana landsberg
  unsure (1)..(3836): unsure at all n locations
attctttgaagtttgcttcacaagataacaagcgtagagttcttcgaaagcttgtttcccctgttgttcttgaaggtggcgagaagagtatcgatcgtcacaccattgagtgtcaatcgacacctgcagctgccccgatcagatttgtctacacatcgccttggaaggtgaggaggcagcagcaatcctgcaccattccacctacatcctgaactccaccaagtcaagctattgactcaaaacaagcacttagtgggaggcaacccacttgtttgatttttctttcccttttcttttattttcgatttatttttcccgctttctctagatttgaatgccactgggacagtgtcgtttaagtctgggggaggtccttactaattatacattaatttttgattcttattattttcttcgtttttgagtttattgagtcatttttccttagtttagttaggaatcatgacctatacttctcttgattattgcctgattgatgagtgctacaggttcaagtcaatccgactattggaaaatctagatggcaaaacaacagacttgaggatatcatagtttccaactcaaccactaaggctcgagctaatctcactgctcttccttttacctcttcaaacggttatgatgcggacatcaaccttacttcacaaaccgcgaactgcatcctgtaccagaagtcccagagggtatcatgacacgttcaaagcctaaacaattgaagaaaatgttcaacttagctgtgcaagatattttgagatccctagagctaggagtaaactggtccttagcaccccataacggatatgatctaatagacgaagaagagcttgttgaagcattcacccaaatgagtcttgaacgaactactcccccaggtatgaaatatcgtttgacaggttcaaggacctctagaaaccaagagaagactttggagcttcaagagatagacgattcaagtgtcacatctgaaagtggtcgacagagtcaagatcaagagcaagacatcatggacatggaaaagctcgaagacattgatcaagctactcaagaggaactccagaaagacccctacttcaaggaaccagccagcaaacaagcacaagacttgattccagaagtacctcaagaagtactacaggaagtgactcaggcgtcatctattgggcctaaaacgcatctaggtaaggtttattcagtttatattatctttgcaggtccaaaaagcccagacaatggctagagtcaccctcaatcgtgctcctcaagagaacttaattagtttccttattttagcttattttctttctaaaaacaatgggttttgtgttttgattatatttgctttcttgttgcatttttacatttaatttcggccctagggctagctgaaggactcttataaagtccccctgcagcagttgaacgatttttcacctttgattatcaataaagaactgcattttctcacttcttctctttaagtgttcttaagagaataagcttgttctttgtcttgtgtgtgcaattcaccaaggccaagttcgtgtactgtatcagagacttatcacatctctgtggtgtacttcagtccgccagcacttcccctctaatagatcccacacgagagaaccgatcgccatcatgttagatctccatcttcgaccatctttccttcacaagagagaagcgaccgccagcttgtgaagccaccatctctatcagatacaagctcaccactgagtcttgtatcatcttggtatcagagcgcagttgcgcttcctttgccaggtttcatcgtttcttatagcctgccttactttctgaatcagtttctacattagtctagtttctgttttatttaaattaaaaaaacaaaaaacaagtatttcagtttcattttatttcgtgttaagtatttgtttttgagtttcgtaatattaatcaaaaatatatatatatatatatatatatatatatatatatattgttaactttgtactacatcagcaagtgtgtcagaaagtgattcaacaagttttaggtttcttggttttgatctttcttttctattgttgtggtacgttgatttctttgttgtttttgtctaagcacaggtcagctttatgcatatactatgggagaggcagcagaaattccccaaaacgccgtaatgcaattgatggctactttgacggaggagttaaggggattaaggcaacagctaggccgtttggagcagccccatcctagggttgaattggggcaaaacttggctcgttggaatgcccgcgaggaggcagaggagtttcctgacttggatgatgatgatgatccaccacccgaccctttgagacgccaacatcaacggagagaagatcctagtactaatcaatctcgttctcgtgacattatttgtttcaaatgtcaaggtaggggacacatggcgagagaatgtccgaaccaaagggtgatgatcctcactcctggtggtgactatgagtcacaagatgagcaagatgattctgatgagcatgaggacgttgagtatccagatgtaggagagctccttgtgattcgcaggacattaagcgtgtttgtcaaccccgaagagaaggtgcaacgagaaaacatcttccacactagatgcactatcaagaacaaggtatgtaacttgattattgatggaggctcatgtactaatgttgctagcaagtatatggtagacatgttacgtcttcagaaaacaaagcacccgaggccatacaagcttaggtggctcaatgacgatactgaactgaaaatcgctgaacaaatgactgtatcattcagtgtgggaaagtaccaagatcaagtcgtttgtgacgtagtgccaatgagagcgggacatcttctccttggacgaccatggcagtttgaccgagctacatgtcacaatgggcgtaccaaccattactctttcaccttgaatgaccgtaagtacaatctcgcccctcttagtccctcaaaagttcatgtcctacaaattcacatgaacaaggaggacgaggtaagaagttctagtctttatttaagctctaaagatgtttgtaaaaccatgagtgccaagggcaccgtgctctaatggttttaaagaatgtcttagtcaggataggtgatcctgagctaccctctgaagtactagctgtgctagatcggtacaaagacttattcccagaggagattccacccggactaccacctattcgtggcatataacatcagattgatcttgtaccaggctctgctttacctaacaagcccgcctacaggatgaatccagaggagtctaaggagcttgagaagcaagtgcgtgacctaatggacaaagggtacatcacagagagcctcatcctgtgtgcagtacctgtcctattggtcccaaagaaggatggcacgtggagaatctgtgtagactgccgtgcaatcaacaatatcaccatcaagtaccgataccccattccgagactagacgacatgttggatgagcttagtagtgnnnnnnnnnnnnnnnnnnnnnnnnnnnnnnnnnnnnnnnnnnnnnnnnnnnnnnnnnnnnnnnnnnngtggaagacagccttcaagaccaagcaaggtctctacgagtggctagtcatgccgtatgggctaaccaacgcgccaagcaccttcatgcacctaatgaaccaggttctaaggttgttcatcggtaaatctgntgttggttactttgacgacatacttatttacagtaagaggtattctgatcacattcaacaattagagttaattctcaaaacgct

SEQ ID NO: 170145 - DNA, 2572 bp, Arabidopsis thaliana landsberg
tagatctgaatttagatgttgatatggaacaatcaagcccagttttgatgttattggaacaatctagtgatcccgtagggttagatggtaaccgaacctttccttttttctcttctgtcaaattaaattcgcctttgtctagagatttatggagtagcattgggttttgatttcaggaaaagttgtattagggttttcattagcatctccagatctagtaaattgtggcgcttcacctgatttacctagaggtagctatgaagattcaccagaattttctaagaaaagaagattttctactgagctttctctagagaatggaattgatggttctactactactacaagacttggccgtaaaagccaagttgtgaaattctcagcaatctgtcagacatttggctatgagttgtctcctgagtcttcttttgagttaccttctccacctggagactttcgggagagtatgactcctgttataagtatcaactctggttctataagcacggatgtgactgtggaggatgtaactttcttgaaggatgagtttttcagtggaggtgaaagtattacaactgatgctgttgttggcaatgaagatgagattttgttgtatcaaacagctcgtcttggtaatttcgcttacaagtttcagtcactggatcctggggactacttcatcgatttgcattttgctgaaatcgagttcactaagggtccaccgggagttagagtttttgatatattcattcaaggagcaaaggcaagacatcatcaccgaaattgagcttttattttcttcttattcatcacatgtcatttatgattcgagtggaaaactattgcaggtcatatccggccttgatttgttttcgcaagtaggagcaaatacacctcttgtgatagaggatctaaggatgctcgtaggtagggaaggagagttatctatacgattagaaggagtgacaggagctgcaattctatgtggcatttctattaggaaagagacaacggctacctgtatgttgctttctaacctttttgtgtcttggacaattctacctaactttttcacaactctgatcacagcttttgttttttagatgttgaagaaactggaatgctagcggtgaaaggttcaactgacactgttctgtcccagcaaactcaagtgagagttattccacaatcttagtgtttctagttgaggttggggtggttacaaaagttgcaaatagttaaactgtcatcctctttttaggaaaatgttgtctgcagggcagaagaagaggctgaagggatgagaagtgactgtgagcagcagaggaaagagatggaggatatgaagagaatggttgaggaacttaaactggagaaccaacaaaagactagagaatgcgaagaagcattgaattctctcagtgagattcaaaatgaactaatgcgcaagtcaatgcatgttggttctttgggtatgtacatctctctccttcatatttcgccttccttgttatcgttaaagttgacatatatgtacttgttcataaatagcgtttgctgtcgagggacaagtcaaagagaagagcagatggttctcttcattaagagatttgacaagaaaattgaaggtacacagaagcaaacttaaagtacgataagcaactgcaagctcttatgcctcattttaacgaacgcggatttgtagatcatgaaaatggagcaaattaagctgttggaggaggcaacaacatacaaacacctagtccaagatatcaacgagttcagttctcacatccagtctagaggtgagtctttgtcttcctatcattttgacatgcagctagcacttcaaagatatagtaatattgtgtttctgtgaattttgatgagttaaatttttttttcaacagtgaagcaggacgcagaattgcatgaaaatctcaaagtcaaatttgtagcaggagaaaaagagaggaaagaactatataacaagatactagaactaaaaggttggtgtctttatccaatataacttgtagatggacccccttgactaaacttggcagcctaacaacttacagtgatcatttcttcgtacaggtaacatcagggtcttttgcaggtgtcgaccactaaactttgaagaaactgtagcaggagtatcaatgggaatcgatgttgagtcaaccacaaatggagaggtcatagtgatgtcaaatggttttcccaaaaaaagcttcaagttcgattctgtttttggtcctaacgcttcccaaggtgatttttggcatcaatgaccatttcctacttgctttctatgaaatctcatctcaccaatcgacatgttgtttcctatacttttacagctgatgtttttgaagatactgctccctttgctacgtcagtcattgatggatacaccgttagcgataccacctatggccagactggtactgggaaaacaagggcgatggatgcagctccactatacctgaatgcagactatagaacactggataatctgcaacgaatcctgaacgcacgagaacagcgcggtcaaagggcgttcaat

SEQ ID NO: 170146 - DNA, 1404 bp, Arabidopsis thaliana landsberg
aacgttacacaaagacaacattgcaaagttggaaaagaacatttgtatagttctttgtaatttggagaagatttttcctccatctttttttgatgtcatggagcatttaccaattcatcttccatacgaagctcgagtaggaggaccagtacaatttagatggatgtatccgttcgaacgatatatgggtcacttaaagagaaaggtgaaaaataaggcaaaagtagaaagttccattgtagaacaatacatcaatgaagaaatttctacatttggtagttattattttgagccatacatcaagacaaaaggtcaaaaaaaatgcgacattatgatggagaagagcaatctccatactcgtttggtgaaattccagaaatattttctcaacatggaagatgtagtggtaaagcgaaggagttttggtttcaagataaagactacaacattgcacatacatatattcttttgaactgtggagaaaaaattgttaaagtcttttgaaaggttcgtgaaagagatactttatattttaattagagagtaaatgttatggttctaaattattaatgttttaatatatgtcgtttgatgaaagcatggtggttgctagcccagacttaagtgaagacgatctaaccttgtcgagagaaaaagaatttgtaagttggttacaaaaatatgtaagaaattactgttattttaaagaaggttataatttatgattattttgctaatgtaattttttttatttattaaataagctggagaatacttgggtgatagtttatatccaaaatggttacaatcactcgtccatggtccgatgacaaaagttactagttggtctatgtacttctgtcgtggatatttatttcacatatatgactatgggaaggacaagaaaaatgctaactatagagtttctgtaaaaagtgaatcatcttatggctcaactgaacatgatttctatggagttttgagagagattttagagcttcattttccaggaccatatggtctttaaactgtgcttttcaaatgtgattggtatgattcaaccatcggaaagggtaaaagagtaaacaaataagggattgttgatgttaactctgcaaaggcttatggaatatatgatccttttattttggctgcataggctgatcaagtgtgttatgtaccatatccccgggtggctacggcaacggatcaacaatggtacgcatcaatcgttattcatccaaggggaatagtcatgtgcaatcataattttgctttttaagcaatgcaatatgttagcaggtctccagttaatgatggacctttgtaagtctttaacgctagtacaagcaacatggcacatataggtgttcttgacgatgtagtttcggatcagaatgttgg

SEQ ID NO: 170147 - DNA, 1506 bp, Arabidopsis thaliana landsberg
atttgcacttcatagttgtaggatcaggacagactcagatctttcgcccgtgaaacataagtatagctcttacttaggacggccgtggagaaagtattcgagggctatagtgatggaatcatatattgacgacgcgatcgcggaggaaggatgggccgggtggttagactccggagacgaagtactaaagacgttgtattttggagagttcaagaattatggtcctaaagctagaatttccaagagagtgacgtgggaagggtttcattcgattgggtttgaagaagcaaattattttagcgtcggtaaattcctagatggagtttcttggttgccctctacgggagttagtttcacttccgggatttagtgaaaaaaagtaaagagaagaaatggagaagacgtcactaatggttttaagtataagtttaagattaagatacaaatttagagtttttacaccaaaaaaaaagatacaatttagagttaaccatcgaatgtaaattcaatttggtatggtcatgaatatatttgaaacttaaatgtaagactttcttctttttcttttggtcaaacaaatgaaagagcataccaaattgttagtgataattgtttatgatactttatatgaatactagataaggcccgcctatttaggcgggtgtaagatacaaaaataaatttttatcgataatatttgaatattgtatagcaatttatatatttttcttgatatttaatttaataattattggtgtaaacaaaatttcagtcttatacattctattttaattatatacactcaattttatcaatgatatttgaattctaaaaagtaaccgaccattcttctatatttaatttagtatttagaaaaaaaaagaaaaaacaaatttgtatcttacaacattcaattttgtaatacagtttaactatctatgtcatcataataaactcgatttaaattctacaacttcatattgagtgataacatttttatatcaaaataatatttatgacatatcaaatctatatcctatttagtattaaaaataattaacaattaacaaaacataattaataggcctaggcataatatccaaacccgaagaaccgacccgaaaaatccgatccgaacccaaacccaaaattttcaagtacccgaacgggtctaaaattcaaaacccaaaaaacccgaacccaaacccgaataggtatccaaacatatctcaaatataagtatatattaatattttcacgggttatacttatatatagaaaatattacgatttttttagatattttagttatttttgtgtatttttagatatattcaaacaaaactactcgtgttgaattgggagtttttgaaattttcaagtaatttaatagatttgcacacaaaatttgatatttcaatatataggggactcgaacccgaacccaaatccaaaccgaacccgacccaaaatcttaaattacccgaacgggtcctaaacttctaa

SEQ ID NO: 170148 - DNA, 2424 bp, Arabidopsis thaliana landsberg
atggcttggggattttcgtccgtgtctctcttcttgttcgtcgtgttcaatctgggtatgttttcaaaaatctgttaattcagttaaattttccaaaattcgaatttttaattgtcctcatgattttgttacagtgagtgctaagattgttttagaagaagggtacgaggtcacaacggtggtcgacggccataagtctggtctgaatccatacacgattcatgctttaccaggatcttctaatctgatcgtccttgattcttccggcagtacattttacactacttcctttcctttgtccgttggtaaacactcacaaaaccactcttttgtctcatctatgaaccggatcattataattgtgtttgtatatgagttgtaaaatcatggatgcataagtaaatgtttagggcttgttgattttgattgcaagtctagaccttcatttttgctttctctgtaatctcaaattggaccgcagtactaatatgtgtgtgtagtgtgtgtgaaacgatcaacttacaaatgaaagttctaaactttactatctataagtgaaagttttgtttatctttctttcaattgaagtttgagctccccttgagaatgtgtgtgtggttgtgcagatagtgtgataaaccggtttgctggggatgggacttcgggtcatgtagatggtaaagctggtaacagccggttcaacaaaccccgtggttttgctgtggatgctaaagggaatgtttatgttgctgataagagtaataaagctatacggaagatcagctcttcaggtgtttgtttaatccatttcttgtattccttttgttttaatgctagttgttgttgttgttgttgcataatcttggtttgttgaaagagccacttagtttattttgattatgcatgttttatttactggactttgtaggttctgtaaccaccattgctggagggatctcaaaggaatttggacacagagatggacctgcacagaatgctactttctctagcgatttcgagataacttttgttcctcatagatgttgtttgcttgtttctgatcatggaaatgaaatggttcgccagataaatcttaaggagaaggattgcctccaaagctctcattctagtatgtcttttctataagtaatcttttgtgggtttgtctaaccattcctttggaaacttcaacgattcttctttcactgtttcagatttagggacatactctctttggtcaatagggattgttctttcctgcattctcggggtagccattggattttctgttcgcccttacgtcatccgtcatgtaagtttttttttctatctatactcacattacatttagtgtataatcaacatatcaaatctcttaaccaaatcgttatagacaggaagaagtgaaccacctctcgttcatcatgacatggaagcttctcctaaccaaattgggggcacaagttctgaccttcttctcctacgttagaaaccgagttgctgaatcaaccgtttattcagtactaagtagactagttatgatgattgtgtctcacctttccctcatgtattccgccctaagtagattagttagttcgatggtatctagcctttttttcttgtgtcaaccaaataatgtagctattttagacaagacatgctcagagtctgatcccgagagtccaggttgcggcaacccaaagccgccactttcactgaaaccctctgatgatcttatggacctaataagctttgatgatgaacaagaacctaacaatgacaaagattgcagtaatgaagagactcttcctcatgcaaccatagatgacattataaaggttcatgttgaaggattttcaaagatggctgaagaagatactgcaattcatggttcttcatctactgagtaggtttcatttaaaagcacatgaagcagagagtatgtatcttttgtaaatgtaaagttaagacgttcaaagtttggttgagttgaaaaatcttttactattttattgaagtgctcatcttttttctttataccaaggaagaatcgtgacttttcttacaagagaggtctaaatacccaaatcccaattgtgccttctcaacaaatttaaaaaaactatacctgaattcccaatctatactactactatcatattaagcaacttctcttgtctatgaatagtatccatatgggtaactcacaaattggtgagctctgtggtggatattctgatgagtattcatctggtcttgctcctggcctggcccaaacacaatctcattagtcctctcgctgctctgctcataaagagtgtatgggattgttgagtgatgcctatgagtgatacagttgatgcttctgttgttgctgctcctggaggaattcggcgtccaagcttctgtcaaggcagggcttcg

SEQ ID NO: 170149 - DNA, 1153 bp, Arabidopsis thaliana landsberg
ccagcggagctataatactagtaatcctcagaatcttggactggtatttgatggaggagacaaaccaaatgatggttttggcttaaaaagaggttttgactacaccatggattctaatgtcaatgagagcagcactttctctagtggtggtttcagtatgatggccgagaaaaagcgtacaaaagcagataaaaccatcactttggatgttcttcgacagtatttcgctgggagcttgaaagatgcagccaagaatatcggtggtaagcagcatttttttatcttctcgattcaatttatcggaaagtcctgagactgatctcttctttttgcccttttcttgtcttggaaattttcagtttgtccaacgaccttgaagagaatatgcagacagcatggtatacaaagatggccttcaagaaagataaaaaaagtgggacattctctgcagaagatccaacgagtgattgattcggttcaaggtgtttctggtcctcttcccataggctcattctatgcaaatttccccaatttagtctcacagtcacaagaaccatcacaacaagccaagaccacgcctcctcctccgccgccagtgcagcttgcaaagtcccctgtatcctcgtatagtcacagttcaaactctagccaatgttgctccagtgaaacccaactaaacagcggtgcaacaaccgatcctccttcaactgatgtaggaggtgcattgaagaagacgagcagcgaaatcgagcttcaaagctcgagtcttgacgagacaattttgactctctccagtttagaaaacatccctcaaggcaccaacttgttatcatctcaagatgatgactttctgaggattaaagttagctacggagaagagaagatcagattacggatgcggaattcgcgcaggttaacagatctattgtgggagattgggaagcggtttagcatagaggatatgagcaggtatgatctaaagtacttagacgaagacaatgaatgggttttgttgacttgcgacgaagatgtagaagagtgtgtagatgtctgcagaactacaccgagtcataccattaagcttttgcttcaggcttcttctcatcatttccctgaacgttcttcagctactgaatacagtttatggcactga

SEQ ID NO: 170150 - DNA, 554 bp, Arabidopsis thaliana landsberg
tggaaagtgagtatgagttagtgaggattttgcagttgcataggcagtgttgaacgacaccaacccttggtgtcgatcgacaccatcgcatatatacgagacatcgggttgtgacgaagcaaaatcgaccaggctcgacattgatctccagaatcgttcgacacacattgatagtgtcaaccgaccccacctgggtgtcgatcgacaccagtaccaacttgaggaagtgttgacgtttgacggagcagaatcgagcaagattgacaaaggaggatcaatacgagatagtagtgtcaactgacactcacctagtgtcgatcgacactggacgcagactgcatcgctgaattgtcaacatcctaaggaaagtcgagttgtagcatgagtgtcgatcgacaccaccactcgcgtcgatcgacacacatcactagttgaagaaaaatcatcttcgatagctacttttcaagctaggatcactactatcagtctaagaactattgtcaagtcaaccaaatgcacctcacataaatcatccacctccaaaaaagctcagg

SEQ ID NO: 170151 - DNA, 1353 bp, Arabidopsis thaliana landsberg
  unsure (1)..(1353): unsure at all n locations
gcggtatgagtccacgagctgcttgcgcgtccgctcaacttctgagcgcgtagaggcctcggcctctccatgcgggcctgcagagcgttgaaccgtgccttccattcctcggcgcgctggctggcgagactcccctccgcccgcgccaatttggcctccgcctgcgccgcctgcgccttagtgatggcctggttggcctccctcctttcctccaccagctggcgccggaggtccgtcctctcgccctccagggcggccaccttctccgccagcttgcggcttttgctctccgcagccgacttctcccgcacggcgtccgcgtgctacgcccgaagtctctcgacttcggcagccatgtctgcagtaagggcacccgacgccacgcggtcggcgaagttggccgcctaacagacacacatgagaccacaatcaccatgaaagcggcaacaccgaagtccagctcaacttacttgactcagctgctgcgcactgctgcgacgcctccctcagccggcgggacacagtgcccgcttcgtccttgacggcagtgagtgccgaaatctcaccgccagcgctgagagcgctacccttcgccccaggcactgcggcagacaccgtggtcgccaccgcaggcggaacaacaagttacccctcgcccgatcctgcaacgtatcaatagtcaaaaaaaactcaggccaacgaatcaccaacgagataatcctccacatcaatctcggtgccgaagtcggcaacgcgtttgccgggcggcggtacgnatcgggccgccttcgcagcctccgccactccgctggcggacggcaccaccttcgacagcttggggcctccggcgcccaccgtcgcctccggcgccttgccaggcgcggaggcgcngcctttcgccggcaatggcggcttgcctccgccggaggccgcagccttcggagccccccgctgcctcttcggcctagcttcatgcagcctgacagtcgcctggcgtttttgcgccgcaccttggcgatccttgtccatcactgcccacacaacagcaccgatatttcgcccataaggaaaaactttccaccgatgaaccatacgagatgtaaaacagtcctcctcatccgcgcgggggataggaacgtccttggaccatcgacccccggtaaccctcatcatccgagccgaagactcccggagctcgagcgaagacatcctctcccccgggggccgcacacgtcctcattaactctctagcgaaactatcagacaccccaagtccccccatcgcagtacctaattttctcttttttgaggaggtggtggccgccagcgcagggtcgcctccagtctccaccg

SEQ ID NO: 170152 - DNA, 967 bp, Arabidopsis thaliana landsberg; identical to SEQ ID NO: 39473

SEQ ID NO: 170153 - DNA, 1209 bp, Arabidopsis thaliana landsberg; identical to SEQ ID NO: 57927
  unsure (1)..(1209): unsure at all n locations

SEQ ID NO: 170154 - DNA, 709 bp, Arabidopsis thaliana landsberg; identical to SEQ ID NO: 14103

SEQ ID NO: 170155 - DNA, 1097 bp, Arabidopsis thaliana landsberg
tgatccttttactcgattcttggagccgaaaaagttcaagagtttgcgggtaagatttcctaaaaatatacagttctgaatttagcaaatagactgtatgtaagatctagtaattaaatggtttggttgaaggcagtcggggactcaaggggcggttacgggtgttgggctgtcgataggttaccccactgcatcagatggaccaccagctgggcttgttgttatatcagctgctccaggaggtcctgcaaatagggcggggatattacctggcgatgttattcaaggaattgataatacaaccacagaaactcttaccatatacgatgctgcacagatgttgcagtgagttacatttccatttttcatcattccttaactttgaaaaatctaagtgtgacgagttaatggttctgaagtaagaaatgatgataatgctttggttgaaatgcaggggacctgaaggaagtgcagtggagctagcgattcgcagtggacctgaaacgagactcttaactttgacgtaattctctcatgcctacatttatcttcgttgtcacgttcatttggtaactacaattgttgttatttcaggcgagagcgggtttctgtgaatccagtgaagtcaagattatgtgaacttcctggttctgggagtaactcccctaagattggctatatcaagctaacaacattcaatcaaaatgcttctagtatgtattctttggcatgactgattccttcttacaaatttatctactctctagtttattatctctcaaagtcttaacactttttttgtaggtgcggtaagggaagctattgaaaccttgagaggcaacaatgtaaacgcattcgtcttggaccttcgagacaataggtgatgattttttgagaacataaactcttttttgcttttgcatcagcctttcttaaaaaaattgttcttgctgcagtgaaggttctttcccagaaggaattgagattgctaaattttggtaataacctcataaacccctacatacaccgaattagaaaatttcaagatccacagatatcataatagaaacttcaacatttgctatccacaggttaga

SEQ ID NO: 170156 - DNA, 901 bp, Arabidopsis thaliana landsberg
atgcaagctgtacgggaagaagtggaaccatcatcaatggcattcctcgtaaatatcaaacacgttcgaagggtatttacgtcatggtctcattatataactgtcagagccccttccgtttctctcgacatgcagagtctagattccagcgacaccatataatatagttattagaaaacgagaggtcaaaaccatgtccggtaataagatctcgactcttcaagctcttgtcttcttcttgtaccggtttttcattctccgtcgttggtgtcatcgtagccctaaacaaaaataccaaaaatgaccttctcacggcctccaccaatatcaagacctatcgaatcacactttgatattcaacgaagaaggagctatactcatatcaaactctttattgcctatacttatggttgtggcatacaaagacagaggggtgataaggtcacttttccttttactgtctctatccatttataagcttgatgagctacgaaatgggcttgaagacgatggtgatgctgagcttctttggagtaaaaaggcaagcttccgagtggggaaatcagttttgcctaagtattttctagaagatgttgggctcgagatgttccaggttttgaaaagaggaggcaagagagttgctgtgagtgatttaccacaagttatgattgatgtattcttgcgagattacttggagatagaagttgtggtcggaagagacatgaaaatggtcggtggttactacctaggcatcgtggaggataagaagaaccttgaaattgcttttgataaagtggttcaagaagaaagacttggtagtggtcgtcgtcttattggcatcacttcctttaactcgccaagtcacagatctctcttctctcaattttgccaggtaaattat

SEQ ID NO: 170157 - DNA, 352 bp, Arabidopsis thaliana landsberg
tccggacttctactttttgccaagactggttggtatggcaaaggctttcgagttgtgtacattaggcagtaagatctcaggcagggaagctgcaatgatgggattggttaataagacagtttctgcagcagaacttgataatacggtgctcgggtacgcgaacctttatgcaaatgcaccgacgaaatcgattggaatcatcaaaaaaatgctccaaaaatccgcaacctcaacgcttgatgaaatgctggattatgaggcatactgccaggaaatagcggggaatagtgatgattaccgcgaaggcgttgcggcgttcctcgaaaaaagaaaacccgcctttaagggtaaa

SEQ ID NO: 170158 - DNA, 1572 bp, Arabidopsis thaliana landsberg
aattcatcaattcggattatggttagtcaattcaaggctctccttacaaagaatcctcgaccggtctaacatatacgtcagacgttggtttcgtccagagcgggaaaattggtaaaatcaccaaggaactcgagtcattatacaataaaccggagcggacgctaagatactttcctgatggggtaagaaattgtttcagtctgaatgtcacacagggaacaaagtatcttatcaagccttcctttgtctatggaaactatgatggtcgtaatgtcatcccggaatttgatctttacatcggcccaaatatgtggatcacggtgaagactgatgacactatcaaggagatcctccacgtatcgaaatcaaactctttgcaagtgtgtcttgttaagacaggtacaagtataccttatataaatacattggaactacgaccattggccgacgatatatacaccaccgaaagtggctccctcagctatctttttcgggtttattatagcaatttaaagggctatatagagtaagaaacaatcacttgatcatgataaaattttctataaactagcaaaacatactatgtttagtaatgttttaacgtaagtctatgccaggtaccccgatgatgtctacgatcgcatatggaaccaaatctcacctgaccaggattggcagattttaactacgaatctccaaataaacgcttcaaatgattatgatctacctcaacgtgtaatcaaaacagctgtaacacccattaaagctagcacaacgacgatggaatttccctggaccttaaagtctccaacttcacagttatacttattccttcacttcgcagagctacaaagtctacaagccaacgagacgagggaattcagtgtggtgttcaacggaaatgttacacttgaatcttatagtccaaagtttctacaaatgcaaactgtatacagcaaagcaccaaagcaatgcgatggaggggaatgcttgttgcagttagtgaaaacgtcaaggtccactttgccgcctctaattaatgctatggaggctttcactgtgcttgatttcccacagatagaaacaaatgtagatgaaggtatgtgtgttttttatatacttatattcttttcgggttttaatgttaagctttaaatatataccgaacttgaatagaaactagactaaccatatatatagtagctcaagaaagaaagatagaaacatggaacctttgaagacagttacaaaatatgaatattgatatcaactaactttatacataattactagtgattgctatcaagaatatacaatctacttatggattgagtagaataacctggcaaggagatccatgtgtccccaaaaagttcttgtgggatggtttaaactgcaacaactcggatgattctacgccaccgattatcacttccttgtaaggacatgatttcatcgttttcctacttttcttttgtacacttatcatactcattatttttttcatcactagaaacttgtcttcaagtggattgactgggattatcgcgctgaccatgtcaggatctcgcc

SEQ ID NO: 170159 - DNA, 394 bp, Arabidopsis thaliana landsberg
atgaaggctgtatttcgcaaggccgccatgagggccgccgttgcaacgctcgcacccgtgctttccatgggagtcgtcgcccaggcggtggcgggtccgcacatgctcgtggatatccgcagcggcaaggtgatcgagcacgaggatgccttccagaaatggtatccggcatcgctgaccaagctgatgacggcatatgtcgccttccgccagatcaaggcgggccggatgacgctcgcgaccccgatcgtgatgagcaagcgcgccgccgccgagccgccgtccaagctcggcctcaagcccggccaggcgctcacgccccacgacgccttcaaggtcctgctaaacaagaccgccaatgacgtcgccttctcgatcgccgagaatgtcgccg

SEQ ID NO: 170160 - DNA, 338 bp, Arabidopsis thaliana landsberg
  unsure (1)..(338): unsure at all n locations
gtaaaatagcacatccctttctctccaaagccactaattacggtgcttaccttgttttcaaagaacaagaaatgggagcctttggatntgagtctcttcctttggaggttagctttcgttctacaagatctgaagtttataacaatagaagagtatttcttaagtcaggaacacaagagtctagagaagatgggtggttggagattgaacttggtgaatattatgttggttttgatgatgaggagatcgaaatgagcgtattggagactagagaaggcggttggaaaggcggaatcatcgttcaagggatcgagattaggccaaaagaattgttgtga

SEQ ID NO: 170161 - DNA, 314 bp, Arabidopsis thaliana landsberg
aatatcgagtctaagtacactttcaagagctgctaatctgtattggcagattcttgctaaggaagttgctaaaagccattgcacaagatactaccagtctaccactgatctaccaaaagcatctcatggggtttcttcttcttcttcttctgtcaaggaagagttacgtcccaaagaaacttctttctgtgacttttacggtcgacccatagtttgccccatacttaccagtgctcgaatggatgcaggttacttactgcgggactgtgggagttacatgggctcgaaaaatcaattatgatataagcaacatg

SEQ ID NO: 170162 - DNA, 359 bp, Arabidopsis thaliana landsberg
gactggtgaaactcaagtggagttttacagctggtctggaagaatatgcttcacaggttttgtacaagctagacaagaacggtgtgatctcacagcggctatatcgagactcatgcacggaggtgaatgggaaatatgtaaaggacttatctttggtagtggggaaagacctcagaagtgctttgattgtcgatgacaatccattttcttactcattacagccagagaatggagtgcctataaaggcttttgtggatgacctgaaagatcaagaactgttgaatcttgtggagttcctcgaaagctgttacgcatatgaggatatgagagatgcagtcacggatttgctcgcaaactag

SEQ ID NO: 170163 - DNA, 672 bp, Arabidopsis thaliana landsberg
ctgagctctcgctaacagctcttatgtgcattatggggatgttggaggctactgttatgggattgatatgggaaaggaaaaacatgtcggtctggaaaatcaacccggacgtgacgcttttagcttcaatctacggagtacaacaattcttgtaatctgttcctacattttccagtttgtgtgtatgttttgctgagagaagaagtattgttgattgtactacagggactagtctcagggttagcatactatgttattggatgggcgtcaaaggagagagggcctgtgtttgtgagcgcgtttaacccgctcagcatggttctcgttgctattctgagcacctttgttttcttggaaaaagtgtacgtaggaaggtaataataaccttgatctaagactactgttgtatcaaaagttagaaaaattgattttcactaaatgagcttctaaatttgtagggttattgggtcagttgtcattgtcattgggatatatttggtattatggggtaaaagcaaggacaaaggagggatgcttcaaccaaacgctggatgcgcagagactgtggtaaagattgaccaacagaaggttccgacgcctgataataaccaagtagtatctatcagttaccatttaatgatcccgaaggcagcagctcggtctcaagagtga

SEQ ID NO: 170164 - DNA, 464 bp, Arabidopsis thaliana landsberg; identical to SEQ ID NO: 73854

SEQ ID NO: 170165 - DNA, 846 bp, Arabidopsis thaliana landsberg; identical to SEQ ID NO: 23946

SEQ ID NO: 170166 - DNA, 534 bp, Arabidopsis thaliana landsberg
tatactccatcagctaaattctccaaatgtgtcagtaaactcgccaagaatcgacaggatcaagttcccgttagcttcatatgaagaaatgcctttcattcccgttgttcgtaagaagaaaggatcgtccagaggatcatacagcccgcctccagagccaccactagactgctcaataacaaaagacaaattcacacttgaaccagaacgagaaaccaaaagtgatttgtctgatcaaaatgcaactgctggagcatcaagtagagcttcctcaggtgcatcaagaagacaaagattcgaccctagctcatatcgacaacgagctgaggcacttgaaggactacttgaattcagtgcaagattacttatagacgagaggtacgatgagctgaacgtgttactaaaaccatttggtccgggaaaggtatcgccaagagaaaccgcgatatggttgtctaaaagcttcaaggaaagtagtcctagtaacttggaagaagattgaaaaatagggttttaactccttacaagtttttg

SEQ ID NO: 170167 - DNA, 1820 bp, Arabidopsis thaliana landsberg; identical to SEQ ID NO: 28047

SEQ ID NO: 170168 - DNA, 672 bp, Arabidopsis thaliana landsberg
tcagttcggagatactgatctaaccactgctgcgaacggtgatccggcgcgtatgagtcacgcgttgtctcaggcggttattgaaggtatctccggcgcttggaaacggagggaagatgagtctaagtcggcgaagatcgtctccaccattggcgctgtacgtattttctctctttctttttttttgtccggtttgatccggtttttaccggtttaatggttcgacttctaattatttggttaggccgctcataatactatttttgtgtgtttgattagagtgaaggtgagaacaaaagacagaagatagatgaagtgtgtgatgggaaagcggaagcagaatcgctagtaacagagacggaacaaaagaagcaacagatggagccaacgaaagattatattcatgttcgagctagaagaggtcaagctactgatagtcacagtttagctgaaagagtaatgatttcacatgatcatataaaaagcttcttttatttggttgaatgagtaaaagacaatttgctttgtgtttttggtaggcgagaagagagaaaataagtgagcggatgaaaatcttgcaggatcttgtgccgggatgtaacaaggtattgtaaaaaaaattcaatgggagattcacatttttttgtagagtggtgacatgattaaaaattg

SEQ ID NO: 170169 - DNA, 509 bp, Arabidopsis thaliana landsberg; identical to SEQ ID NO: 6362

SEQ ID NO: 170170 - DNA, 1445 bp, Arabidopsis thaliana landsberg
aagtttgaccatgggaaaaattcaggaacataagtccaaaagccagttacattcccaaaggtgaacctagaaaagctcagtggcatggtttgcatcgaagatctaagaatgggtggttctgttttgatgattttgagtggcgtccttatactaaagcattgaacaattggaacccatttcggttttaccttgaggaagctatttgggtgactgttgatgaaagtattgatgatgagtttgcttcttttgctcggtgtgtgacagtttctcagattgttggagatggttttgtagaggattacttcccaaatagagtggcgagacagttcggtttggatcaagatcttcctggtttggctacttgtcaaagaaactccacagaaaaggaagcttggaatgattacaataagtctcttattggtttaaacctctacatgccttctcgcctcgatcaaggttctgtcactgcgagataccgagtctggtggctgaaatcagtttcaaagtttctgagtcctgaagagatgaaggaagaatcaactgaaacttttaacgcaaggaagacatttgatcattatgacgaagattatgatgatgatattgatgcatctcccaaggtactgcctttgagtcaggtgtttcagaaattggaagaaggttttcccgcaaaacgcagaaggtctgtgatacatagattggtaaagcaagataagataggtgggtgtgtgaacagtcgtgtatcatcaggttggaagatgaacaacacaagtgaggattttacaaacaatagaagcatttacaagccagtggtgctgaagcgagctcatgggggtaatgatggtatttctacgggtgaagaaaaggataacatgactattgctcaaaggatcagatctaaggagaagtatagcagtaatgcggagaatactctaggagatgcttctgaaacacttggaaaaagggctagaagatatatgacggtggatagcgatgacgactcagagccttgtcaaaagcttgcttcgacaaaaatagagcaaaggagtgaagaggatgatgaaactacaagcaaatcacacaagacaagggagattttcaatgattttgaggttgacgtgattggaaatactgcagggaagaagagtatgatcgatgatgagcagcaacataatggatcgactatgaaaagcattggaagcaatgggagcaagaaagcagagtttttggtccataaaaatagcgaaaagcatagatgcaatgagaaaatgtgcagtgaagttaaaaagcaagaagaaattgatgaaaggttgaaagagagaaagcttgcaataaaggagatggaactgaagcttgaggcacatatgattgagatggagaagactttgtccatgattagaaagtggaaaatcagaggaaaccagattaaaagtcgagtttctgcttag

SEQ ID NO: 170171 - DNA, 1408 bp, Arabidopsis thaliana landsberg
atgcggtttcctcttttccttcgtttcagccagagtgggccattattttttgttattcaggtggtcaggtagatgccaaaacattttttccacccatgatgatagtcgcccaaggctttttgcgtagagagcaaatgcatcggcaacgtaacaggcaaaattctaggaaccggaattgtttggctgcaggttacgtagtccgggatgagccatatgggttcacttctttcagagtatcttcttccgcaagcaatggttttgtacttagtggaacgtttagttcagttgattgcagtgctatatgtttgcaaaactcttcctgtcttgcctatgcttcaaccgagctggatggtacgggttgcgaaatctggaatacttatcctaccaacaaagggtcggcttctcatagtcctagaactatatatatccgtggaaatggtatataacttgtggaaatatattctctgttttttttttttcagtgtcgctttagtaactgcaggaaatctattggacattaagttttctggaatattgaatatgttgtaggtcaagagaacaaaaaagtggcagcttggcatattgttgtggcatcactgttcctcatgatacctatgatttggtttataatctatctcgtgttgaggaaatttaatataaaaggtagaaattgtatcagaattactcacaaaacagttttagtctcaatggttttcttactaacaagttcaccctctttctttctttttatgatccaggacgtgttttatttcgtggaatatactactttctatggagagagctcactcctcaaggtacgtacgtacctgagatttagctgaataatatttgtaaaagcatgtctattaatgtaatatttgctattaatatgttagtgattggtttcatacggaggagaattttatcactaaggtttggttcaacaatagaccaagaaatgctactacgtgaattgggaattgataggagctgcatacacaagagaaatgaaaggaagagtaataacgagcttcagatttttagctttgaaagtgtagtatcggcaacagatgacttctccgatgaaaacaagctcggtgaaggaggttttggtcctgtatataaggtagtccagagtcttcatgtttttttgattaacttaaagcagatttttatgtttctgctactttcttgaagggaaagttattaaatggggaagaagtggctatcaagagactatctttagcatctggccaaggattagtggagtttaaaaacgaagctatacttattgcaaagcttcagcatacaaatcttgttcaggttttagcatctgcatcgaaaaagatgagaaaatgcaaatatatgaatacatgcagaacaagagccttgactacttcctctttgg

SEQ ID NO: 170172 - DNA, 1165 bp, Arabidopsis thaliana landsberg
gttctccagttagtacttctcataatatctatacatattaaaccctttgtgcaagtttggtttagatactgaagactgacaattttcttcttttgcagacgcccttccccagatgtgcttgctcctgtacttcataacattgggactatagctagacaatataatcaccagagccaagtatgtaatcatattccacctatgttgccaccttttggagttatcctttatcaagttaaaaaaactgtcaaaatctatgtttatcataatgtttatatcactataccgcttttagtagagaggatggagtgcttgctttgttatatgttccttgtttacaatgttgcgattagattttgtaaccaaacaacgaagtgctctgaataaacctctttgaacatattctttagattgtgatcaattgtgatgttttacccattcttgccaacctgtttactcgagactatgagaaatacataaagatagaaattttctcaacaatttcaagcatcactgcaggctttacagaacaacttcaggtgagaagcttctgttgcagaacatatacaaatttacccttatgttgctatcactaattgttttctaattgtctttcttgtactgatgataacagtcggttattgatgcaaatttgattccaccgttggtcaatctggctcaacatgcttaatttgacgtaaagaaagaagctgcatgggcaatttcaaatgccaccgtgggtagttctcctaatcaaatcaagtacatccctgtcttctctctatttgatatagctttttattgatcactaaatcacaatctccatatactggtgtggttcagatacttggtggagcagggttgcacaaaacttctatgtgatctcttggtatgtccagatgtaatgatcatctcagtgtgtcttgatgggttggaaaacattttaaaagccggagaggcggcaaataacacaggagacgtcaactgttatcgccaactgattgaagatgcgaaaggagtcaaaaagattgggaacctgcaagaacacgaaagcgtggagatctacaagaaggctttgaagattctggagacatactgggatgtagaggatgttgagatctggctttgatctggttttgcagctgtgagagaactaagttgcagttcc

SEQ ID NO: 170173 - DNA, 2174 bp, Arabidopsis thaliana landsberg
tcaaacaaatttgaaagaagaattatatatttatgtttaaattaaataaaaagtattttagaaaattagttttggtaattaacaaatatgggtagtttagagatattatatatattaaatttggtaattaaattaatttcgcttttagttattttttttgtacaaaatggtaataaaaaccagttatgggagatctaattgaagatttgtgggtcaaaatcaaataaaaaatccgacccaattggattccttaaaatgtacttcaaaaatgttaagtagatacatgtcacgttaggtagaggaccaccatgggagcaaaaatatatcatagtgtcacaggcagaggaccaccatgtttcagaatacattggcaaaattaccatcggattggatccttgctaccactgctagggaagtcacctaaattccttcaactgtatgtctaggataccgaaaatgaaatctccaatcaaatgcaaacaatgtcgcagaaaaagtcagcaaacaaaattcaggaagatgcatgtagttgtggaattgcttaagatgttagatgagcacaactgcttgtgtttgttctgtcggaaagctagagatagctacaaagcaaatgaagttcaagatttaataatgagattggttggccaaaaaggtaagggtaagcaatatgatctaccccaagtcaatgaagttgtagacttgattgtaggggatatgacagctacttctggtcacagagatgttgttttggaattgcagtcacgccacttacaagaaattagagatgatcatcctttgttgttcccttatggtgaatatggattttatacagaaataccacatgtagtctccacagccggcgaaaggaaaagaacttatcttagtatacaagacttctattcttaccaaatccagactaggctagcagaaggaatgacattcataaaggcaggacgcttattccaccaatatgttgttgatgtatacactgtcatcgaacaagagcgacttcgctgggcaaaagacaatcaggaacaacgtattcgatgcagttagtaaaggtgacaccgaaggcataaaagtggggaaaagaataattttaccatcaacttttacaggaggacaaagatacatgatagagaaatatcttgatgcaatggcaatatgtcgtgcatatggtaatcctactttgttcatcacaatgactgcaaacactaattgaccagaaataaaggaacatttggcaacctatggtggcacctcagctaatgagagacttgatattgaatgtcgtgtcttcaagatgaaacttgacgaattgcttatagacctcgagaaaggcacattcttcagtccatctattgctggtaagtccaccaagtttttgtaagtccaccaattactgtctttaagaagtttgttattaaaatattttaaaattttttacagtgctacacacaattgagttccagaaacgcgggctgcctcacgcacatatacttctgtggctagagaagacatctaaaatcccaaccgctgctgaaataaatgcaatcatctctgctgaactacccaacaaaatcacagacccactcggatttgagctttgtagaaaaaacacatgatgcatggtccttgtggaacggatagaccatcatctcctggcagggctaataggtttgcactaaaaagtacccacgctcatacaatgctttcacatctgttgagaaatctggacattttgtctaccgtcgtcggccagaccaagacaatttcgtcgtcaaaggaggaacaaggatagataatcaatttgttatcccgcataatctgccaatcttgaagaaatatcaagcgcacataaatgtggaatggtgcaacacttcaaatgctatcaaatatctattcaaatatgttataaaaggagtaaataaagcaaccattttgatcgagaaaggtacaaccagcaccttcgatattgaaagatacaacaagagttgtaaaggaaaggaataaaattcaagagtatctagattgccgttatttgtctgcttgtaaagctatgtggcgtacttttgcattcaaaatccacaaaaggaaaccatcagttcaaaaattgattatccatctagaaggacaacaattggggctacaaaaagtcagacaatttagggatg

SEQ ID NO: 170174 - DNA, 1191 bp, Arabidopsis thaliana landsberg
  unsure (1)..(1191): unsure at all n locations
ctcgttgataacaagttcacatgggtgattcaaaacttctcgtcttcccaatcaagggtcgtcccttctaatcaattcgttattggtggctgcaagtggtaaacatgataaaccttgtcttttaatgttacaatttggattttctcttttattttgatgacggttcggatttcttttttgatgtaggcgtcttcttgtctatcctgagggattcaataagtctggtgatcatttgtcgctgtttctggaagtggctgatcctagatcattgccacctggatggagtagacatgcacgttatcttttaactattgttaatcaacattctgataaaatctcaaaacgaaacggtaattatatcttacccttattacaacataattaattagtcagataaaccagttaagtaatcttcagtttttatgtcttgtgaggcttgtttttggacttggaatattatatgtttctgaagcgtgtttctgtgttttttttggggtttggtttagttttcaagttttctgccaagttttgaatattgttttcataatctacaggttcatagttaaatttactgattagatgaattctgcttttgtgattttacagaagcaactaagtggtttaatcaaaagattccaggttggggtttgtcagcaatgattccccttactaaacttcatgccaaagatggtggatttcttgtgaatgatgaactcaagatagttgctgaggtaaatgttcttgaagttattggcaaactagatgtaccggaggaatctgaagaggaaacccaagttacccaacctatgaaaaaggtaaaggtagattatgatcatgtggagtctaatgatttgatgatcaacgagactccaccggttagtgaactcatggacgtcaatggttttcaagttcttccttcccaggtaagaaaacttttaagagttttgtagaaatttcaacctcacaagagttatcaaaaatcttgcctttttttttaattcacttgcaggtggattttgtgaagcgtatttttgaaaaacatccagacattgcaaaagatttccgtccaaagaacccacatctgaggaaagcatgcatgaatnnnttgctcagcaataaggaaacattgtgccaaccacctcagaagcaatcaaatgaagatcttggggagcagacaatgcactgacagac

SEQ ID NO: 170175 - DNA, 1929 bp, Arabidopsis thaliana landsberg; identical to SEQ ID NO: 4003
  unsure (1)..(1929): unsure at all n locations

SEQ ID NO: 170176 - DNA, 1734 bp, Arabidopsis thaliana landsberg
tccatggtggatcgaatgcggcaacgttctcatagctggtgcactaagttcttatctggggcaggaaaacagattctacttaaagcggtactctcatctatgccttcttatgctatgagttgtttcaaactgccagtctccttatgcaagcagatacaatcagttctcacacgcttctggtgggattcaaactcggagaaaaggaaaatggcatgggtttcctgggacaagcttactttgccaaagaatgctggtggattagggttcagagagattgctgaattcaatgattctcttttggccaaactaacctggagaatcctcaaggagccaaactcccttttagctcaggttctcttagggaagtactgcacctcctccccacttatggattgcaaggcaccggcttctgcatcccacggctggagagggattttggctggcagagaggtgttacggcggggtttagggtgggctgtgggacagggagaaaaaattaaagtgtggactgatccctggttatcttctcttgtacccacaactcctattggccctccaacagagcagaacaaggaccttttggtgagagatttacttcatgatgatgcaaagagttggaatattttagccataagaacccatttacctcagtatgaggaccaaatcaggaaaattaccatagcttcttcacctcttgaagacagtctggtctggttacctgttaaatcaggtgtgtacacaactaaaactggttatgctcttactaagctgaacagtaccccggtggccaatgtggggttcaactggcagaagagtatttggaagcttcagacttctcccaaagtgaggcatttcctctagaaagttatgagaaatgctctgcctctcggagaggttctgtttcgcaggggactggcggaggatgtgcgatgcaaacgctgtaaccaagtggagaatgcactccatctactcatctgttgcccttttgcaaagaaggtttgggacttagcacctgtcctgttcaagccttcagaggttattcatacgacagttgagcttcttttggtgggggcaaagaaaatggtgacgctccctccaacaggcctctccacggctcctttgtttccatggatcttctggcacctttggaaggctcgaaatttgctgatgtttgaagatcgagcgttcactgaagcagaggtactgttaaaagcgatctctgatgcacgaagttggatggaggcacaacttcttcttccccgtccagaaacaaatcccaaaaccttaccaggagctttagctgcaccatcacctaacccagagtttgtcagctgctatgtagatgctgcttggaatatctcgggtaattgcggtatgggttggttttttcagaccacagacatgatgaagataggagaaaaaaaggtatccaaatgttttgtaggttctgctcttattgcagagacaatggcgatgcaatcggccctcgtagatgctcaatctgcaggtttgcgtcagcttaatgtctgttcagattgtaaggtgttaatctcccttttcaactccggttccagcgttgtcgaacttcgagggctgcttcaagagattagagagttgagtgtttcctttactactatcggtttcttttacattccccgtgcaagtaactttgctgctgattcgttagcgaaagcagctttgtttgatgtaacctctccctccttttttggaggc

SEQ ID NO: 170177 - DNA, 886 bp, Arabidopsis thaliana landsberg; identical to SEQ ID NO: 51177

SEQ ID NO: 170178 - DNA, 537 bp, Arabidopsis thaliana landsberg
atgacgacgatgatgtctcaaccgaagtttgtgccgtgcaacgccgagacgtggccgaatccccacccgatgtacgccgcgctgcgcgagcacgacccggtgcaccacgtggtcccggcgagcgaccccgaccaggactactacgtgctgtcccggcacgccgatgtctgggcggccgccgccgaccatgagacgttctcctcggccaagggcctgaccatcaactacgacgacatggagctgatcggcctggcggccaatccgccgatggtgatgcaggatccaccgggacacaccgacttccgcaagctggtggcccgcgccttcacgcccgcgcacgtcaagcaactcgaaccgcaggtccgcgagttcgcgatcgagcgcatcgaacgattgcgctccaccggcggcggggacatcgtcaccgaactgttcaagccgctgccctcgatggtcgtcgcacacttcctaagggtgaaagcaggccgaccgcgcccagttcgacggctggaccgacgcgatcgtggcggccaccgt

SEQ ID NO: 170179 - DNA, 1514 bp, Arabidopsis thaliana landsberg
atttgacaaggaatcgtttacaaactattgtctaacaaaaccttttgcatgaaggaacaccaattgctgaaagaccgcagaaagagcataagaaaacggacttgccagggagaaaatctctcttctgcttccctcggaaacatctcaagtcatagtagagaaagaggattggataaccgtccatttaaacttattctctccgacggccaaaatgttaaaaagctagggcctggaagagcatctaccaaacatggtgaaagcttaagtgtcaaccttggtgacgaaaaagaagacacagcctttgggagaggtggaaggcaacggcggaaacaaggttctttctttactagtttttatgcatgtttgttagataggcagttttcttcagccccatattgtgtgtgttttcagtgttcacacaaatttggacattatctacttttaatcttccatgttgatattagattttatgttgctatttaaaagcttgatgtagttccaggttcttacgtgactctaagcagctcttcctttttcagcaggttatagaaaatgggaaaaagctgcaatagatggggtctctctggttgctgatgctgcagagcatttggaacgaacatcaattgacaaagatatggatgatcaaacaggtttacttactagtattggatgatagttccttttcttagatatatgttttttgaggactaacatgtgcaaattctaaatcagattctctttttatcttagatttaggtcccacaagatatttaaccggaaagtctccactttctctatgctcagctggtgatgttcctctcagtgatgccaatatgcagttttctgccaagcttaaacttcagctgttcccgattgatgaatgtactcgaagatccttggaaatggtaagcttcaaataggaattatactgattggagcaataattttctgagacatgaaatggagcttgatctgttaacacttaacactttaacaggataagcacaatccgcatcttgaacttactcttagtaatcgcaagaagatatcatctgtacttgaacatctcaatcgcaaatggggaagctcaagttgtgcgactggagagctattgctatttccttacaacgcacgaaaagaaactgtaacgtgccatcagaggtggacccatgactcttttctaagcgcagcagaagtgcattcaatggtcggaagtccttcggttttccgcttaaggtttgctctcatattttcctagtctcttgcaggtttcttctcgtcaaattgtcatacaagataaaccaaaattaatttacttatatgtatttgcaggtatggttggtttgtccatgatgcgtcaggttctattatttctcaagttccaacttcagatccttgcccttcactcgaggatgacatgaatgtggcccggttgaacgaggtcaacatgctccttactaaatcaggacccttgtctgtgcattcaactgctgaacaaacgacggctgtacgcc

SEQ ID NO: 170180 - DNA, 472 bp, Arabidopsis thaliana landsberg
atggagcttcacgttgaaccagaactggtcgggcttgcctccgtcggccatgtcccgaccgtaccgccgacccgcctaggatcgtgggacgtgaccacccccgtcccgaccgtgctgcccggcagggtctcgccgcgccgtccggtgcccgcgcacatcgcgcggccggagtacgtcgaccagcccgctcccgagcggttcaccggctcggaggtgaaggacgccgagaccatcgagcggatgcgcgcggcgtgccggctggccgcgcaggcgcgcgaggaggtcgggcggcacgtggtccccggcgtcaccaccgacgagctggaccgggtcggccacgagttcctctgcgaccacggcgcctacccgtccacgctgggctaccgcggcttcccctggtcgctaggcgccagagtcaaagaggtcgagtgccacggcatccccgacagccgggtcgtgcaggacaacgaca

SEQ ID NO: 170181 - DNA, 453 bp, Arabidopsis thaliana landsberg
agcgacgatgaagctatctccggcaataatcctcgccgtcagatcaaaccaaaaccaccgaaacgtttcgtctcaaagatctgtgtcccgacgctgatcaaaaggtatgagaacgtttcgaattctacagggaataaagcagccggaaaccggaaaacgtagtcgggtttcaaaggcgtacgacggaggccgtgggggaaatttgcggcggagataagaaatccgtttgagaagaagagaaagtggcttggaacgtttcctactgaagaagaagcagcagaagcttaccaaaagagtaaaagagagtttgatgaacgattgggtttagttaaacaggaaaaagacctagtagatttgaccaagccttgcggtgtacgtaaaccagaagagaaagaagttactgagaagtcaaaatgcaaaaaggtaaataagagaattgttactgagaagcca

SEQ ID NO: 170182 - DNA, 1599 bp, Arabidopsis thaliana landsberg
agatggaacaatgccagtgccaatatttagattgtcgattgacaaaaaaaagcatttctccgttggatgaaaaataatttacggttttcagatgcgtactcgtcaaagtttagtcgttgtgttgacgaaaaccattggaagctatctgggctgaaaagccatgattgcaaagtcatcatgcaacgactactgccgtgtgcgtttgcagaacttcttcgtaaaaatgttcacacggccatttcaggtaatttcttatttttctactttgtacttattttttgtattatatttatatcaataaattaatttaactacatatatttttagatatttcactcttctttcgggatatctcatcgaagattttatgcagagatgatgcttttttgttgaagctttgctaggcaatctagtggaatatcggtggatgtatccgttcgagagatacatgtaccatttaaagaggaaagttaagaacaaggcacatattgcgggttcgattgttgcacaatgtgtgaatgaatagatagcaaatacttctgcaaattattttggacgtcctgaaattaaagatgatgatgttccaaatcctggagaaattcgatttacatacttttatccagatgttccaagcttgttctactatgaaggttgtgttagtggaaaagccacaaatggatggtttaatgattatgactatacaatgctccaaacgtttttgctgcttaactgtgatgcctttgaaccttatgaacggtatgaattttttagtatgataatattcgcatatataatattctaacgctaactacaattacaggatgttcgaagagtatacgacggattaaatcccaagaatttctcctaaagaaatggaaaaagcgaaagacgactactttgctgaatggtgtaaagaatatgtaagtataattatttaaataattattgtaaattaatactatatgattacgttctttataattaataactataatgtggttcaatttcagattaacgatgccacggaatcttatgaattttcattgtggatgttggattttgtccaaggtcctaacccgtaattatacatcttggcctatataccactcacgaggatattgttttcatacgcataaccaaggaaaagataagaaaactcaaaattacggtgtttatgttcgtggaaccactgacacggattattatgggttgatagatgagataatgatgtttcaatatcatggggctgttgggttaaaggccatggttttcaaatgcaggtggtttgacacaactatagatagacgaataagaaaacatccatcaggtcgcaccgatgtggcaccgcgtagacactatgaaaaatatgtcctttcatattatctggtaattgtgatcaagtaggtttcattccttatccacgtgtccgacataccgttacaaacgactagtgggcatgtacgaaagttatgcctcgaggtgttcgtgagacctctgaagatgctctaattgctcttcaaaatgatacatataatcactttatcacaccaagtacaatagttctaattgaatcacatgtcgtgaaaaatgatgggggat

SEQ ID NO: 170183 - DNA, 3076 bp, Arabidopsis thaliana landsberg
  unsure (1)..(3076): unsure at all n locations
atagatgttctagactcgttcatctcnccaactccagaagaagcagtcgaattccaaatgacnccaatcgtcagtagcattccttggctactgaagaagtattgctgcccaactctcaccactgagatgacgactgagcctttcagctgtacacgggtaacaggactgtacgacaacaaaggcgatggagactgtgggcctgtggcatgcaagttccttgaaatgcatgctcatggaatggattacactgacatgacggctctaacggatgaagtggtgattaggattcggaaggtttatgcgatggatacatatgctgctttggttgaatgtgaggacgagtactagttatttgttcctaaacttagagtttgggtgtttctaaacttattcggggcttatgacttaagacttatatttaggacttgagatcgaagtatgcatttgtatatttattagatttgaacttatgcttatgacttaaaaaatcgaaagaatgttttttgtatattatttgatgtcaaagaattaatatgacttataacttattattttgtatatacccacggtgtacagattgcttctgtacaccgtgtaaggtgtacggattgttttctgtacagcatacgtagtgtactataagaatagcatacgtagtgtactataagaacagtgtacgaatgggtatttgtacagcatacatattatttgaattaattattaaagaactaattattgtttgaattaattattaaagaactaattattgtggcgtactggaagagaacgtatactgtttgaattaattattaaagaactaattattgttttttaagaacttagttgttgatgtttaatgtgtttgaacggcagatgcggtgtacacattggagactgtacatatattaagatgtacagattgttctgtagatcgtctgtggtgtacggattgttatttgtacagtgaattgggtgtacggctgttatctttacagtgaattgggtgtacggactgttatgattcatctacataggttattgttggcttgtgattttacatatggtttctgtatcgtatataaagcatacggatttgttcttatatttcaatgtacaaatttgttctgtacaacgcctgtggtgtacggatgtttcattagtacaatagtccagataggtttaggttaaagtatgaaggttagttttgtttttgtttcctataaatatgtccttagcggttcgtctactcatccacacctcattttctttgctcctttttaacttcataaacctcaaaagtaatatctttataagatttactagatgatatcttccatattattgtgaagaagctgggagatgatgacgcatattacctagctccggtgatactcacaaacaaacgaggaagggacattgcactctcgagggacattgtaaagtcagcaaatctagctgctttatgtctcgagccaccgaaaatatatcctggtggtgtagctagaagcttctttacgcgtcaggctctttattatgaagctttgcgtttagtgacccgtgaaagggatatacaaggttcccttgctttgctaaatgaactagttcctgatgatgaatcggcgactgtggcctatgccatgttccaaatgtgtgctgaaaggggtgatctagccggggctacattcgacatgatattcgacagcttaggtggtcggcttttgtttaatatttactctcccgatttggaagaagaatgtgaaggtttgattgacacactgttatcatatgaacctcctaatgaaaataccattggcccgaatatgggagttcgcttattctaagaagataagtatgcatgattgtgcttattagcatgaagaggaatattattgcgaagaatgttacatcttcaatgcaacattacgaatatgcgaaatcctttagaacttctagcattgaggataacttttgatgtaacattataatattcaaattcagttattgtataattacgttgcattttggataattatgtaagattttggaagaatatatgattgattaccttgtataataataaagtataattacgccccccatatatgtataattagtttgaacaatgtctcgatttcttagttgaatactttcggtcatgtaacgttatctctcaacgttatctcttatttttgtagattcttttttcttaaaagcaacaccttggcgttgtggcatagttgtggaagtctagtttgggcgttgcaagcttagtaattattattgtcagtcggtggtagaaagagagatcactttctatatggatactttaatgtagtataatgtataatgttacgaatatattattcagaagaagactgattactattttttctattatttaaaaaatatattatttcttaagatgtgttagtttttcattttatacataagcaaactcactattaaagtgtttatgatttattttacacatttgctttagtcctacttaaaatacgaataaattgctttgcagtataacaaatatagcatctcaaatataataaaatattgcatttagaatatctagatctaaaatattaagcattacaataatcaatttaaataatctaataaactataaaaggtaactcaaatcgacaacatggacatttatcatcatttagatgtgcatttgcttattgtatcatatcattttgcaccattttagcttattttgcatacttaggcatctaggatcatcttgcatacgcattgcatgttttgngtgtgttttttaggtgcagaaggagctcaaaaggactctactcgatccatgcagatacagaagaggcatcatttcactcgatccattcactcgatcaaggcagctacagaagaggcatcaattcagtcgacccctttactcgatcaaggcagccttagatgaagcagcagattgatctactcgcccctcttcctcgatcctctactcgaccagtttactcgataaagaggaacctactctacaagacttgtcgatcatttaaagtgtcttttgatcctcctcattccccac

SEQ ID NO: 170184 - DNA, 1782 bp, Arabidopsis thaliana landsberg; identical to SEQ ID NO: 17459

SEQ ID NO: 170185 - DNA, 1799 bp, Arabidopsis thaliana landsberg
gattaagtgtccaaaatgcaaacggattgattagctcagtacttaacaaaagcagtgttttgttttttggtctaaacatcaaaagctgacaatagatgataatgcaggctattttgttggggcataccgattcatacaccagagacaaaatgatgcaagtaaccattgcatacaaccattttggagaaggtcttatacagagaatgccaaggtttttcatctaaatttcatatcattttttctgtgacaatacttgtatattgatttttccttagagaaccagtcagttttcgaatgttatagagtttggtgttatttcaggtgcaggcatggatactttcacgtagtaaacaacgattacactcactgggaaatgtatgcaattggtggaagtgctaaccctaccatcaacagtcaaggaaaccggttccttgcccccggaaaccgtttcgctaaggaggtatttgatcaaacccgttacactggttgcaagattgctcaaagatgcatctaagttagaagatataatctgatagttctaatcaagacaattgaacataaatttgaatatttgtttcgacaggtgacgaaacgggtaggtgcagggaaaggagaatggaacaattggaattggagatcccaaggagacttaatgctaaatggtgcctactttacttcatctggagctggagcttctgcaaattacgctagagcctctagtttggctgctaaatcatcttcccttgtaggtatgcttacctctagctctggtgctttgaaatgcaggatcggtacactttgttaattatttgtatttgtataaccaaagccgaacacatagaaaatatatgaaaactgcgagaacgaagaaaaaagaactcattcttcgttgttcccatgttttgatttcaagttgtagtatagtgcattgctctactagtgtatatctacaatatcttcttcttacaaatcatcttcactctatatactattatttctcttcttgttctgtatatacctgattaataacgaggccatgcctacaataccggtcattaaacctatcacaagaccagtaacagcagttccccacaacctagaggaacctagacatggttttatagctaacccacaaagacttggactgttcccttcaaagacaagttttaatccaccaaaacttggtaatactccagtgaagttattgtcagaaaggtttatgtttttcgagttttaacagagtcaatcccctcaggaacaacaccctcaaacgtgttacttgacaaatcaagctcctttaaacttgggtataaactcagggaaaccaccagatatgtttttaccaccaaaatcaagaactacaagtagaatctggcgaagcaggctcaggaaaatccccaaacaacaaactttcatgaaccctgaaggctaacatgggaagtgagaacaaagagcaaaaaccaaagtttggaaaagagaaagagtaacaacgtttcttggcatataaacatgttccttcacattgctacacatccaaatgaaaaaacgagtacacactaacaagagtatcacaagagacatacaccacaaactcaaaaaaccatttattttgttatactgtttaccaagaggaaagtgatgctttgtgtttttgtttatctataaagtaatccctcaaaggtaaagaatatacatcggacttgttaacaacatgtgaagcatccgataagagagaacattgcaggataaaagaaccagaagaaaaaaaggtaaaagagagattaagcaatgagaaatga

SEQ ID NO: 170186 - DNA, 620 bp, Arabidopsis thaliana landsberg; identical to SEQ ID NO: 34508

SEQ ID NO: 170187 - DNA, 1161 bp, Arabidopsis thaliana landsberg; identical to SEQ ID NO: 1330

SEQ ID NO: 170188 - DNA, 504 bp, Arabidopsis thaliana landsberg
ggccgcgaggcgatcatcctcggaccgcagacaagcgacttcctcggcaaggacctctccctgctggaggtggcctacggtgccggtatcagggtgctgcaactgacctaccagacccagaactacatcggtagcggatgcggcgaggcgaacgacgacgggctctcgcgcttcgggcgcgacgtggtcaaggagatgaaccggatcggcatggtggtggacgtctcgcactgcggcccggccacgacagcggacgccatcgagctgtccgagctgccgatcgtgatcagccacagccaccccgcggccaagtcgccgcacatccgcgcgaagtccgacgacatcctccgcgcgctggcggacaacggcggggtgatgggcctcaccgccctgtgcggattcctgcactatcccgacgaaccgagccgccgtcccacgatggcccgctgggtggaacatgctctgcacgtcatcacctcgtcggtgtggaccacctcggcatcg

SEQ ID NO: 170189 - DNA, 358 bp, Arabidopsis thaliana landsberg
atgggcacagcaaccaactgcaagttagccgttatcaccggcgcgtcgtcgggcattgggctcgagctcgcgcggcaatgcatcgagcacgacttcgacatcatgatcgccgccgaagacgaaggaatccacgaagccgctcggcatctcggcgctgcgggcgcggtcgtcgaagctgtccattgcgacctctcgacgttcgaaggctgcgagaagctcgtcgcggcggtcaacaactcgaaccgccacctagatgcactgttgctcaacgccggagtaggtgtccccggctccctcgtgcaaacggacctcgaaaaagagaaaaagatgatcgcacacaatgcaaacgcggtcgtcc

SEQ ID NO: 170190 - DNA, 2955 bp, Arabidopsis thaliana landsberg
  unsure (1)..(2955): unsure at all n locations
tcgcgtttgagacgaaggcgagcgccttctccccgtgacacgccaatctcaagcaagcggacgacaccagcacgctcgcgaaaagcttgctggacgtcaaccttgtacctgagacgacggcgcagtcagtccacgacgtgacctcatcgccgcccgtcgaccagaaggtaccgaccgattcccatcccacgtctttcggattcagcctcgacccacctagcgcttcgctttggtgggtgctctcgtagaggcaagtccaaaccctctggggtttcgtacgaggtcaccttgggaccggctgacggacgtctcgacctacgggccctctgggtccgaggaagacgacgagcccagcatctgttgggatttctctagacttggcaaccccagtgccatgcgggacttcatgaccgcatgcgactactgcctttccgactgttccgacggcagccgcagccttgacgacaaggactgcggcccgagccggaactgtttccacgtcgagctaggggatccctccggaggcagccgtctcgcgtgccggaggatggtgatctccctaggccagtgcctcgcgccgacatcccacgggagctagctgtggtccccgttccggcggggggtcacgacccacagctcgagcaagtccgcggggcgcaggccgggctcgacgaggaggcaggagcgctcgagtcgatccgccgggacgtcgggcaggtatgggcgggccagcccccggccggagaaatacgtcacctgccccagggtctctagcaccgcatcgccaacgatgctagggacaggccgccacccgcatccggcggggttggtcaggacctggcagccgcagcgatgctcctccgcgcgatgccagagccatcaaccaccgagggtcggcgaatccagggagagctcaagaatctcctggaaggcgctgcggcccgacgggccgagagcactgcctcccgaaggcaaggatatccctcggaacctcatgccgcgacttcccgattcatgcgggaagcctcggtctacaccgggcgcacgcgcaacaccgcgcctgcgccccgggccacctcggcaacgagcaccatcgacgcgaccgtcgggcccacctcgacgaaagggtgcgccgaggctaccaccccaggcgtggggggcgctacgacagcggggaggatcggagtccctcgcccgaaccacccggtccgcaggccttcagtcgggccatccgacgggcgccattcccgacccggttccgacccccaactactatcacgaagtactcgggggagacgagaccggaactgtggctcgcggactaccgccttgcctgccaactgggtggaacggacgacgacaacctcatcatccgtaacctccccctgttcctctccgacactgctcgcgcctggttggagcacctgcctccggggcagatctccaactgggacgacttggtccaagccttcgctggcaatttccagggcacatacgtgcgccccgggaattcttgggaccttcgaagctgccggcaacagccgggggagtcgctccgggactacatccggcgattctcgaagcagcgcaccgagctgcccaacatcaccgactcggatgtcatcggcgcgttcctcgccggcaccacttgccgcgacctggtgagcaagctgggtcgcaaaacccccaccagggcgagcgagctgatggacatcgccaccaagttcgcctctggccaggaggcggtcgaggctatcttccgaaaggacaagcagccccagggccgcccatcggaagaagctcccgaggcgtctgctccgcgcggcgccaagaagaaaggcaagaagaagtcgcaatcgaaacgcgacgccgccgacgcggaccttgtcgccgccgccgagtataagaaccctcggaagccccccggaggtgcaaacctcttcgacaagatgctcaaggagccgtgcccctaccatcaggggcccgtcaagcacaccctcgaggagtgcgttatgcttcggcgtcacttccacagggccgggccacccgccgagggtgcangtggcccgcgacgacgacaagaacgaagatcacccagcgggggagttccccgaggtccgcgactgcttcatgatctatggagggcatgcggcgaatacctcggctcggcaccgcaagcaagagcgccgggaggtctgctcagtgaaggtggcggcgcagtctacctagactggtccgacaagcccatcactttcgaccgggccgaccaccccgaccatgtgccgagcccggggaaatacccgctcgtcgtcgaccccgtcgtcggcgatgtcaggctcaccaaggttctgatggacgggggcagctgcctcaacatcatctacgccgagaccctcaagctcatgcgcgtcgatccgtcctccgtccgaggaggcgctgcgccttccacgggatcatcctgggaagcgcgtcagccctcggcgactcgaccttcccgtctgcttcgggacaccctccaacttccgaaggagaccctgacgttcgaggtggtcgggttccgaggaacctaccacgcggtactgggaaggccatgctacgcgaagttcatggccgtccccaactacacctacctgaagctcaagatgccgggccccaacggggtcatcaccgtcggccccacgtacaagcacgcgttcgaatgcgacgtggagtgcgtggagtacgccgaggccctcgcctagtccgaggccctcatcgccgacctagaaagcctctccaaagaggtgccagacgtgaagcgtcatgccggcaacttcgagccagtggagatggtcaaggccgtccccctcgaccccagtggcgacgtctccaagcaaatccggatcggctccgggctcgaccccaaataggaagcagtgctcgtcgactttctccgcgcaaacgccgacgtcttcg

SEQ ID NO: 170191 - DNA, 919 bp, Arabidopsis thaliana landsberg
tttttaattacttaattaagccatatccacatgactagaagatatctttaacttatgattgcaacatttatatattatgttttagttattgatattcttacttcattataaatccaaaagatcagcagaagattgatacaatttttattagatcacaatactataagcattatcattaaattgtgagaaatctagcttagacatttgcttcttaattatttcctttaatttgacttgtttttgtttttgatatactgatttgatttttgaaattttaatttcagtatacctaaaacagtagaaagatatcaaaagcgaatacaagatctcgggtctaaccataagagaaatgataattcacaggtaaccaaacttcatagaattgttagtttatcatggttattttcatatatatacatttgctaaaaataaacttatccagagctcaagtaaaaagaaattctatatcaatatctagtacaattttatggtgtagatcctttggtgtaccacttttaaaaaattaatatacatgctaaagtgtatgctttatttatcgaacatgggtgataattttttatattaatatttgtacttacaattttggttaagaaaatatgttttgcatttctcatgatcaaaccttgttgacagcaatcgaaggacgaaacctatggcttggcgagaaagatcgaacatttggagatttcgacacggtttttgaactcaaaatacttatacgaatattttgttatgaatgtaacgtttacattgtaagcgtctatttaccatatgtttaaaaaatatatacatttgcagaaaaatgatgggagaaggacttgacgcatcttctatagaagagttacaacaattggagaaccagttggacagaagcttaatgaaaataagagccaaaaag

SEQ ID NO: 170192 - DNA, 424 bp, Arabidopsis thaliana landsberg
taactccaaaaagaatgtccgtagaacttgttgatattgcctccgaagaggacgatttatttgaacattaccgcattgtcgccgacaaaggccaaagcctcatgcggctcgataaattcctgaatcttcatgtggccaatgcttcgaggacaaaaatacaaaacgggatcgaagcagaggccgtaaaggtaaatgggcagccgacgaaggctagctacaaggtcaagccgctggacgtaatcacactttccttaccggagccgccgcgggataccgaaatcgttcccgaaaacattccgctgaatatcgtgtatgaggacgacgtgctgatgctcattcataagccggcaggaatggtcgttcacaccgcttatggcaactggaccggcacgctgatcaatggattggtatagcatttccagca

SEQ ID NO: 170193 - DNA, 705 bp, Arabidopsis thaliana landsberg
taaaattaatcgggtcaagtttaaatctcgtaatattacgggtctgtttgttaatttatgaaagttaatcgttatgataaattaaggaaggaaagttctgattatgacaataacaaccccgcggtttgtttgacaggtgatgcaaaggagtttcccacagcttggactaacgaagaaagattgtttagagacaagctggatcaaatcggtgatgtacattgcaggttttccaagcactgccccatcagaagctttactcgatgggaaatcgttgttcaagaattacttcaaagccaagtcagactatgtggaagagccaattccagtagagggattagaagggttgtgggagaagcttctagaagaggactcaccattgactatatggaatccttatggaggaatgatggcaaaaattcccgagacagagacacctttcccacataggagtgggacattgttcaagatacaatggctgactttgtggcaagatgggaaaacaagcgaggcgaagcatatggggtggatgagggaaatgtatagttacatggagcagtatgtatcgaaaagcccgagatccgcgtacgtgaactatagagatcttgatttggggatgaatggtaaagggagtgatgcaagagaatgggggaataggtatttcaagggtaattttgaaaggttggtggagattaaagctaagtttga

SEQ ID NO: 170194 - DNA, 603 bp, Arabidopsis thaliana landsberg
tgcacatcccgagcagcaacgcgaagtcgacgcctgcctggcgtggagcggtcagcgaccggtggcctggctgcacgatcatgccgacgtcgatgcgcgctggtgcctggtgcacgccacgcatgtcgacgaacacgagctggcgcgcatcgccgccagcggcgccgtcatcggcctgtgtccgatcaccgaagccaatctcggcgacggcatctttccggcggtgcgccatcgcgcgctcggcggtcgctggggcatcggctctgactcgaacgtgcgcatcgacgccgccgaggagctgcgcacgctcgaatacggccagcgtttgcagcagcgggcgcgcaaccgtctcgccgcacccggcacttcgaccggccgcagcctgttcgacgccgcactggccggcggcgcccatgcgctcggcgtcggcagcgccgcgctgcgcatcggcgcgccgctcgacctcgtcagtctcgacgccatggacgcggcgctcgccgtgcaccgcgaccacgcgatcctcgatgcctggatcttcgccggaaaccgcagcctgatcgactgcgtgtggcggcgcgggacgcgcgtggtcagcggcgtccg

SEQ ID NO: 170195 - DNA, 1011 bp, Arabidopsis thaliana landsberg; identical to SEQ ID NO: 29980
  unsure (1)..(1011): unsure at all n locations

SEQ ID NO: 170196 - DNA, 560 bp, Arabidopsis thaliana landsberg
ctctctctctgtatctagaaaagagagattcctcagtatcagccatgaaagtaatgaacaaaggtaaagtgcagccatctcctcatctgccatgttcttcttctttgaatggagatgactctctatgtgtcagtaaggttctcaagagtccgattctagttctagtctcggttctctcctctgaagatctggaagttcctgctagcttaatcaccaggtcagtcaacaccgcgatcgtggtatagtgcaagaagaagagaagccatacagctcctttgcttggctgtcaatgttttgattgctacacaagttactggtctaaatgggattcttcgtctaaccgtgagctcatcatccagatcatagaagcctttgaagatcatctcaccagggacgagatctctgcttcccacacttccaagaaaaacaagaagagagctaagaagatagagatatcggaagaacaacctcaaaataagagtatatggttattggttagctagttgaaaaactgtgctattttgcatcaggttttgcatattcttccttcttttgggttg

SEQ ID NO: 170197 - DNA, 1666 bp, Arabidopsis thaliana landsberg
  unsure (1)..(1666): unsure at all n locations
atggattcagggaaggatatgtggtcgaggctgtgtttactggcggaaactgtggttatggctgcggaggaagaagaacaacgtcgtcgtctacttgcagagaaaagagaagattcaaagagtcagaagaagactgtctctgaagaagacgatagcgagaagagattcttatctcatgtcccgaggaaaaaaaggtcgtctttggtaaagagacagcaaaaacctaatggtgtttctacttcttcttcgtcgcttcctgatcttaaccaaatccccattgattacgagactgaaaccaaacaaaaccctagttttattgagcgtttggtgtgtgatgaagaacaacgtgtgaagaaaggcaaatccaggattatatgggaagaagaggaggaagcggacgaagacagcgagaagagacttttcgagaagaacctgatgaaatttgtaagacacagccaacagccacaaaattttgaaactctcaatggggcttcatcttcttcatcgttcttgaaccttcgttgttatgaggcttcgttattcttggattacaacacggttgagtcagagaagacagagacgaaagttctaccaaaccctaattaccaatcttcttctccgtcttcatgcctaacggagaacgacacaagtcgcaagaggcgtgccgtggaacagaggaagagtggtaaagtcaagaaagtaaaggtttctcctttgccaaggttgtctacagagacgcctaagtgggttttccaagcgatgggacacatgaacgctgatgctgaaaccccgaagctgatctttgaaaggactctgttcaagagtgatgtcaactctaacctcagccgtctcttaatcccattccagaagctaatcagaaacgacttcttgacgccagaggagtgtcgagccatgcaggaagacaaagacaaagacgacgaagatattggtgtgggaacgattcttgtgtgtcaagccaagcaggaagacgaagacaaagacgacgaagatattggtgcgggaacgattcttgtgaaccaaagatttaaaatgtggggtttgcgtttcaagatatgggggatggagaaggactctggacatggaaccttgaattacattttgaattgggactggaatgatgtcgtcaaaggtaacagcttaaaagccggcgacaatatcggtctttggactttcaggtgccgtggagtcctctgctttgctcttgacacatggtaggtagctctctgatatgtttcatttgtctcttgaggtctcatttaacaaatttcaagtgattcttgaggtttttggctttttagtatagtaactggttctctcctctattgttaggattagtagtagtagtatgttaactntgtccgtctcctctgttgtttcagacctttaccattgtttgaaatgaacacatttggtcataaatatggtttcttgttttgtctactttacttactgcattgttcaatatacctttgtgttgtctcagatctctcctctaaacctgttgtaatgatggaaatgatctattcctgctaatgttttgtgtactattcctccgaaatgctcgatgcagtcagtttgatcaaatttagaaccaaaacaatcaaaaatgtcagagaaaaagcaagttttgatttcattacatgag

SEQ ID NO: 170198 - DNA, 2183 bp, Arabidopsis thaliana landsberg
gtgggttatggtcggtgagtggaaatgcaaagaaggagaatggaaatttgaacctgaggaaggcatgtttggtcgttgtgtacgcgttcaggaaaccatgacgtacacggactttgtccgtacactccgagacgctttcagtttgaagtccaccgagatcaatcccataattagctactggatgccgggagagatgttagtgatgatagatactaaacgccctcctgtctacattgatagtgaagtggggttgaatacgttcttttttatttgtggtcagtatccttctctcaacttgtttgtctctttcattacaaccgtcaagacactcggaaataatgtctctaggactcatggtgacgatgctgaaagtgactgtgtgtgtgatagtgtttcaaatgttgatgaaaataatgaggtcgtagatgagcaagacgacgttgaagacgataacacagatgaggatgaagaggagggggacaacgaagatggtgatgggtatgatgcttattagggtgaagatggatctattgggggaagtaccctcgatcctactattgacggtagtgaaagtagtggtgaagattatgattacaacaagtagaacgatgtaattgtagaagaatatggaatagggaatgttgaggagaacgtcattctcacaccaggggaattcagtcgtttattggcagagtgtacgtacacaagtcaacgtgtacctcgcggagataacatttctcattcgggtgaccgtacaccagctgtgcctctaagaagtatgtgtcaacatggtttgtaccaatgtacgttcactatagattgagaagtgtttttaagaacagaaaagttatacaacaaacaatgtcttatctcagccactaccaatattggtttaatattgtatcaataaatttttcttgataatttaattcacaaacaaagatgtacgtatcttattacccatgtacatacattcatttaccaacaaaaatatacgtacattattacacatatacgtacataactttcaatatgaggaacaaatattatttcaccatctatttctatttaattattatgtatgtatggagattattgagatataagaatacgtaataaaatagcttgagttattagaaatcataccatatacgttcgactaaataattttgtgtacgtacactttaaattgaatatacgtacacagaagaaatttaatgaagggtataattgtaattttccagtcatcttcaacctcttcttccctaattttgcagccgcttgttaactcattaacatccgaaactcctcgccgccgactactcttcttcatctccgccatttgactatgaacaataattcaagaaaccagaaaatcctctttttgttatcctttatcacgagctcgatcgaaatttcctcaacttaagcaacgactagaactcgcacagagcctcaatcgaaatttcactttcgatcagagtttgtgtttcgtcggaattgttcttcgtcttcgacaaacagtttttgatttcctttggttgtcagaaagttaataacgtgttttttatttaattttaaatttaaattttggtaacaagaaaaataaagtaacgaaactgaaccgcctcctttcatttctcgttccaaggcaaatttgtccatttttggctgaatggctaaaatctggttgggccagcccactttgtctttttgtgaaagaaaaagtcagaaagggtgtccacggtaaaaatttcttttatatctttagctcattctgtttttggtggttatcgagtttgtcgtatcaagtgagagagagagatcctttgtagagagagaaatttatcggtgatctagtggattctggagaatctccggagagacgtacgctaacctcaccggatagctgaactcattaaagcttggtgtcgtttctttcattctaaaaaaaacacacgagagacgagagtgttttggtgagctgaacttgaagtcgattcatcttgaatcgtacagtaatgctgaccagaaccagccgctttcatcgatgtaactgcttgcaatggctccctacatttttcaactctcatgtctaatccaacattctgacatcgattttgcatcttcttgtggggaacattgggagacagtgacctcgatgaggctaatctgcatgtact

SEQ ID NO: 170199 - DNA, 1653 bp, Arabidopsis thaliana landsberg; identical to SEQ ID NO: 9794

SEQ ID NO: 170200 - DNA, 690 bp, Arabidopsis thaliana landsberg
caccggcgcagccggcttgcaggacaccgtcaacacccctggatctccgggctcggcgtcgactacagcctcggcatcgacggcctcaacctcttcctcgtgctgctgaccgcggtgctctgggtcggcgggatcgccttcgccgccttccgcgagcaggagcgcccgcagctcttcttcttcctcatgctggcggcggagaccgcgacgctgggctcgttcctctcccaggacctgctgctcttcgtcctcttcttcgacctgatgctggtgccgttctacttcctcttcggcgcctggggcgtcgatcgctcggccgaaggcgggccgacggcgccgcaggcgacgctgaagatgatggtctacacgctgatcggctcgctgctgatgctggtcggggcgatcgcgacggcgatcatctccgcccacggcggccacctcaccttctcgatccaggcgatctccgaacagggcgtgccgctcggcagccagcgctggatcttctggttcttcgccgccgccttcctggtcaagatgccggccttcctgatccacggctggatgcccgacgcctaccgcgcggcgccgctgccggtgctggtggtcttctccggggtgctggcgaaggtcggcgcctacgggttcctgcgggtggtgctgccgctcttcccgcaggcgacggcgcagttc

SEQ ID NO: 170201 - DNA, 1325 bp, Arabidopsis thaliana landsberg
tatccgtaaaagcatctcccgagagtcaactcacgagtgtagacctaagctcaaatgcttttcaaggaccactcttcctcccgtccaagtctctcagatatttttctggttccaacaataacttcaccggaaagatacctcgatcaatatgtggactaagctctctagagatcctagatctatcaaacaacaacctcaacggctcactcccttggtgtttagaaactcttatgagttctctttcagatctagatctccgtaataacagcctcagcggaagtcttcctgaaatatttatgaatgccacgaagttaaggtcacttgacgtcagccacaaccgaatggagggaaagcttcctggttctcttactggttgctcttctctggaagttctaaatgtgggaagcaatagaatcaacgacatgtttccgttcgagttgatatctttgcagaagcttcaagttcttgtcctccactctaacaagtttcatggcacattacataacgttgatggggtttggtttggatttcctcagttgcaaatcattgatgtatcacataatgacttcgtcggtatcttgccatctgattacttcatgaactggactgcgatgtcctccaagaaagataataatatagagccagagtacattcagaatcctagtgtatacggttcctcacttggctactacacttcacttgtcttgatgagtaaaggagtatcaatggagatggaacgtgtccttacaatctacacgggcatcgatttttcagggaatcaactacatggaaagattcctgattctatttgtctgctgaaggagcttcgaattctgaacatgtcaaggaatgctttcacgggctacatcccatcttctttagcaaacctgaagaatctcgagtcactcgacatatcccaaaacaatatctctggtgagattcctcctgagcttgggactctctcttctctcgcgtggataaacgtttcacataaccagcttgtaggttccataccacaaggcacacaatttcaacggcaaaaatgctcttcctacgaaggaaaccccggacttaatggtccttctcttgagaatgtttgtggacatatcaaagagtcaacaccaacacaaagcgaaccgttggagacaaaagaagaagaagaagaagaatcatttagttggatagcagcaggtttaggctttgcacctggagttgtatttggactagcgatgggatacatagtggtttcacacaagcatcaatggttcatgaagactttcggacgaagcaagcaacagaacaccagaactcgttaagtcagccat

SEQ ID NO: 170202 - DNA, 355 bp, Arabidopsis thaliana landsberg
tcttctttgacattcatcacacagccaatatctctttgggcaatcttctttcttagagagcctaccaaatattgaaaatccgtatgatcaaacccaaggcctctctcacattgacgatcagcctctggattcgttttctagcccgattcgagtagttgcttatcaacatgatcagaattttattccgcccttgatttcgacatctcctgatgagtctaaggaaacccaaatgatggtcaagaacaaggaaatcatgaagtataatgatcatacttcaaacccttcgtcgacctcagcttttacacaagatcaccagccatggtgtgacataattgatgatgaaacaagtgattct

SEQ ID NO: 170203 - DNA, 1642 bp, Arabidopsis thaliana landsberg
ctggggaagcacaagtgagaagcggaaacaacaccttatctcatggaagcgagtttgtactcttaaacaggaaggaggtttggggatcaagagggctcaagacatgaacaaggctttgttagcaaaacttggctggcggttattaactgatcatcaaagtttgtgggcacgtattttgagacggaagtataaggtaggtgacactcacaacatcgcttggactgtgcctaaaagtacttggtcttcaacttggcgtagtgttggattggggattcgtgaagttgtgctgcagggacagagttgggttcttggagatgggagagacatccttttctggaaggatagatggctcacgaatgaaccaatcattgattctgcagttgatgttgtgccggctgaccgggttaatgattgcgttagcgatctgtggtgggatggtagaggttgggagttagggcgctttctcccatacaacacagaaaatacacgtttaagattgggggccttagtggttgataagattacaggaactcgggaccatttgtcttggggcctaactgtggatggcgccttcacagttaagtctgcttactccctcttaactcggtctggtgagttacgcccgaacatggagaagttctggagttgtgtgtggagctgcatggttccagagagggtgagattgtttttgtggttagtaggaaaccaagcgattatgtccaatgctgagagatatcggccgtcatctctgtgattctacaatctgtcaagtgtgtaaagggggggaggagaccatcttacatattttgagggattgcccagctatgagtgggatatggcagcgcatagttccgccaagtaaggtacatcagttcttcacaatgtccttattagagtggctgtatgcgaatttgagtgtggaagtgaggatggaacactttttatggtcaacgatatttggtatggctttatggtggggttggaaatggcgttgtggtaatctcttcggggtaaatggcaaatgcagagatagagttggtttcattaagaagctagctaaggaagttaatgatgctaatgtacttggacgtggaggacaaggaccgagggttagagtggaacgcatggtcaaatgggagccaccgcggagtgggtggttgaaactgaatactgatggggcgtcacggggaaatccgggccgagcttcagctggtggggtcttacgggatgcgttgggcgaatggaaaaaagggtttgcgctaaatataggcatatgttctgccccattagctgaactatggggggtatattatggcttgtatatagcttggcagaagagggtgacaaacttagagttggcggtggactcgaaggtggtggtggggtttctcaaaacaggtgtgagcgctacgtatcccctgtctttcctggtgcggttgtgccacggctacatctcaaaagactggaatgtccatatctatcacacgtatagggaggctaatcgtcttgccgatgggttagctactatgctttttctttacagttaggatttcatatgttggagactactccgcatgatgttgttatgattgtttcggatgatgctcgtggaactgcgattccacggcaagtttgtatttga

SEQ ID NO: 170204 - DNA, 1081 bp, Arabidopsis thaliana landsberg
aaaacctattacatatccaaaagttgttcagtttactgagtactgtttcttttatagacgtacctattcttgatgggggaagaaagtaagagtggttctagatgttggttgtgtggggctagctttgggggactttacttgataagaacgttatcacaatgtcatttgctcctaaagacgaacacgaagctcagattcagttcgcactggaacgagggattcccgctacactcgctgttattggaactcaaaagcttccttttcctgataatgcttacgacgtaatccattgcgctagatgcagagtccattggcatggatacggttgttatactccaaatatatccttgcttttgaatcagtgaacttgcttgctttgttaatactgttgttatatggaaatgtgttgttgcaggtggtagaccacttttggaacttaaccgggttctaaggcctggagggttttttgtttggtcagctacaccagtttatcaacacgacgaagggcaccgtaatgtttggaaaagttagttttacttgttcttcttagtccctcctcattatgtttaattagcatacagaagacgtttgtgaatgttttatggtttgtatgtgtttttcttgcagcaatggagtctttgactacatcaatgtgttggaaagttgtggctagaactcgattcactaaagttggattcgtgatttaccagaaaccagactcagattcttcttatgaatctcgtaaaaacaaagatccgcctctctgcattgaagaagagaccaagaagaacagttcatggtaatgacattgtatccttaaatatatcatttcaacaaaaaaaacagagtttttgatgtctcttaaaccaattcataacaatttttcgaatcaaaaggagcactcctatgcttacttgtctaccgaaacaaccggtcagtccaataggggaatggccttccggttggcctgagaggttagcgtagacaccggttagcctctttagacagcagaggagtgaagagagtttcaaaaaagacagcaaactctggtctggagtcatgtataatatctaccgatata

SEQ ID NO: 170205 - DNA, 279 bp, Arabidopsis thaliana landsberg
atggtggttacacgatcgcatgtcggggagtcaaaggataagggaaaggaagtggagattgcggagccgatagagtcactaattttatggttagaagagttggtcgcaaagcaaaacaaagcaatgatgaggcctatgtcggatatgatgggtgcaataagtagatccacatctcataagcttcatgatgaacagtcaaccagagattggatcttaccgaggtcatctacgtcaacagatgacaggtcgggtcatccagattatcggagggaaaatcga

SEQ ID NO: 170206 - DNA, 706 bp, Arabidopsis thaliana landsberg
atgcagcaaaccttagacattattcagagtcaattgggtcatatgattgaacacaacaacaaattcaagaaagccagcgagagaatcaccatccgcaaagttcctgaagctcgtgatgatgatgagagacttaggaattcgcgtgtttaaaggagaacataacacggtcgcggcagacaagtggctacgagaccttgagacgaattttgagatttctcgatgtcctgacaatttcaagagacagatcgcggttaacttcttggacaaggatgcacgaatttagaagagaattcaaaaagaagtactttccaccggaggcccgtgatcgattggagcagcaattcatgaacttagcacaagagacaaggagtgtctaagcatacgaacaagctttcacgcgactaaggaggtacttatacaacggacaagatgatgaagcattgatggttcgcaggttcttgagaggactcaggctagagatatggggacgactacaagcggtcaaatatgacagtgtcaatgagctaaccgaatgggcagttaatgtggaggagggtattgagatggagaagagtgtaaccaacaaggaaaatgattgatcgggagggaggaagactaataacgcggaggccaaaaacaacgctcctaaattcacaccaaatcaggagagagacaatgatcgaggaagagcaagagcgaacttcac

SEQ ID NO: 170207 - DNA, 963 bp, Arabidopsis thaliana landsberg
cacaacaacaaagtctccaagagacttactatgacatgggttcctcttctttgcatttcttgctttttcctcggagcaatcttcacctccaagttctgtttcttcttcttcatcaatctttctacggttactttaacaaaacaaaaaaaaatctttctacggttacacaataaataatttcatgtcttcttgctttctcattatttttgttgttgttgttgttgttgcattttcagattacgatcagcttcgtcggattccggtagccagctcattttacagcaccggcgtgatcaggagcttaagattgttacccaagattatgctcatgagaaagtttctttcttagaacaattaatctcattgaatctgaatttctcctatgagtattaattttggtgttaaaacaaaaaaactcattattttcaatcttttgatttcaccaaaatacagaagaaatcacaagacaatgatgtaatggaagaggttttaaaaactcataaagcaatcgagtgagtgagaaatgattatttttttgtgtgaatcttaaacttgctgttgattaataatattttgatgatcatatactcttgtgttgagacaacagatcattggataagtcagtttctatgcttcagaagcagctctctgctacacatagccctcaacagattgtgaatgtctcagcaaccaattcttcaacagaaggaaaccaaaagaacaaagtttttatggtgattggtatcaatactgcatttagcagtcgaaaacgtcgcgattcgcttagagagacttggatgcctcaaggtatctgtgatgtccatccttcaaatctctggttactttcaatgcttcattgcctctaatcttatttagcttttgtatgtcatctatcacaggggaaaagcttgagaaattggaaaaagagaagggaattgtcgtcaaatttatgattggacacag

SEQ ID NO: 170208 - DNA, 453 bp, Arabidopsis thaliana landsberg
ttttaagtatatacctaaataatgtatatccctgataccagtcaattaatatgttttataattcaggttgaagtagagggtttgcttaggatcacagcaagagtggtgccaataacgatggaagattctagaatccatggctacgacgtgaaggaagacgactgtctagctcaccttgacctaggcttcaagttccaagaccttagcgataatgtcgatggtgttttgggacagacttataggtctaactacgttagccgagttaagattggagtccacatgcctgtgatgggtggtgacagagaatttcagaccaccggactttttgcacctgactgttcagccgcaaggttcaccggtaacggagacagcaacaatggccggagcaaattggagctccctgagatgagttgtgccagtggcttaggtggcaagggagtggtttgcaagaga

SEQ ID NO: 170209 - DNA, 945 bp, Arabidopsis thaliana landsberg
atggaacatgtcagagttatcttcttctttgcttgtttcctaacgcttgctccatttcatgcctttgctcaggtagattcctatgagtttgatccagatttcaactgtgttgatcgtggcaacttcacggcgaacagcacttttgccgggaatctcaaccgccttgtctcctctctctcctcactcaaatcccaagcttatggcttctacaacctctcttctggagactcatctggagaaagagcttatgcaattggtctgtgtagaagagaagtcaaaagagatgattgtgtcagctgtattcaggcagctgcaagaaacctcaccaagcagtgtccgctgacaaaacaagctgttgtatggtacacgcactgtatgtttcgttactcaaacaggacaatctacggaagaaaagaaacgaacccgactaaggcttttattgctggtgaagagatatcagcaaacagagatgactttgagcgtctgcagagaggactattggacagactcaaaggaattgcggctgctggtgggcctaataggaaatacgctcaaggaaacggttcagcttcggctgggtaccggagattctatggaactgtgcaatgtacgccagatttgtctgaacaggattgtaatgattgtttagtttttgggtttgagaatattccgagttgttgtgatgctgagattggtcttcggtggttttctcctagttgtaacttccggtttgagacgtggagattctacgagtttgatgccgacctagagccagatccacctgcaattcagcctgctgattcaccacaatcagctgcaagaactgagaggacaggtacatagaaatgtttgaatgtttctctcgtgtgtgctactgcagatgttgtccctagcagaatatgtttttgtttctaagattaagatagtgaatgttttaagcgttag

SEQ ID NO: 170210 - DNA, 296 bp, Arabidopsis thaliana landsberg
agtgttggaatttttttatacaacggtctatccttcacgcgcctacgcgcgcatcatcctcgccgtatcttcttctcccgagaattctctccggtcagtcatgcctccaattcaccttttctcgaagcttcccttccaagttcaacttcttccgccgccagttccactttgatgaagaattcgcctttggtaagttccaaattcctctttctatctgatcaaatctatcacgaatcaagaatatatagcttgttagggactaattggtgaattcaacttgagttttacaatcagtc

SEQ ID NO: 170211 - DNA, 515 bp, Arabidopsis thaliana landsberg
  unsure (1)..(515): unsure at all n locations
gatgtgagtgacaaagtgaatgccacgaagaagtcactacttgtaataatcggaatggtgcttattggcgccagcctgagaggttcttttacgggagtagccccttnnnnnnnnnnnnnnnnnnnnnatttcgggcttgatggcttccaagcagggctaattaccgccatacctgttcttgcctttggtgtgatatcgccctttaccagcggaatcagcagaaaatacggcctggagctggtgttgttcctggctatcacgttgatggttttgggaatagccatccgttcagcaggcttgttgtggtccttctacacagggaccgtggttgttggcgccggaatcgcaattgcccaggtacttctgccgagtttggggaagcgcgattaccccgataacataccatcagtgacagccctttgtgtgctcgccgccggcgccggtggggcgctagctttcgtgagcgtggttcccttgagccagcaatttggcttgagaatggctgcttttttgtg

SEQ ID NO: 170212 - DNA, 687 bp, Arabidopsis thaliana landsberg
gtcttgagagctctcttgatctccatacctaccccgacattggtcaagcagcctttggattccctggccgtctcatcatctccgtgagttatatggaaatgatttacatatatacttaaaagttattttctagctaacatctccaaactaagatttatttgatctcttttgagagttccagatacttttgtacatggaattatatgcatgttgtgtggagtatataatcatgatgagcgataacttgtcgagaattttccccaacatttcactaaacattgttggagtatctctagattcttctcagatctttgctatatcagctactcttattgttcttcctacagtttggctaagagaccttagcttactctcctatctctcaggttccattttctatataaatccttacaaaatagcttcgagattcgttcattctttaatatatatgtgtgttccattcacttagccggaggagtcttctcttcgattctgctggctctttgtctcttctgggttgggtcggttaatggagtcgggtttcacccgggtggacaagctcttgatcttgctaacttacctgtcgctattgggattttcgggtttgggtttggtggtcacgccattttcccgaacatttactcttccatgaaagaaccatctaagtttccattggtgctcatcact

SEQ ID NO: 170213 - DNA, 876 bp, Arabidopsis thaliana landsberg
gtgagcatgaatcatgggcggcttctccgccgtcaccctctggcttacatcccaacggtttattaccaggcaaggctgcatctgtgactaggccactcgatgctgagcgatgggccaaggcggaggatcgaactgccaagctcattgcttgcatccagccaaatccaccttccgaagatcgccgtaatgctgttgccagttacgtcaggaggcttatcatggaatgcttccctcaggttcaggtgggttaactttcttgtttttaaacttttgtttttattccttgagataatgtaacaagtaactattttgtgtcttctagatctttatgtttggatctgtacctctcaagacttatttgcctgatggagatatcgacttaacggcttttagcgctaaccaaaatctgaaggattcttgggctaatttggttcgtgatatgcttgaaaaggaagagaagaatgagaatgctgaattccatgtcaaagaagtccagtatatacaagcagaagtatgcgaattagaatgcttcttttttctcctctttctatgtttgctgtatgaaccattgatatttattccaagtaaggttgagtctcttgacgtactggatcgtctaatgatttttcactggtacaatgtttcaggtgaagataattaagtgtctggtagagaatattgtggtagatatatctttcaaccagattggagggctgtgtacattatgcttccttgaggaggttagcattccaccgaagacaacatgcctcttgctttctcttcgtgagttaggcagatcttttgatttcttacctctttactgttcatatatgcaggttgatcactatataaaccagaaccatttattcaagcgta

SEQ ID NO: 170214 - DNA, 95 bp, Arabidopsis thaliana landsberg
tcagatcacacattatcaacccgtgtttgtatgatgttgaggatgcaactggttatttcttatactcctttaccctcaacgatgaacgtccaaag

SEQ ID NO: 170215 - DNA, 1646 bp, Arabidopsis thaliana landsberg
ggaatgtgataatggatatgtatgtgaagcatgagtcagtggagagtgcacgcaaagtgttcgatcaaatttctcagagaaagggttctgactggaatgtgatgatttctgggtattggaaatggggaaacaaggaggaagcttgtaagttgttcgatatgatgccagagaatgatgtggtttcttggacggtgatgattactggttttgcaaaggttaaggatttggaaaatgcgaggaagtattttgatcggatgccggagaagagtgttgtttcttggaacgctatgctttcaggttatgctcaaaatggttttacagaggatgctctgagattgtttaacgatatgttgagacttggagttaggccaaatgagaccacatgggtcattgttatttccgcatgttctttccgtgctgatccttccctcactcgttcactagtaaaactgattgatgagaagagagtccgtttgaattgctttgtgaagacagcattgcttgatatgcatgctaagtgcagagatattcaatctgctagaagaattttcaacgagttaggtacgcagaggaatcttgtgacttggaatgctatgatatctggatacactagaatcggggatatgagttcggctaggcagctttttgatacaatgcctaagcgaaatgttgtttcttggaattctctgatagctgggtatgctcacaacgggcaagctgcactagccattgagtttttcgaagatatgattgattatggagattccaaaccggatgaagtaacaatgattagtgttctctcggcttgtggacacatggctgatctagaattgggtgattgcattgtagattacattcgtaagaaccaaatcaagcttaatgattcaggatacaggtctttgatcttcatgtatgctaggggtggaaacctgtgggaagcaaaacgggtgtttgacgaaatgaaggaaagagatgttgtctcttataacactttattcacagcttttgcagctaacggagacggggttgaaacgctgaatttactctcaaagatgaaagacgaaggtattgagcctgaccgtgtgacttacactagtgtcttgacggcttgtaaccgtgcaggattactcaaagaaggccagagaatattcaaatcaataagaaatccactggcggatcattatgcttgtatggatttgttgcgctgagttgataagcaaatagattaatcagccaaaggtagaatgtacagtccctaagaaattgccaatggatgcacgctcctcaatgccagtcttacatcaggtgagcataatctgtatttgaattgatttaatataaagttcaaaaaaatttccttacaacctaggaaaaggatagaacccaaaattaaaactaatactaaagtcccactcttgtcaatgtaataatatggtcgtctggttagaccccactttttgcctttttttgtttctttagttgcttcttctcccatttaacattccgtgtgaataggatatccttaaagtggtttctatgtgatttcttgggtcttttctttgttatttcttacatgtgagtgcttccctaaagttcacttttgttttgtctaccattctgtgtgggttcacttatttactggtttt

SEQ ID NO: 170216 - DNA, 463 bp, Arabidopsis thaliana landsberg
gtatttcgactcgttcgagttgacatggattccccaagggcaaaatacatcggacgaccccttagctgctttggcttgaacatccgacccgaacttgagaagaatcatcctagtggagtttatcgaaaatccaagcatcgagctcgacaaagaggaacatgccttcctcgtacaagttgccgcagattgcgaagatgcctcggatgtcagctcggacctgggctgcgattgagaatggattgaacccatcacaagctacatatccgaaggaaaagtgccctcggataagtgggaagcttggaaaattaaagctcaggctgcacgtttcgttctggtcgaggagaaagttttcaagtggcggtcgtccggacccttaatgacttgcgtggaaaaaggagcagctcacaaaatcatgaatgaagttcacggaggctcgtgcggaaatattctggggaagagccct

SEQ ID NO: 170217 - DNA, 1199 bp, Arabidopsis thaliana landsberg
atgagtagtcaaagagagagcttgtctcataagagagatggaatcagagagagtttgtcccgaatagactcggctgtgacttggtccattggtcatagcttctaaagcctcccgcaagtgtgttgatggccaagacagagacggatcgtgaatctttaacggcaagtaaggtaaaattgtatcaagatcgtctcttttctccattgctctgttctcttgcttctcaagttcagctcgcaggtttctttctgaagaatgaaatacaaagcatagatatatagatacctaacgaacacagttgactttcatgttcttatatctgactatagagattagattattatatcattccttggagatcaagaaacgtggaaaggattattcagacaaactcatgtcttctacagctcaccactctgattaatcaattattcaaaggatatattcggtctgctatttgaaatttgaaatcataagaaaggattaaagaagctttatgaataatttaatgtaagacagtaagagacaacaaaatggattggacatagaatgatggtgcgcatatttccggttctagtaccagctctggagagattacatgagggcctagatatatcccttatggattctaaggggctgaaacagaagaaccgaaaggaaccgaagaaacgcccagtccaatctataatgatggaagccattcaaaaatgtgggttaacctttcttgtatgtgccacatcgtggacaagttacttgagcttaatctcaggagatggaatatgaggtccacttccatttacgtcttggcttcaagatggaaaaaggtcgtctccgataacactctaattgaaggccagaggattcggctctggtccttccactccctagccaagctatatattgctcttgttcctctggatccagctccagctccaactctggctatccttctggctccagctccaactccatcttcgcctccggttgttactagagattctgacgagctatatatatctcatgctgatgctcaagaagagggtgacagaatacttccagttcatgcagataatgattgggagtgcctaaatttattggctaaagtgtccgaggagacgacttgtctcgaggtttcacaagaggcaaataggaggagctcactagtctcggacacagagctggacctcgagctccggttg

SEQ ID NO: 170218 - DNA, 214 bp, Arabidopsis thaliana landsberg
tggaaaacgcagcaatgtcggtggaggaaagagcggtggcgctggaggtaagagtggtggtggcggacaaagcagtggcggaggaaaaagcggcggcggaggagcaggagcaggtaatatggtagcaccagggacaaatgggggtgcttacatctcaagaggtggattcgagagtaaccctcaaggttactttagtaacttgcatggcagtgga

SEQ ID NO: 170219 - DNA, 802 bp, Arabidopsis thaliana landsberg
ttgctggtcatggcctgttcttcctttaggcctttcatggcaccaccaacgttgctacacgattaggtacgtttcagtttataacagaccgaaacctagacaataatactcacaacatgaccctgtgaatcccattggatacatgctctcaattactattgtaggcatatatagtggttgcatgtttttgggatttttatgggtttggacctctgattctcacatatatttttggtaaggactaatcctcatgtgtcatttcagttattcagcagagatgccttgggtcctaacccaagcagtgttctacctaggaattatactagtcacacgtctagcgcgtcccaacatgaccaagctatgttaccgacgttctgataagaatctaagcatgatccagacagctttcaagtttgttgcactcctctttatcctctcagcctacattataccattcttcatcatcccacagacgatccacccgctcattggttggtctctctacttaaccggctcctttgctctctctaccatacccatcaacgccttcttgcttcccattctccctgtcataacaccgtggcttggcattttcgggacactcctcgtgatggcttttccttcttatcctgatggcgttgttagagcattgtcggttttcgggtatgcattttgttgtgcaccgtttctatgggtctcctttgtgaagatcacatcgcatcttcagattatgattgacaaagaggttttgtttccgcggttgggtgaatccggagtcacttctggtctcagcaaattgtac

SEQ ID NO: 170220 - DNA, 497 bp, Arabidopsis thaliana landsberg; identical to SEQ ID NO: 80255
  unsure (1)..(497): unsure at all n locations

SEQ ID NO: 170221 - DNA, 1087 bp, Arabidopsis thaliana landsberg
  unsure (1)..(1087): unsure at all n locations
gaacccttagctaccattcccatcttcactcactttacggtcatggaatcctccattcccgagtttcaggagctcctctgtttccggaccaaagtcgtccctgaagctgaacaggtttttaagaaactgtgcaagtccaaatcaggagcttgttgttaaaggagaaaccggaaatgggtcgatttcggagctccaaggagatgnnnnnnnnnnnnnnnnnnnnnnnnnnnnnnnngaagcagaagtagaagaagtgaaggtagatgatttggcgaatcagagtatttggggacagatgaaagagatcgtcatgtttaccggacctgccgcgggattgtggctatgtgggccgttgatgagtctcattnnnnnnnnnnnnnnnnnnnnaggaagctcactcgaactcgctgctttaggtatataccatagaatctgagttttgctcgacttgatttcataaattgttggttcttggcttttgattcgacaacttaaattagtctctttgctctttgctctttgttgttatataattcaagtcaagaatgatttatggacaatgttttactagctcagtcatacaaaaagaacaaaacttttagccttttttctcttcagttttcgcttgtctctgtctaaccagtgaggagcttttttctcttttcattatctgtgtgtaaccttgaaaactaaagtgggtttgatgtgctggaatagcactaacctttctttagtgacgtatttaatggtgcttgatttttgtcctattagtatataatttactgaaggaaaataggatctttaggttccataaagcaaggtagctttcttgtttgattggcaaattcgatacaaagatgtttgtaagtttcaggtttcagtcatggctttgattactcgtgactcctgaacatttgattttgatttcatattataccttggatgtgttacttgaactgggaacatccgattattcttccctttactatgttccacgctaggttcactggctgaagtaacagtaatttaaaatttcacttttggatgaaaccaggatccctgcttacccggcaatctggggaattat

SEQ ID NO: 170222 - DNA, 491 bp, Arabidopsis thaliana landsberg; identical to SEQ ID NO: 78023

SEQ ID NO: 170223 - DNA, 557 bp, Arabidopsis thaliana landsberg
atcatgaagacacgcagcaaaaagaccaaaaccgagaacaatcaagaaaagtcaaaagagaaaaacaagtttgatcaactgcctctggacctagagatcgagatatttaggaggttgcctttgaaatctgtagctaggtttctcacactatccaagtcatgtgcagcaactatccgcagtccaagtttcatcacatctttccggtcgccgcagccttgtaccataatcgcttccgctcctatattcaactgtcttcacccctttaaacctagggtactggtagaccacaagttatccttcttctcatcatcgtcttcctcatcatcatcaacgtcttttctatcgcgtttgacatgtccgtcgtccccataccctcatcacatggagtactattgtcattatgtaaatggattgataagcgttggatatggtcgagagcaaatcgtaaccaaccctagcactggtagattcataactccaccaagcgtcagaacaaagagaaggctcgtaaaaagtttataacgggaatgatccaactagtgatcaatacaaagtgt

SEQ ID NO: 170224 - DNA, 290 bp, Arabidopsis thaliana landsberg
  unsure (1)..(290): unsure at all n locations
atggtttctcctttcagtatgcctttcatagctcaaactagtggttttgttaactattctcaagtttttatcactcaaaccatcgcaaaaaggtatcatgctcttattccgacangcaatatggtcattgtccaaaatgataatgatccgtgtcaaccgtttcatgacttcttatnccaccaatttgaaatctacagttaaccccccaaatgattttgattaacactatgaaaccttcacaccttaacccatcgatttcttttgttcgcacaagactatgcatgtcgtca

SEQ ID NO: 170225 - DNA, 3519 bp, Arabidopsis thaliana landsberg
gtctctccttcttcttctatcttccttctcctttgtttgcttctccctctctaccgtctccatctcccacatttctaatcagactcttgtatgtgctctcaacaaccactcttatcttcaatgttccagtttccctttaaattcgattcgattctctttaaccagtaacctccaaaatcgaaggttttcgggggttgtttccggaaatgggtttgtgtgcggattgatatcgcggctggatcccaacacttccacacttctttgttggagattctctgttgatggaactaatatgttgcacaaaagaatctaccacggtcctgagctcgaagagttagaagccgggaattcccgcatttgtggagttgaaagagtctcaaggcgcctccgttgctggcaaccgtactatttgccacggccggataattacagttccattgccttgggagataattttttctgtgggctatctcagccacttggaaggatcagctgtgaaggagaaggtctagccagggtaccaagtggagaccgctacatcgccatcgcggctggatcaagacaagcgtgcgcgatcactgttgacaatgatgtggagtgttggggacaaacacagtcgcttccacgtgaaaagttcttaatactagcggttggggaagaccgcagttgcggtgttagatggtctaatggaactgtggtgtgttggggcaacaacaacaacttcagtttgcctcaaacgctaaagaacattcattttacatcaatatacgctaaagggccaatgttttgcggtgttgccacaagaaattacactctatattgttgggggaatgagaattttagatcgggtgttttcgctccgttccaaggcctaatttctcaagtggtaatgccaggaccgtgtagaagagaatgcccttaccgtccattgtcaggatcacagtccttgtgcagcaatcaattgatgatttgcgatttgaaaagaaatgatggagaatttcccaatactagggcacaaaactctaagaacaaaacttggagcagaagaaacattgcgtttctagtggtcggatgcgttggaacgttttccttgctccttgtcatcagcttcttaatctttaaaagccactgtagttgccgtgtccatgactctggacgtcttgatgatactaggacaatagacataccaaagctcgagaagaggctgtgcactctagcaagtttaggtaatcctaggcagctaatggagttctcaattgacgagctggctctagccacggatggtttctctttccggtttcatctcggtataggcagcttcggctcagtttatcaaggtgttttgtcggatggacgtcatgtcgcaatcaaacgagctgagctaacaaaccctacattgtctgggacaacgatgagacaccgacgagcagataaggattcagcgtttgtaaacgagctagagtctatgtcgcggcttaatcacaaaaatcttgttcgacttctaggtttctatgaggacacagaagagaggattttggtgtacgagtacatgaaaaatggatctctcgccgatcaccttcataatcctcaatttgaccctcttacgtggcaaacacgcttgatgatcgcacttgatgccgctcgtgggatccaatacctccatgagtttgtcgtgcctccagtgatccaccgtgacataaagtcatcgaatatactgttggacgccacgtgggcagccaaagtgtcggatttcggcctatctcaaatgggtccaacggaagaagatgacgtctcacatctctctttacacgctgccggtacattgggctatatcgacccggagtactacaagtttcaacagctcacaaccaagagcgatgtttacagctttggcgtggtgttgctggagttgctgtctggtcacaaagcgatacacaataacgaagacgaaaaccctagaaacttagtggaatatgttgtaccatacattttgctggatgaggctcatagaatacttgaccagaggattccaccgccgaccccttacgaaatcgaggcggtggctcatgtcggatacttggcagcggagtgtttgatgccgtgtagtcggaaaaggccgtcaatggtggaggtagtcagtaaactagagagtgctttggccgcttgtttgacggctccaaagacggagaccgtatctcgatcaaacacttattagccacgtttagcttaattaaatcttgtggtcaactgtaattgtatttatttttctagggattacgaatttaattaattggtacagaattttaatattttcttcgacgaaaacccttgcacaattcaatttctttttgcagcttaatgtgaaaagcttaaagcaaaagccaatgagattcgctgcttctttttgtacgcattttaattccaagttaattgtttgaagacaaagaattgttaaagcttaccaacttatattatactccatgagaaaagtctaaaagtcttctaatattagttgctaggaaaaagagttggtgaataattggtttgaattgtcaaattgaatttacacgccaatggtcaaaatttgactgatacgaaacactaaagaacttttgaaggtcctaaacttttagtaactcagttctattcttcatgattgcgacaagagaacacaatgggttattttcagtaaatctacaggtaataagaagaaggtctgcatatttctgaggtgtgaggtacattgtcttactggcgacaaaacaacccgttattgcgatacaagagatatcaatcgagtgtgataaatgcaagaaaggatatttaccgctggttaggtccttgccaagaatgattcaacttacaagtgaacttgaagcagagttcctctgttgaagcaatttggacatagtagtgtcgatctgggtaagcacttcatcaggtttgtaccaagaacgaatcaacttaaaagtgaacttggagcagtgttaaacacttgaagcaattcggacagagaagaatcgatctgggcaaacacttcctcctttgagcggtttccctcgatctggataataataagaaatgaggtgattttgcttcacgaaaacattaaagaagagatagcaaagccaaaatagaaagggtgtggatgagatcccatgccttaattgttatatcgtcgtacatagaaagcacatcactcacattttggttatgagtcttcagccgcagttttgcctacagcgaaagagaaaaacttcagagacataatttgactaagagtcaatctcatgtgtgagaaataattatcgaatgagaaactttcaagagatatataagaagtattgatttgccttctcttcggtatcatcaaaacgttgggtgagtctaacagcaatctcttctgtctctggaggcgaatacttcaagtggtagatctttcctgtgacaggatccaatcgacgcccaacaactctttcaattagaatttcttcaggaacctgtcccaaaagcagagta

SEQ ID NO: 170226 - DNA, 988 bp, Arabidopsis thaliana landsberg
ataatgttttggatggaaaaggaatctataaggtttcattggtgtttttgaagaaaatggactgataggggagggtttattagagaattctgctaaacatgtgaaccctgcatcaattgtatctggtgatcaggtaatgtacacatctatatgtacatttctatttcaaaatataaatttccgttataatggtgtctaactttttgtggattggaggtgccactcatgttggagaattgtaatggttcgccagactctactactccatcttcaaagcgtgtttacgctagagaattgaatggctctgaaggttcttcaagttcgaaaaaggtgtgtattgtaccattagatttggaaaagtctatatcagagaatgcagaacaaagtgttgtcgtggatgcagaggtggctgattccaaagaagccattgtcccaattgatatcaagacaccaatagtggcagttgaaaaagataatgaaaaacctaagttcgaagatgttggcatggtgaagcaagaattcaagaaggagaagtcaaagaacatggtcggggttagggtcaaagttgagaagaagtagttctacttatctctgtctcttaaaaactgcggcttattgaacacttagtgtcacataagctctgttttttagttggtttcaatgttttgaagtttaggaatctttttttttctaagttcttggatttcatgttttggattatgcttcaggtttttaatcattaaatttctcttttaaagattctattaagctttcatattcgactcttattaatttatatgcattatatataattcctatctctgttctaatgaaatatctaaagagtccaaatgaagcttaccaattactcttcaactagatgtcttcgacctcctttataccttgaatgcatcatttgaatcattcctggtacagagtaaataaagatttggtattgtatattatgtttcagctttttaataattat

SEQ ID NO: 170227 - DNA, 468 bp, Arabidopsis thaliana landsberg
atgacgacaatttctgatcttcctgaggatgtggtagaggagatactccctagggttccattgacatctctgagcgcagtgcgatccatttgcaaaacgtggaatactttgtccaagaatcgtgttctttgtaaagcggcagtaaagaaacagtttttgggattcattatgatggattatagggtttgctccatgaaattccatcttcgaaacgacgagggaggagacttggttgatgatctatctataaagcaagtaggtatacttgatcaaatcgagatatctgaagtcttacattgggacggcttactccttttcgtcactaaggacaactcaagtcttgtggtatggaaatcctattttgggcaaacgaggttgatacaacccaataacaaatttccactgttcagaccgctatgctatcggatatgacaataacccggaaccttaaaaatcttgaggaaattt

SEQ ID NO: 170228 - DNA, 2032 bp, Arabidopsis thaliana landsberg
  unsure (1)..(2032): unsure at all n locations
gatgtcagagaacatgcgcagaggaggaaggcgtgctcagcaggagcgagccgctcaacaggaggaggtgcccagcagcagcacctgccgctcccgcccccgtatgtccatcgagcagatgtttctgatgcagactcaggcagttcaagccatctgtcagaccttggccgccattcagcagcagcagcagcaggcgtcacctcagcctcagatgcctcagatgcccagagacaagcgtgctgaattcatgagaggtcatcccccaacgtttgctcattcttctgaccccatggatgctgaggactggctgcgcactgtggagcgggagttgcataccgctcagtgcgatgacagggagaaagtcatgtatggtccccgtctgttgagaggagcagcccagtcatggtgggagtcttatctcgccacccatgccaaccccgacaccatcacctgggaagagttcagaggtagctttcgtcagtaccatgttcctgcaggtctgatgacagtgaagaaggaggagttcctggccctcaagcaagggtcatcgtctgtcagtgagtaccatgacaggtttctgcaactgtctcgctatgctcctgaagatgtcaacaccgacgccaagagacggtaccgtttcctgagaggcttggttgacnnnnnnnnnnnnnnnnnnnnnnnnnacaccttcccgacattccagcacctgattgacagagcaatcatgacagagaggaagcgtaaggagatggaggatcgtaagcgcaagatcagtggaccccagcctggaagcagcagtcgtcctcgtttctcaggcaatcaaccnnnnnnnnnnnnnnnnnnnnnnnnnncacctcagcagcatcagcagttccaaaggcagtatcctcagcaccagtaccagaaccgtcagagcaatcagtcaggaggtcagtttcagaggcagaatcagcaggcacctcgtcttcctgccccagcaaaccagcaggacagtcaggcagcaccagctcaggttggaaacagagcatgtttccactgtggagagcaaggccactgggtgatgcaatgtccgaagaaggcagcccagcagcagtcaggccccaatgccccagcaaagcagaatgtgtctcagcctggagcaggcaatcgctctcagccgcgctataatcatggaagactgaaccacttggaggctgaagcagttcaggagacccccggcatgatagtaggtatgttcccagtcgactcccatattgcagaagtgttatttgatactggagcaacgcattctttcattactgcatcatgggtagaagcacataatcttccaattactaccatgtcaacccccattcaaattgactcagccggtggtagaattcgagccgatagcatttgtttgaatataagtgtggaaataagggggatagcgtttcccgccaaccttatagtaatgggtactcagggaatagatgtcatcctagggatgaattggctagataagtatcaggcagttatcagttgtgataaaaggacaatcaagttggtgtccccactaggagaggaagtggtgaccgagttagtcccgcctgagccaaagaaaggaagttgttatcagatggctgttgatagcagtgaggcagacccacttgagattatcaaagttgtgtctaagttcccagacatgttcccaaaggacctaccaggtatgccaccagagcggaaagttgagtttgccatagagcttcttccttgaactgcccccatctttaagagagcttacagagtatctagaccagagttggttgagctcaagaagcagattgatgagctgtcagagaaaggttacatccagccaagcacctcaccttgggccgcccctgtcctatttgtggagaagaaagatggcaccagaaggatgtgtatcgattatcgagctctgaatgaggtcacaatcaagaacaagtaccccttacccagaatagaagatttgttcgaccagttgagagcagccagcgtgttctccaagata

SEQ ID NO: 170229 - DNA, 450 bp, Arabidopsis thaliana landsberg
agtgtattggagtctccagatgtacgtttgctagatagattgtcatggagcaataacacggggcaaatacaccgcctgatcgaggtctacagggttatcaaactggagaataacggagcttttgttcccaagatcccattgactggacattctctagtaccacgtgtagaaaaccttgacagattcacattgcagttaccggaagaagtacgaaggcaactgagccacatgaagacgttaccacaagctaggagttcaagagaaggctataggagtggtagcgttggaagcgagagaagaggttttccttatggacgccgatataatcgacggaacatttctctttctttctctttctcttttcaaacaacctctcttcaatcaggaaaaggcagggaaaaagagtttggtgaagggtcatttgatcgccttaagccagagatggtctaa

SEQ ID NO: 170230 - DNA, 400 bp, Arabidopsis thaliana landsberg; identical to SEQ ID NO: 66705
  unsure (1)..(400): unsure at all n locations

SEQ ID NO: 170231 - DNA, 559 bp, Arabidopsis thaliana landsberg
ttgttgattaatttttctttttttaactcaacagagctttattaataagagtgggcatagtcatggactcatggtgtaatcaggatctaattttgattaattatctaacgcatgtgagcattattttcagggcatttaacaacaaagagtgacgtgtatagttatggcgtcgttttactcgagctcctaacgggaagaagagccacagaaaagtcacggccaaaaaaccagcaaaacatcatcgactggtcagagccttatctaacatgtggccggatattcgggtgcgttatggacccgaggctcgcgggacaagattcgtcaaggcggctaaagatacagctcttctagccttacaatgtgtgagcccaaaccctaaagaccggcccaaaatgcttgccgttgtggaagctctagagagtctcatacattataaggacatggcggtttcttctggtcattggccactgtctcctaaatctcagggcgggaaggtttcccgaaggttcgaggggatcatcggagtggtagaaaatcagctccgggttcgttaagatcg

SEQ ID NO: 170232 - DNA, 384 bp, Arabidopsis thaliana landsberg
  unsure (1)..(384): unsure at all n locations
gctggctgtgccgcctttgccgtgtttgctcttccccgccgtgtggtgcctcttgtgcggnttgctgtggtttggggtctagtgcttgtggttcttgtttnctgtctcggccccctctctgcgcgtttctgtcctgctgtccctcttgcctttgcgtcttcccgttggttccctctgggtccggtcccggcctccgtctctgttcgggtcctcggctcggccttggcttgtgcggctttgcgtcttctgtttggtctgcccggtgttgtgtgcggctngntgcgtggtgtcttcctcgggtcntctccttctgggtctgctcttcnngcnttcgtggtggaaaatattcattnccggcttcctcatgttagtcgtctgtgccgt

SEQ ID NO: 170233 - DNA, 438 bp, Arabidopsis thaliana landsberg
agtatatgatcaggattgatttgagatctttttggttcttgagacagacgttctcaagatgaaacttctagatagtgcttgtcttggcaagaaattggaaaaagtatcatgaatcttgtggcttttggattcatttcttttggttcctcattttctaagctcgattctttgttacaggcggatactagtagacgaggagattcagacagttcttcgatgatgagatctgcagaagaagatggagaagataacaataactgcttgggaggtgagacatcatgggcggttccacagattcagtctccacctacagcgtctggtctaaactggcctaagcattttcaccaccactctgtgtttgttccggacataacttcttcaactccttataccggttcatccccgaatcaaagggttgggaaacggcggcgacggttc

SEQ ID NO: 170234 - DNA, 1928 bp, Arabidopsis thaliana landsberg
ataaatctcacagataactggtacatttctttctcattatgacttctcttactatgacatgttgacttcatctatacctcatgaaactgagttgtctcatagagcttgggtaatagattcaggggctagtcatcacgttactcatgaaagggaaatctatatagagtacaaaagccttagatagaacctatgtctggttacctaatggtcagactgtgaaaattgagggtgctagttatgttcaacttactgatgctttgtctttacataatgtgttacagattctagaattcaagtttaatttgttaagtgtgagtgttgtgactaaaactttgaaatctaaagtcagttttacttctgatgcttgctctattcaggcaattactcaggagttaatgattgggcacggtagtcaagttgcaaatctatatgtccagaatgttgataagtcccttagacatgtttgtgagtcttcttaaagtatgtctgtttgtgctagtgttcatgttgaacctgatatgtggcataaacgattagaaaatccatctttgaataaaattgatactctttctgaagttttatctttgtctaaacagaaaatcaataaaacatcttatcattgtcatgtttgtcatcttgcaaaacagaaacatttgccttttaaattgtcaaatcacatgcgtaataaaccgtttgaattgattcatattgacacatggggtccgttttctgtacctactgtagatggttttagatattttttgacaattgttgatgattttagtcatgctacatggatttatatgcttaaacagaaatctgatatcttacatgtttttcctggttttcttaatcttgttgaaactcaatataacactaaagtttgttcagttaggtcacatcatgctaatgaattgaaatttacatctttatatctggaaaaaggaattaaaagttttcattcttgtcctgaaacacctgaacaaaactctattgtagagagaaagcatcagcatttgttgaatgtaactagggctctcatgtttcaatcatgagttcttttacaattttggggggattgtgttttaacagcagctttcttgattaatagattaccttccccaggcttggaaaaccaaactccttatgaaagattaactagtgaaaaacatgattatcaatctcttagaacctttggttgtttatgttatagctccacatcccctaagaatagaaccaaatttgatcctagagctagagcttgtatttttctaggttatacatcaggttttaaagggtataagctattagatattgagacatactcggtttttgtttctagacatgttatatttcatgaggaaattttccctttttcatcatccactatctcggatgatgtaaagaacttctttcctcatttttctcttcctgcaccaaatcatgatggacatctgcctctagtgcaaccatcttctgatgctcctcaacatcgagatgagacatcttctcctatttttattccttctgaatctaaatcgaataggcagagaaaactgccttcccatttgcaggactttcattgttatactactaatactcttaataccctatctataacttccccttatccactagcaaactatatctcttattcttatttatctgagccttccagtgcttttattaacaccatcaccaaaataaaaataccgcaaaagttttcagaggctaagaatgacagggaatggactgatggtatgggtaaggagattgacgcttttataagaactgaaacttggagtatctgtgacttaccacaaggaaagactgctgtgggatgtaaatgtgtttttaccattaagtttcatgcagatggcagtatataacgatataaggccagacttattgcaaagggatatactcaa

SEQ ID NO: 170235 - DNA, 320 bp, Arabidopsis thaliana landsberg
  unsure (1)..(320): unsure at all n locations
tgtaccgatatcaagaagcgaattgaatgatctgctaacgaaaccgtctttaaatggcattcctcttctgattcttggcaacaaaatcgataagtctgaagctctctctaagcaagctttggttgatcaactgtaagtttcttattcaaagtccatacaaaacaatctggattcgagtatatgactttggattgttttgatgcagagggcttgaatctgtaacagacagagaggtttgctgttacatgatctcgtgtaaggactcgataaannnnnnnnnnnnnnnnnattggctcattaagcactcgagaactgccaca

SEQ ID NO: 170236 - DNA, 228 bp, Arabidopsis thaliana landsberg
tttagaattattttaattaatttaatttttttttaacctaatcggtaccgcccgcaaccgcaaacgcttgtgggaaagagcttttgaaatctggcgatttcgagcggtccaaggcggtatttagcggtttctatgattggttgcaatcgctaacaaccggctacacccgcaaacacagcgtttgcgggtggtagagggagaaccaatcaaccattagtggatagagga

SEQ ID NO: 170237 - DNA, 510 bp, Arabidopsis thaliana landsberg
atttttctctttggttttggaatcaggaatcagatcaaggctttggtatttcaagactctgttgtatcttgcgtggtgtggatttaaaatcggttctgtttctcttagtaatcatgccaatgtgtgttcttggtgtatacattaacgctctcaagatttcatatttcttgagacctttatgggaatcaccaccaaaaccattccatgagataccgcattatcaccacgagaacgcttcaatggaatctctctgtaaactccacggttggagaacccgtgagtaccctcgtcgtgtatacgacgctgttttgttcagtactgaagttgaactcctcacgatacggtggaaagaactgtacccatatgttactcagtttgttctacttgaatctaactcgactttcaccggattaccaaaaccgcttgttttcccggggcatagggatgagtttaagtttagcgagccacggttgacttacgggtcgataggaggaaggtttaagagaggat

SEQ ID NO: 170238 - DNA, 584 bp, Arabidopsis thaliana landsberg
tcatcacttcacatcaccaccggcctctaggtcgagtaccaccatcaccttcactcgatcactcactcgattacatggctccgtcccaatattgtgtcgtttgaaatattagggtttcagaatatttcgctataagtagcttgtactttacatttttcgagacaagttttattccgcagacattgtgttcttgacattttttaatccgcatttctcttaatctattcagtatttgcttttcatttcgtttactaagttgttcatcctgttatcatcttgccattactctgttgctatcatgttttcattcttatcttcgtttatgctctctgcaatgatgtctgagtagtgacttggtttctgaggatgggttagagtagtttagaattctcagtatgctaggtggttgagtttgatttatagattccttctggattagttgttcttaatgcctattgctttctgatcaactggaatttgagcctagacatttccgcacccaaaaggtgttcgatgaaatttctgaaccactaattccagagattcgtggctctgtatcaaggtattggttacaggaagcgttt

SEQ ID NO: 170239 - DNA, 507 bp, Arabidopsis thaliana landsberg; identical to SEQ ID NO: 832
  unsure (1)..(507): unsure at all n locations

SEQ ID NO: 170240 - DNA, 440 bp, Arabidopsis thaliana landsberg
ttgctgatataatgttctggaagaacaagaaagaatcaggaacaatcttgggggtattcacattgatatggttcttgttcgaagtggttgaatatcctttcatcactttcctctgccagatcctcttactattcattttcatattcctcatttggtcttacattggctcctcacaactaatccagaggtaagaaaaacattaacactacttgagatatacttctttatgaatcaatcaaccaagctctcaagaaatgttattttgcgcagtaaacctccgagtattaatgatctaaggatttcggaatcgaattggagattcttgttcaacaagataaactggttcatcatcaaattgtatgatatttcaagtggcaaagacttcagactcctttttctggtataaatcaatacacaccatttcattttaattatttcat

SEQ ID NO: 170241 - DNA, 766 bp, Arabidopsis thaliana landsberg
gaacaaacttgtagttgataaccagatgaggtctggtgaagaaaatggtgatgttcattatgattcagataattctgactctggctacttcaggaatggaccaaagaagttggactcagatgtttctgttgatgggttctttaggaacaaaacaataatgggatctggatccggattcaacagctccccaacaaaacaagatagggacatgaacagattcaggaaggaatggtataaggaaggagggtcagggtcaggatcaggatcaggatcaggtcgttcttctacaaagtatgatctgaggaaaagcaaaagaggttttccttctcatggtcgtaagaaaatcaagtatgagttcactgaatctgtctatgacagtggtgagcatagcttggaaactgactcttgtgcggacacaaacagaactatcaagattcatagtaagtctccaatggttaagaaagcaaacggtgcaaagaagaaaagcaaaggtcacgagtgtccgatttgcttcagggtgttcaaatcaggacaagctttaggaggtcacaagagatcacatttcattgggaatcaagaacacaggactttggtgattcaacatcaagtagctcatgagatgcatacactcatcgatctcaatcttcctgctcctattgatgaatgatcttactaaaaccgaaaccgcggttttcttctctttattgtttcctttctgtttattgattcttttgcttcagattcaagaatgcttttggtttgcaag

SEQ ID NO: 170242 - DNA, 863 bp, Arabidopsis thaliana landsberg; identical to SEQ ID NO: 21611
  unsure (1)..(863): unsure at all n locations

SEQ ID NO: 170243 - DNA, 323 bp, Arabidopsis thaliana landsberg
cttgtctcggaatcagattatgggttcaagaagttgaaatcactgagaatttccttctgctagacttggccaagactgatgtggatgtgattcttggttatgagtggctctcaaaactgggagagacaatggttaattggcagaatcaagatttctctttcagccacaaccaacaatggatcactctttgtgctgaggacgaagaacttgagcaagttactacaaaagtaaagatgaagagtgaaaatgagcaagaggatattgaagaacagagaaataacgatggggaaatgcttgttgtttgctaccttgaggacaagttt

SEQ ID NO: 170244 - DNA, 1684 bp, Arabidopsis thaliana landsberg
atgtctggagcaagaatagaggttgggaagttcgatggtcgtggagattacacgatgtggaaagagaagctcttagctcacagtaatatgttgggcttgagttctgttctaagagaagctgagacgccgatggggaaagaaagagattcagaaaaatctgatgaagaagagaaagaagaacgtgaaaagatggaagcttttgaagagaaaaagaggaaagctagaagcaccatcattttgagtatttcagatagggttttgaggaagattaaaaaggagacaaccgctgctgcaatgctggaagccttggataggctctacatgtctaaagctctcccaaaccggatatatctgaagcagaagctttacagctacgagatgcaagagagtctgtctgtggaaggaaatatcgatgagtttctacatctcatagcagacttggagaacacgaacgtgctcgtgtctgatgaagatcaggcgattctattgctgatgtctctgccgagacagtttgaccaattgagagacactctcaagtatagctcgggaagaactacaatgacactcgatgaggttgttgcagcaatatactcaaaggaacttgagttgggctctaacaagaagagcataaggggtcaagcagagggtttgtatgtcaaggagaaagaagagacaagaggcagatctgagcagagagagaaggggaacaaaaacaacagatccagatcgaagtcaaaaagcaaaaagggatgttggatctgtggtgaagagggtcacttcaagggttcttgtccgaacaaaaacaagttccaaaacaagaaaaaggaccaagcaagcagcagcaaaggtgaagcagcgatggtagaaggaaatcacactgatgctgcaggctactatgtatcagaagcccttcattcaatgggtataaaccttgaagatgaatggataatggatactggatgcagctaccatatgactcacaaaagagagtggtttgaggagctaagttaggatgctggaggctctgtaaggatgggaaacaacacgatttccaaggtcagagggattggaagcatcagactcagaatcgatgatggctccacagtattactcactcaagtaaggtacattcctgacatggatagaaacttgctttcgatgggaaccttagaggaacagggatgtagctttgagtctaagaagggagttttgctagttaaggtggatacaagaactcttatggtaggtaaaaggcatgaaaaactctacttgcttcagggaaaaccagaatgtggacattctttggttactgaaaagaaaagtgatgaaacaatcttgtggcataggagattaggtcatatgagtcagaagaatatgactatcttggttaagaagggttttctggacagaaagaaggtctcagaatttgaactatgtgaagattgtgtttacggaaaagcaagaaggattagctttgttttagccacacatgggacagagaacaagctagactatgttcattcggatttatggggagctccaacggtcccattatctctgagcaaatgtcaatacttcatctccttcatagacgattattcaagaaaggtgtgggtttatttcttgaagcataaagatgaagcttttggggcatttgttgaatggagtactatggtggagactc

SEQ ID NO: 170245 - DNA, 774 bp, Arabidopsis thaliana landsberg; identical to SEQ ID NO: 10040

SEQ ID NO: 170246 - DNA, 231 bp, Arabidopsis thaliana landsberg
gtttgggtggaagacataattcttttaattaattaaaaaaaaaaaaaaatctaaccgcttaccgccacaaacgcttgtgggaaggagattttgaaatctggcgatttcgaacggtccaaaacggtatctagcggtttttatgattagtgtcaaacgctaacaaccgctaccacccgcaaacgcagcgtttgcaggtggcagagggagaaccaatcaaaacattagtcactg

SEQ ID NO: 170247 - DNA, 796 bp, Arabidopsis thaliana landsberg
atggcattgtttctaagctttgttcaggtatttagcatcgttataacaatcattatgtcccactttggtcagtttgacgcaagaacaagtcttaacgttctgagttacggtgcaaacccaaacgggatcgtagagtcggcaaaagtcttttcggatgcatgggatgctgcgtgtagagtggaagactcagttgttatttacgtcccaaaaggaaggtatttggttagtggggaggttaggttcgaaggagaaagttgcaaaagccgtgagataaccctaaggattgacggaactttaattggtcctcaagactacagtttgcttgggaaaaaagacgaccggtttagtgttagtggtgttcacaatgttacagttcttggaggttcttttgatgctaggggatctaccttgtggagctgcaaggccaacggttacaactgccctgagggtgcaacggtatgtgtttaagtcttgaattaccaatttatgcatttgtgtttttcttttttgtcaacaacatgaacacaactacacttacatgttctaaactcctaataatttatgcgattgcgtttggttgcaataacagaaaaaaaaatgcgattgcgtttggttgcaataacagaaaaacaaaatgtaacttcagaatatatattttattatggaccgcatttgtttcgtaacatatattacgtagtaattacttggaaaagaatactatatcgtaaatttacaatatgaatccaaaagaataaaacgcaaataacagtcaagatttaacaaaggtttttaatgt

SEQ ID NO: 170248 - DNA, 852 bp, Arabidopsis thaliana landsberg
tagccaaaaaacatatattttggaaaaatgttttctactcatgaaaatgattcttgttaagctttctttacatttctgtttttgtaaatccactacttacatttcatttatttgttaccgagtagaccctaaatatataaattacttctatggataaaagactcaatacatggcgatcatttttcaggttccatcttaagcttcataccgccggtataatcgcggcaagctttggtatggcaaacttctttgcccgtcctattggtggttgggcctcagatattgcggctagacgcttcggcatgagaggccgtctctggaccctatggatcatccaaaccttaggcggtttcttttgcctatggctaggccgagccaccacgctcccgaccgcggttgtcttcatgatcctcttctctctcggcgctcaagccgcttgtggagccacctttgctatcatacctttcatctcacgccgctccttagggatcatctctggtcttactggagctggtggaaacttcggctctggtttgacccaactcgtattcttctcgacctcaacgttctccacggaacaagggctgacatggatgggggtgatgattatggcgtgtacattacccgtcactttagtgcacttcccgcaatggggaagcatgtttttgccttccacggaagatgaagtgaagtctacggaggagtattattacatgaaagagtggacagagaccgagaagcgaaagggtatgcatgaagggagtttgaagttcgccgtcaatagtagatcggagcgtggacggcgcgtggcttctgcaccgtctcctccgccggaacacgtttaagagtttt

SEQ ID NO: 170249 - DNA, 207 bp, Arabidopsis thaliana landsberg
gagcacgttccgatgaacctcggcgattccgtcaccgtccacgtcgacgccgatgcgatgacgtgctggaacattgcgtcggacgtcacccgcatcggcgagctctcacccgagacgttcgaagccgagtggctcgagggagcgaccggtcccgccgtcggcgccaagttccgcggccacgtcaagcgcaacggcgtcggccccgtc

SEQ ID NO: 170250 - DNA, 439 bp, Arabidopsis thaliana landsberg
  unsure (1)..(439): unsure at all n locations
ggaaccaccagcaaacaggagcacgccagcggggcaaaccagcgaggaccgcatgcagcaacgcacacagggccaggcggcgaagggcaancagctgaagcccgtcccacgggagaaaagaaaaaccacccgggcgcccaacacgcaaaccgccacaccccgcgcgcggccgacgcacaacgcagcnggcacgacaggacacccgaccggaaagcgggcagcgagcgcaacgcaaccaaggcgagccagcacacacaaaaggcaccccaggcagcacacaacacgcacccggcccgaaagcagagggaacagcgagcggagaacaagcncacacaggaaacagccaggaccaggaccacgaaatcgagcccggacccgcacgacaanccgccgccaggcgacaaccacaccccaacaaaacacaaccccaccaccaccc

SEQ ID NO: 170251 - DNA, 424 bp, Arabidopsis thaliana landsberg
tttggtgactcagataccagaggctatcaaaatgcgaaaacgggcacgccctgttataaatgtgggaaagaagggcactgggcaagagattgcactgttcagtctgatacgggaccagtaaagtctacatctgcagctggagattgttttaaatgcggaaagccagggcactggtcgagagattgcactgctcaatctggtaatcccaagtatgaaccagggcaaatgaagtcgtcatcttcaagtggagaatgttacaaatgcgggaagcaaggacattggtcgagagactgcaccggtcaatctagtaatcaacaatttcaatcagggcaagcaaaatccacatcctcaactggagattgctacaaatgcggaaaagcaggacattggtcaagagattgcacttcccctgctcaaactacaa

SEQ ID NO: 170252 - DNA, 1354 bp, Arabidopsis thaliana landsberg
atggatcgattgtgtgagagggacacatggtatgatgagatgaagaacgctaagagaataactaagcaactagatgaagtcgcaatgataaaaagaattctggcaactagaagaagtcgcaagtattcccttgtattcccaatatatcgttatcaagtattcccttgtatttccagtattatcgttacatcctaacatatcaaattccaatttaaatcctaacatatcaaattcaaattcatatccaaattcaaaaaaaaaaaaaaaaaccaaattaaaatcctaacataacaaatccggagtcagatccaaacaaaacaaaccaaattcaaatcctaaaataacattcccaaattcaaatccaaacaaaataaaccaaattcaaatcttggtactccgagtggtcctctttgtgaattttgcttccacaggtttcgaaggaccaccatccttctttttcgggacaccatctttttcgtgatccttctctgtcgggacacaatcctactcttgatcaccattcttctctttcggatcaccatccttctcttggtccttcgcttcttaattctgcaaccgaacgaaattatatcagtattactcagttttactctagatcacacagtgctactcagtattactcaattaccaatatagtattacgaaacgcacctttctcttctctgctttctgctcatccttgaatgctaacaacgattcaactcttttatccaaatctgaaatcattgctataatttcattcagctggtctaccatcttcttatccaacttttcaatcatctgcaccacagaaactaaactcgggagttcttgtccacctacttaggaatatgctgtacacccgcaatctctggtcatgcggtgatcttcaggacttgaatatcctgctggtagagctcatcaaacctgattagacggccctctgtataacgcttgaaccaagtgtgtaccactacatcagccacgtcaatgtcgtcttcttctttggtgataattttcatgagtttgtgctcctcaattctaggtgtgacgagacaatcaatgacctgtaaagataaacagtgtgaatggattattataactaaatagaatagcaaatgtttcataaaatagtatatctaggacaactcacctgagttgtacccaattctgcattaatagtatcaagaggaaagcctttcaaatggtttttcttaaacttcaccttgcacatcttaggagatccctgatctgctcctgcaatgtcgtcaataaattctttcctcaactatgggattgcctcgaatacaagaagctacagaataagaaaacaatatctaataacaaatagtat

SEQ ID NO: 170253 - DNA, 224 bp, Arabidopsis thaliana landsberg
caggaaaagagatacttccatacatggaaccaaggccaccagtggggattcaccgttacatattggtacttttccggcaaaactcaccggtgggtctgatggtgcagcagcctccatcacgagccaatttcagcacacgaatgttcgctggacatttcgatcttggtctacctgtggccactgtctacttcaacgcccaaaaggaacctgcttcacgcagacgc

SEQ ID NO: 170254 - DNA, 311 bp, Arabidopsis thaliana landsberg
cattcgtctctctcgggaaggacatcaggattctgtaatttggtactacactctttcaggagagtatacggtaaaatccggatattggtgactcactcatgatctgacatattgtcaaattataaccagcagctccccaggggtcagtggatgtgaagtcagagatatggaaaagttctataatcccaaagataaaatacatgctctggcgtactatttcaagagcattacctacaactttcagattatatctccaggggcatgaaaatcgatccaaaatgcatccgttgtcaaattgaataagagtcaat

SEQ ID NO: 170255 - DNA, 488 bp, Arabidopsis thaliana landsberg
  unsure (1)..(488): unsure at all n locations
atgaaaacacggcgcaatacacgatcttgttcgaattcaaggaaaagagaggagaaaaattcagaaacgatcccgttcgatctcgttatcgagatactcacgagattgccggtgaagtctatagcgagatttcgttgcttatcgaagctatgtgcttccacacttaacaatccagatttcaccgaatcgttcttcaccatatcttcgtcacgcccgaagctattgttcacctgccccaaagacggtgaaacattcttcttctcatcaccaaagcctggtgattcttctcctttagtggtcaattttcatatgagcttctctnnnnnnnnnnnnnnnnnnnnnnnnngtcctgtttgtggcttcatatatggattcaatagtcatacgaatttgaagggaaagacaatttctaagccactgatatgtaaccctagcacaggcgaatgctggcccttaccaagagtgaaaacgaatagaactataatcac

SEQ ID NO: 170256 - DNA, 1008 bp, Arabidopsis thaliana landsberg
gtagtcttaaagaagttggagaagcctcgagtttcagtgaggaaacgtactgtgaattggttagagggttcatagagagtaaaagcgttgagagtttagcgaaactgatcatcaaagctcagaagttggaatcaaatgtccactgatgttggcggatcagtggggtttggaatcgtaaatgcttgtgtcaagctcggattttcgggtaaaagtattctcgatgaaatgaatgctcagggaggatctggagggattggggtgtatgtgccgatcttgaaggccttttgcaaagaaggcagaacatctgaagctactcagcttgttacagagatcagcagctctgggcttcaattagacgttgagacctataacactatgatcgaagcttccatgacaaaacatgatttcctagctgctcttacattgtttagggatatgagagaaacaagagtggcggatttgaaaggatgctacttaacaataatgactggtctccttgagaatcagagacctgagttaatggcagagtttgtggaggaagttatggaagatccacgcgtagaagtgaagtcccatgattggaattcgattatccatgccttttgtaaatctggtcgcctaggagatgcaaagggtacattcagaaggatgactttccttcagtatgagccgaataaccagacatacttgtcgttgatcaatggatatgtgagctgcgagaagtacttcgaggttgtggttttatggaaagagttcaaagacaagaaagcaaaactagagcatgctcttgcggatgcgttcttgaatgcattggtcaaaggaggcttctttggcacggcgttgcaagtgatagagaaatgtcaggagataaagatattcgtggataagtggaggtataaagcaacgttcatggagactcaaaagaatctcagattgccaaagttgaggaagaggaagatgaagaaaattgagtttcttgatgcctttaagaattgggctggtattacc

SEQ ID NO: 170257 - DNA, 566 bp, Arabidopsis thaliana landsberg
tcaaaccaatgatccaaaaaaagtttaaaaaataagtgtgtacaaaaaggtttgtgtttatcttcgaagacaaagaacttagacccaaagttccagcatccttgtaagaatccaacacgtgtgaagccgtcacagctctgttttgaagatgcgttactaaggtttcaagattgagttctctaacaccaagaacttcagtgctgcagatactagtgaacctaagaggaaaggtagattctttgtgtgaaaacacaattgggaatatgctttccctcatgattctcaagaacgaagaagctgcgattgaaagaattcaagatgtggttgatgagataaggagggcaaaggaaatattcagcttgaactgcaaggagatgtcgaaatcttcgtctagaatttttgagcttttggaagagattgggaaagtatatggaagaggaaatgagatggatttgtggatgagtaatagctggtgtaagctcggcttgtacgatgccgatttcggatggggaaagccggtttgaaagaaaaaaagaggcgcttcccatttcaaaaacttcatgtta

SEQ ID NO: 170258 - DNA, 955 bp, Arabidopsis thaliana landsberg
tccctgacaccaaacggttgcatgccatgttgtgctgtccactacctaagttttttactgaactaagagggtttctgggatgcaccggttactaccgacggattgtgaagaactacggtcagatagcaaggcctttaactgatcaattgaggaagagtgggtttgagtggaatgaatctgcaaccatggccttccaagagttaaaaagggcagttacagaccttcttgtgcttgttttgcctgattttcaacaagagttcacagtcaaaacggatgcatcccgagttggaataagagctgcgttatcccaaaacaagagacctatcgcttatctcagtcaagccttctcaagccaaggtagaatcaagtctgtgtatgagagggaattactagcaattgtgagggctgtaaccaagtggaaacactatttatccagccgagaatttgtgataaagacagaccagagaagtctcaggcacttactagagcagaagtcagtttcaacaactcagtaaagatgggcttccaagctgacagggttgaaatatcgcattgaatacaagcccagagttgacaacaaggtagctgatgcactttccaaaactactagagcagtttcatactagtgctatgggaggacatgaaggggcattgaaaacgtttaagagattgtgtaatgaagtgtactggcgtggaatgagaagagatacagtgaattacatcaagggctgccagatttgtcaagagaacaagtactctaccttatcacctgcaggtctcctttcacctctttcattatcgcagcagatatggagcgacatcagccttgattttgtcgaaggtctgcctacttcgaagggttttaattgcattttggtagtggtagacaggctaagcaagtacactcacttcatcgccttgaagcatccgtttactactaggtctgtagctgaat

SEQ ID NO: 170259 - DNA, 532 bp, Arabidopsis thaliana landsberg
  unsure (1)..(532): unsure at all n locations
aggtggtaatagatgcgaaagcccgctattacgaaacatataacagcaatgtgcacaggggcgtgcatcacctgagccaggtagctaccgatgcatacgagaaagcccgtcacatagtggccggctatatcaatgcagcccattcacacgagatcatcttcacaaaaggcannnnnnnnnnnnnnnnnnnnnnnnnnnnnnnnnnnnnnnnnnnnnnnnnnnnnnnnnnnnnnnnnnnnnnnnnnnnnnnnnnnnngcaccacagcaatatagtgccgtggcagatcgcctgcgaggaaaccggcgccacgctgaaggtgatccctatcaacnnnnnnnnnnnnnnnnnnnnnnnnnnnnnnnnnnnnnnnnnnnnnnnnncggtgaagatggtagcggttacctatgtttccaatacaatgggcaccattcacccggtccaggacannnnnnnnnnnnnnnnngcacgaaatataccggtgctgttggatgccgcacaggctatccagcatatcagtatcgacgtacaggc

SEQ ID NO: 170260 - DNA, 217 bp, Arabidopsis thaliana landsberg
atggcttacacaaacaaagtagcggttgcggttggagcagtggtggtgtttctcgcggttgtgatgaatccgcggtggacagacgcacaaacgtatccaaaattggatcgtttatgtgtgatgatgatccctgacattctggaagaatgtttcatccacgatagactaaaactacggaagactgctgcaacgatctcaaaaatgcgacaatgacgca

SEQ ID NO: 170261 - DNA, 341 bp, Arabidopsis thaliana landsberg
aaacgtcatcaccgagacgtacgtaggtctaaaaatccacaggttctacatcaagtgcaccaaatgcttagcagagttgacaatcaaaaccgatccaaagaaccatagttatactgtagaatcaggtgcaagttgcctttataatggccatgaggacattgaggaggagaagaagaagaagcatgaaaacgcattagaatccctagagaacagaactgtggtatctaaaaaagagattgcagttatggctagtcttgatgagttaaagtcgatgaagcctagtcgagcctcattgagtaaaaactacataattgaggatttgagtagaagcaaaaaacaat

SEQ ID NO: 170262 - DNA, 325 bp, Arabidopsis thaliana landsberg
gcctaggtttgcacatcagcaaaaccaaggtcctgctgctcctgaggctgatatgaaacaaatgctacaacaaatgcttcacgggcaagcctctagctccatggagatggcaaagaagatatctgagttacataacaagctggactgtagctacaatgatctcaatgtcaagatggaaacactgaataccaaagtccgatacttagagggacattctgcatcttcttcagctccaaaacaaacaagccaactaccaggcaaagcagttcagaatccaaaagaatatgctcatgctatcacactgcgtagtggaaaagcacttcca

SEQ ID NO: 170263 - DNA, 341 bp, Arabidopsis thaliana landsberg
ggccgattactgagatcccaactcatcgacaagttggtgttcttgaatctccagtaccactgtcaggagaacacaaatgctcgatggtcactcctggaccatctgtgggattcaagcgtagttgcccaccatcaactgctaaagttcaaaagatgttacttgacatcactaaagagatagctgaggaagaagctggcttcatcacacccgagaagaagctactcaattctattgacaaagttgagaaaattgtgatggcggagatccagaagttgaagagcactcctcaagctaaaagggaagagcgggagaagagggtgcggactttaatgactatgcga

SEQ ID NO: 170264 - DNA, 747 bp, Arabidopsis thaliana landsberg
  unsure (1)..(747): unsure at all n locations
ccgcgcggctcatcgaggagcgacggcggggactgcccaacgtcgaggtgcggttcgaccacccggtcgtcggggtcgagcaggggcgccgacgaangtaaccattgccgtcaagggccccgagggcacgacgacgcacagcggcgcctatctgatcggcgccgacggcgggcgcagcacggtccgcaagcaaagcggcatcgagttcgccggcttcacctggccggagcgcttcatcgtcctgacgacgccattcgatttcggcgcctcgcgcggctattgcccgcgcaactatttcgccgaccccgacgaatggtgcaattgcttcaaggtctcggccgacgggccgcccggcctgtggcgcaccgtcttcccgaccgatcagagtctctccgaggcggagctgatgagcgacgaggcggtgcaggcacggctgcagaaattcttcccctcggacacaccttacgagatcgtccaccgcaacctctacacgacgcatcagcgcgtcgccgccggctttcgcaccggccgcgtcctgctcgccggcgacgcggcgcacgtcaacaacccgatcgggggcatggggctcaacggcggtttccaggacgcggcgaatctctccgaaaagcttgcccgcgtcatcctcgacggcgagtccgatcgcatcctcgatctctacgatctgaagcgccgcaccgcagccaccgagttcgtgcagcagcagtcgatcgccaacaataagcagct

SEQ ID NO: 170265 - DNA, 495 bp, Arabidopsis thaliana landsberg
atggagaattcaagcttccttatgatctacaaatgaagattctgttaccgatgcctctaaaagtcttggcgaaatggttctgcgtctcaaagcaatgtgcatcatttatccgctccgtagaattcagagaaatttacttgagtcgatcgatgacaaagcctcgagtgttgttcgtcaccaatattttaccaatctaccaaaacaaacccgaaacattgtttcattctgtttgtcaagaggaggaagcattgttcttgtcttccggtcaacaacagatgtgtaccaacgaaacaccactttgaaatgtttctaaacccatccaaggtttgatttgccttcaagatactgaggttgcgatttaatttgcaacctggctacgcgaacgttacggaaattaccgcagatcgaaaggtctaacggagcatgcatgaaaagttttttcggatattacaaagctaaaaaaagtaatcaagttgatatgtataagtttaacta

SEQ ID NO: 170266 - DNA, 1798 bp, Arabidopsis thaliana landsberg
atgcataagcaagagttcttggaattgttcaaggccgcacaacgagcggctaagtatgcgagtgatgagaattctccagaggtctcgaggagtatccaattcgtgaagcgtttgaaagaagctcctgcatctcttgattgtgacgtggtcgttaacacaaactccattggaaacggaatccgttttctccgagatcacaaaaaccccctaattcgatctgaggcagaacttctttcagatctttggctcaagtatctttacgccaccggtagaaaacagaagtcgacagattctgtttagttaaacagattcagagaaattcagattcaggttttgaatgtaactgtattaatgtgttagagacttgggtttgaatgtatatgacattatattactgcttcttaatatggcagattttgaataaagaaaaggtttcacgagagaagattagaacactaatatgtatgacaaaagctttcttcttgattcaatgaagtcacactcatttcaaatccataaataataaagcttacttaagtactatagttggttaaactcacaataatatgacaatgttttgctactaatcacatcacttggatcagttattttttgttaaaaccttgacttggatcttacactttgatgacgctcttggaagcatcataagattcctcatttccatggtggtttgcaagttattactgttgtttaccacgcaaattttcactagctcaagacacggtaacttctccaagaaatgcttcatttgattcagctctcttgtcgttccttgatagctcaatatctccagcaccttcacttgagatgatgataggcaagaggttatgctctcgtcggtatcatagcaaacacatacatccccacatctgtttgttatgtagtgatcgagaccctgaagcataacaaagaaaaagagtaatgttaacgacctaccaatatatatatggtgtttaggatgtgtttgtgacatgagataccatgaagatgagggtttctaggtttggagagttcttgatcagaagtggcagcatttgccatcctcttgccttgtcattcccaatagatagactaacaaggctgtcgaacaatggcatttctttacatgagaaataaagcagcttcaacaaaacacaatgtgttagtctgttgtcactcaataacacaaaagttgaaataaatcatcaaaagccccaagtgaatctcattctcgataagcaaaaaaaaagaagaatgttatttataaggaaagaacaatatatagaggaggctgacctctagagtgtggctagataagtgaaggattctaacatttctgattccattgatgagatttctcatatcagcgggaatggaaccgagagatccatttcttactcccaccattcttgtttcatccatccgaagattgagtctagcttcgatgagggaatccaacttaacattaggatacttacccaaaacataaccagagtgtttgtagtagataagattaggagcatctaatgaaatactagtaaacttgcgatcaaatcggatgtgtagtctctttagagatggagaagacacggaacaagtccaatctacacatcgccgctcctcaacaaccagttcttcgagaacaggacagcgagatataagagttccaacaacattatgacctccaacaaaattaactgagtcaagacataatgtcctaagcaaaggaagagaaacatcttgagaaagcttgattgtaaaaccacgtcctactctcagcttaaccaatgtcttgctc

SEQ ID NO: 170267 - DNA, 537 bp, Arabidopsis thaliana landsberg
  unsure (1)..(537): unsure at all n locations
ctctggaaaaaaatattttcagcagcaataagtatgatcgcttatctactcttcaaattactatatggcatggcagtgatgctgggtattgtggtggtagttttttttctgtttaatattttaccggtagatcccgcacggatgacacaagggcatcggtcagatgtacaatcattacaggcggtgcgtaaagagtttgggttggataaacctttaccagtacaatttgcctactatctcaatgatctttcaccagttggtatacatttaaacacaccggatgaacaacagcgctatcnnnnnnnnnnnnnnnnnnnnnnnnnnnnnnnnnnnnnnnnnnnnntaaaatggccctatcttcggcgctcctatcaaacccacaaggatgttgcctcgttgttaatggaagttgtgcccaatacaattatactggcaactacctacatgttgtttgctatgatcatcggcatattattaggggtggttagcgccgtacatcaaaatacatggattgataagctgcggtaggttttctac

SEQ ID NO: 170268 - DNA, 967 bp, Arabidopsis thaliana landsberg
atggatattcccgtatttactatggtctgtgagtggagatgcaaagaagaagaatggaaatttaaaccaaaggaagacatgtttggtcgctgtgtacgtgttaaggaaaacattacatacacggaatttgtacgtacactaagcgatgctttcagttttaagtccacagagatcaatcccataattagttactggatgccgggagagatgttagtcatgatagatactcaacgccctcttgtcttcattgatagtcaagtgggattggatacattctttttgattcgtggtcggtatccttctctcaacttgtttgtctctttcattacaaccgtcaagacactcgggaataatgtctctaggactcatggtgacgatgctgaaagtgaccgtgtgtgtgatagtgtttcaaatgttgatgaaaataatgaggccatagatgaggaagacgacattgaagacgataaaacagatgaggatgaagaggagggagacaatgaagacggtgatgggtatgatgattatcagggtaacgatggatctatgggggggggggaagtaccctcgatcctactattgatggtagttaaagtagtggcgaagattatgattacaacaagtggaacgatgtagttgtagaagaatatggaatagggaatgttgaggagaacgtcattctcacacaattgactgttcaacatccatggaaattcagtcgtctattggcagaatgtacgtacacaagtcagcgtgtacctgacggagataatatttctcactcgggtgaccgtacaccagctgtaactccaagaagtatgtgtcaacatggtttgtaccaatgtacatatactatagattgggaagtgtttttaacaacagaaagtcatacaacaaacaatgtcttatcacacaatcaaacaatctttttgcaacaagcaacctaggtcatgtcctacaagaatggaga

SEQ ID NO: 170269 - DNA, 536 bp, Arabidopsis thaliana landsberg
ttgtctagtatagtacagacaagttcaaatttgtttggttttgcttaacgaatcattaatttgtattttaatttcatcttccttaatgcaatcgccgacgtaagacaatcaattcaagcaaagcttcaattttctctcttatccattatcataaatttccaaaagcctaatcctttacctgagaagcatcttttctcatttctggagcttacaaggctgatcggtctcgtccgattgaaattggtatccaagttcttgaatcaatcgagacagaaggttaagattgggatatatttcgcaacttggtgggcattgaacgatgtgtccgataactacaacaagaaggttttgaatgcttttccttacctgtggctaactgtgatgctttctcttgcttgtggccctcagatgatgcatgtctcttgggtcagtagagttgcagatgctctttcaatcgatcttgctttcttacccctttgttcccgttagaggatcacacttaaaatactgttgtttctttatcaattgtcttgctt

SEQ ID NO: 170270 - DNA, 427 bp, Arabidopsis thaliana landsberg
tttaaacctgaagatatcagaatgtgggttgtagtagttgtttctcgctacatacgtgagctggatatttactgtccagagaagcaacacatattgccaagtagcttatatacctgcaagtctgctcgtgatcttgaaactcgatgacggggttctcctgaatgttcctcgaatggtttgtcttccctctttgaaaactttggaactgaaaggtgtgagatacttcaagcaaggatctcttcagcggcttatatgtaattgccctgttcttgaagatctagtagtgaatctatctcatcatcccaatatgggaaagcttactgttattgtcccatctttgcaacgtttatcactctctacaccttctagtcgtgagtttgtcatagatactccttctcaactgtctttccaacttgtggatcgtaat

SEQ ID NO: 170271 - DNA, 1126 bp, Arabidopsis thaliana landsberg; identical to SEQ ID NO: 3631

SEQ ID NO: 170272 - DNA, 446 bp, Arabidopsis thaliana landsberg
aaatactcattactgtagtatagaaaacctaacacagtatatattttaacttttctattttattaaaggacaaagagacaggaaattggtggactacagatataagaggcaatgaatcagaagaatatataggctattggccaaaagaactatttgatcttattagtaagagtgcaaacatagttggagttacaggatcagtccaggcttctccttcgggtcaaagcccaccaatgggtaatggtcatttaccaactgacgatgaggcagggtcggcgcgtgttggagaagttaagtttatagataatgattttgtggtcaagggaagtgaccaatataagttagagaaacttattgatgatagtaacaattgttatggtctaaaagatggaaagaagttaattttattcaattatggtggacctggaggaaattcttgtggggtc

SEQ ID NO: 170273 - DNA, 225 bp, Arabidopsis thaliana landsberg
ttctttctctctgttccgatgagttcaagctctgccaaatccggtgtcgtcggagatcgtggtgtcccgtgtaagtgtgtgtgtggtttaagtgtcacagttttcacatcgaaatcacaagataacccgggacgtccgttcttccgttgtattagcaaacgagatgctaagacgtggacaaacaacagggatgtaagttaagtatgattgtgtaacttgtggttt

SEQ ID NO: 170274 - DNA, 771 bp, Arabidopsis thaliana landsberg; identical to SEQ ID NO: 40868
  unsure (1)..(771): unsure at all n locations

SEQ ID NO: 170275 - DNA, 802 bp, Arabidopsis thaliana landsberg
acgatgagcgtcgtctcaagcttccatcaatcatggaagagtttgattctcgcaagccaacgttgcaacacagtgaaagcaaatcaaatcaacacattctctattcatcatccatggcctccatcgaaacacttacgcaattagcaaacttctcacagcttttctccatcttcccaatttaaacaaacactttcactacgcttcctctatattcgattcgattgagattcgtaactcattcgtttacgatactatgataagaatgtgctccagaagctctcagcctcacctgggtttacgatattttctattaatggtgaaggaagaagaagaagatatagctcctagttatctcacgtttcatttcttgattgttgcgtgtttaaaagcttgtttcttctctgtgggtaagcaaattcattgttgggtggttaaaaatggtgtctttttatcggatagtcatgtacagactggagttttgaggatttatgtggaagataaattgttgttaaatgcacgcaaggtgttcgatgaaattccacaaccagatgttgtgaaatgggatgttttgatgaatgggtatgttagatgtggtttaggttctgaggggttggaggtgtttaaggagatgttggttagaggaatagagcctgatgagttttcggttactacagcattaacggcttgtgcacaagttggggctttagctcaggggacgtggattcatgagtttgttaagaagtaaaaatggattgagtctgatgtgtttgtaggaacggctttggttgacatgtatgctagt

SEQ ID NO: 170276 - DNA, 350 bp, Arabidopsis thaliana landsberg
  unsure (1)..(350): unsure at all n locations
gtcggctatcgttcgctggctttgccagcgtcgagaaaatgagcgatgcggaaacgatagatgcgatcaacgccagcgatgcngatttcctcgtcgtcgcgctcggcgcgaaaaaggggcaggcatggatagaacgcaatctgtcgcacctgcaagtgccggtcgtcagtcatctcggtgcggttgtcaatttcgttgccggcacggtcagccgcgcgccttcctgggtgggacgcatcggcatggaatggctgtggcgcatcaaggaagagccggcgctgtggaaacgctactggcgcgatggatggatnnnnnnnnnnnnnnnnnnnnnnnnnnnnnnnccatgcgca

SEQ ID NO: 170277 - DNA, 538 bp, Arabidopsis thaliana landsberg
acgggacgatcatcttctcctgagttatccgacaaaagatctggtgatgaaggtgattgggtacgaagagatttgccagaatcgttgttctttcaagttctcctgaatctcccgacaaaagaaatggttaagactagcgtcgtatcccccgaatggagacatctatggaagtatgttcctggattagatttggatgaagctgatttcacacaatccgatactgctcgtgagtcttatcgatagctttctgagtgtcaaccgtgagtcatccttaaacaagtttaagttaagaatctattgcaatcatgatcgtgataaggagactaataatgctcatatggcgcggtggatcagcgcaatcgttgagcagaacgttcagcatgtcgatcttacatggcttccagtggaggtacctccataaactcaacttatgtgagagtttggtaactttaaggctttgtggcgtagtcttgccaaaacctggagttatttgtcttaccggttggtataaaccctccctcttagaatgggttttatt

SEQ ID NO: 170278 - DNA, 465 bp, Arabidopsis thaliana landsberg; identical to SEQ ID NO: 58604
  unsure (1)..(465): unsure at all n locations

SEQ ID NO: 170279 - DNA, 654 bp, Arabidopsis thaliana landsberg
atgacttgctctgcggctgatctctcagccctactcggcccaaatgccacggcagcggctgactacatttgcggccagttgggttccgttaacaacaagtttaccgatgcagcctacgctatagacaacacgtacctcctcttctctgcctatcttgtcttttcgatgcagctcggcttcgctatgctttgtgctggctccgttagagctaagaacacgatgaacataatgctcactaatgtccttgatgctgcagccggaggactcttctactacctctttggttatgcatttgcctttggtgaatcctccgatggattcattggaagacacaactttggtcttcaaaactttccgactctcacctcggattactccttcttcctctaccaatgggcgtttgcaatcgcagccgctggaatcaccagcggctccattgccgagaggactaagttcgtggcgtatttgatatactcttcttttttgaccgggtttgtttacccagttgtctctcactggttctggtctccggatggatgggctagtcccttccgttcagaagaccgtttgtttggcactggagccatcgactttgctgggtcaggtgttgttcacatggttggtggtatcgcaagattatggggtgcccttatt

SEQ ID NO: 170280 - DNA, 1798 bp, Arabidopsis thaliana landsberg
tattacaaaaccagaaaacacatttgaggaaaagagtgacggtgttgagaatttatgaagcggagtgagagacaagaaatatgttcaaaccaaagagtgaggttggagtttttcatcgaagcagagtagttgatgtttaaggaaaagctgttctgtaactttttacaaccatcagttaaccatggcagagaacaaatacatagagatgtaacgtgttatttttttttttttgtttgaacgtgtataaaatgaccatgaataagttggcaaatttgtgtctctgtaatattattatttttggtttcaatttgacagattctttagttggagtttaaaattgatgaagaggaaaatataagaggtgctatcgttaagtgaaactattgggccgaaaacatataggcccattttaaaattttggtttgttttgcaagagatcccagatctcgaagcgtgcgataaagtgagaaaaaagcaggtttctctcttctttatttggtgtcaaacccaaacacctacttacggaaactgtaacacaataaagtgagtgaccactttctttttttacactatcgatgatacaactttttaatatcatcgtggtgcacattttaaaaggattacaatgaccacgattaaactagtaattagtacatatacaaactagtaattactctattatttatttctttggtaagaacactacttgtgtattactattactaaaacatataataaaagtgtcagtgtcaaatgtcaatgtaatttaatttaggggaaatgaaatggccaacataatctaacacaaaatcaatgaaaatggagagagcatcttactcaccttataataacccttatatttttccacgtacgtgggccccctcacataaacctctctttcctttataatctctccactcttcacactctcacttttgttcatgtaccaaagaagtccccaacaaacacaaaataatcaacagagagagtcagagagataatgggtaataactatcggtttaagctatcggagttaatccctaacgcttggttttacaaacttagagacatgtccaaatccaagaagaagaatcttcagagccaaccaaatagcaccacctccaagaagaaacaccacgcagtctctactcctacgtccacaacgccactcagtcctaggcctcctaggcgcccttctcactcttccaaagcgccaccctcccatcctcccaggaagtcctccgggaaccgtcttcgtcaccgagccaccgtcgactctaagtcttccacgacttccggcgacagcactaccacagaaacaggttctttctcaccggactttcgctcggatcaagttctcctccccgacgagtcattaacgggctcctggcacagcccttgcagctccaagttatccaaaaccgcaacctttacgccgccgccggaactcgaactccggcccatcattaccaaaacggccgccaccgcacggaaaacggcggtgaattctccggcgggggtgagacttagaatgcggtcgccgcggatctcggtgagcagcagcgcaagaagaagcgggtcgtcggctcggcggagcagggcggtggtgaaggcgtcggtggatccgaagagagactttaaggagtcgatggaggagatgatcgctgagaacaagataagagccacaaaggctctagaggagcttttggcttgctaactctgtctcaattcagacgaatatcacgctattatcatcaatgtcttcaagcaaatctggcttgatcttaatcttccacca

SEQ ID NO: 170281 - DNA, 477 bp, Arabidopsis thaliana landsberg
atttactatgtttgatttacaaccgagagatttggccgtttttgtctctgccgttaaccctccctctcctaattttgactatttgactctatcttgggctagagatgagaagctggctgtgtatataaccactacgacacacgtgagattatagagatttggatttcgactaagattgaacccaacacggtatcgtggagcacttttttgacagtggatacgtcactaatcaatggtttaccggatcttttttcaactttctatgaacctaggagcttcttcattgatgaggagaagaaagtcgctgtgtttttttataataaagggaccgagaccggttgttaccaagtggcttacatcattggagattatggatacttcaaatctgtcaaaattggagtaatctcgaactcccagtggcaacaaggcatacttgtgtgctcttcttatgttccaagtttagtgcaactacaagat

SEQ ID NO: 170282 - DNA, 577 bp, Arabidopsis thaliana landsberg
  unsure (1)..(577): unsure at all n locations
agtagctgaagactgtagtgaagaggagaagaatccatcgtttagagagtctgtcaagtgtaaaatctttctaggtttcacttcaaatcttgtttcatctggtgttagagatactattcgttatcttgttcagcatcatatggtttgtgatttttgctttatcaccctgcttttttatagatgttaaaattttcgagctttagttttgatttcaatggtttttctgcaggttgatgttatagtcacgacaactggtggtgttgaggaagatctcataaaatgccttgcacctacatttaaaggtgatttctctctacctggagcttatttaaggtcaaagggattgaaccgaattgggaatttgctggttcctaatgataactannnnnnnnnnnnnnnnnnnnnnnnnnnnnnntttgacgagatgttgaaggaacagaaagaagaggtattgctttatctttcctttttatatgatttgagatgattctgtttgtgcgtccccagtgcccatagattttgattcctctcttgaatcattaaattcgttggtgaatccttctttctctggtttttc

SEQ ID NO: 170283 - DNA, 602 bp, Arabidopsis thaliana landsberg
attctttctccgccgctcctccaccaccgtcgtccggtaacagaatcagtccggcggttttgtttgtaattgtgattctagctgtcttattcttcatttctgggcttcttcatttgctcgtcaggtttcttattaagcatccttctgctactgcttcttcaaggtctaatagattcccagagatctcaactagtgatgctcttcaaagacagcttcaacagctttttcatttgaatgattctggtcttgatcaagcttttatcgatgctttacctgtttttcactacaaggagattgttggtagtgctggtggtggtggtggtaatggtgctgctcaagagccgtttgattgcgcggtttgtctctgtgagttctctgagaaagataagctgaggttgttgccaatgtgtagccatgcttttcatttgaactgtattgatacttggcttcagtcaaattcgacttgtcctctttgtcgtggtactctcttttcccctggtttctcaatggagaacccgatgtttgatttcgatgatataagagaagacgaagagggtgtgaccgagaatggaagtcagaaaactatggagattcaagaaatc

SEQ ID NO: 170284 - DNA, 407 bp, Arabidopsis thaliana landsberg
tcgtcgcctgggtcgtgcccggaattgccggtggtatcatctggcagatgttgttttccgaagcgccatacggcgcgatgaacagtatcctgcggatgatgcatctgcccgttgtcgcctggctttcggatccgtcgatcgcgccatggtcggcgctgatctccaacatctggcgcggcacggccttctcgatggtcgtcatgtatgcggcgctgaaggcgatcgatccctcgctctacgaagcggccgaagtcgatggcgcgacgggcactcagcagttcttcttcgtcacgattccgcagatgcgcgccgcgatcctcgtcaaccccatcccgatcacgatcatgacgctcaacaaaatcgaaacgatcatcacgctgacaggaggcggccccggccgcgcgacc

SEQ ID NO: 170285 - DNA, 1410 bp, Arabidopsis thaliana landsberg
ttgaatggctgaacaagcagaaaccaaggtcagtcatatacataagcatagggacacttggtcaattgaaaaccaaggaagttttggagatggcttgggggttgtgtaatagcaaccaaccattcctatgggttatccgagcgggttctatccttggcactaacggaatagagtcattgccagaggatgtcaataaaatggtctctcagaggacacattgtgacaacgagcaccccagatagaagtacttggacatcctgcaatgggaggcttctggagccattgtggatggaactcaatactcgagagcattggacaaggagttccaatgatttgcaggccctttcatggcgagcaaaagttgtacgcaatgtatatagaaagtgtttggagaatagggtttcaggtggatggtaaagtggatagaggaaaggttcacagagctgtcaagaagttgatcgtggatgacgaaggtgcggggatgcgagacagatcccttgttcaaaaagagaagatcaaagcctctgtcagtagtggaggcacctcatacaacgcattggaagatattgtcagttacttgaaggcaaagcaaagatgttgaacttcatgtaatattagttgaattgttgcaagatttgcaaagtgtggtttcttttgtatcactcttggcattttgctcaatatagaattgttgcatcacaataaacatcttttcttttgtctttgattactactctctctaacaaaataaagagatgtaactacttgcgtacaccatcgaccacatgcttcacatgtgcgcaaagagagctaacaaaacattatacggatgaattagtgtccacaagcgagaatctgatatttctatatataaaacattcaaagaagatgagaagcagagtaatctataagcccggagcttagagagctacttattagttttcttgtaggttttggaaatggaggaaaagcaggtttcttagtaacagtagcttccgccctataaacaagtagaaaacatatgtatcaactacattgtgaaatgggctccacagaaggaagtacttgctcatcctgcaataggggcgttttggagccatagtggatgcaactcgatactagaaaacatgatcagcgaaggagttccggtgatttgcaggccattttcgggtgaacgcaaggtacttggagtgtgtttggaaaattgggattcaagtggagggtgatctagacagaggagcggtcgagagagctgtgaagaggttaatggttttcgaagaaggagaggaaatgaggaagagagccgtcactttgaaggaggagctaagagcctctattctcccggaaggttcttcacacagttcacttgatgacttaatcaagactctatgaacatttacaaataaaatt

SEQ ID NO: 170286 - DNA, 1275 bp, Arabidopsis thaliana landsberg
atgcaaactcgatccgaaggttttgcacacctattaccattcagagacagaattgacaaaatagctcgtgagttatcagaaaccaaagcaaaggcagcctgtgatcagaacagaccagctgctatggatcaacagaacagaccagtttatgttcaagacccacctaatgttgatcaaccaagaaacattggtgctggtgatgccccaaggaatcatcaccaaagataagggatagtgcctccaccagttcagaacaacaactttgagatcaagagtggtctcatctccatgatccaaggaaacaagtttcatggtttacctatggaagatcccctggaccatcttgacagctttgatagactctgtggccttaccaagatcaatggtgtcactgaagatatgtttaagctcaagctatttcccttctctttgggagacaaggcacaccagactccgcccacctgaggggacgattgtaaaaaagcttttcttaaaaaagcttttcttgtcaagttcttctctaacgctcgcaccgctagattgaggaacgagatctcaggtttcaaccaaaaaaacaatgaaactttctgtgaagcttgggagaggtttaaaagctacacccctcggtgcccccatcacggattcaagaaggcttcattattgagcacactttacagaggagctttaccaaagatcagaatgctacttgacaccgtctccaatggaaacttcctgaacaaggatgtagcataaggctgggagttggtcgaaaatctagcacaatctgatgggtgttacaatgaagactatgatcgctcaatgagaggaactggaggaaatgaggataaacagagcaaggatatcaaggctctgaatgaaaacttaaacaagttgttgctggctcagcagaagcagatacactacatcactgatgaagagcacttccaaatgcaagaaggggggaatgatcaaactgaagagttgtgctacattcagaaccaaggagggtttaacaagggctacaacaactacaagcccaacccaaacctctcctccagaagcactaatgtagctaacccccaagatcaagtgtatccaccccaacagaatccgtccaagccttttattcagtacaaccaaggttatgtccctaaacaacagtttaatggaggctaccaatagcagaattcatcaccagggttcactcaacaaccacaacaagccccagcagcccaagatcctgacaccaaacgaatgcttcaacaaatcatccag

SEQ ID NO: 170287 - DNA, 328 bp, Arabidopsis thaliana landsberg
gaatttggttcacttattctcaagaataccttgagaacttgattcttcttcatcttcatggataatttggtatatttggaaagtaaggaatgaaaaaatatttgagaatgtggataaagatccgctagaggtattatgtttagttgaaaaagaggcacaatcatagcagttagctctagttgcgcttcatagtgaaattcaccgctccttgagattagaaaaaataatttgggtgagggatatctcatataaaaatacatatttattcaggattttgctactataatgatcggatcatggaaaggaagcaataaatattcaggaacaa

SEQ ID NO: 170288 - DNA, 597 bp, Arabidopsis thaliana landsberg
ggctgaacaagcagaaaccaagtcagtcatatacataagcttgggaagcaaagctcacatggagactaaggaaatgttagagatggcttgggggttgtgtaatagcaaccaacctttcttatgggtcatccgacctggctctgttgcaggcttcgagtggatagagttattaccagaggaagtcattaagatggtcacagaaagaggatacatagtgaaatgggcaccgcagatagaagtacttggacatcctgcagtgggaggattctggagccactgtggatggaactcaacactcgagagtattgtggaaggagtcccaatgatttgcaggcctttacaaggcgaacaaaagttaaatgcaatgtatatagaaagtgtttggaaaatagggattcaacttgaaggtgaagtggaaagagaaggtgtagagagagctgtgaagaggttgatcatggatgaagaaggtgcagccatgagggagaggggctcttgatttaaaagagaaagctcaatgcctcggtaagaagtggaggctcctcatacaacgcactggatgaagcttgtcaagttcttgaatacagagtgaagatgctt

SEQ ID NO: 170289 - DNA, 6294 bp, Arabidopsis thaliana landsberg
  unsure (1)..(6294): unsure at all n locations
gacaacatttgcggcaatggcggcgagtctaccagacggtgtttccgatgactttgactacgaacattggtctccaatcgcggaaacgagactggtggagaatggtgtttgggatgttgttcaaaacggagtctcaccaaatccaacgacggatccagaggtagcggcgactattaaggtcgaagatcttacccaatggagaaatcgtatgattgaagacaacaaagcgctcaagataatgcaatctgctctcccagattcggttttcaggaagactatctcggttgcttnnnnnnnnnnnnnnnnnnnnnnnnnnnnnnaaggtaacgataccaaagaagctaaaaagctacgtagattagagaaacaattcgaaaaccttatgatgtacgaaggagaacgaatgaaattgtacttgaagagacttgagaaaatcattgaagagttatttgttttgggaaatccaatatcggatgataaggttatcgcgaagctgttgacttcgctgccacggccatatgatgattctattcctgtgttgaaggaattcatgactttgcctgatctgactcatcgtgatcttcttaaggcttttgaaatgtttggatcaaaacctaaaactatgcctcaggagttgatgaagttcattaacattcttagaaaagcccactctgatcggttgccgtgtcccgggtactataagaacaatcccatcaaagatgctaagcttcttagattagagaaacaattcgagaagcttatgatgtatgacggagaatctatggattcttacttggtgcgagttttggataccattgaacagttccgcgcttcgggaaatccgttatccgatgatgatgttatcgctaagctgttaacttcgctgtcatggccatatgatgatgctattcctgtgttggaggaactcatgaatttgcctgatatgactcctcatgatcttattggtgttttggagatgtttggatcacatcctgaaattatgcctcaggggttgaaggatttcgtcaaaagtcttagaaaagccaaggctgagcagttgtggtgtggtgtgtgcaagatgtacaatcactaccaagaagactgttattacaaccctagggtagtgaacttaggtggtggagaaagagggcattgtgctagagactgctgtaacacaaggaatttgcaacccggggcgacactacaagctcagaagagagaagtgaacgatgatttcacttatgatgaggatatgtggatgctatacaccaccactgagaatcacatgactccatatgagaagtttttcacatctttggatagaacatacagagctggggttcaattagcgggcgtgaatgttgtcatggtagaagggataggagatgtcaagttcacgatgaagggagtgaagatgacaatcaaggatgtgcttttcgttcctcggatcaacaaaaacgttttgagttttagtcggatgaaaaaaagaggctattcattggaaatggaaggaggtgaatgcactattagggatgagaagggcaacatatttgttcaaaccttgcgggaaaagagaggcattgctctgcgtttgcaggtgactgaaaggtatttgctttgaataaatttatttggtagtagtagtatcaagtcttttatgtcgtttcaatttggatttattcgcctaagtaaagctaattcgtatactgctactgcaatatgaattagtttggtcttttattggttttttggaaactcttttgtattcactatgtattgcttttgttaagttttgctaatggtgaaaggagacgattctagttaacaacttaacaatgaaagggcttttttattaaattgatcaatatatgattacaatccaaacttaattgagaaaatttaccgaaatagaaaggagaataaattctgctttaaatcttagattagctataatcacacaagtgacaagtccaaatcatggttagagagaagcttgcgtgcggtgtacggacgtacggttaatcacttaaccggaccaacccactagaattgaaccagatacaacattcgttaacaaaaataacttaagcgactcaaaaactccgtatgatcaaccaaattcacaaacgtatttgaaatatgtatgaatttaacattcatttggaagtgatgcgattcattggtttatagtttatacatatttctccaattgtgttaaaccgaaccaagaaataaaagcgaaaccgagccactactcaactaggtgattttgcaattgaactttagggtttatgattaagcgcactatataaataaaatgttctggagactggagagggattagtttagtcactttgcttgatccaagagaatatacagagaaaaaagcttgacgacagttgaggctatggcggcgaatctccaagacggtgtttctgatgactttgactacgagcattggtctccaatcgcgaaaaagagactcgtggaaaatggagtttgggatgttgttcaaaatggagtctcgccaaatccaacgaagattccacagttagcggcgactatccaagccgtagatctagaacaatggagaaatcgtgtgattaaagacaacaaagcgcttaagataatgcaatcttctctcccagattcggttttcaggaagactatctcgattgcttcagccannnnnnnnnnnnnnnnnnnnnnnnaaggtaacgataccaaagaagctaagctacgtagattagagaaacaatttgagaagcttatgatgtacgaaggagaaccaatggatttgtacttgaagagagttgaggaaatcactgaacggttcgaagttttgggaaatccgatatcggatgataaggttatcaccaagctgttaacttcgttgtcatggccatatgatgattctattcctgtgttgaaggaattcatgactttgcctgatctgactcttcgcgatcttcttaaggcttttgaattgtttggatcacatcctgaaactatgcctcaggagttgatgaagttcattaacattcttagaaaagctcactctgagcggatgccgtgtggtatctgcgtgaagaacaatcacaaccaagaagaagacttgtattacaaccataggcctagggtagtgaatttaagtggagccaatcaatttagaggacaagggcattatgcaagagattgcagcaacactagaaatctgcaacaagctgagaagaggatccaaaaacctgagcatctgatgttaggggtaactgttggtggtatcacatttgatgagggcatgtggatggtacacaccactacaacggatcacatgactccatatgagaagtttttcacgactttagaccgatcatacagagctagggttggactggcggacgggaaagttgtcatggcagaagggaaaggagatgtcatgattatgacgagggaagggaagaagaggatcaagaatgtgctttttgttcccgggatcaacaaaaacgctttgagtgttgctcagatgacagaccaaggctgttcagtaacatttggaggaggcaaatgcattatgaagaatcacactgggaaagtatttggagaagccatgttggaagagacaggttatgttattcgtttgcaggtgattaaagaagttatctggcactaggcttaactcgtatggtggacgtattagtttggtattcttctgttttaagtttctttgcctaagaataagaaagctactgctgctgcagtatggattagtgtggtctttttttaacctaggacggtttggaatcaatctagtttttgggaaactgttttgtatccacaatgcaatgcttttgtcaagttttgctaatggtgaaagaagacgattcttgtagaaagataaaagggcttttggtaaattgatgatcaaatatacgattacagaccaaacttaattgagaaaatttaccgaaattgaaagagagagatagacatgcagaaggtgggttgttgaatcagtagcggcagatcttggccgtaggcattgtgacacaaacttgtgcgtatttcttcttggccgcctctgtccctcgcttgggctcttcttcttcagccatggctaccttagccaaagaacaaaccgctgcagctgcagccgtgaacatgaggtccctcctcattgtggtgctgctctgttccttgacttctaagctgggtgtgttgtcgctcgtggaggctctgactacggagagccttcgtccgccggtggctgagggaaccttggcgacggccgggaagaaggtagcggtcatggtcatcgatgccattgcttgatagttgattctactcgctagttggctctcggttaatggtttgtgaggtgatgggaatgtgtttaagaagttgggtaatttgagtttgtggaattgtggagaaatgatatccatttccttatccaaatatgattttcgtgcaaatgggttgtggccacgtgtcatgttctatcttttgttaagaaaaaaaaccatgagaggttctcgcaccaaaataaaaaagtgtacagtgtagatacttttgttgtggagtcccacatgtaggtcccatcttggatttaatttaatgaaacagaataatgattcgaaattacaacactggttaaaccccaacccttggtctaagtctaacgccgttagtcgttcttctctgttctctccatcaaattcgtcagaaaccaaagaagattcatcaattctcctctaacaccaatcctgcttgctttcactttccttctccgatttcgttctcacgccttcgcattcctttttttaatttcgtttcgaaacgcgtttcaaggttacgtcgatctcaaagtaacatcgccttcggagagaaattgataaaccttgctccaattccattgttattcatggctcttagaaactttacctagattactcggattcaatcgtcaagtttatattggatcgttgtgtcgtaggaaccctaatttcgagggcctgtgcactcactcactcactcaatttgcacaacaccctcagagaccaacaagagcaacatgaacgctccgatcataggtaagctctattttgcacttgggcttcctttcccattgttcggttcttcatcgatggtatttgtttacctttttcctgtgtagatccattgcaaggagattttcctgaggtgattgaagaatnnnnnnnnnnnnnnnnnattaaatgcgttgcctttaatcaccgtggttctcttctcgctggtaataattttcttcccaatttagcttttgctgtttcgttatctatgaatttggttaaagtttggatttttatagtacttacattgatggtgatatcttgcattgtttatttgttagcgggatgtgccgatggtggctgtgtaatctgggatttcgaaacaagaggcattgcaaaggagattcgtgatagtgattgttctgctgctataacaagtgtctcctggtccaaatatgggcaccgcctgcttgtctcagctgcagataagtcattaactctttgggatgtctcaaccggagagaagattgctcgtacgattcttcagcagactccgttgcaggctcgtttaaaccctggcttaagttctccttctctctgtctggcgtgcccgctctcatccgctccgatgatagttgactttgatattgattgtactactttgcttccagtctctgtgcctgagatgcctgatgtattagctcctccgcaacgcagtaaatgtcctgaatcaaatcctcctttctctccagctgcagcatgctttaacaagtgtggggatcttgtttatataggtaattccaaaggggagatacttatagttgattataaaagtgttcgagttcttgctttggtttctgcgtctggtgcggcacctgtgaaaaacatagtgtttagcaggaatgggcagtatcttctcacaaattcacatgatcgaaccattaggatatatgaaaatcttctcccagcaaaaaatgtgcttaaatcccttgaggacctggggaagaacatagatgggcttgatggtattgagaaaatgaagacagttggatcaaaatgcttaacactcttcagggaattccaagattcagttacaaaaatgcattggaaagcgccttgtttcagtggtgatggtgagtgggtagttgggggttctgcgtgcaaaggggaacataagatctacatatgggaccgagctgggcatcttgtgaaaatattagaaggtccaaagaagcgttgattgact

SEQ ID NO: 170290 - DNA, 481 bp, Arabidopsis thaliana landsberg
tccggtccatggaatggagttgggtttagtggcataccgacgatgcaaaacaggagctactctgacgttgttaacaacttcatagacaatagagaggaagttgcttacaatttcaaagttaccgaccatagcacgcactacgtgagattaacactgactcccgaaggattatatattagagatatccagatgggatacaacatcatcggaatggaacttgttttgcgttttaccgaccgcgaaatgcgatttgtaccaaatatgtggtcgtgacagttattgcgacatgacaactaccacggagatggggtttttattctgatgaagatgatgaggctgccggagacaagcacaacaattatggataagacaattgggttgaatgaatgtaaggagaggtgttctaaggattgtcactctaccgggtttgcgaataaggatatcaaaaatggtgggtcggttgtgtgatttggactgagag

SEQ ID NO: 170291 - DNA, 467 bp, Arabidopsis thaliana landsberg; identical to SEQ ID NO: 75388

SEQ ID NO: 170292 - DNA, 454 bp, Arabidopsis thaliana landsberg
atgagtagattccgtaaaaccctagtttctgctttcgttctctgcttggttatttttcctcttctagtctcagcggcagaggaagaaaaccaatgcggcggatccaaaggtggctctgctgcggagaaagcatcggctcttaaatacaagatcatagctttcttttccatcttaatcgccggagtatttggcgtctgtttacctatttttggcctcaagacggagagcaatttcttcatgtacgtgaaggcattcgctgccggcgtaattctagccaccggctttgtccacattcttcccgatgctaccgagagtctcacgagttcgtgccttggagaagaaccaccgtggggagattttccgatgacgggactcgttgccatggctgcatcgatcttgacaatgttgattgaatcctttgcttcagggtatttgaacagatctcgcttggcga

SEQ ID NO: 170293 - DNA, 691 bp, Arabidopsis thaliana landsberg
atgcttgattctcacaaccgcggtcttatctgtaagctccctgttctccctctcttttggtgcaacaataaagaacctaatggtgccgacttctgttgtagtgcatgcaaaatcacaaatcttggcacagcctactatttttgtgccacatgtcgtaaaaagttccacaaagaatgtgtggagtctccacttgaaatcaaacacccttcctatccttttcaatctctccaactttatagttctccctttgcccttgtgaattgcgtatgttgtgatataagtttccaagacatgatttatcattcttctacttacaaagtgagtatgcatcctgtttgtgcgatgaaaccagtaccctcttttatagaccacacaaaaagacatccccaccctctcactttttcccctagcaaagcttccttaccttgcaatgtttgtggcctcattaaagaatcttttaccacatatgtttgcgttcggtgtatctttgtagtacatatagattgtatctatttcccctatgtcattaaaatatgtcgtcaccaccatcgtatctctttaacctcttctcttccatccggaaaatggtcgtccggagtctgtcgtcaaaaggttaacaaaaattgtggtgcatacacatgtaacaagtgtagccactattttgttcatacaacatgtgcgttacgggaag

SEQ ID NO: 170294 - DNA, 511 bp, Arabidopsis thaliana landsberg
atgacgatgccgaatcttccaaaggagttggtagaggagattctcagctttgttccggccacatatctgaaacgtttgagcgctacttgcaaaccatggaaccgtttgatccacaacgacaagagattcgcgagaaagcactacgataacgccgcaaaggagtttctggttttcatgatgaggaagaacttcaggattattcggagaggcgtcaatctccatggagctgatccatctgcagaggtgaaaggtgaacttaccctaccagatccgtattttaagaactcagctgatgaattccatatagatagagtctttcactgtgacggcctattgttatgcacctccaaactcgaacgtagaatggttgtttggaacccgttaactggtgaaaccaagtggatccaaacccacgaagaaggcgacaatttttttcccggatactcccaagaagacaagaacatatcaagcaaaaagagctacaaaatcatggggttttatcgtagtggta

SEQ ID NO: 170295 - DNA, 571 bp, Arabidopsis thaliana landsberg; identical to SEQ ID NO: 70296
  unsure (1)..(571): unsure at all n locations

SEQ ID NO: 170296 - DNA, 1219 bp, Arabidopsis thaliana landsberg
agaagatcctcacttctctccctaaagatgcatctgagacatgttcttctccactcaacaggtatgccaagcgacttgttgacaatggtattagctccgatgaagctaagctgttgacacgggacatcagtgccatcatgctgcctaaggtcaagaaagagaaggcacagccagtggacattgttgagtacatctgcactatcactccagaccagaccactgagaaggttccagatccaggtagctttgttcttgattgctttactttacaagcagattcagccgctctttgagtgatctgggatcaagtatcaacctcatgcctaagtctgttactgagagactaggcatgactcattacaggccgactcacatcacttttctcttcgcagatcgttccaagcgaatccctgaaagaatccttgaagatgttcctgttaagtttggtaactctgttaaccctgctgattttgtggacctggattatgagaaggaacccaaggatcctcttatccttggaagagcattcctagctacagctggtgctaggattgatgtgaagagaggtaggatctctctcaaagtttgttatatggagatggagtttgacatggatggttcagcgctcactaagcctatcagtagtattgcctctagcacagacacacctcctctaactgctcaaaatcccaaaacagagccacacacaacgctcccatcagctcacctcgccaatgagaattgtagagcatcggtgtcgatcgacaccagccctcctgtcgatcgacacccttgggattcatagacagaggattctagacatcctcttcagcccacaccacttgaggccctctttgataagttctcttctatctcttgtattgggtacctttgattaattctttagataattcgaagattgcttcacaagataacaagcctagagttcctcgaaagcttgtttctcctgttgttcttgcaggtgacgagatgagtgtcgatcgacacatccctgattgtcgatcgaaacctgcagctgccccagccagatccctttacacaccgccttagaaggcgaggaggcagcatcaatcctccaccactccacccacatcttgaactccaccaagtcaagctattgactcaaaacgagcgcttagtgggaggcaacccactggtttgatttttcttttcactttctattattttcttttatttt

SEQ ID NO: 170297 - DNA, 212 bp, Arabidopsis thaliana landsberg
atgtttaggatagttttgcatgcatgttgcatatttgtgttgttttcaggttatttggagcttcatctccatctcttgataaccactcgatcacatcactcgacccccaggtcgagtgacttcatctccatcttccgaccaccactcgattaacatcactcgacccccaggtcgagtgactttatcccattgccagacctctactcgacctc

SEQ ID NO: 170298 - DNA, 1673 bp, Arabidopsis thaliana landsberg
atggggaagaaagcgaagaagaaggcccgagctccaacaaaggagattcagaccatggaaatttccaagaaggtctcagaagagccgcctagtcaagccggggaaattgctgagggtgacgttaaagcagttaaggagacacaagcttgtgtgcatttcgataaggctcttaatttggagaaggtgttggataagattaagtcatcccggcagattaagtgtgcagaatgcaatgaaggagtgtatggaaagagaggaactaaagcaaagggcagtaaagggaagaaggatttttcttcttctgatccaaaatctaataacaaagccatttggctatgtttggaatgtggctgttatgtttgtggaggtgttggtttaccaaatggacctcagagccatgttttgcgacacagcagagtgacacgtcaccgattggtgattcaatgggaaaatcctcagttaagatggtgtttcccgtgccagttgcttctccctgttgaaaaagaagataatggccagaagaaagatgtactgtcagaggttgttaaattgattaaaggacgatctttgaacaatttagcttcatccgatatcgaagatcagtgctcaggaagtggcagtatcactagtgatatcaaactagaaggtgctgtgaccagtgatatagaagcaagagatggttatgttgtgcgaggtttagttaaccttgggaacacatgtttctttaattcgataatgcagaatcttctttctttggatcggttacgcgatcacttcttgaaagagaatgggtctggggtcggtgggcctcttgcgtcttccctgaggaaattattcactgaaacgaaaccagaggcaggcttgaagagtgtgataaatcctagagccttttttgggtctttctgttctaaggcaccccagttccggggatatgaccagcatgatagccacgagttgctacgctgtttgctagattcgttgagcaccgaagaatcggccttgagaaagaagcgtggtgtttctgataatgatgagaaatctactactctcatagaatctgtatttggaggcgaaacgtcgagcattgttagttgtatggagtgcgggcattcctcaaaagtctatgaaccatttttggatctctccttacccgtaccattcaagaaaagccctcctaaaaaaccacaacctgtttctcgagcaaaaaaagctaagcttccacctaagagagtcccaaagaatgtgtcaaaagtaagtaaggtttcaaaagttctcccaggtatggttctttcggaactgaactcttccggaaaatctatggctgtcacagctgattcggatacatcctgttccagtttagcaccccttgataatggtccggttttagaaactccttcagttctaacccttgacaataatcaggcctcagaaagtgcatcacaaagtgatactggtttcgatggctcctggttggattttatcggaccagaaacctctggagatgagacgaatttggatatgcaagaagatggtattgataatgtcattacagctgaggttaatcaaattgttcccagtccaaatattgtggcgaatagctcagtttcatcgggtgatcagactttggaaggtaatacagagaggctgatgcaagattatgaagaaattgcaaa

SEQ ID NO: 170299 - DNA, 465 bp, Arabidopsis thaliana landsberg
ggatcctggccgctggcgggacgaatcggtcgccaacactattttcgtcattggcggctcggacggactttttcctgaattgcagcgcatggccaagcttcgactggcgttcggcaaggccacctggccgcatcagttggtccgtgtcttgttgctggagcaaatttatcgggccgcaacgattctggcgggccatccatatcaccgcgcttagcgccctacgtgacggtcgatgaattcagagcacgatgtgatccgaaaatcgcttcacacgtttcagcttcataccctggtcgccggactgctcgcggccggcatggtcggcgcgtggccgtcgatcgcgacggcgcaaaccccggctccggcacccgcaacaccggtcgccgcgacaccagccgagacggcaccggccgcaacgacgacaccttccaccgacgacatcaagcaacgcgcgcaggagcttga

SEQ ID NO: 170300 - DNA, 813 bp, Arabidopsis thaliana landsberg
atactttggttccgggtctagaaggtttataaacttttgcctaaaaccttttgtacaaatatcagtaggtgtgttcttactaggactgaccagatcgatcataggatttatcaattaaaaagtaaaatcaggtgggtaatttattttggttggtcaagggtttaactgtaatataatttggttgataggtccatgtggggactctggtttgaaagagtggattaaggccggacttccggcgaagaaagcagtcttgggatttccatacgttggatggacctggagtctaggaagcggcaatgatgcggccaccagccgagtagctacatcagctgagggttctatcaactacgatcagataaaaaggttaatagtggatcacaaagcaagaccggtttttgactcgacggtggttggagattactgctttgccgggacgagtttgattgggtacgatgatcatcagagcgtcgtggctaaagtaaaatacgctaaacagaaaggtttgcttggttacttctcatggcatgttggagctgatgataattttggcctatctcgtgcaggttcgttttcattaactttctttttactatatccttaaatttgaattatcacattcggaaataatttttttgcaagttttttttatactatatatttgaatctattaattgggggaaaaaaaattagtatctgatcagattagcagtagtgagttttaaatggcttttggtggtttttacagcatcaatagcatgggatactacagagctatccaccggacatggaagtgtagcagccggagaataa

SEQ ID NO: 170301 - DNA, 761 bp, Arabidopsis thaliana landsberg
tgatgaaattggacttatccaggggatgattgaagtgagagaaggatcttggtttgagcctttgaaagatcttgaaggaaaacttgtggggcttgtgagtaatccaccatacataccaagtgatgacattccaggcctacaagctgaagttggtagacacgaaccgaaacttgcattggatggtggtattgatggaactgatagtctttttcatctctgtcatggggcttctcggatgcttcaacctggtggctttttcgttttcgaggtacctaccttattttcactctgtttctccaaaatatttagtagaaagatacaatcgtttgggtttactatgtttttctctttgtctctgatactaaaaccggaaatgttagtattgaaaagagatttaagataatcgttcttgtgtatgagtccgaagaaacaattgttgcttattgttgctttcactttatcagtaagaatttggcgttctaagaagattatgattgccactcaaagatcaaagtcttgattggtcaattttcattatatgtttatttggttggaagatgtttgcgtatatactaataatcacatcaaccatgaaagattaatcctatttgtttatgatgatgcagactaatggagagaagcaaagcaagatgatcgtagattacatgatgaccagtgatctcaaagactgtttctctgatttgaagatagtttctgattttgctggtttctatcggttcgtgcctggctttcgtctctgg

SEQ ID NO: 170302 - DNA, 1353 bp, Arabidopsis thaliana landsberg; identical to SEQ ID NO: 10052
  unsure (1)..(1353): unsure at all n locations

SEQ ID NO: 170303 - DNA, 744 bp, Arabidopsis thaliana landsberg; identical to SEQ ID NO: 63220

SEQ ID NO: 170304 - DNA, 619 bp, Arabidopsis thaliana landsberg; identical to SEQ ID NO: 72411

SEQ ID NO: 170305 - DNA, 1198 bp, Arabidopsis thaliana landsberg; identical to SEQ ID NO: 60327

SEQ ID NO: 170306 - DNA, 664 bp, Arabidopsis thaliana landsberg
aactccagaggagatggagaggcagaggaagaggattgaatttatttgtcgagctagaagaaggtttttaagagctgatgctgttgaagaagatacttcttcacttcctttgccaactttgcttaaaccagagttgaagcatggaaagaaacctattttcgatctcatggaggccattagagagattaaggtcaggattcttaatatgagctgccattgtaatagaatggaagctacactatttagggttcttttaatttatttattttgtgtcaaaggattaatttttttgcttgtttcgtagttaggggatttcaaatgactattataaaggaagctatgatgattaggatcatatgactatataatgtgaaacataaggagtcttggaagaattgttagacgttgtggattagtttagatcatgcaagttttgtgtaatggtggtactgtgagatttgtggattctgtaaactggtaatagttgttgttgctgagttgatttacaagttgagtgagtgagggcaatgcatcccttttgttcgtatggttttcatttctgatgctgtttttatcaatggttcagggcaatgccaaggcgaaatttgatgaaactcttgaggcgcatgtgagattgggcattgaaaaaggaagatctgagctg

SEQ ID NO: 170307 - DNA, 1228 bp, Arabidopsis thaliana landsberg
gaaagattctccggatctttggagaatcgaaacaacggcgaagagacagctaagatagtggaggtagatacagggacccgacccgggacttacagaatccgagcacccgttttatccgggtcggatttcttagacaacccgtttcgacgtacgctttcttcaccgctctcgggtcgagtcccaccgcgtctatcaatgcctaaacctgaatgggaagagtgcagtagcaagttcccgacggcgcagagcacacctcgtttttctggtgggtctccggcgaggagcgtgtgctgctctggtggcggagtagaggcggaggtggatacagaggctgatgctaaccggttctgtttcttgtcgggggaatttaactcgggttacatggcggatacaacgtcgtttagggcgaaactgaggtcgcatagtgcaccgagacagagaccagagagtaatgcttcagctggcggatggaggaggagtatcggcggcggtggtgttaggatgcagagacagtcgtgttcgggtgtcagagaagctgtggtcgggaatatcgagaggcgtaggatgcgttggtgattcttatttccataattattatccgtttagttttggttaattaggggagtaatgttattaatttaatatagtttgatattattatagttttctaagtttcactgacaaaatttaaaattgttgtttcttgtatgctacatattctatttctatgtaagttttttgctacggataatttacatttttattagcttaactaaaattatccgagtttttttatattcggtgttgagaaaacggtactgatcggttagtaaacaattattggttcggttaaatataccaaaccaatattatcggctacaacgcatgcaagagactattttgtaaacaaccacttaaacataaacacgtgttaacgcgattcacatcaacgcgtgtggaaaaaggaaagttgcttccttcgttcttaatcccttctctgtgaacacaaaaacgcgaaataacatacaaaaaccaatacaagtgatttccattatttctcgtctacgtatacaattgatcttttccccatctccaattcagatttggacagaggtattttttgatccgattcttacgaatcctgaatctttctcgtagattaatcgatcgatcggtttttaattcgcggaaaaatgtttcagtaacccgtgatcgtgtcggttggggt

SEQ ID NO: 170308 - DNA, 542 bp, Arabidopsis thaliana landsberg
ggaaagtgtagaagtccgtgtccagggcgccgatgtggggaaactcataaacgtggtgagagatgaaacggaagcgagaaaaggagccactccctcagaatcacccaccacacgatcgatcatctcagagcctgactcaagaaccgagcctcgacctaaagaaccagaccccatcaccaattactcagaaacaaagagctttaactgctgctcggattcttcaccagctgagaccagaactaactcattcgtgcctgaagaggaaacaactccgactccacctgttaaagagacgttggacatcaagtcgttcagacagagagcagaagcgcttgaaggtctattggaactatctgcggatttgctggaacagagcaggctcgaagagctagccattgtgttgcagccgtttgggaagaacaaagtttcgcctcgagagaccgctatttggttggccaagagtttgaaaggaatgatgatcgaagacatcaataataataatagcagtggcagctccaggaattgttcatgaaggtaaatta

SEQ ID NO: 170309 - DNA, 561 bp, Arabidopsis thaliana landsberg; identical to SEQ ID NO: 43812

SEQ ID NO: 170310 - DNA, 623 bp, Arabidopsis thaliana landsberg; identical to SEQ ID NO: 18841

SEQ ID NO: 170311 - DNA, 993 bp, Arabidopsis thaliana landsberg
gacgaaagatgacatcatcacaaggcttttcaacattgcatcaaagtaaaaacactagagatcatgagtttgaagagataatcccatcaccaaaaagacagaaaagagatctcgtgactccattagctaaagctaaaggtaacgaaacatgttctttagtagcaatcctccatttatagcattctcccgtttctatatcctaacatgaacatagcataatttgaacaggcaagggaaaaacgcattgacagaacttggcttgccagaataaactaagagaggaagccactctttgcaaaaggcgctcttgccgcatctgctttaagtatgatgacaataaagatcctagtctctggttaacctgcaattcagattctcaattcgacggtgaatcttgtggcttatcttgccatttaaactgcgctttcgacagtgagaaatcgggtctgaaagaggatacgccgagtagtgatattgatggatgcttcaactgtgtttcctgtgggaaaacaaatagcaaaatagagtaacttcaatcaaactatcttcttccattatgatacaatctttgatggttattaagtttctaacttttgttttcttctcagatgtttgaagaagcaactgatcattgcaaatgaagaaagaagagtaggcgtgttttgttaccgcattctcttggctcataagcttctcaagggcacaaagaagtacataatagtatctgaagaggtggagaaagctgtgatgcatctgaaaaatgaatttggtgttcccatttcttgtcttccatcaaagatgagtagagggctcgttaacagactttgctgcgctgagaaagtcaagaaacattgctcttctgctttgaaagagcttgatggtcttccactgccttctactatccaaggtaagatcaacaaacacttatgatcacaaaacactatacttgtggtttcttctttcagtgcttgattcgatataaatcacaggatc

SEQ ID NO: 170312 - DNA, 544 bp, Arabidopsis thaliana landsberg
  unsure (1)..(544): unsure at all n locations
tcatcgtaccgcgctcgttcaaagcggaattgnnnnnnnnnnnnnnnnnnnnnnnnnnnnnnnnnnnnnnnnnnnnnnnnnggacatgtgcacgggttccgactgcctcgccatcctcgctgccaagcgccatccaggcgcggcggtcgacgccgttgacctgtcgaaggacgcgctcgcagtggcggccatcaacctgaagcggcaccggctcgggaagcgcatacgcctggggcgctccgacctcttcgaccagttgccggcacaggcctacgatctcatcatctccaacccgccctatgtggacgcaaagtccatgcgagcgctccccaccgaatatcgccacgagcccgtgcaggcgctcgccggcggcaaggatgggctggacctggtgaaacggatcattgcgtctgcgccgcgctatctatcgccacagggagtgctggtcgtggagatcggccacaaccaagaggctaaggaacgagcctgtccgcgcacggccttcacctggctggagacctcggcgggcgacggatttgtgttc

SEQ ID NO: 170313 - DNA, 3052 bp, Arabidopsis thaliana landsberg; identical to SEQ ID NO: 895

SEQ ID NO: 170314 - DNA, 1802 bp, Arabidopsis thaliana landsberg
cttatttcttctcgttttaaaatccctatgtctttttcaccaaattggcaatgcttgctctattaataaaagtcataagttaccattttctcaatcttcgattcactcacattttcctcttgagattgttttctccgatgtatggacatcaccggtccactcgattgatggctataaatactatgttatttttgttgaccattatacacgatatacatggctttatcctctcaaacaaaaatctcatgttgcctcaatttttccggttttcagggcattggttgagaatcggttcaaaacaaaacttacaacattgttctcggataatggtggtgagtacattggcttaagatcatatcttgcgagtcatggaatatctcatctcacatcaccacctcacacacctgaacataatggcattgcagaacggaaacaccgacatatcgtggagacgggattgtcacttttatcacatgctagaataccaattgagtattggtcttactcactagccgcagccgtgtttcttatcaacagaatgcctacaccgattctctccaatgtctctccatatgaagctctttttcaatccacaccaaactattcacgacttcgtgtgtttgggtgcctttgctacccttggcttcgtccctattctcaacacaagctttctcctcgttccactccatgtgtttttcttgggtattctcttacacaaagtgcttacatatgttatgatttttcctcctccaaattttttgtgtcacgtcatgttgaattccatgaaaatgaatttccttttaattcatttttatcctcgactgacaattcccatgagtcttcttcttctgttgttcaccctatttctacagctcgggtctatcgtgagccactcatcatcagctcgccccccagtttggatccttcaccaacaacaacagaacaagtgccgtcagacaatggttcatcaccatctgggaacactaactcaacaccacaagagacaagcaatgttgttgaaaatattgtggcagcaactcctgttcccaccgtagctccaaacaatgatcatcagatggtcacacgggcaaagaataatattaagaaacccaatccgaagttcgcgaacaatatacatcttacggaagtagaaccaacgtctcatgttcaagccttgaaagatgagcgatggagacgggctatgggagctgaatttgattccattgttcgtaatggtacgtttactctagttgatccgagcatggcatctaatgttgtaggcaatcgctggatatttgttataaaaagaaaagcagatggaacgatcgacagatttaaagcgagacttgttgcgaaaggttttcatcaacgacccggcatagatttccaagaaacgtttagtccggtcatcaagcatgttacaatacgagtggtacttgggcttgctgctcaaaaaaattgggtgttaagacaacttgatgtgaataatgctttcttacaaggcaaacttacagaggaggtgtatatgagtcaaccaccgggatttattgacaaagataaaccacatcatgtatgtcgtttgcacaaagcgatatatggtttgaagcaggctcctagagcatggtataatgagttacgagattttcttcttagtaacggctttgttaattctttagcagatgcctcggtgttttattttcacatgggagatgtactcatatacatgctggtgtacgttgatgatatcgtctttaccggaaataatgctaaagctgttgattgttttattcaagttctctcca

SEQ ID NO: 170315 - DNA, 2405 bp, Arabidopsis thaliana landsberg
ccaaaatttatttttcccgccaaaaaaaaatttccgccaaactttttttcccgccaaaaaaatatttttccgccaaaattttttctcgtgaaattttttcccagccaaaaaaatgcttttaaaaatccttgtaaaatttttaaaaactctttaaaaaaactttgtaaagttttttaaaagctttcgtagttggtaaaaacccttgtaaatcattttaaaaccttttaaaatctttataaagtctttaaaaacataagtaaatactttaaaacccttttttaaacctttgtaaatcattttaaaactttttacaatagttttacaagatttacaattgtttttaagcataagtaagtggcattgaatgatttacaaggaattttaaaagcttataaaagggtaaaacatgatttacaatcgttttaaagcataagtaagtggcatagaatgatttacaagggatttaaaaagggttaacatggtctacaatggttttttagtataagtaagtgacattgactgatttacaagggattttaaaaacttataaaagggtaaaatatgatttacaatcgtttttaaagcataagtaagtgacataaaatgatttacaaggatttttaaaaagggttagcatggttgacaatattttttttaagtataagtaagtggtattggaatgattgataaaggattttaaaagcttataaaagggtaaaacattatttgcaatcacttttaaagcataagtaagtggcatagaatgatttacaagggattttaaaaagggtatgcatggtttacaccagtttttaggcataagtaactagcatagaataatttacaagggattttaaaagcttaaagaagtgttaaacacgtttacaagggattttaaaagcataagtaagtgtcttaaaacgatttacaagggattttagaagtgtttgcatagtttacaatcgattttaaaacataagtaaagtggcatagaatatttacaagggattttaaaaccttttctaagggttaaacatgattagcaatcgttttttaagcataagtaagttgaacagaatgatttacaaggaattttaaaagcttttagaagggttaaacatgatttacaatcgtttttaaagcataagtaagtgtcatataatgatttacaagggattttaaaagtgtctgcatggtttacaatcgtttttaaagcataagtaagtggcattgaatgatttataagggattttaaaagcttttaaaagtgttaaacatgatttacaatcgtttttaaagtatttactataaaacctgtaataatagtctctacactgtcttttgttcatacaggaattcaatgtgaacctgttcatagggaacttcgacgaaagggaaaagatcctgtaaaagaactatacttttgggctagtaaaggatcctatactcttggtgatctcgaagatcgattgtttttaaaacctaaggaaggtgaacctgctgttgaagatgaagaaaagttgtgtcttgctgcagtagtgttgactgaaggaattcttttgacaccatatggaaaagagaagatacctttgccaagattgcagcatgcttctgattttgatatgtacacagcccaaccgtggggtaaaagaagcattcagtgttctatcaaattcaattctgagaatggacgagaaaacttgggcaaaagagaaatatgatttgagaggatttggactagcgctaacaatatgggtgttgagcgcagttccagcatttggtgcagcatatggagttaaagataaggaattccaatctgaatatccattgatattgaagtggaaaagcactactactctagagtttttcaagatcgtaaaccttgtaaatgatgtttctgaggtaagcttttgtctatttacagaattctttaaatggtttttagatttgaagttctgctttctcaagatttgtaatgttattgtatcttcgcagatgaattcaagtctttagttcctgatttccacacagacgacacagaattccaacctattttgggacttgttaatatgggctacagattgaagaaaactgaatggaatacaagatgcgttgatgtttgtgctgcccttgaagaagtaggtcaaaacaaaatcaataacaaaatatctgatagcgagaagcttgacaggattttgacaatccttgaagatcttaacaagagagtcgagctgattgagaggattttggacattagaatggaggaaaagaataatcagagatctgaggaagatgaagaaaaaaaacaagaagatgaaggagtagaaagacaaccagaggtaattgtaaatgtttctttaaaagttatttgaaaggaaaggttttacaatgtagtttaaaggtta

SEQ ID NO: 170316 - DNA, 360 bp, Arabidopsis thaliana landsberg
tcgttaggttatctttttgggtcagacaatgagattccaaaaactcccgctccaccggtagccccaaagcctgcaccaccgtacggtgtagattccacagaggaggaccatgaagctgaccaaaaacccaagatctctaacaacaactaccaaagagttcagggccaaaactccggcaacttcgtcaccgtaagtctttattaattaaactccactttctttctttttccgaaaagaaaattaaacaaataagggttataattaaaatttcaggatcgtccaacgacgaaggtgaaatcggttcctggtggaggctcatctctaggatacttgttcggagataagtgaagaaatgaaaat

SEQ ID NO: 170317 - DNA, 437 bp, Arabidopsis thaliana landsberg
  unsure (1)..(437): unsure at all n locations
agtgtccaaaggacctgcgccgcgcgcgcagcgccacgcacagcctgattccgacctagaccggcgccgccgcggccgtcggcctggtgctgccggaactcaacggcaagctggacggcttctcgatnnnnnnnnnnnnnnnnnnnnnnnnggtggtcgatctcacgttcgtggccaagcgtgccaccagcaaggaagaaatcgacagcgtcatcaaggccgccgtggacggcccgatgaagggcatcctcggcatcaacgaaaagccgctggtgtcgatcgacttcaaccacaacccggcttccagcacctacgacgccacgcagacgcgcgtcatggacggcacgctggtcaaggtgctcagctggtacgacaacgagtggggcttctccaaccgcatgctcgacatgacggtggcgctgatgaaggccgcctga

SEQ ID NO: 170318 - DNA, 3324 bp, Arabidopsis thaliana landsberg
aaagcgtcaacccagaattttaatggggttttactttgaaacatcatcgacaacccaagctcagttagatgacgatgttttctttccgcaatcccgttctgttgtggtgttgatgggcaagagattagatgttgaatcccatgaccttgtaagtgagttttgaaccgagtactgataaactcaccaccaccatcactttgaaaaactttaatcttcttactaaactgattctcgacttgtttttgaaaaaccataaacacatcacaaaaatctgacttggacttgagaggaaatatccatgaataacgagagaaatcatccacaataactgcataatatttgaaaccttgaaccgatacaaccggagatggaccccatagatcacaatgtaaacgatctaatggttccttaacactagaaatagaagaagaaaacggaagcttagtgctctttcccatttggcaaggttcacaaacggaagtagtgctgctcttattaactagaattgccttgctgttttgtaaaagttgaagaatctggaagtttgcatgaccgagccgttgatgccaaaccaaatcacttgctgcaacttgccggttagaatagaaagctgtaaaccccaaattcttcaacacatagagcccttcacgacgtggtccctttgtcacaaccttctgagtttgtaaatcaataacatacacagcattagcatcaaagaagaccccacaaggatagtcgtcacacagttttgagaccgataaaagagatttctccatggtcggacacactagaacatcattaagaggaacactacctgtggaggttgtgagagtagtagaaccaacgtgagtaatgggttggaagcttccatctgcaaccattacattctcaggtccattatatggagtcgcagtctgaagagaagtcgtggttggagtgatgtgggcagtagagccagaatcagtgagccattctcgaccactagtatctgagacatgaagtgcagcgagagcttggggaacatcttcactttgataagagttatcaaaccgattccagcatttaagagcaacatggccagtacgaccacagatttgacacacgggtcgagagttagaggagttacccgattgatttggattccagccagaggagtttacttgttgagagaagcctctaccacgagttgagtagcctcctcgccctcgattgctaccacgacctctctgaccagagccaaagtaaccgcctttttgagtttgaaaagcaagatgaggcgatacatcggaagaagtctcatacgactgcaacttcgaatcaaaaccagagacctccaaaacgacatcgttaaaggtgggagatggaatacgagacatagagctttgaaggactgtagttattgggtcatattcacggcccaacccattaagaaaggtaaatatcttcatatgctcatcaactggttttccaatggaactcaagctgtcacagacggctcgaaactcacggcagtaggtggtaaagttcttacctttaatgttcagaagttgaagccggcgacggagatcaaattctcgagcgacagagcttttgttgaagttttcagcaagagacatccaaacatcatgagatgtagacagagcatgaacaagaccgagcacttcttcagtgagagtaccaaagatccaagatttgatgagctcgtccgtacagatccaagcttcatactccgggtttggagtttcgacggcgagattgttgacagtggtaacaagaaccgtcggtggtttagggactgaaccattaacaaaaccgagaagcttttgacatcgaagaagtgactcaaactgggttttccagagaagatagttactgtcgcttagcttgattgtgacggagctagcgacgtgaagagtggaaggaaaggggtaaggtccagaagtctcagccatgacagcaccggttagggttttagaggctctgataccatgtgaataaaagaagaagagggttttcttactgaataatacttttcattaacactctcccaaacccacgatgaatacaaagagcttatacttatactacaaaaagaaccttctggatccttatttgcagtcaaggatctggttacacttgtcaatcatctagccactctcttcttctgatgtgataggactgaaacggttacatagtacgatggtcggagagtcagctggttgactctgcttcttctgcaaattctgcaaactctgttttgtctgaccgtgatgttgagaggaactcttgacttggacattgttttgttgggcttgtgattgggctgactgggcttgtgtcttgtcacttacaaagaggacctaattcaattgagcctgccatcctcaaagtatgttctggttttttgttgttctgtttttcagacatattacattattttgctacaagatgtgtgtaatctcatggtattgtcacaaatgcagccggatatagcagcaccaggagtgagcatattagcggctacaactaccaataaaactttcaacgaccgaggattcattttcttgtcagggacatcaatggcagctcctaccatttcaggagttgttgctcttctcaaagctctgcaccgtgattggtctcctgctgccattagatcagccattgtcaccacaggttcttaccttctttatacaatgctaaaaaaaaacaaaaacatactgatcttaattgttttatttactctatgtagcttggagaacagatccatttagagagcagatatttgcagaagggtcacctcggaagctagctgatccgttcgactatggtggaggccttgtaaatccagagaaagctgcatatccaggtcttgtatatgacatgggcctcgaagactatgttctctacatgtgctctgttggttacaacgagacatcaatctctcagcttatcggtaaaacaacagtctgttcaaatccgagaccatctgttcttgatttcaacttgccttccatcacaatcccaaacctcaaagaagaagtgactgtcacaagaaccctcactaacgttggacctctcaactcagtctatagagtaacggtcgagccaccttcgggttttcaagtgaccgtgacaccggagacgctagtgttcaactctacgaccaaaaaagtctattttaaggttaaagtctcaaccacacacaaaatcaatacaggttactactttggaagcttgacatggagtgactctctgcacaatgtcaccattcctttgtctgtgagaacgcaaatcctacagaactactatgatgaaaactaa

SEQ ID NO: 170319 - DNA, 1199 bp, Arabidopsis thaliana landsberg
actacggaagctctgattccatgcggcggagtagtgagaaatcggaggagccagatccaccgtctaagcttataaatcaatttctcaacaagcaaaaagcttccggtgatgaaatctctctcgacatggaagctaacatgcctgagcttcaaaaaaatacggttcctcctctgtcgtcaacggcagtttccggttctgcttcaccagtaaccgcgccagtgacggcgagttatcgtaatggaaccggtgatgcgattagacggagacagaacagagtcacgctttctccgtctgttaaagatggtgatagtagtgaagatgaagaaaacagagtagatggatcagaggttgtgaagtgtacctctaatagatcgacgatgaggactaagactttgatgaagatgaagactagatctagattgatggatcctcctactccgacgtatccggatatggtttccggtcggactccaaggtccgggaatctaaatcccgggtttagtgggagaaacactaaaccgggaactccaaaccaaggaggatccaaggatttggaagaagaggaagatcccttctcagaggaggatttacctgaaggtttaaggaaggagaagatttgtgtttgggttattatagaatggatatttctgattttgatcattgctagtttgatttgtagcctagtcataccttacttgcgtggcaagacactttgggacctagctctatggaaatgggaagtgatggttcttgtcttgatatgtgggagattggtttctagttggattgtgaagctattcgtttacttcgttgaaagcaattttctttggaggaaaaaggttttgtatttcgtttacgggattcgaaagccggtgcagaattgtctatggctagggcttgtgttgatcgcatggcatttcttgttcgacaagaaagttgaaagagagatgcgaagtactgtgcttaagtatgtgactaaagtattaatctgtttacttgttgctgttatcatctggctcataaagactttactggttaaagttcttgcttcctctttccatatgagtacttacttcgatcggattcaagaatcgttgtttactcaatacgtgattgagacgctctcgggacctcctcgtattgagattcatatagaagaggagaaagtagcaaatgatgttaaaaccttcgagatagtt

SEQ ID NO: 170320 - DNA, 454 bp, Arabidopsis thaliana landsberg
atgtcaccggagcttataagggacaatgttttggattatggtgcggatgtgtggggttttgggtgtaccgtgcttgagatgttgacaggagaacgagtctggtaagcttgattggtaaggttggagaattctcattggtgaaagtggtagcgttccctatattcctaattacttgtctgataaggcaaaggattttcttgcaaagtgtttggagagagatccatctaagaggtggtcagttgatagtttgctcgaacatgagttccttaaatggattgacgaagacgaagaagaagaaatatacgaagaagaagaggatgacttttatgatggaatagaagatgtcgatgaagaatatgaagcaaatctagaagctgaagcagcagttgaggaagaagaagccattgaaatagatgaagaatatcctaaagaggaatcggaagatgacctataa

SEQ ID NO: 170321 - DNA, 582 bp, Arabidopsis thaliana landsberg
cgaggtcctcgatagcctcggcgctgtggtggcgaaacatccgcattacgccgaaggcgcgctgatcgagcggatctgcgagcccgagcgccagatcatcttccgcgtgccgtgggtcgacgacaaaggccaggtgcagatcaatcgcggcttccgcgtccagttcaactccgcgctcggcccgttcaagggcggcctgcgcttccatcccagcgtctttctcggcaccatcaagttcctcggcttcgagcagaccttcaagaacgccctgaccggcatgccgatcggcggcggcaaaggtggttcagatttcgacccgaagggccgctccgacaacgagatcatgcgattctgccaatccttcatgaccgaactgtaccggcatctcggcgagtataccgacgttcccgccggtgatatcggcgtcggcgggcgcgagatcggctacatgttcggccagtacaagcgcatgaccaatcgctacgagtccggcgtgctgactggcaagggcctgacctggggcggctcgcgcgtgcgcaccgaggcgaccggctacggtgcggtgtatttcgtcgagcgcag

SEQ ID NO: 170322 - DNA, 746 bp, Arabidopsis thaliana landsberg
cccgagctttcaaatctaacaagtgttagctttagaaatctgagaatttagtacttgagccagtttgttgttctgtaaactacttaagccaagaaatcttctcttgcaagaattcatattttgtggggaaattcattcataataactcttctcgaataccttaatcttaatgtggtttgtatttatgaaagctgtggatttcaatggcaggtgctgatttgagcgatacattgatggaccgcatggtaaacaccacacaccatactttgtatacaattacttgcatatgatacatttatctttcggtgaaaccttggttctgttactggcgattctaggtgctaaatgaggcgaatctgacaaatgcagtgctggtccgatcggttctaaccagaagtgacctcggtggtgccaaaatcgaaggtgctgattttagtgacgctgtgattgatcttcttcagaaacaggtaacaacaacacaccattatatttatcctagcttccgttccactatcaaaaagtattttactaatggttttcataacgttttgaaggctctgtgtaaatacgcaaccgggacaaacccattgaccggagtggacacgaggaagagtcttggctgtggaaatagccggagaaacgcatatggttcgccttcttctcctcttctcagtgcaccgcctcaacgtctgctaggccgtgatggattctgcgatgaaaagaccggtctctgtgatgtcaagtag

SEQ ID NO: 170323 - DNA, 951 bp, Arabidopsis thaliana landsberg
catgcactggtacaattagttattaagtaaattcatagagtacaaaattaatagtcatgtactgcttaaaatgatagataagatatatagagactgaatttataaaggatatacatagattaataataactgtcaatactcaatgcatccgacgtttacagagtattgtggatagattgaatgattatgactaattctcaagttatatgatataataatatattgagtaaaaatatagtggatatttgacaatttttctaatatatgtatttttgttcatttgaaggagaatttgtgaccataaggccattttgcgttggatttggaaaagacattattacaaaatcatacaaggtgattttgatgtactcagaaaaaaaccatcctcatggatattttgatggtttcaatatcaaagctatatctcttgataatggaaagcaacgagacgccggttggtacgttttagatgagcacgaaatttgcaatgaacaaacaccggtttacgcaaacggatcactcttttggtggacaacatttacttcttggaaatatcgaatattttcagaattaccttcacagatattagcttgtgatctacacacacaaaattttcgatgggtatcaataccggaatgttacacccgttacactcgtggagtgcaaatgtggagcctaaatgagcgtttgtgcttatcagatgtgctacacagacaatgttcagaattagacgtttggagtttacaagattctactcaaaaatgggagcaattgttttcttttaatattcttaatatcgatcgactagatgcaaaatgttggatgcttggtctaagggctgctcactttcgaaggattggagaggaccaaaatcaagtttcgtttgatagtctaagaacggcgatttggtattcgccgactatgatttctccatcaaatttgttggtttga

SEQ ID NO: 170324 - DNA, 660 bp, Arabidopsis thaliana landsberg
aacaccaaagacacagcagagatatgtaaaataaccggactttctgatttatctctacgcaaaggctataaagaacggctagaggattgggacgatctacttccatctaactacacaccagctgtgccaccagagaaagcattttccacaaccacaatcttcacaacccgctcaacaactgctagagccgtggatccacctgaacctagtttcgtggaaaaagacaagccctctgcgaaaccaatcgaaactttcgatcatacctaccaacaaccgaaaggcaaagaagataagcagccaaaattcagacagccttggctgtttggaactgccagtgtcatgaacccagcggagatgataagcgagccagcaaaacctaatgctatggactatgaaaagcaacaactcgataagcagcagcagcagcagctaggcgataaggaaacattgcctatatatctaagacaccataacccattcccttcaaatccatctccatctacaggtatcagcacaatcaattggtcattccgaccatctgttgtccccggatcttccagcaacttgcctgttattcatcccccaaaactacctccgggttatgctgagattagaggtagtggaagcaggaatgctgataatccccatggagacttctag

SEQ ID NO: 170325 - DNA, 482 bp, Arabidopsis thaliana landsberg
aaccgagtaagaagtgaatgcccagtatgacaaggcattgtcgcagctcgaagacatggagttccgcaatatgctgagtgccccggaagacagtaaaagcgctgtgatccaaattactgctggtgcaggtgggacctaaagttgcatctgggccagtatgctcatgcgtatgtccctcatgtgcgggcagaaaataggctatacaattgccgagctggacaaacagtatggtgtctgtggccgggatcaagagcatccccatgcagtttgagggcgattttgcttacggttacctcaagggcaagaacggtgtgcgccgcatggtgcgcatttctccgttcgactccaatgccaagcgccatgccagcttttgcagcgtatatgtctacccgttagtggacgatgagatcaatatcgagataaaaaatgccgatatttcgatccagacctcgcgaagcggtggagcaggcgcacaaaacgta

SEQ ID NO: 170326 - DNA, 1166 bp, Arabidopsis thaliana landsberg
  unsure (1)..(1166): unsure at all n locations
cgtaagttaggggagattgaggagaagagtagagctgtacgaataagaaatggaatanaaagggaacccagtctaagaacacaaagccaagaaggaactgaattatttttgttaagagtatgatcatagttttgggacacattttttctatttttaatagaatatggtcatagtattggatacactttcttgcggtgatataggttgtaatgactcttgttgtttatggcctttgtttaaaggattttgtgttattggttacacctttgataactgtaataactcttgttgtttatggtgcttatgttatgtatatccaaaaccaaaccttgtctagagctactaggtgggaaacttgtttcagcaagactgaaattgagtcctagtttacaccttttgcagaattgcagggtccaaccacgagagcatcgagttttatactttcaggtagcactcatagtacctccctgtttgagtcatctggcactgaccatgccacacatatttatgtcagcacagcaaaactttggtattcagcaagatctaaattatgtgactttcttcttttgaatcatagttgtaatgaggaggctaagagtattgctgcagctgcttcgagcaggggaaagattgaggtcagttgtttgaatttttgttttcgctcggcgttgttctatgatattatatcagctctttggaattaagaagatgaattgtgtgtgtaggatttaaatctatgtcaagttgaactgtttaagcttgctttttttttttttttgaatctgtgtattggctcggtgttgttagaatctaatttcttactaagtatctcgacaaagtcagtttcttggagagtgctgattacaggcagtttgagaaagagagagacgctagtttgagaagacacgatgagaccgactcctctaacgttcttctacatctgctgtaagtaatcttgttttctgttctgttagagaagtcttctttagtagactttgtagcattttctcaagtgatttggtcacattctttggcagtgtctaaaccgagtccccgttttcttgattgattcggatttatttcttatgtctctctcgagagagagttcaaaactgagaccatcctctctgaaggccatggccaatgaaatgggcttgcaatgcaac

SEQ ID NO: 170327 - DNA, 3683 bp, Arabidopsis thaliana landsberg; identical to SEQ ID NO: 22885
  unsure (1)..(3683): unsure at all n locations

SEQ ID NO: 170328 - DNA, 844 bp, Arabidopsis thaliana landsberg
aatgtgaagagaaagaaagacttcatttgcttggagagagttaagggaaagattgttaacgtgcttgatggacttgagttgcacactggtgtttttagcgcagtggagcagaaacggattgttgatcaagtgtatcaacttcaagagaagggacgaagaggagaacttaaaagtaacttcttgttttgatctgaaaatgctcttatcttaacttgtgacctatttttaatctgaatcttgtcttgttctctctctgtagagcgtacatttactgctccacataagtggatgagaggaaaaggacgtgagactatacaatttggctgttgctacaactacgctccagtaagtaacgttctctgtcatactttcattaatctgtttcattcttaaaaaaggagttgagagttttgccttcttgtattttgggttgataggacagagctggaaacccaccgggtatccttcaacgtgaagaagtggatccattacctcatcttttcaaagtaatcattagaaagttgattaaatggcatgtactgcctccaacttgtgtgcccgatagctgcattgtgaacatctatgatgaaggtgactgcatacctcctaacatcgacaaccacgactttctccgtcccttctgtaccatctctttcctcagtgaatgcgatatcctctttggctcaaacctgaaagttgagggtcctggtgacttctcgggttcatactcaataccgcttcctgtggggtaagcaagttcgtaagaattcccagtttcaaaactttcggccatctccttgtcgaatagtatgaaaacaaagactgtttttttggatattttgca

SEQ ID NO: 170329 - DNA, 2522 bp, Arabidopsis thaliana landsberg
tggggggtttggtgttaaaatcccaccaaagttatgacaaatcaattcggcttaaatcctgtcataagttatatgatattccttttgattgttgcagttaggtgtattgcgaaaggtagcaaagagagaaaatgacattcgtgtatatgctgatgagcttggaatgggtttggctggaaaattggactttactttagaggctgccaatgcctctgaatttcaggtactcggcattaggtttttagaaaacataatacttgagaggttgccaatgcctctgtagtttgacaaacacaaaatgaaaaaaagtttgacaacagaaaaaaagattattgctttctgcttcttctgatagatatgtcgcttttgttccctctaagtgtgatgtgctcattatttgtccatgcataaaattgtggcttatatagcttgtgcaatcaaagtttaaatgttgttatgctgttccttcacaatgtactctctgttcgtgctagtatctatgttatttccttaattttgtggtttaagtttacagcaagtatctagtatgctttgactgactgaagtacttcattttgaaggaagctcacgcacgattttcctatatccgggttccaaaagtatatcagcatctaacgcgcaaaagagttttgaccatggaatggatggttggtgaaagcccaaccgatctactcgcaatatcttctggttactctgatcatgacaatgagagtcatgagaaacaaaaaattgaagcgagaaggcgtcttcttgatctggtaggttaacatatgctttgtagtaatgataaaacatctcatgatgttctattttgatgttcattagtaaaggtgtgtgactgtttgtaattttactgtgatgatacttcaatgcagttactgaaaaaaaagtagaattaatcttactgatgccttcagttgtttatattgaactgcatgtttaacgtaatttgttataatccatgttaatttggtagtaccattttgctagaatattttatattctaatgacttagctttcttttaatttccactgtaggtgaacaaaggggtagaggcaactctagttcaactccttgatacaggtattttgcatgcagatccgcatcctggagaccttcgttacacaacatcaagacaaatagggtatctcctaaccatccatcagcgttactcagaaaattctgactgtgacaagatgatcttaacttgataaccacgtgtctctatgcaaggtttttggactttggtttagtttgtcggatgcaaagaaaacatcagcttgccatgctcgcatcaattgtgcatatcgtaaatggtgattgggcctgtcttgttgaatcgttgattgatatggatgtcatcacgccaggcgttaatacccgtcgttttactctggtaattatataatttctgatctcagatagtgtagtgtatcttcaattaatatatagctgaatgtgtttggatgttagtattctcatatcttatgattcttgaaaacaacaatacaggatctggaatatgcattgggagaggttaaacttataaacgggattcctgatatcgagttcaccaaggttagacatgtatttcaaaaattgttgttagagacatgcattttagtctaaattagagaggcaagtttgtttatatttacgacttttaactctaacacatggtatacctgattagtatagtggttggtttctgttgcaattctgtcgcattcttctctgtgttagtatccttgaacctagttacttaaagtgctaggatgctaagaagttccatctgcactcttatatggcagcaacttctatcttgtagctcgtacatgggagaatgcaaccaatctaaaattcttatagttttatcttctgcgtgagtaccattgaattcattaatatttcttccaatgcttctaattttttcaaggtgcttagtaaaatagtcaatgtggccctgaagtatcagctacgcatgccaccatacttcacacttgtcctccgttctcttgcttgcttggaaggtacttgtgattgagtccttgattgtttgtttgataactttatttgtcatttctttctagccatgcttggtttcctttacttggcattttgcgtcattctttttgttggcttatatcgtagaagaatatgtaatccatttgtttccatcctttagttatttgctttctattcttgtcttcccaggtctggctgcagctggagatccaaattttaagacatttgaggcagcatacccttttgtggttcaaaagctcatcactgaaaattcagctgcaacaaggaagattcttcattcggtattacacagtttctagagccatttaagtgactttttatagtttctgtttcataaagctaaatagcagagaaaacttcttaacttctgttggtgtctgtaggcagtccttaaccgaaagaaggaattccgatgggaaagggttgctcttttcctgagtaaaagttctacgag

SEQ ID NO: 170330 - DNA, 2873 bp, Arabidopsis thaliana landsberg; identical to SEQ ID NO: 16492

SEQ ID NO: 170331 - DNA, 2796 bp, Arabidopsis thaliana landsberg
  unsure (1)..(2796): unsure at all n locations
gaagaggatctttttacgatgacatatggtcttccttttagtggagaagaagatgccaagggcttgttactcttgaatgcggttgaagaaactatctgtcgtcagctgcgtgcttgtaaggccacgagaaggagaatgttggaaggtactttttttgctttgcatatcttccttttttattttacatacacacacttgcagaattgaaatatgaagagcgtattcatatgatgggatcgaagagtcttctgttgcctcttttcttatgatatgttgtttacacatttaaggatgatttgggatttggagacagtataatgcattggaattagatattttgcaacagctctctaagcatataccaacttgaaattagcctctctggcctagatacgataactttgagtcttctactgagtaatgatttatatgtgaagtccgctgattattaaaattaattttttctttctaattttaccatctctttgagtgatatggtatattgtttatttgtaaaataactttctttccttttgtttgttaaagatgcataattggaacttttacaaagtaatcctaatctgaaagagagtttttgcaaatgtttgttatgcaggatacgtttcggtaaggtttcatgatttatttattctttctttgataaatgttgttaattacaggttttcccaacttaagtcatgttaagtagtgtataatatagtcccaagtctgttcctttaattagtattctggtgaccatcaatgaacataattttttattgcttgctttgaaaaagaaaaactacaattagtacttaaaatgtgcatttggtcttttatccagtgttccgtaaggtctcatgctttatttattctttctttgataaactacacgtaacaagggtatgatgagttgattttcttcaacctaacctcacaatggggagtggtggacaaagttaatatatgttttattgtgttaaattttccatgttatgcaacttacaagaatgaacaagcttagcagagactaaattttgaatatatggcagcttttattacctgtttacccttatttttggttaaaaattcttgccagacatgtgattgatgatgtaattattattttgtttcgtaagccatttttaaaaaaaaattagtagctgttgtatacttttgcactgctagttgttttaacatattctcaatacctttcagcattttctacatgctcttaattgtatgagacgaccacaaggacgtggcctcgaattggcaaggaaacatataggctattgcatatcagagctagattctgttctggattcagcagaatttctaagattagatattgtcgagaatggcgtaaacgagatagaagaaagtacaactgcttctggccggtcccccattggatttgatcctactttaaacaaaagattatcagctccaacgccgccacgtgccattaaacttctttcttggaaaaaggttgggacttctaaattctctgtatacgtaatttagtttgtgtgtatataactttttagtaacttttttcaatttttgattctccaggctattgactattatgtgaaacttcttcacaatctggatcagatctgtgcattttcattggaaccagatttagaggccgtcttggagtttgtgattaagtttcaaaaatctcgtcctgatttggttgctagggctcatcttcaggtgcgttactttaacttaacgcatcaatatcatgcagctctgtgctttcagataccatttatcattttgttttcttgttttgagtaactattttggctgtagttgcactgatgttcgcatacatccactagggtgtgtttgtatagtgaattatatggcttcttcttttacccgcttccttgctttgcagttttgtgtnnnnnnnnnnnnnnnnnnnnnnnnnnnnnncttagagttaagtgattcagccatatgactgtagtagaaatctcctttatttctgtaagaacagttgcataaacttagaaccaatggactagagaatatccaactctcgtgaaccaccttcccaactcaagccccattcgccaacaggcctgtcgaatgctctgcttattcttcttgttgactctttactattcttgttatctagatattatttatggtgacactggaatatgtagtggctgacactctcatttttctttcttatgaagacttataagaatatagatccaatatatgtagttgaggttgattctgattgtaaatttctgttaagcattgatatggttgtccatttttgttatgatattagcaatatttgtgaataaattatgtattaagctagcataatgcttttaccttttacactcaataaataatcttgttctacagcttctccttgtgcaagatgggaaactttacggccgtgatacctttttgacaatttgcgccagatctcttgcattagatgtctccaagaaccatggcctccatacgaatgagtacattcttcaacttaatcaggtaaacacagtatattaaaagaatacgttgggtacatttttttctacaaacgtgtatgaggtagctctttattcttccttgaaaagggtttggaacttggtaaaaccttgaaaagaataatctttcattggttttgttcaatattcggtgtctggcttataagccgcaatctcagagaatttcagcatgtgtggatgtaactaatttgcaatcatcaagaagattgaaacaacaattatttgttttaatggggactttgattag

SEQ ID NO: 170332 - DNA, 494 bp, Arabidopsis thaliana landsberg
ctgcagcagaaggacgccacgatggagaaggtgctggcctcccccgtcctgtgggatccggtgcgcttcgacgagacctgcccgtcctcggacggggcgtgcgcggtcgtcatcggcggcgaggacgcggcgaaggccgccgggaaggccgcgtggatcaaggcgacgcagatgcggaccgagccgaccatgttctccggtaaggaccacgtgaactcggccgccggcgcggcctgcgcgaaggccctgtggcacgacgcgggcatcacccggccggtcgatgagatcgacatggccgagatgtacgtcccgttctcctggttcgagccgatgtggctggagaacctcggcttcgccgacgcgggcgagggctggaagctgaccgaggcgggcgagaccgaccccggccccaagatgccggtcaactgctccgaaaagtgtgaagtcctccaacccgatcggggcctccggcctgctgcggttggccgagtccg

SEQ ID NO: 170333 - DNA, 528 bp, Arabidopsis thaliana landsberg
  unsure (1)..(528): unsure at all n locations
tcaaaacttcccagcttgggtttcaatcaatgcatccccttaacgaacttcttgacgtaaatggtgggtttatggtaaatgaacaagtcaagnnnnnnnnnnnnnnnnnnnnnnnnnnnnnnnnnnnnnnnnnngatgtgttagtggaaactttattagttcatgaaagcattgatatcaatgggttacaagttcttccttcacaggtaagaaaagtactttttaatacatattacatctcactataaaacctgcataaatgttatgtgggtatgttttcggatctccaaaaactgctatctaatgaggttttactactaattcgttcatgtttcacaggcaggtagaatctgtcaacagtctgtttgaagatcacccagacattgcatcaaacttccgtctggaaaacccacttctgagaactccatacatgaatagccttatacacttgactagagataagtgccagtcccctcagaaactctccaatgtcgatctggtcaatgcatattctacaaaatcatatgt

SEQ ID NO: 170334 - DNA, 548 bp, Arabidopsis thaliana landsberg; identical to SEQ ID NO: 41885

SEQ ID NO: 170335 - DNA, 1505 bp, Arabidopsis thaliana landsberg
gaattagctgagcttaaacatgaagtagtgaaagacaaggaatccaactgctgaaaaaggggaaacaggctgttgaagaatcaactgcgaaaagatttactgacaaggaaattgaactcagaaaagcttgcagtcaaaatgacagggccaatgtaattgtaagaaagcttgagaatcaaaatgcagagattcgagcagagcgggagggatccaaattaagtgcatcagaatcgcttaaagcgtgcatggaagcatcaaagaaggagaaaaaatgcttgaagaagcttgtggcatgggagaaacagatattgaagttgcaggatgagattacagctgaaaaagaaaagattaaggccctatataagactttagctcaaatcacagagtatgaaaaggagattgaggtacgttggttcatattatattcatttatactgtgaaagttctctagatcctctatacttttaactctagaattgtgggaagtacatttacttaggattcaaaatatttacgtacgttatcatttgaggcacacatctagttgcgaagttggttctgtcttagatggtagtatgccataagacttcaaagatcattcaagaggtatagtctgtgtctgccacatattttgctagggtagatggaacctggatttgatatgaatataatcttggagaatccgtctcgagttgtagaagccaaatgatttgctatacctattgatatgttccactggatagcttttctctctacatggtggtctatattttcttttcgttcctgacgttttacctgtttgcgccttgcgggtacgttatctatgttgctgcacattgtgttcaaaaccttgctctagatttgcttacttggactgtggttgatgactgataattgaaatatcaatttactttacctcaattaaacatggaatgatggttagtctatcaacttctttttatatttacctgttcatatgttatttgcaggcgaaatggaggcaagagcagaaggcaaaagaggaggctctggctcaaatggaggaagaacaacgctcaaaagaagcagctgagggtcacaacaagagaaagcttgagactttacgactcaaaattgaactagacttccaaagacacaaagacgatcaccaaagactggagcaagaactcggtcgactcaaagcctcttcagatagtgactcaagccacatatccaacaacgcttggaaacccaaaaaatctcaaggagaaaacattgctaagctgcttgaagaaattgataagcttgaagggtcttatgacaatgaagcaaactatgatcgagaatgcataatctgtatgaaagatgaagtctctgtggtgtttcttccttgtgcgcatcaagttgtgtgtggtagttgcagtgatagcttcttcgcgagcaacaatggcggaagcaaagtcactcgtccttgttgccgaggtttggttcagcagcgaatccgtatttttggagcaaccctataa

SEQ ID NO: 170336 - DNA, 3066 bp, Arabidopsis thaliana landsberg
atgacgcagatttccaacctttttcctttaacagtttactcaaaggaaatatctatttaattttactttcatgcagtgtatccggcgatacaatacttatttgtcaatttttttctgcagtgaactatcttataaccacctaactggatctataccacaaagtttctcagatttgaactctcttcaattactgtatgtaaacattcattgatcagtgaaatgaactttcccattcataagtactttataactttttttgtgtcatctataacaggtcacttgagaacaacagtttatctggttctgtcccaacagaaatttggcaggacaagtctttcgagaataacaagctgcaagtgtatgacctctagtatttgtttttctttacttattagtttcctagttttatacttcattctcagaggctgaaacttcttttggatgcatgcacagtgatctcaggaacaacaacttctctgatgccacaggaaacctgagaacaccagacaatgttaccctatagtaagtttctttgttcctgtttggtagcaacttaatgcacatcaaacattttggactgaaactgcattctcttgtcttggcattatagtctaattcagtttaagtttttgtacttgttctgcgcgctttaaaaccaaaagtcaacaactcataggtttctctagtttctactattcttttgctatctactaaagctcttttcgtatccttctgtatgaaagtcttcgtggcaacccaatatgcaagagtacaagcattcccatggttacacaattcttcgaatacatctgcggcgaaaaaaagcagacatctacaaactcaaacacaccctgcagtaatgtgtcatgtccctttgagaatgtgaaagtatccccaggaatctgcttgtgcacagcacctctttcgattgattataggctaaagagccctagcttctttttctttactccatatattgaacgccaattcagggagtatattacctcgtccctccaactggagactcatcaactagcgattgatagacttgtcgatgagaacaggctgcgtccaagaatttacttaaagctagtccccaaaggcagaataacatttaacaagagtgaagtcatacgtatacgggacaggtttatgtcatggagttttaataaaactgacttttttggaccatatgagctgctggacttccctcttcaaggaccgtatggtacagtttttggatctaatctttaacaaataaggatatgtgtatatatatagtaatatgcatttaattctttggatgcagctgatttgttagctcaaacgagtggaattagaacgattgtatggatgatgatagtagcaggctctgtcgtcgctgccactgttttatcagtgactgcaacacttctatatgttaggaaacgtcgtgaaaactcacatacgctcaccaaacgtgtttgtaagaaactcagcaatggctctttttgtcagtatttcatcttgttgtgtcctataaccatgaaattgaggactctttcttatgtcttccagtcagaacaatatctcgggaaatcaaaggggtgaagaagttcagttttgtagaactgtcggatgcaactaatggttttgacagctccacactgattggtagaggtagctatggaaaggtctacaaaggcattttgtcaaataaaaccgaagttgccatcaaacgaggagaagaaacttctctgcagagcgaaaaagagtttctgaatgagatcgatctactttcgaggttacatcaccggaatcttgtgtcgcttattggctacagtagtgacatcggggaacaggtatgtccttttgcatgtgcagttgtcagttagctttatatctatgctcttcgactaatccacataggtgttctgtttggttcatgcacagatgctggtatatgagtatatgcctaatggaaatgtgcgtgattggctttcaggtaagaaatattcctcccaagttcttttctatacatgtaagatcagaaactagcttaaaatttttgaggcgccaatctgcttccacatggatgctaatgtatcagtggttttacattgtcacgcagctaatgctgcagacacattgagctttagcatgaggtcacatgtggcgttaggttcagctaaagggattctttaccttcacactgaagcaaatccgccagttattcaccgcgatatcaaaaccagcaacatactcttggactgtcagcttcatgctaaggttgctgattttggattgtcacggttggctcctgcttttggggagggagatggtgagcccgcccatgtatcaacagtagtaagaggaacaccggtgagttctaaactaggacacaagtcgatatgtgatactatgtaacctgtggcttttgacaaaaccaaacatggtttccctctcagctatgacattttgataattatacatgcacagggatatctggatccagagtatttcatgactcagcaattgacggtgagaagtgatgtgtacagctttggagtagtgttgcttgagcttttgactggaatgcacccattctttgagggtacacatattatccgcgaggtacttttcttgactgagctcccacgtagatctgataatggagtagctaaatctgtgaggtttatgtttttttgaatatatctacaaatttcctaagagttttttctgtacaatgtgatacaggtgaggaccgcgaatgaatgtggaacggttttgtcagtggcggatagtcggatgggacaatgttcgcccgataaagtgaagaagttggcggaattagctttatggtgttgtgaagatagaccagagacgagaccaccaatgtcaaaagtggtgaaagaacttgaaggtatttgccaatctgtgcgagaacccgaaatgttctcagaaacaacgaaattactctgctccaaaacatcgccgtcatcttcttctgtaccctcgccattgtctttacttcctggaagtaacttggacagtggctttttccacgctgtaaaacctcgttgacaa

SEQ ID NO: 170337 - DNA, 2072 bp, Arabidopsis thaliana landsberg
gctccaactaagtaaagactattccaaattaatcacaagtcgttttctcagattcccactgagattctatttctatttgatttagtttgtttttattcgcatgagaagaccaaagatgacccatgtctctttgcattttttaccaaatagacacacgcatggatatattcatatatttattaaaaagtaactgttattagcttatgcaataatttttacaaaactttgttccgatccatgtaaaaaaaagaagagtgaaaatatatcaaacaccacttatttttaaaaaatttgcttagtaacagatgacgacaggacgtgaaagcttaaggcatattgagacagcatagttcggataagaccggaggagcaagttgacgaagcgatgcaatacaaaatcaactctcatacagagtacagaattaactctcaaggggttaatttcaaacctcagattcttgttgtaagttatctttgaaatacttctctttctatttgaactgagtcttgaattcttgatcatgaatatttttcaaattttgtattacttcttaagctagaacttgttacgtggtattttatggtatcatctttgtttccttggctaatacgatattgatgttgaaaattttatttaggtaacacgattaatcacatacgttaaaaacactaaatgcaaccaagaattggaatctattttcggaaccaaatattcaaatattcttcgaattccatttgaaacagaaaatgggattttacgtcgttgggtttcccgctttgatatctacccatacctaaaaagattcactaaggtaaaatcatatataagaatggtagattttttttttcaacaattatattttctatgttttattctcaagatattttattatgaaactataaaatattatgagtaggatgcaacaacaaagatattggatattttggaaggaaaacctgacctaataatcgggaactatacggatggaaacttggtggcatcactcatggctaataagcttggaattactcaggttctttacctttttactttggtaaatttagaccaataaattactcattcttatgtcgaaacaaatttattgaaatgaaagaaaaaaaatctaggcaactattgcacatgccttggagaagactaaatatgaagattcagatatcaagtggaaagagtttgatcctaaatatcatttctcatctcaatttacggcagacttaatctctatgaactctgccgatttcatcatagctagcacttatcaagaaattgctggaaggtattttaactaatttcatttagacaatataatgcatttgttccatttgatccaaaccagcctggtttgacactatcctgtttttttcaatcttgttagcaaagagagggctggacaatacgagagccacatgagcttcacagtcccggggctatacagagttgtctccggcattaatgtcttcgatcccaggttcaacatcgcagctcctggcgcggatgactctatctattccccttttaccgcacaagacgggagattcaccaagttctacacttccattgatgaactcttgtatagccaaagtgagaatgacgaacacatgtacgtctctattccctattttacttttccacaatactacacggtctcaagaagcgttatagattgttatagaatatgaaactaactattaatattatttgtaagtaaatgttatagaatgttatctatgtgtattaaaaaatactaaccgatatttttcttgtgaacaaaagcggttatttagtggacaagaagaaaccgatcattttctcaatggcaaggcttgatgttgtcaaaaacctaaccggattaactgagtggtatgccaagaacaagaggctacgagacttggtgaacctcgtgatcgtaggaggattcttcgacgcttctaagtctaaagacagggaagagatctcagagatcaagaagatgcattctctgattgagaaataccaactcaagggtcaatttagatggataacagctcaaacagatcgaacaagaaacggtgaa

SEQ ID NO: 170338 - DNA, 1118 bp, Arabidopsis thaliana landsberg
cttttggattaataatggttagacccaggagctattttaaagcctcccggttcctaataagtatttttcttttgtatgacacaagaatctgaaaatgattcagatccactatgcttcatggatggttcaccttggtggagctaggctggtatatatttactctctatataccatattcttgcattgcttatacgggcttaatcaaatactgaactcacagtttctctttaatttgagaatagattacaaattttgccgataaagtaggagttggagttcacttcaatccgtttgtcaactggaacgacagggtaagaaatttcccaaaactgtagagttgtttaaaacctaatgaacaatctaagtttgttaattatattttcatatgttttcattctgctcaggatgatagcattgtatgtaatcttaagccatttttcttgcatgatttaccttctttgtgaagctatttgcagaagctcaagtatggagttgttcggatgcatgacctagtacatgacatactggactggaagaggttctacttgagtggccgtttacaaaaacctgtatgtcagttgcttggtgttcttagtaataactgtaaatcatgagatgttttatgaaagtgcctttggttgcaggttcatatgcttgttgataatctggacatagaggatgtgaattctgttaataagagagctgcaatatctgcagctcttcttctcttgccatcgaaattcaccgaggttggttttctgttcactgctcactcagaaaccttgaagtttcactagactgcacactataactcacggaactctggcgcaggaagatctatacgccaaaatatgcagcctttcttacatgggagacttgcgcatgttttttgcagaggacactaataaggtgagagagaacccagtcatgttcttgattacatcatattggtaaaattggtttcagaaacatggaagttgcttaacttttttcggtgaaaagtatttctgatccattgattcaatcctttccctttagccgaccaagattgtgaagggacaatttgataaattacagtcgatgtataagccttttcttgaagagtgcgagaccaaaca

SEQ ID NO: 170339 - DNA, 1663 bp, Arabidopsis thaliana landsberg
ctcttggttcgaaaattttgttgaaatgcaggaaggttactatctgcgttgatttgtgaatacttggactgggcacaacttaatcacacgctcatagtttatcaacctgaaagcaatttggtaattcagataatccctttttcttttgctgtatttcattaagatgattgtagatgaatttttctcactaatctggtgatctcctgcaaaatctattcaaagccaaaagattcgtggaagtctgagttacgcgactttaatagcaacaatggttttgagctcaatagaaatggagatagtggaccactccttctcgatgttcttgaagggttcttgaagtttgaggtatttctttcgtctttttcccctgtgaagatgtttgcagccaagttgaaaactgaactttactatctttaactttttctcttagtttacaatctttacaaccatactctaaacaaattacaatagtccacctgtagtatgtgtgatctatgagttgtagtgtttacagttcctgttctgtaagtgaagatgatcaatactagttgtttacactcaagctttacaaacaccaacttacataaaatcttggtactctgtcctcgcaaccaagagaagaagttatagatagtaaaattcagttttccaagaaaaataaagtctcttagtagagattagagttcttcagagatttgagaatagcaaatttccaagcctcaaattctcttcacatctaagaatcatgtttccatcctttcatagttaaaccattatcatctggtttttgctgtatgcacctcagatgtagtgatcatcattttttgtaatgaatttttttcttcagagcatgacgcagggcatgggtaatagttcaaggagagattcagaaacagagtcgtcatcaagccttgagtccagaaatccccctcgcagatcatctgcttctgatagcttacctcctcaacgaaggtacacatatcttcaactctttgttattatgccaaatcaaagatccttactctttcacatgattgctttactcaccttcaaataaatgggcaggccggtttctgcatctcaagcatcgggtgagtcatcatttccctagtttcttgaagtattggttgaaatacgtatgcttcatgattttttgatgccaaataaatatgacaagatgttacagatagaagagccggattgtccacatctgggtacagaaaagatgaattcaactggagacaaggtaatcaagatgcacatgaagaggtaactagagcttcagcggcgctggagaatcttcagcttgataggaaaactcggaacttaacatcgtcttggaggtaagctttcaaggaaggctcattgaatcccacattgaaatgaaaacaatgcaagttgtggtacatctgatccatcggacttacttatgttgtaggaatgtgagggatggaacaaatgaagaagaagggagagattgatttaggctttggataaacatttcagcttctggattagtagagtaatggtttgtgtacgtgatatatgtatgtttctcctttatttgcaactgcgttttcaattagccttttttttaacgcacgaacctctgtctccttgagaacaaaaaacatgaaacagtaaaatgttttcttctgagatt

SEQ ID NO: 170340 - DNA, 1396 bp, Arabidopsis thaliana landsberg
tgttaggtattgaaagaaacgtatagtgaggcatggatttacttttgaatcggacacagatactgaagtaattcctaagcttgctaagtttgttttgacaaagctaatgaagaaggtaatgcttattgtgtatgagatttgaagtagtggttgttttgatttagttagtatgctcattttcatggggatatctatttcttatgctttgtaggtggacaaactgttacattctgtgaagttgtgtttgaagtgatgaggcatcttgaaggagcttatgctcttatatttaaaagctggcattatccgaatgagttaattgcgtgcaagcttggtagtccattgcttttaggtgttaaagtaagtaactctttgtcactagaatcaagagggctgttattcgtttccttgctagtctctcttaaatacttatagaagcaaaagttgattgttttagcgtggatagtggcacagttgcttcatattgctagcttgatttgtgtacttaagattctaactggatcatgatgctagcttttattttctcacctcctttttcactcacagaatcggaaccttttcggtttgtaagcaactgcggtataccttacttttgcatatgctttcgtaggagctagatcaaggtgagagcaatagtcatgttttccaagatgctcactttctatctaagaatgaccatcccaaggagtttttcctatcaagtgatccacatgctcttgttgagcacacaaagaaagttttggtgattgaagatggcgaagttgtcaatctcaaggtataacaattattcagttatattttagttagtgtgtattcattccctgtcaaagttaagtatgaatgttgaattctagcgtctgaccaactaatcttattgactgatcactgagaatatgtgcagcattcacaagtaccaactgaaacatgtaacaaatatcatgacagataaccatatgttattaatattgtttatgcagattctttgtgcttaccacttccacattttattaacaggatggaggtgtatcaatacttaagtttgaaaatgagaggggaaggtgtaatggtttatcgagacctgcttcagtggaacgtgccttatctgttctagagatggaggtagagcaaataagcaagggaaaatatgatcattacatgcaaaaggaaatccacgagcagccagaatctttaactactacaatgagaggccgacttatacgcggtggttcacgtaaaacgaaaaccgtcctcttaggtgggctgaaagatcacctaaagaccataagacgcagccggcgtatagtttttattggatgtgggacaagttacaatgccgctcttgcatcaagacctatccttcaagaactctctggtaatt

SEQ ID NO: 170341 - DNA, 569 bp, Arabidopsis thaliana landsberg
ttttaaaatgcataattcttatttctttcattcgccattttcaagatatgcatagcagacatggagaagatcctctgtcggaccatttggagtcagcagctggagaagctgcagccagatacaattcagctcttgacatgacgctgaaggtaaagattcaatacctaaactctcgtcttctgattagttcattccatatctcttgacttcctcattctctttgattaactcacaaaaacatgttatatcgcaggccctcgtgagtattaagatactcaaagaagatttgatgcacaatatgcaaccgttacaacaccacctggaagaccaagttccttccgtgctacaaaatttctttactgcttttgtgtcagaggagataaaaactgagggagtctacagttacctcttgagcgacttacttgctctcctagaagaagttctttccatggttcgtgtgaagaagatactctactaagcatggtattattattatttttgtcagtacgctttataaagaagggttctattttaatatcttttcagtcgagtggtgctgctgaggttgg

SEQ ID NO: 170342 - DNA, 1431 bp, Arabidopsis thaliana landsberg
atgaattactatggatgtagaaatgggagttcaggtggactgcaaattccattgtcgcaacaatcagcggcaactgtttgttgggaaaggtttcttcatgtgagaaccattagagttctgcttgtcgaaaatgacgattgcactcgttatatcgttactgcacttcttcgcaattgtagctatgaaggtcagttttgaagcctatgacccaactttaatctatagcgcatatatgtacccgtttcggttctgtttgttgattgattattattaactctgtcatggcagttgttgaggcgtcaaatgggatacaagcttggaaggtgttagaagatctaaacaatcatattgatattgtgctaacagaggtgatcatgccttacttatctggtatcggtctcttgtgcaagattttgaaccacaaatctcgtcggaacatccctgtcatcagtgagatctttttccttggtcgttttacattgagctctttcttttgaagttacacgatttgttgagtcttctctagcgtatgttggaaagtagatgcttttaactacattcccctgtgagatttgtgttgcagtgatgtcatctcatgactcaatggggctggtctttaagtgcttatcgaaaggagctgttgactttcttgttaagccaataagaaaaaatgagcttaagatcctttggcagcatgtttggagaagatgccaaagtgtatgtccttgctcatatatgattaatctgaaaacctgttggtacaactggtgataagtagtaaactagaaattcatggtctaattgtggattggtatcttcttcttttttttccacatgattggtatcttactttttggtttctcatggttttccttgtttcttgttcagtctagtggtagtggaagtgagagcggaacgcatcaaactcaaaagtctgtgaaatcgaaaagtattaaaaaatctgatcaagattcaggaagcagtgatgagaatgaaaatgggagcattggcctgaatgctagtgatggaagtagtgatgggagtggcgctcaggtaagacgaatgtgcaataccgataatctaaatatacacccgagaagctatccttttaaaaatttcttaaccacaaatgataggggtcggatgatcgaacttcgcatgtgcactcagatgcttataaatggtggaagcgcttaactaaccaattgtagaactcaatgatgtttaacttagatctattcagtgataaactgggtgaaaatttctagttcattttgaagttttattttgcacatggtttatctccaaaacctaggttgattttgacatacctttttttattcagagctcttggtcgcaaaaagctgtagagttgatgtcagtcagaaagcggtatctctatgggaccgagttgatagcacttgcgcccaa

SEQ ID NO: 170343 - DNA, 4868 bp, Arabidopsis thaliana landsberg
  unsure (1)..(4868): unsure at all n locations
gccaaggtatatactcatctcagcaattagaggttttaaagctatgaatcacaaggtggggttttttcttgggggcaagcaattccccaacatggtatttgatttcaatgttatagaggtataaaatggttgtaaggacattctcttaaatgttccttcactagttatctttgatagtggaactagtccaaggagcaagatgacgatctttcctaagattgttgcttgtatcaagatgacataaaatgttttacactcgcttggatattatatcaagaaaacctaagggatgtttattaacatttttatttatttccacgagtttttggagtatatcctagctgggaaaaaacatcaaaaaattcttgaatgttgatgcaaacactagtggacctttaacgaatttgaagatgcctttgtttgttaaactggaagaagtttttcttaggcaaaattctaatcatggagacaagattggttattgaaacaaactaagaatgttagcaaacaaggttatttataatcactaagaaaagtttcttcttgaagtcgcaggattgatgcacttcatgggggtctacaaaactcaacgagtgcaaacaaagttctttatgtgaagaactaacttgtttcttattgattcataatgaggttacatcacatatatatatacatatttgaggaggttacatgtctaatgggctaggtttacaaaggcccataactacttaagtctatgaccgacctatgtctaattcccatgggccggacctacgggccggaccaactatggcttctcttcatggaccgggccgacaggccgacgggccgatggaccgatggactggtgggccgactggtcgatgggccgtcacaccaatgggctgacggacctatcctccaaggacatgggccacggttatggaggccatccaacaagtggtttacaacatgaagcagaatatgaagcattaattaccagactcaggttggcacagggagttggagctaatgaagtgatcccctactgtgattcacaactggtggttaaccagttcaatggagactatgaagccaaagattcaagaatggaggcatatcttgaggtggtcaaagatttagctacaaaattttagaagctcgaactcattcgcataccacgaggagaaaacacaaccgcggtcgcactcgcagctttggcgtcaacgtcagaccccgaagtcaaagaatcatttcggtagaatgtattttagatagaagcattaaggaagaaaaatagacactcgtagtcacaagatcccgagctgcagcccgagatcgtggcgacactgctgttgaattaccacctgttaaaagacgaaagtcaaaggaagcaaccgtacctaagcccgctgtgcaggaaaatgttgggatcgaactaattgaagaagtcatctccgacgctaaaatcgaagctgaaactgaaccgtgggttgacgaggatatactagcgccaaatgaacatcccgaaccagaagctctggtgtttcacgaagttgaccaaattccggctaaagattgggggctgattggagggagccaataaagcattacatcgttacaggcaaactcccaaagaacaaatggcaagctaggaaaatgagaatcgttagcgcgaaattttgtttatcaaagaattctttgtatagacgaggtgtaagtgacccctacttgctttccatttttgggcccgtagtcgagattgttatgagcgaagtacatgaaggcttgtgtggaagtcattcctcgggaagggctatggctttcaagatcaagaaaatgtgttactactggcctactatgatcacagactgcgttaagtatgcccaaagatgcaaacgttgccaactctatgcaccactcattcactaaccttcggagttattctcttcgatctccgccccgtaccctttcatgagatggtcaatggatatcattggaccattgcataggtcgacccgaggcgtacaatatctactggttctaactgattatttttcgaagtggattgaagttgaagcgtatgtgaatattaaagattcggcagtaaagactttcatttggaagaacatcatttgcaggcatggcgttccatacgaaatagttactgacaatggacttcaatttatttcgcacgagtttgaagcattttgctcggactgggggattaaggttagttattgtactccgcggtatccacaagggaacagacaggctgaagctgcaaacaagacaattctaagcaatcttaagaaacgcttaagtaatttaaaggggggatggtatgatgaaattcagccagtcttatgggcatatcgcacaactcctaggcgctcgaccggtgaaaccccgttttcattggtttacgggatggaggcagctgtaccagccgagctcaatgtgccaggacttcgtcgaacggaagctcctttgaatgaaaaagagaattctgcaatgctcgacgattcgctggataccatcaacgagaggcgagatcaagccttgatccgaattcagaattatcaacatgcagcagctcggtattacaactcaaaagtcaaaagcagacctttctttgtgggcgattatattttgaaacgtgtgttcgataacaagaaagaggaaggagcaggcaaactcggcattaattgggaaggtccctacattgttatcgaggtggtctggaatggtgtttacagattgaaagatttagaagacagacagtccaacgtccttggaatgtggtgaacttgaagaaattttatgtttaaaaacacacacgcattctttgtacatgaactacggtgtggcttgatctcgaaatgggtatgtaggcatctcggaaacgagttcagctattaataaaatttgttttattcatgttgaagaatagttcgattatacgtacgaataaaaataaggagttcgactatgcgaacatacaaagcaggaagcaaggataaatttattcaaagagaaaacaaagaaaagacgctgaaatcttagaaacacttcggattaggaaatccttctcatcttgcagaacactttgatcccttgactggcgagatcaagaatgggcatcatacaatccgggannnnnnnnnnnnnnnnnnnnccaagtttgatccaatctccggggtgagagttgagggtgtgtaactcccttgatatcacattgactgtaatgcccctgaccttgactatacggccggacgtgcagtctatcgagtaaaatgcgagatcaagccaagaaaaggcaagatcagtttggccttttgatgtggcaagtcatgggtaaggagcattgaattggatcaagtccatgggtaaaggaatgacacaccatcagacggaccaagtttagctacgatgcgactatcggtaaaccccaaaaccattaggctagccctaagaactaggatagcttcaggaaaccttactttcggtctaggaaaccttagaaggtcgagtggaatccatttggacagtgagatatgtgtatgggtcgtgaatggtcacgggattgatcggagaatgcggataagtgacgatagccggcttactcggttaattctggcatggaacgtgttatagtcctaaggaagccttgatttgcgtcatggaccctcaggagacattggaacggagtgtgccgtattaatgttcttgcggtctggtgacagatcgtaggtttcgccggaatgaggaaatggacgaccaagattgaatcgtgcctcatgtttatcctttaaggctcaagcttatccatattctggtcatccttatccttttagggtcgtgcttatccatttttggatgatgtttatccgaaaaaatggaaggaaccaatcggaggccgattagtgtcttggagcggccgttggtctacatttttcacattttgattggtccaaacacctcgtgcttgccttggccgacctaatcaccgaccttggaccatataaataccccctccgcccatttgattcctcagacccaaaaatcgcttagaacagcttagttcgcgggagaaaacattcagaagccaaaccactcggaaatccaagtgagtcttgagttacgtgaagtagcacgtgaataggatagtttattcatttatttccttaatatagcttaggaggttaattatgattacttagcttaattattcgcttaatccttgattaggatagttaattaggtttagtaattgttacttaggattagtgatgactaattaggattagtatttcctaagcatgattagggctagttaaaccatgattagggggaataattacgattagtagtaattaagtatgcttagttgtttgactagtagagttttgcatataagattaatgcatgatagtatgtgagtctgttgtcatgttagttagtctttaattagatgactagcattagccgaaccatgaggatcccgtctgtatgttgtgcgtcgcatgtaactccgttccgttatggcatacgaaggctcggggttggatcgttaccgaccgggcgctacatgacgatgtagtataaaagaatgctatgtctcttatagactttgtgtctaagagtatggaggcatgtccttgggagatcatggatttgtagaaggccttacctaggttgatagaagcatgcttgcattagttgtctgctgcatattaggaaatttgagtctgcatacattttgcattgtgcattatattttgcttgtgttgtgtgttacgtgttatctttttttatgtcttgcttgttaggttgtattattgttacgtgttgtttgctgcttagggggtaagaaagggtattaggat

SEQ ID NO: 170344 - DNA, 558 bp, Arabidopsis thaliana landsberg
  unsure (1)..(558): unsure at all n locations
gtatgtatcaagaacccctccaaaccgaggaatgcgccggcatcgctgtttaccacgaaaaaggaagaactgctgcaggacgaagagatcaatgtgatcgtggaagtgatcgatgatgccaatgcggctttcgagatcgtttctaccgcgctgcgcaacggcaaagcagtagtgagcgccagtaaaaaaatgatcgccgaacatttacccgagttgctggaactgcagcaggaaaccggtcttccctttctctgcgaagccgcggcctgtgcttccataccggtgatcaggaacctggaggaatattatgataatgacctgctgcattccatcaaagccatcgtgaacggctctacgaattttatcctcaccaaaatgttcgaggacannnnnnnnnnnnnnnnnnnnnnnnngcttgcacagcagttaggatttgcggagagcaatcccaagctggatgtggagggatatgatgcggtgaaaaaataagctatcctgctcaaccatgcgtatggtattgtggagcatcctgacgatatccttttcaacggcagccag

SEQ ID NO: 170345 - DNA, 2922 bp, Arabidopsis thaliana landsberg; identical to SEQ ID NO: 7202
  unsure (1)..(2922): unsure at all n locations

SEQ ID NO: 170346 - DNA, 602 bp, Arabidopsis thaliana landsberg; identical to SEQ ID NO: 55507

SEQ ID NO: 170347 - DNA, 818 bp, Arabidopsis thaliana landsberg
aacatcgcatcagatatgtgtctgtctaatatgtacgatacataaatagggaggacttcaaaaattacgctgagcttctattccaaagattcggagacagagttaaattttggatcaccttaaatcagccgtactctctcgctgtcaaaggttatggagatggacagtatccaccaggaaggtgcactgactgtgaatttggaggagattctggaactgaaccttatatagttggacatcacgaacttctggctcatatggaagctgtatctttataccgaaaaagatatcaggtatacatatcgtaaactcataatttctctttgtgttgatactactttgtggtatatttgagtctataatcaagaactacttacgcagaaatttcaaggtggtaagataggaacgacattgatcggtagatggttcatcccactaaatgaaactaacgatctcgacaaggctgctgcaaaacgagaattcgatttttccgttggctggtatatatgttcaactgatggattacaaaacattatgtatatataaaaacatgctttgcaatattaatttatgtatattttcttacatatgtgaaggttcttggatccactggtgtacggacaatatccaaagataatgagagacatgctaggagatagattgccaaaattcacgcccgagcaatcagctttacttaaaggatcacttgattttctagggttgaactattacgttacaagatatgcaacctacaaacctcctccaatgccgacacaacatagtgtcttaaccgattcaggagttacaattggatgtat

SEQ ID NO: 170348 - DNA, 729 bp, Arabidopsis thaliana landsberg
atggagaatgaagagggaaaaagagagatgacgaagaaacaaagttcaaggtttaagagcatttgcgtcttttgtgggagtagcaatgggaacaaagctagttatcaagatgcagccattgatttggccaaggaactggtatgcatatatacaacttgcaagttctttataaaaattcttaggtcttctttaacaatgataaaacgttctgtttttgcaataacatcatgcatgaggatttttaagaaaccttgtatttattaatacagtctctaattaataaagagtttatatgtcaatttttatttgttttctttgacacaaaccgaagacaggataattaccaaattcggttttcaaaatttgatgaacaggtgatgaggaagattgatcttgtttatggtggaggaagcataggtttaatgggtttggtgtctcaagctgttcatgatggtggtcgtcatgttattgggtacttactctatgtttattctatactacttcatgaaaattctcatcattctttttgttgagagttacgaaaataaaggtagctaggtatggtttttaattcttattatgatgcagaatcatccccaagctcctcatgttgcaagaggtattaattgaattttcattaaaaatcaatgttcagtggatctgaataaagaattataacaataatggtaatgaataatgctcttttttggctctctggcaatgtcttgc

SEQ ID NO: 170349 - DNA, 481 bp, Arabidopsis thaliana landsberg
gcccgatcgggacagaccctcttcacctactagcatctggccgcctccaaggagtgcaccgaggccgtgatcgccggtggtaacgcggctatcgcctacgagacggtacggctggccgacggctcgctgcccctgctgattcccatgagcgaggtggccggccgcatggccccgatgatgggagcccaccacctgatgcgcccgggcggggggcgcggtgtcctggtctgcggggcaccgggagtccgcgccgcccgggtggtcattctcggagcgggagtggtcggcatggccgcggccaccatggcggtgggtatgcactccgaggtgttcgtgctcgaccggaacctggaccgcctgcgcgaattcgatcatcacttccggggcgagctcgagaccatcgcctcctccgaacacgccattgaggagatgtgcctcgacgccgacatcgtgatcggggccgtgctggtcgtcgagcccg

SEQ ID NO: 170350 - DNA, 2795 bp, Arabidopsis thaliana landsberg
tattttgattaaaattgaaataggaagaaaataagaagaaagtgacaacaacagacaaacggctccgtcaccaaattgacgagagagactctctcctttcaaactctttttcagtttcaacttcttcgtctccctcccacaccacctctacatatatacattcgattcacagtctatatatcttcttcttctatgcctctggcgtttctctcgcatggcgggtctacactcttcctcctcctcctcgaaacccactctgtcttcttctccttcttcatcatcttcctcgcgtcttttcctgctcgtgacccttcttcctctctctctcgcctgtttcgccttcgttctccaatggcgtggcggtctcgacgaccccgttacgcattggtcaatagatcatcacgagtttcccggaatggttacaacccaagagaaacggtctctgcgtcgttcagtttctgattcgggttgcgttgatcttctaggtcagagtcgttccccttcgtttccttatttccggaattggaaatttgattaccactcggatctgaaacctagggtaagcccttgtgattcaattttgggttttcctgatttaatttgatctaagcgtgttcatatcttctgatttccatatatcgttgatccttggtactttgattatgaaaagattgtgactttgtgcaaaaatggtagatatgtataacgacgagcacttctgctgggttagagcaaacattgccatggatattctatcacaaagttattggagtttcaacattttatctatttgttgaaggcactgctgcttccccaaacgtttctcgagttttggagacaatccctgtgagctctggagcttatgaatgatccctttatttgtttttctgacttagtattttcttactgctaatacgttctgttttgcagggtgtaaaagttatttacaggacaaaggaattagaagaaaaacaggctaaaaggtatttctctggtctgcatctttgtggatattggtaatggatctgctgtgatttcattgtgtcacttatgaaacttgggattttgttcctttacttttagatctataaatccactaacgtgattttttcaacagccggatatggaatgagacttggctgtcgagcttcttctacaaaccgtgtaactatgaattattcgtgaaacagtccttgaacatggaaatggcaatcaccatggctcaggtatctcttactttttaccatatttgttgaatatggtttgtggtaatagcactagataatgtaaaaaagccaacggtctctcagactctcacgccattttatgcggtgtatttaggacgctggtatggaatggatcattcatcttgacactgatgagcttatacatccttctggaacccatgaatattctttacgcaagttgctgggaaatatttctgcagacgtggatgtagttatctttccaaattatgtgagtcttacagttgtttggatttcattttttatcttgcgaaaaaacttcttctggcttcatcagcattgtctgtttttcaggagagcagcgttgagagagatgatatcagggaacctttcagtgaggtataaaatttatcatctgaagctattttgccaacatgagaaattgttcacatgattgtttgtttacccaccataggtacattgctatctttatagatctaaaaactactctatttgttgcacattcattttattgtaggtatcaatgttcaagaagaattttgaccatcttctgagagatgtctactttggaaactataaagatgccactcgtggaaatccaaactatttcttaacctatggaaatgggaaagctgctgcccgtgttcaggaccatcttcgtcccaatggtgctcatcgatggcacaactacagaaagagtccaaagtatgctcttttctcgttaaattgtctatcatttgactctttgtatctggcattgcttccctctgtatataatatgttagattctactgcggtttattcaatagaagcttatagtgggacatggacgagcctaaggctgtcacttacaattgttttaaggtgctaactattttgtggctgattcatggcatcttttctacagtgaggtcaaacttgaagaagctgccgtgctgcactatacttatcccagattttcagatcttacttcaagacgtgatcgttgtggctgtaagcccactaaagtggatgtcaagagatgtttcatgctagagtttgacagagctgtgagtggagatttatagttttttgctttatatttcctgcatcgttttccgaaatatatagtcacagctcttggctatcacatgtaggcatttattattgcttcaacagcgagttcagaggaaatgctgcaatggtattaatatagatttaaatataatcactgctcttcatcccattttcaactgctgcaatctaaccagcttcactaatacaggtacagagagcatgttgtgtggactgatgaaaaattgaagttgaaactccttaggaagggaattctaacccgcatttatgctcccatggttagttccacaaactcaaaccacgctctttatttgacatgaacgatcagtgtttggttttccacaagctatcatctcttacaggttataatccaagagctaagagaagcgggtgtttttagctctgtggtaatcgcagctcacaagtctccttcgaagaactcttcaactgctgattcgacatcaggcattacccgagaatcatctcaggaaactg

SEQ ID NO: 170351 - DNA, 1230 bp, Arabidopsis thaliana landsberg
  unsure (1)..(1230): unsure at all n locations
caaagtaacacattttcgataatctactttgggaaaatcttgaaagatggggaaagatttcaagagtttggttactagatgcatctatgttgggaagatgaatgataatgcaaagaagctgaaaatcgcgacggaggagctcaaagatcttggaaacaacgtgatgaaaagagtcaagctttgtgaggagcagcaacagatgaagcggcttgacaaagtccaaacatggctaagacaagccgacactgttattaaagaagctgaggagtatttcttgatgtcttcttcgtcttcttcttctggtttgatatcgtcgagccacaagatggagaagaagatttgcaagaagctgaaagaggttcaggagattaagagcagaggaatgtttgaagttgttgctgagagcactggaggcattggaggaggggcgggtggcggattgacgattaaggatagcgatgagcagacgattgggttagaggcggtttcgggtttggtttggaggtgtttgacgatggagaacactggtattattggattatatggtgtggaaggtgttggaaagacgactgttttgactcaggttaataacaggttgcttcaacagaaagcaaatgggtttgattttgttttgtgggtgtttgtatccaagaacctgaatcttcagaagattcaagatacgattagggagaagattgggttcttggataggacttggacgagtaagtccgaggaagagaaagctgcgaagatctttgagatcttgagtaagagacggttcgctttgtttctgatgatgtttgggagaaagttgatcttggtaagggtttataaagattacttacggtgcaagcaatagtgtttatattacttgtgatataaatgatctgcttttcttgtacagtgaaagctggagttccgccaccggatnnnnnnnnnnnnnnnnnnnnngtgttcacgacatgttccgaagaagtttgtaaggagatgagtgcacagacaaagatcaaagtagagaaattggcatgggaacgagcttgggacttgtttaagaagaatgttggagaagatactataaagagccacccagacatagccaaagtggctcaagaggttgcagccaggtgcgacggtcttcctctagctttggtcaccattggccgagccatggcctccaagaaaacccctcaagaatggcgtgacgccttgtacatcttgagtaactctcct

SEQ ID NO: 170352 - DNA, 1233 bp, Arabidopsis thaliana landsberg
gaaatgacacgctctgggtagtcataaattagggcggtataagtaaccatttagccatgcccttccagtgcatttttccataggctgctagggtagattggaggtgtcttaagtggtcttaatgtccaattaggtggtttacacagctgattaggtgttaaagcacctgataagaagacatatgccctaggaattttaattgttgtgtaagcagttaagaatatagacatgatttctcaatgagacatttcatgctcaggatcaaatttcggaagaactttaaaagagtgtgagactgtaattacttagtgaccactctaaaacaacttaaaaacacactacaggcttgagaatttaaggaatctatctttaagttcaaagatgatgaaattgaagttgttggttttaaaaagaataacacgctatagtcaaaaaaacttaagaagtgttgtgttatgtaaagtattaaaagtttaactaaatcatctatagtttaagtttgtgtttttctttggtgtattttctagtagtaatatagaactagtgtacttggaatcgtcttagatgctctaggttctagctgtaagattatcatccaactagtattgccttgaagctttttggtacatcttttgtattgcagggtgtcggtccaagtcttgcaatcagcttcgcagcgtatgagacttttaaaacattttggctctctcataggtaaatgcctctttattttgggatttgactatcaatattgcctagtgagttcatctgtccaataagagtcttaacttatcctatcgtaatacatttgtctttgaacttgttcaggcctaatgattcaaatgccgtggttagtcttggttgtggcagtctctccggaattgtttcctctacaggtttttgatctgatctgacccttctctctagttaccatagataatttagcccaaagaaaattacacgaaagtttgttatattatactgataacttttgtagcgacattcccattggatcttgtgagaagaagaatgcaagtggaaggagctggtggaagagcaagagtatacaacactggactctttggaacattcaaacacatattcaagtcagaaggcttcaaagggatatacagaggaatattgcctgaatattacaaagtagttcctggcgttggcatcgtcttcatgacatacgatgctttgcggagactcttaacttctctccccgattga

SEQ ID NO: 170353 - DNA, 574 bp, Arabidopsis thaliana landsberg
  unsure (1)..(574): unsure at all n locations
agtctccataattgttttaaattatcccccacagcttatatattactgatcaagttttaatattcttttttttttctagcagtttgagatgaatcatctcaatggcgaacatgtggtgtcagtaaaaggttgctatgataacatatccggtgtgatgcaagcacttcaattcgaaaccaatcaaaggagttctgaagtcatgggatacgatgacactggcactaagtttacacttgaaatcagtggaaacaaaatcactgggttnnnnnnnnnnnnnnnnncaaacctaaaatctcttggagcttatttcacaccacctcctcctattaaacaggaataccaaggtggtactggaggcagcccatgggaccatggtatttacaccggcataagaaaagtctatgttacatatagtcccgttagcatatcgcatatcaaggtcgactacgacaaagatggaaaagtggaaacgcgtcaagacggggatacccttccagaaaatagggtccaaggacaacaaaacaaagttctagttttaacactacgtacttacttcttattattttaggttttt

SEQ ID NO: 170354 - DNA, 777 bp, Arabidopsis thaliana landsberg
tgatataaaagttgtaacagtgtataaaattagcccatcctctctataaattatgacgtgatgagacattaatagatttataaattctattttgttgtcgcgatagtattaatttatagagatttattacatataatacagtgtctcgataatgagattagtgggctactaatgttagttgtctcaaccattgtattcagtttggtgtggtgcggactcttaaataaaaaacaaggcgttacaatggagcgtatatgaatactaatgcattcaatcctttggttggacctacgcagttcagctctactcggatgcattttcaaattggcaatgaattcatccaagttggttggtctgtgagtcaattaattagatccgctatttttttatatactcgatgtattatggtgtgatcattttctttgattgatatatatccatcaaattttctattcgttttaggtacacccggcattgcatcatttctttaactgtcggctattggtatatacgaatgtgagcgggataaatcttgttttacatttttataccatatgatttattgtcacatgttatatggttttatttaggcaggaggacgtgcgtgttataataccttatgtccggatggattcggaatgatactagtaggtcaagatcttattcctggacgacttaccgagcacagagatttaaactttgccataatcaaggtaagttcctttccaactattatagacataactcttcatgttttaggtattcaagaacgtttga

SEQ ID NO: 170355 - DNA, 543 bp, Arabidopsis thaliana landsberg; identical to SEQ ID NO: 44603

SEQ ID NO: 170356 - DNA, 505 bp, Arabidopsis thaliana landsberg
caggtcttcgtcgctcttttgcatttgaggaatggaactggatcagcgatcgcttgattcaagaagtgcgcacagaagcggctaaaaaagtagaacgtgagcttgagctggatatcatgggctgtgatattgatgctcgcatggtggaaattgctaaggccaatgctcaggcagctggtgttgcaggagacattacttttaagcagatgcgcgtgcaggatttacgttccgataaaatcaatggagtaatcatttccaatccgccttatggtgaacgtttgtcagatgatgcaggggtgaccaagctctatgctgagatggggcaagtatttgcaccgctgaaaacttggagcaaatttatcctgactagtgatgaagcttttgaaagcaagtatggtagccaagcagataagaagcgtaagttatacaacggaaccttgaaagtggatttatatcaatattttggtcagcgtgtcaaacggcaagaggtaaaatagaaagggat

SEQ ID NO: 170357 - DNA, 548 bp, Arabidopsis thaliana landsberg; identical to SEQ ID NO: 31836
  unsure (1)..(548): unsure at all n locations

SEQ ID NO: 170358 - DNA, 1212 bp, Arabidopsis thaliana landsberg
  unsure (1)..(1212): unsure at all n locations
tgtgtcgatcgacaccatatgggacgctcttatcagagacgactcaatacgacggtgtcgatcgatacccctcttgatcgatcgacattggatccggactgcaccctgtgaggtgcaaatacctatgtagcccgagtctgtttacactcctcctgtcccttatccgaggaagcgtcgttctaaacaggatattcatgctcgctaagtgcatagcaataatggagatgatgctccacacttttccctaaggatgcttcagagacatcttctgcttcactcaacaagtatgtcaaatgacttgttgaccatgaaattagctcagatgaagctaagctgcttaccagagacattagtgcaatcatgctgcctaatgccaagaaggagaaggcacaaagagtagacattgctgagtacatccgcaccatcactcctggtcagaccactgagaagcttcccgatccaggtagctttgttcttgattgctctatctccacaagcaggttcagccgttctttgtgtgatttgggatcaagcatcaatctcatgcctaagtctgttgctgagagactaggcatgactcactacatgcctactcgcatcactctcctcttcgcggatcgttccaagcgaatccctgaaggaatccttgaagatgttcctgttaaagttggtaactctattatcccatctgattttgtggtcctggattatgagaaggaacccaaggatcgctnnnnnnnnnnnnnnnnngttcctagttatagctggtgctaggattgatgtgaagagaggaaggatctctttcaaagtatgtgatttggagatggagtttggcatggatggttcagcgttcactaagcctatcagtagtattgcctctagcacagacacacctcctctgactgcttagaatccccaaatagagtcacacacaacgctcccatcagcctagctcgccaatgagagttgtaaagaatcggtgtcgatcgacaacatccctcctgtcgatcaacaacctcgggattcacagaaagaggattctgcacattctcttcatcccacacctcttgaggccctctatgataggttctcttctatctcttctcctgctttaccatcaattaattccttagattctttgaagtctgcttcacatgttaacaagcctagagttcctcgaaagcttgtttctcctgatgttcttgcaggtga

SEQ ID NO: 170359 - DNA, 336 bp, Arabidopsis thaliana landsberg; identical to SEQ ID NO: 41858

SEQ ID NO: 170360 - DNA, 490 bp, Arabidopsis thaliana landsberg
  unsure (1)..(490): unsure at all n locations
agcgcgctcggcggtctatattgcgcacgccaatttcgataacttcaacctcgacctaatgtatgcgctgccgtcgcagacgctggaagaagctcagcacgatattgaaacggcgatcggctttgcgccgccgcacctgtcgttgtatcacctgacgctggaaccgaacacctatttcgcgaaattcccgccggtcgttcctgacgccgatgcgagtgccgaaatgcaggacatgattcatgacctgaccagtaccgccggctacacgcattacgaagtctcggcctatgcgcagccgggccggcaggcgcgccacaatctgaattactggcagttcggcgactatctcggcatcggcgccggcgcgcattcgaagatttccttaccgcaccgcattgtgcgccagatgcgctccgagaatacgaagagctatncgtacatacggtcaaagggcaggcgatacaggaagaattcgaagtcgagcgcgatg

SEQ ID NO: 170361 - DNA, 2557 bp, Arabidopsis thaliana landsberg
  unsure (1)..(2557): unsure at all n locations
ttcaccatctccaaaactcgatttcaacaagattactcgactgctgcggaagagaagtatttcaccgtcgcaatcgagtacgccgactcgtccttggtcgagtagcaccagttttaaccccatcgatagcacattcatcccctctggaatctaagtaacttcgaagagtcactcgacagccgctacgccgccgcaatcgagttcaccatctcattcaccatcgagtagaatcagtttggccgtcgaaacctcaagaacactagaccagattcaagattccaaacgataattccggttgactgagagtttactcgaccgctggtgctatcatttagcagatccactcgacatcaccagttttactcgaccaccactctgtgcaacttgattccaatcatgaaagaagagcttgtgaacacgtcagcttactcgagtactgggttacactcgaccagtttagtcctttttgttaattcttgagaacaatttcggtttcatagttttctttgagactaacctattgacatttgagttttgagttcttaatctttttcaggatcattatgagcaactatagtggcggttcgtcaattgattccgactataacttgtttgaggctgagttttcatctttaagaccggaaagagaacagagggaatatgagaatttcaggagaagagctgagatagctctagggaagagagcagtgacaaagaggtatgagctgatagacgaggagttggaggtcgagtatatgcctgagcattctcatagagccacaaaacttctacacaagcctgggttattgccagctgaggagtatatctgactcttcaagctgaatgagttctacaacacaaagtatccctgctcaactacgctggcacagcttggattactggaggatgttcggcacatgtaccagagttgtcacctggacactctgatggcttacccatatgtagcctacgaggaagaaacgattcagttcctctccacactgcaagtggagctttaccaaggtatgacctttgatgatttggaaagtgaaggattgggattcttgtgattctctgtgtatggtcaggattataagctatcaatcaagcgcttggaaggattgttttgtttccccaatcaaacgggtactaagcccaagtttgacagagaagagttgaaagacttatgaatcaccattggcagctcttaagagggtatagagatcaacacaacacagagaattgcttataactatattcttattgataacaaactgattacaagtgttatctcggatattacttgatctatactacccaaaagatcaaacccgactaagaatacttaagcctaattctcttctctgttttttatcactctcacgtgaaggcaaagagaactacacactcaccttcaagcttttgcaatgctctgaagtttacaattgtataacagtattcnnnnnnnnnnnnnnnnnnnnnnnnnnnnnnnnnnnnnnnnnntacctactctccagaaccgtaaacctaggatctccgagaatctcgttttaagaaatcttttttgttttctccaagcttattccttcctaattgttcgagacgatatcttccatatcttctcggtgattcttgtctttgacaccacgccaagtcagcttccatccttggctctccacatcatccgccttagcttgccacgtgtgctctcgcatccatgtctgcaactcaagcgtttgataaaactcgatgcagcttcctgaaatccatcaacgctgtgatcgccatcagctgattgattgaactctgcatcttcaatctccccctttttgactgagtttgatactcaagcattccttcattgatataaccttaaactcaaatgagagacacaccacacatctaataggcatactgtagaaataccatctagtataaatatcataaaacgattagtctgaaagtgaacaatgtgtggaaaaaatattacagacccatgtttacgatgatacaatcatcggtttaaacaaaaacaaaagagaagttgttttggtctgaaatacaaccgagcttaacaagagaaacgaaacaaaaacacagctcccccacaagttaatctcccccagcatcatctgactccgaaggggccttatctccccctgcttgagcacataacttagtcaaaaatcatgtaaacaatcagacatatgtagtataaagcaagaagatcgcacagaacacttacctgtatcgagagcagcctgcaggatttcgatggcaatcctcattgcccttcggttggctgattccttgcgatatgctgctgcactctgcttcaccttcttctgcttggtcgacgctgaggaggcaggaggggtgacgggaatctgaaccgggcattgcgtctggatcaactgatagatcagattggggaacggcaggaagagtttcgtgtccgttttcagagccagctgaagaatgtgctcaaaacccatccttccaaagtcaaatggcaaattttaaataatcatgtacacaagcttggctcggtcaggct

SEQ ID NO: 170362 - DNA, 563 bp, Arabidopsis thaliana landsberg
  unsure (1)..(563): unsure at all n locations
ccgacgatgcaaaactggagctactttgacgttgttaacaacttcatagagaatagagtgtatgcgcnnatagntncaaaggcaccgaccatagcatgcactacgtgagatttacactgactaccgaaagattattacagatatccagatgggatacgacatcatcggaatggaacttgtttggcgttttaccgaccgagaaatgcgatttgtaccaaatatgtggtcgtgatagttattgtgacacgaaaacatcaccgacgtgtaactgtatcaaaggctttgttccaaagaatgtgacggcttgggctttgggagatacatttgagggatgtgtgaggaagtcacgactgaactgccacagagatgggttttttcttttgatgaagaggatgaagctgcctggtacaagcacagcaattgtggacaagacaattgggttgaatgaatgtaagcagaggtgttctaagggttgtaattgtaccgggtttgcgaataagtatatccaaaatggtgggtcggtgttgtgtgatatggaccgcaggagctcatggatatgagga

SEQ ID NO: 170363 - DNA, 793 bp, Arabidopsis thaliana landsberg; identical to SEQ ID NO: 39699

SEQ ID NO: 170364 - DNA, 508 bp, Arabidopsis thaliana landsberg
atgcgcgtgtgcgatgacgaccgtggcggtatcgatgtggcaggcaatggcctgaagggcatgcgcgagcgcgttgaaaccatgagcggacatttggccatccattcactttcggggcagggcaccgagctggtggtggatattccgctgccacgaacggacaaacctgcgctggactcggcacacctgcggcccgactgcccacaagacaaagtattgccattgcgaccccaggccaggagccaatcatgattcgcgtgttgctggccgaagaccagtcgatggtgctgggtgcgctgtcggcgttgttgaacctggagtcggacatcgaggtgctgggcgctgccgccgatggcgagatggcgtggcgcgagctcgagcggctcaagccggacgtgctggtgaccgacatcgaaatgcccggcctgaccgggctggaactggcccagcgcgtgcaacgccacgaactgccgatcaaggtggtcatcgtgacgaccgtcgcgcgccc

SEQ ID NO: 170365 - DNA, 715 bp, Arabidopsis thaliana landsberg
atgttttccaagtacagtttcattctttgtcttattttcttcttcgtcacagcattttccggcgactccagagctcttgctggaaacaatgagcagaagaacatctctggcttttctgggattgactttccaaatccaatgcgtttcggttctgcttcttcttccacaagcaacgattgcggcttctcttcccctgagaaagaacccaccaaggaacggaccggagaaaacaagacggtgaagtttcacttaaagcgccgggagactacgactacagagaaggcaacaacaaattcagttcttgagcttcaaatccgagatctcacaagaattcagacgcttcacaaaagagttttggagaagaacaaccaaaacactgtttcgcagaagcagaagaagaatgataaagaagttgttaccactactccggtggcttcttccgtggaggagcaggctggtcaattggtggcaacacttgagtctggtatgactctcggttctgtctagtacttcatggacgtgttggttgggtcggcaccaaaacacttctccttgattcttgatacagggagtgacttaaactggattcaatgcttgccttgctacgactgtttccagcaaaacggtgcgttttatgaccctaaagcctctgcttcttacaagaacataacttgcaatgaccaaagatgcaacctagtctcatcacctgaccctc

SEQ ID NO: 170366 - DNA, 709 bp, Arabidopsis thaliana landsberg
ttcatcatcatcatcgttacatttttttttgcatcttatgcttctcataatctactattgtgtaggttattgacacattaacgaaaacattaagttacttgcccgggttcatatcaatgcacgacgtggcctacttcgatttcttgaaccgtgtacatgtcgaggaaaataaactcagatctttgggattatgggaacttcctcatccttggcttaacctctacgttcctaaatctcggattctcgattttcataacggtgttgtcaaagacattcttcttaagcaaaaatcagcttcgggactcgctcttctctatccaacaaaccggaataagtacatacttctcttcattcatatttatcttcaagaaccaaagtaaataaatttctatgaactgattatgctgttattgttagatgggacaatcgtatgtcggcgatgataccagagatcgatgaagatgttatatatattatcggactactacaatccgctaccccaaaggatcttccagaagtggagagcgttaacgagaagataattaggttttgcaaggattcaggtattaagattaagcaatatctaatgcattatactagtaaagaagattggattgagcattttggatcaaaatgggatgatttttcgaagaggaaagatctatttgatcccaagaaactcttatctccagggcaagacatcttttga

SEQ ID NO: 170367 - DNA, 510 bp, Arabidopsis thaliana landsberg
gaaagcgcattgctttcggtgtggggctcccgtatacccttacgtaaacgtaagtgacatcgaatgatgccgcctgcgaagcatttgttgaaacgcgactggaagccaacaccccgaccgcttccgacaggcgatgcaggccaggccgcgccgccctatccggggaaaagtctaaatccatgaacatgatgccgaccggccagtccgtggccaatgcaaacgacatggcgaacgaagccaccgaggatctcacccgtatcggcgagatggccaaggtcttcggcgtaacgctgcgcacactgcgcttctacgaggacaaggggctgctgaagcccgtccgcgacggtgccacccgcctatacacgcgccgcgacaaggcgcgtcttaagctcatcctgctcggtcgcaagatcggcttctcgctgcgagacgtgaagcagatgatggacctttacgacccgggcggcacgaacgcccgccagcttcgcgtgacccttggaaaatcggaaa

SEQ ID NO: 170368 - DNA, 1735 bp, Arabidopsis thaliana landsberg
tatctgtgacgcatatatgatccagagagcccaattttctattatggtctatctgtttcttttgttaccgttcttttgatgtctatgttgtttcctctgagtttttttttttgatgcagtggagcttttattgtatgctccaaagagcccaattgtggattatgcagtggtcttcctctggctaatgtctgttggaacagtttttgttgcttctgtttggtcacatgttaccagtccgaagaagaatgatgagcagtacgatgaattatcacccaaggtttattatactctgcttttggggcttctactgaaaccttgtttttggaactgagttctactgaaaataaacttcactttaacatctgagcatacaagaaatcaaccaaatataattttcttacaactgacaagaagataaaataatctaattagctcgttctgtctctaatatatctgcctcttctattgatacacttgtctaagttatacactaattcttgttctttttatattttctgaaaattttggcagaaatcttcgaatgttgacgctaccaaaggtggtgctgaagaggaaactcttgatattagtgctatgggtgctgttatctttgtcatatcagcgtccacattcctcgttttgctcttcttcttcatgtcatcgtggtttatcttgatcctgaccatatttttcgtcattggtggtatgcaggtaatgttagctaatcttgagcatatccttagtttcatggttcaatagctagaactatgatcaatgtttggtaacaggttgatagtaaactttctttagcattgtttccttcccttgtaaaaatacataacatgatgaactctttatgtgaaatgaaacagaggcctgctaagctaagcattattatgtcaatatcacaattattaatttattttctatctcagggaatgcataatattatcgttacactcataacaaggtactctcagaaacccaattaagtttttgaaccgtgaaagagctctattccagctagttaaaagcatcatgtgatgttttctctttattcatgtttatatttctgcacgatatgcagtaaatgtggccagaagaatttaaaactacctctgcttgggaatacctcgattctctcactcgtggttctgttattctgctttgtggttgctatcctctggtttatgaatcgcaaaacttcgcacgcatgggccgggcaagatatttttgtaagtccattttagcctggtaattttacagttgtctaaagccaaattatccctatgcattttggttcttctttgatttttttccgtatgtctaaacacaacttctggcttgacgcactcaacatttactttcacttcttgctcaaatccaactcaaggttctgttttgttttcgacatttatcggttgacttctgtaggacttagcttaggatgcttttggttcaaaattgtccttagttggctttctaaggttgacgtgtcatgtgacagggtatttgcatgatgattaatgtcttgcaagtagctcggctacctaatatcagggtaaattttctgtatgtattttccaactaaaattcttttgtgatccctttgtatgtgttctaatgggtgtctcacacttaggttgctaccattcttctctgttgtgcatttttctatgacatcttttgggtattcatatcaccactaatcttaagcaaagtgtaatgattgcgg

SEQ ID NO: 170369 - DNA, 812 bp, Arabidopsis thaliana landsberg
cggtcgatcagcaatggtgcctcgtccatgccacccatatgacgccgaaaaatatgatgcggctggccaaatccggcgctatagcgggactctgtccgatcaccgaggccaatttgggcgatggctttttcccggcgcgcgactacatgaaacagggcgggcgcttcggtatcggatcggattccaatgtcctgatcagtgtcgccgaggatctgcgtgtgctggaatatggccagcgcctgatccaccgcgaacgcaatgtgctggccaattcttcatgtggagaaagcctctatatccgcgcgctcgatggcgcgcaggcgcttggcgttcaatcaggaatcgcaatcgaccagccggcggatatcgtcagtctggagcgcgccctggacagcttcgtcttcgcctcggcacgcaccccgattgattgcgtctggcgctttggccgcaaacaggtagagggtggccgccatatcaaacgcgacactatccttgccgattatcgcaagttgatgcaaaggctgaccgcatgaagccccagaacaagacaaagcaccaaaaaattcgtgacgatatcgagaaccagatccgctcaggcgcactgaagcctggcgaccgcattccgttcgagcacgaactgatggcgcaatattccgtctcgcgtatgacggtcaacaaggcgctgacgcctctggatgaaggcggtctgattgaacgccgcaagcgcgcgggtacgtttgtgcgcctgccgcggctggattcgaccgtgctcgatattcccgatatccagcatgagatcaccgcgcgcggtc

SEQ ID NO: 170370 - DNA, 1068 bp, Arabidopsis thaliana landsberg
atgttgttggaagaaacagaaccaccaaaccagactctagatcatgtcctaagctggcttgaggattctgtgtccttatccccattaccaggatttgatgattcttatttgctccacgagtttgatgggtctcaaacgtgggaatgggatcagactcaagatccggagcatggttttattcaaagctatagtcaagatcttagtgcagcatatgttggttgtgaagcaactaacctggaagtggtaacagaagctccatccattgatttggatcttccacctgaaattcagcaaccaaacgatcagtccaggaaaaggagccacgacgggtttctcgaggcacaacaggtgaaaaaatcagcaaggagcaagagaaaagcaatcaagtctagtgagaagagctccaaagatggtaacaaggaagggagatgggcagagaagttgcttaacccttgtgccttggccattacggcaagtaactcatcaagggttcaacattacctttgtgttctctctgaactggcctcttcttctggtgatgctaatcgtcggcttgcagcttttggtcttcgggctttgcaacatcatctttcctcatcctctgtgtcatcatccttttggcctgtttttacttttgcttcagcggaagtgaagatgtttcaaaagactctgcttaagttctacgaggtaagcccttggtttgctttgcctaacaacatggcaaactcagctatcctgcagattttagcacaggatcccaaagataaaaaggatcttcatattattgatattggtgtttctcacggtatgcaatggcccactttgttggaggctctgagctgcagactagaaggacctcctcctcgtgttcgaataaccgttatatcagatctaaccgcagacatacctttctctgttggtcccccaggttacaattatggttctcaactcctaggctttgctcggtctctcaagatcaaccttcagattcgtccccttgacaagttacaactcattgatacctcacctcacgagaacttaatcgtgtgtgctcagtttaggctgcat

SEQ ID NO: 170371 - DNA, 575 bp, Arabidopsis thaliana landsberg; identical to SEQ ID NO: 75238
  unsure (1)..(575): unsure at all n locations

SEQ ID NO: 170372 - DNA, 1349 bp, Arabidopsis thaliana landsberg
atctaaagagaaaaaaaccatgagaaaaggaggtttaactcctgacagagatcgtcagattgaggaacatgagttgcaagaaactgggataagtcctgacatagagaggttaaagaggaacattaatgctacaccataccaaagagaagaagaggaagaagatagagaggaacaggaagaatccgtggagggaatattcgaaagcagagaggttccttcgtggaagaagcagttaacaattagggcttttgtggttagctttgcgctaagcattttgtttagcttcattgtgatgaagcttaacctcacaacaggaatcattccttcgcttaatgtatctgctggtcttttggggttcttcttcgtcaagacatggactaagatgcttcataaatctggtcttttgaaacagccctttacaagacaagagaacaccgttattcagacttgtgtagttgcttcctcaggaattgcctttagcggtaatagaaacaagaacctcatctaaaagaactcaaaatttgaatcaagattggtgtttttttcttgatttctgactttttcttataaaaagacaaaatctttgaggtcatcttccttcacacataattcacctgacccttcttttctctcttttctgggttgtttattaaattaaactgcaataggaggatttgggacttacctatttgcaatgagccatcgaatagcagaccaatcaggagacgttgcccgtggcgttaaggatccttcattgggttggatgatagcttttctctttgttgtcagctttcttggcctcttctctgttgttcctcttagaaaggttttgattctgcctcttcttctcctgtggaaacaccaaagagactttgagcagctgatgcaatcttacagttaccaatttgtgtttgcagataatgataatagacttcaaactaccatacccaagtggcactgcaactgctcatcttatcaacagctttcatactcctcaaggggcaaagctagccaagtatgagactttcgctttcgtagcttaacatacattttgagttctctgcttattgacttgtgctctctgtatcaggaaacaagtccgagtcttggggaaattcttctccttcagcttcttttggggtttcttccaatggttctttactgcaggtgaaaattgtgggtttaacagcttccctacttttggactcagagcttaccaatataagtaagcattatgatattattacctgatgcattgtctttagctcacaaaaaggggaaattgtcttgtctttgtctcataagctggtttattgtctcgacaggttctactttgattattctgcaac

SEQ ID NO: 170373 - DNA, 1144 bp, Arabidopsis thaliana landsberg
atggagaacccatcagcatccagagataataaaggtttctgttttccagatattccagtagaagaaatggatggctgggttaagaatttgatctctgaagaagatatgtttagctcctcttcaacttcagagcttatgaatttcgaatcttttgcttcatggtgcaacagcccttccgctgcagatatcttgttcactcaatacggtttatcgacctctcaatctattatacctttcggaggcttagaaggctcatacgcttgcgagaaaagaccgttagactgtactagtgttccaaggtcattgagccattctcttgatgagaagatgctcaaagcattaagtttgtttatggagttctctggagagggaattctggcacagttttggactcctattaagacaggagatcagtacatgcttagtacttgtgatcaggcgtatctgcttgactcgaggctatctggataccgtgaagcgtcgaggagattcactttctctgctgaagcaaatcaatgctcttatccaggtcttccaggcagagtctttatctctggagttcctgagtggacatcaaacgttatgtattacaagactgctgaatatttaaggatgaagcatgcattagataacgaagtccgtggttcgattgcaattcctgtccttgaagcatcaggttcttcttgttgtgcagttctggaacttgtgacatgtagggaaaaaccaaactttgatgtggagatgaactctgtttgccgtgctctgcaggtaattaactaaccttatctctcttctctttgtgtatgtgtctttgcttcttctttcttttatctctcttcactcatgtttttgtctatgtttttcaggccgtgaacttacaaacatcaactattcctcgtcgccagtacctttcaagtaatcaaaaagaagctttggctgaaataagagatgttctcagagcagtgtgctatgcacataggttgcctttagctctagcttggattccctgtagttactccaaaggagcaaacgatgagttggtaaaggtttatggaaaaaactcaaaggaatgttctattctttaaatagaagagacatcatgttatgtgaatgatatggaaatggaaggctttgtgaatgcatg

SEQ ID NO: 170374 - DNA, 1561 bp, Arabidopsis thaliana landsberg
  unsure (1)..(1561): unsure at all n locations
caaggaccaaggaagttactctctcgcagacggaactcgagctgttaacccttctccgacgtggtcagactgactggtccacttttagcagagatcgcatcatagctgctcttgccgtagctccagcagttcccacaatcgtccctccagcagcacagctagatccgatcgaagaggtccttcggattgaaccggttcctgaggctgatctgcctataagtacgagttccgttatattttcttgggtttaaaaaatgtacgagttatcgagacagctgcgcaactcaaattgctaactaacaaatgtcatgctctatttgttcagttcctcctgactccagctccacttcagaactcccgctcattagaagaatgagatgnnnnnnnnnnnnnnnnnnnnnngccaatgccgaggctcctgctcgtgccgatgatctgtcggctgcggtgaccgcggctcgaaacactctagctgtttcctgcgcatctgcctcagcatctcatccctcccttcctgaggtcaacaccgggacctctactgcagcaagtcaatcaggtaacaatcaggtcgctcaggtatctgagccatctgcagttgttcgttctgatgtgcaccgtcctctccgaagagggctcggacccagccggaggtgaatccagcgactgagttggtcgtgagcgaccagagggtcacctctcccagagaggagaggatggaacctgcggctgctactccggaggcagctgcgtccgcggataggggaggtcccatggcggaggacgaggctccagaggtgggggcaggtcttcaaaccggtctcagaaagtgaggcagacgtccaactctggtggaggttccgcgggaagcgggcctttccactggtctaacactcacgaccgtgatcatccgatcgttgaggacgaggctgggttggcgaacctgcttcgctacatcaaagggaggaactgccaggttcctggagtgaagaacatggccaaggcggcatcttatgctgacatgatggcgaaggagggccaggtaataaccgataactgcctcctcctgattccattcttatgctagttataactttctgttttgcctttggtaggcgatagctgccacgaataagctggttgctctctatgagcagcgtttgagtcaagtcccctcggcgagcgagcttgaagaaggaaaggccctcatccgggagctgacgtcaagtgtgaaggctggtcaggatcgcgaagtctcgttccaggtacacctgggttttgacttgcttataaataattcgtcgatgatttgatgattctgacctgattgtaatttaaggcggagatcgagaggctgaaaatggagttgtccacttcaaaagacctcgagaaaggttttgctgagaagatcgggttcatggagatggagatcggggggttgcaagctgacaagcagacagcgaggagccagatccatcgcttggagcagaagagggaagagctctccaaaaaggtggtggacctgactttggttgcacaaggggcaaagaaggcggttcatgat

SEQ ID NO: 170375 - DNA, 1645 bp, Arabidopsis thaliana landsberg
atgaattcctatgaaaaagttcttatgctaactttttcagcaatagctctaattatagttactgagagttacagaacaaaaccattggaagaggaggaaaacacgttggagagtttactcaactatatcaataagtctgcgatcaagagttttcgggtaagcctttcaaaaaatatggtataatcatagaatggtcgcatttttttcagaacaaatcaagtttatttctgtttgcaattctgtagactaaacatggcgatacattggattgcatagacattcacaagcagctagcctttaatcatcctctactcataaaccattctattcaggtttatgcatgtctatattataaaagttccctacttcgagtatatttttttaaaaagaggagtttatttatgaattgattgaaatatgatgggcagttgaggcctacaactatacctaaatggaacataactaataataatgattctcgtcccgtaccgcttcgacaagatggcataagttgtccacttgggaccgtgattgttaagagaaccacaccgaatgatcttatacaagatcagcgtttgaaagccatggggttcaaagattcaatatctctttcttcaaagagcaagaacattgatttgactggttttcatgtattaatctggctagcacatccgtcacatagagaaatttgaatttcaaacaaacaatgaagcattaatcacttctttcttcatatattttctctttgattcaagtttgccgtggctcagtacaaatattctcattatggagcaaggggaaaccttaatctttgggaaccagaagtttcacctactcaattcagtcttgcaagtatgcttatctctagcggcttaaatgaacagtttcaaggcattagagctggatggatagtaagtcaagatcttgtgttgtcccttgctttctctaatttttttttttatcaatggtgaaaagtaaaaaaagattaccaaaacccacactcaaaaatatcctcaggtgtaccaatggttaaaccggaatcacactcgcttatacacctactggactgtatgttctcaaaatctctaaagagctttaatataaaatccatcttgacatttttgatattctcatgttgtggatatcatcatttatacatgttctatcatttgactcatatagacggatggatttaagaagacaggatgctataatacattatgtcctggctttgtgcaagtgagcactgatatcccactaggcttacttcttaaaccaatatctatttacagtggcgaacaatatgaaataaacatcaacatatataaggtagcatcaactaccaaaattttccttctctagtcatttcgaatgtataaataactgcgtctgtttaaacaggatcatattacaggaaattggtggttgatggcgttcaataattatgttggatattggccaaattcattgttcacagatgttggtttagcccatggagcaagtttagtatcatggggaggagaagtatacagtccagtgaaagagaagagtccaagcatgggaagtggacatttcccacaagagggtttcaagaaagcagcctatgtgagtggtattgaactaatcgaagatattaaattggaag

SEQ ID NO: 170376 - DNA, 542 bp, Arabidopsis thaliana landsberg
gcactctttcattggttgagaaacgacgggagcatcataactttcaatcccgagacagagcaagcacgcttgattccttccggttttcatcaggaagtaccggatatgaaactgttacttgcggcagatgataagatcaatcgcttgaccttaatatcagggacaaaagaaacaatctcagtttacacattactcgggaatctcaaatggggtctcgctaggcggatcaagaacgtatctctgaaagaaaatgagttgaatgctggaacatggttgtgtacgatggcaagcgtcttctggtgagggagaagaaaaagaatcgtttaaatggtgtagttcatgtgtacgacatggaaactaacagttggggagttttagggtcgatcatatatacggccggtgcagtctgggacttctataagtttacgccgtcctggtgtcctgttgaggagggtgagcaaaattataaagcgatagtagattgtaatgaacatcgcgtcttctatctaatttctattatgagactcgttaatacaaccaag

SEQ ID NO: 170377 - DNA, 2058 bp, Arabidopsis thaliana landsberg
  unsure (1)..(2058): unsure at all n locations
tttctagaattcttaaattgtgtcccaaggtacagtctcaggttgacagttcttgggggaagtctatatggtcagtttaaagctagatgtcctaacggttaatatgttcgcttctattgaaagtcaatgcttatgctaataaactgctacaaattaagcactaatacatgcacacttgttactcgtagaaccaaatcctatgttcatccacagttcacaagatgcatgggcgaaggatatggaaccacaagatgtctcaggcgtaaatttatttgatatgcatactatacgtactgccaccaataacttcagttcctcaaataaacttgggcaaggtggatttggtccagtgtataaggtaatgtatcattctgttctatttaccttttcttgttttcctattctgtattttcttcttctggagatgactatgtgcaactattcttccagggaaagctgcaagatgggaaagaaattgctgtaaaaaggctttctagcagctcgggccagggcaaagaggagttcatgaatgaaatagtactcatctcaaaactccaacataaaaacttagttcggattttgggatgttgcatcgaaggagaagagaagctactgatctatgagtttatggtgaacaaaagccttgatacttttctctttggttggtcccttcttgcatccttcctttactattcagtaactttttatatatatgtggaaactgtttgtctgacagttttatttcttagattcaagaaaaaggctggagattgattggccaaaaagatttgatatcattcaaggtattgcacgtggacttctctatctccaccatgactcacgcctcagagtnnnnnnnnnnnnnnnnnnnnnnnnnnnnnnccttctggatgagaaaatgaacccaaaaatatcagattttggattggctcggatgtatcaggggaccgaatatcaggacaacactcgcagggttgtaggaactctgtaagaatctaatttcaaagacatgattaactaagattaaaagttaatatcagatattaacttgggagaaactatttgatatatgtgcagaggatatatgtctccagagtatgcatggactgggatgttctctgagaaatctgacatctacagcttcggagttctaatgttagaaatcatcagtggagagaagatctcaagattcagctatggcgtagaaggaaaaacccttattgcatatgtaagtaagatttataggcattgacacagtaagatcttgtatttgattctcattaagtgcgcagatctcgctgactgtttgaaaacatgtattgctcttatattcgcttggtctgaaatcacaacaggcgtgggaatcttggtctgaatacagaggaattgatcttttggaccaagatcttgctgattcatgtcacccattagaagttgggagatgtattcaaatcggcttgctctgtgtacaacaccaacctgcagacagacccaacacacttgagttgctgtccatgctcaccacaacatcagatcttccatcaccaaaacaacccacatttgcatttcacacggtagttgatgaatcaccgtctaagaggttgatcactgtcaatgagatgacccattctatgatcctagggcggtaagagattatgtgatgaaacctgtagagtgaatgtgtgtttgattgttcacgaaaggaatcagttttcgaatgtatataacttaacctttcatgctttttgtaaaagatttttcactgaagtaaatagagaaaattactatagatgagcttccaatttggttgaccaatgatttactatagagtttgcatttccaattgttctccagcagaattgtctaatcttgtgaggagcttatctgcagagccaaatgagctcataattttgggtttccattggttagatactatcatatcctcatagtataaaagtagaattagtcaatgccttaaatctaaataagggagccatgattgaatttgcacgtattaaaagtgaagaagaaactcaagtccacaggagaaaagtgtga

SEQ ID NO: 170378 - DNA, 556 bp, Arabidopsis thaliana landsberg
atggagtgctatgagcagagtcagagagctgcgttcgttgtgctgttgttgatcgttatgttgggatcccaggcacaggcccaactacgcactgacttctattcggacagctgtccatcactgctccctacggtgaggcgggtggtggagcgagaggtggccaaagagcgtcggatagctgcttccctcctccgactattcttccatgattgcttcgtcaacgtaggtcttcttttcggttttttttatatatattgtttttttgttaataaaagaaaggaagcgtacgcttgccatgtctacatgtattttcgttaattagaatgctaacattgttgtaaactgaaacaaaaatggcagggctgtgatgcgtcaatattattggatgatacacgttcattcctcggagaaaagacggctggacctaacaataattccgttcgaggatatgaagtcatcgacgcaatcaaatcaagggttgagagactctgcccaggcgtggtgttatgcgctgacatcctggcaatcacggctcgggactcggtccttctagtta

SEQ ID NO: 170379 - DNA, 472 bp, Arabidopsis thaliana landsberg
  unsure (1)..(472): unsure at all n locations
atggaccctgcgtcggccaacggtcaactcagcgacgtcgtcctgaacccacagaccatgctggagcgtaaccaaacgtttaacgacgtcaagcgagtggaggaaaaggtcgcctccctcacgtctcccgcgtttaaggacgagcgcgtcgcgttggtcacgggttccggcaagggcatcggtcgtggagtggccatcgagctcgctcggtctgggttccacgtcgtggcgctcactcgcacgcaggccgacttggacacgctcgcggtcgaatgccgcgaagccaaccccacggccaagttcttgggcgtcgccgttgacgtcaccgaccgccccgccctggaaagggccgtgcagcgcgccgtcgacgagtttggtacgctctcttgcgtcgtgtccaacgccgggacgaaccgncgccgagttgcctgccttccgacatcgagacgtgnngctcaagtttgcaagtcga

SEQ ID NO: 170380 - DNA, 1139 bp, Arabidopsis thaliana landsberg
tcactcctctttgattaagatctattcgtttttttttattccatcaacttaccactggccattatatttctcccttaaattttgttccttcgtatttgccctgcttgaaagatttttttttttataatcttttgtcgtgtttcatacttttaaatattttacatatttcgatatttctcttatgcttaattccttattccatattccacattccacgcttatcacaaaatctttctcctttgtctcgcttttttcttttgttctttcacatgtgtatatacacacagaacacacacttacatttctattatcatataaaacttcaactttaccttttatcttccaaaaaaaacactatcttcttcatcaaattctcttgattctgtttctttttatcctcctccatggccctctcacctaattcaagctctttagatttaacaatctcaattccgagcttctctccatctccttcacttggtaagatcatatccaaattaaagatttattaaatcttatatattatatagttttaatactatgtcttccaattaaaataatttggtaggtgatcatcacgggatgagagattttgacataaaccaaacaccaaagacggaagaagatcgtgagtggatgatcggtgcaacaccacatgtcaacgaagatgatagcaactcgggtggccggcggcgcaaaaagctccgtctaacgaaagaacaatcacatcttcttgaagagagtttcatacaaaaccataccttaacccctgtaagtatatattaatggctccgtctatgttgtgcttacgacgaatagagaaataagaaagagaaaagagttaatcttttctgatgatcatgtcggctgatgatgtttcgggtggctgattatgaaaccacagaagcaaaaaaaagatttggccacctttttgaagcttagacaaaggcaagttgatgtgtggttacaaaatcgaatagctcggtacgtatatatctaccgtcttcatatattacatcattcatacataaaattcaattcgtattgatcggagaaaataagagctctatatcgaatgtttatatacatacggcatgttatgtatatatatatatatatatgagggatttagaaaatat

SEQ ID NO: 170381 - DNA, 339 bp, Arabidopsis thaliana landsberg
  unsure (1)..(339): unsure at all n locations
aagcggagaaagacgccgatgtnnnnnnnnnnnnnnnnnnnnnnnnnnnnnnnnnnnnnnnnnnnnnnnnnnnnnnnnnnnnnnnnnnnnnnnnnnnnnnnnnnnnnnnnnnnnnnnnnnncgtcgagacctccaggaagaacttcctcagcacgctgaatatctcatgatattccttcaccaacgtggagagccgcgcctcgcccatgatgaagaacggcggctcgctggtgacggtcacatatgctggagaaagccgactcatccccaagtacaacgtcatgggcgtcgccaaggaagaaatcgaggcctccgtgcgctatctcgccgccgctctcg

SEQ ID NO: 170382 - DNA, 573 bp, Arabidopsis thaliana landsberg
  unsure (1)..(573): unsure at all n locations
gcccatcagttcagctcgctcgaggacgcgcctacctggggcgaattcgatgcggtggcgaacgtaacgccccgttcgcattcacccacccgacgacgctgcaggcgattgccnnnnnnnnnnnnnnnnnnnnnnnnnnnnnnnnnnnnnnnnnnnnnnnnnnnnnnnnnnnnnnnnnnnnnnnnnnnnnnnnnnnnnnnnnnnnggcatggtgaatttcacctaccgcaactcgccggcactgcagaagggcaggcagatggtgctcgccggcgagatcggcgaggtcaggcatgtcgaggcttcgcatctgcagagctggctggtcggccgccactggggcgactggaagagcgagagcaaatggctctggcgcctcagcaagaaacacggctcgaacggggcgctcggcgatatcggcatccatatcgtcgacttcgcctcttatggctccggtctcgacgtggcgcatgtctttgcccccctgaagcccttcaacaaggccccgggccacaagatcggggagtacgacctcgacgccaatgacagcttcacgatgaatgtggatttcgc

SEQ ID NO: 170383 - DNA, 748 bp, Arabidopsis thaliana landsberg; identical to SEQ ID NO: 1450

SEQ ID NO: 170384 - DNA, 863 bp, Arabidopsis thaliana landsberg; identical to SEQ ID NO: 17489

SEQ ID NO: 170385 - DNA, 513 bp, Arabidopsis thaliana landsberg; identical to SEQ ID NO: 4680

SEQ ID NO: 170386 - DNA, 934 bp, Arabidopsis thaliana landsberg
agactctgttttgtacaagtttcttcggactttgaatccaattcgccgtggtttgaaataagtttatgtctatataatcacaagaagaaggggaaaaaaaaaaggagagattcagacaacagctaccggagaaatgaattgcttttcatgtttttatttccatgaaaagaaaaaggttccaagagattcagacaacagctaccggagaaatggggaggtgaccggtagagacaacaacaaaacacaccctggtaagctcaaaacatctatattaatttttacagataagtcttatatatattagggtttataagactagattcagtaatctttgtgatgtttacagagaatccaaagactgtaaatgagcagaacaagaacaatgatgaagacaaagaagtgacaaacaacattgctgctcaaacattcagcttcagggagctagctactgcaactaagaatttcagacaagaatgtctgatcggtgaaggcggctttggaagggtttacaaaggcaaactcgagaaaaccggcatggttagtatatacttttgtacatcactttgaaacatgaatatggtatatgatttatagcattctatatctctctacaacaaatctctgaagatttttcgaatggttattttgggttcagattgtggcagtgaagcaattagatagaaatggattgcaagggaacaaagagttcatagtagaggtcttgatgttaagtcttttgcatcacaagcatctcgtgaatctcattgggtattgtgctgatggagatcagagacttctcgtctatgagtacatgtctcgcggttcactcgaagatcatcttctcggtaaattacaaaactaaagatccgcattgactaactttgaatcagtccttatgtttaacctgttttttgaatgcttaccgatctacacc

SEQ ID NO: 170387 - DNA, 1902 bp, Arabidopsis thaliana landsberg
gcattgagatggataatagttacactcaacttaattttttaatttttccaaattttcagggccggggtaggcaggccaatgttttactgaggggagctgtgtttaagactttagtattaatttcttcacatatggccttcccgcatatattcgtatccctggtattaaagtgtatgtgtcagctaaagcaacataatgtgtcagaaactcacactctttttatttgcgttcatgattgccaggtctctctatttgctctttcgttctggagttttcactttgcgagcttgtgtgcttttggcctccttgcatatgttggttacattatttatgccttcccgtcattgttccagttgcacagattaaatggccttcttctcgtatttatactcttatgggctgtcagtacgtatatattcaatgtggccttttcttttctgaacactaaggttggaaaggtaatatattctcgatgcgcaaaatcttcaactactttaagaaaactaagatgtaaattaacaactagtgtcttaaatatacaggacatgcaaatttgggagatggtgggactttggcattatactatacctggattctttttgcttgcacagtttggtttggggatgttggtcgcgttgggtaatcttgtaaacaattctgtttttctgtacctgtctgaagagagctccagatcttccaatgagagatcttacgttgaaggtaatcgcctcatattcggttctgcaaagcaagttatctgatgttttccaacttccagggttgtcggaactgtaaagttgagaaaatgggtgtacttgtttatcgcgatcaacctatcatcttttctgactgaaaccatctaaagacaattaaagagttatcacgctatccaaaatatattttaaagaaatttttgatatagaatatcatggaaaatgttatgtactgtgtgattttgaaggagaaaatcttaaaattactattatattggcaagcttagtttattccgggcttagttttaggttgcgatttcaatcttctgctatttattcaattttttcttaacgactgaaattaccatcaataacagctgatgaagaaacaaaggtgttggtcgtcgcgaccattgcttggggattgcggaaatgctcacgggctattatgcttgcactgatttttctcattgctatgaaacctgggtttttccatgccgtatatggtatgattatccccctcccatttgcttttataacaaggattcatgtatctgggtgtttgtgaaaaacattgttcatgatactgtatcttaatggacttctttcagtgatattcttccttatgtatctgttgagccacaacatcaacagaaagatacgcaagtccttgattctactatgtgaagttcattttgcacttctctacattcttgagattgacctggtgtcgaactccttaaagcaggaaggctctgtgagcagagaagttctatttcagttaggtacgcctctctttctgtatttttcaagttataggataaattcacggatttccctttgaaagttagctgcaaggtgatcttggatttgcgggaaaaaaggattagggaagagttctcactgacaactctctgtatgaatctttgcaggtctccttaggtctgaaagctcttgggacttcttggagatagccttgctagcttgcttctgtgctatccataatcatggttttgaggtgctattttccttttcagcaattgtacgccatacaccaagccctccaattggatttagcatattgaaagctggtctcaacaaatcagtcctcttgtctgtctattcgtctccatcttcaagttatagccaggataataccacttacggtacaacacttccttcttgtctt

SEQ ID NO: 170388 - DNA, 1423 bp, Arabidopsis thaliana landsberg
ctttttccaacaattgtgaccgaagctaaaacaattcacgtgttggattccatggaccatccaagacaaactttctcaagagtggtataattctttgaatagttctattttaaacggtcagtagatcacttacataaatgttaaactggatggtaaataaaataggtatatgagcaactgcacatactgtcaccattggtgctacctagagagtttataatcctaagaacttgccagcaaatgaaagaagatctctggttgatagctgacgtttcctgttatctccaaaacgttgaatttgagtctacggctcctatttgcaccaaacgtccctccggtgttctaatccaagccttgccccatggtcgttctaaggtctctcttccctctctttttgatatatttttataagtttacatacacacacacacacataagatatatgtcttaattttaaagcaatgtgtgattgaaaaaaaaatcttcaaaaataacaaagaaaatgggcaggtaacatggatagagcatgtggaagtgactgataaagtgtggccacatcagctttatagagacctcttatacggtggttttggctatggagctcgacgttggaccgctactcttcagaggatgtgtgagaggctgtctctctactccatgactgacttccctcccaccgactaccccggaggtcattattagttacacctatacttatatgactcacttagtgcataagtaacttaaaatgtgttatatatgcggatttagttagtatattgacaagtgctagtttcaaaacttttggtacttcaagctttttaactatttgtaaagttttaaaatgtttttattcttttgtagttgtgaaaacaatagaaggaagaaggagcgtcatgagtttgggagaaagaatgttgaagaactttgcatggataatgaaaatgtctgacaaactcgatctcccgcaacagtctggagccaacaatagcggagttaggatttcggtgcggacaaacacagaggccggtcaaccgcctggtctcatcgtctgcgccggttcatctttatctctccctctccctcctctccaagtctacgatttccttagaaatctggaggttcgtcaccaggtaaagaatagatggtttcattaacagtataagtccatatttaaatgtcgtcctttttcacattaattaacaagaaacctaatgtttgtatatatgtacataagtgggacgttcactgccaaggaaatccagtgactgaggctgctcgttttgtcaccggacctgaccaaaagaacaacgtgacttttctccaggtaaatgtatatattaactcctactaaaaccttatgattaaagtttaaattacacaatttttttgcttctttaagtttatcataactagcattact

SEQ ID NO: 170389 - DNA, 3055 bp, Arabidopsis thaliana landsberg; identical to SEQ ID NO: 3273

SEQ ID NO: 170390 - DNA, 1002 bp, Arabidopsis thaliana landsberg
taattttattatattattttatttaacatttaacttacatgaatacttcaggcatataaccatatgtttctatatttcattgggatgttccccagactttagaagacgaatatggaggcttcttaagcacacgtatagtgtaagtgcattaacgattttgattcaaagttttttagtttattttcttcttcttttgtttaggctctgctgtaacacccgctatcaaatctatttatgtctaatatgtgcgatacgtgaatagggaggactacacaaactacgctgagcttctattccaaagattcggagacagggtcaaattttggatcactttaaatcagcctctctctcttgcactcaaaggctatggaaatggatcgtatccaccaggacggtgcaccggctgtgaacttggaggagattctggagttgaaccttatacagttgcacataaccaacttctagctcatgcaaaaactgtatctttatacagaaaaagatatcaggtatgtgtatactgtaaagtctctcataacttctttgtgcgtcaattttacttttttgtggtgcatatttgtagtctataacctattaatatttatgcagaaatttcaaggtggtaagataggaacaaccttgatcgggagatggttcgtcccgctaaatgaatttagtgaactcgacaaggctgctgcaaaacgagcattcgacttttttgttggatggtatatatgagcacttacatgaatctcaaaacacaaacagacacacacatttatagagaaagtttcagtcagaaattttgtgtgaaaagcacactttagtttgcatcactaatttatgaatcttttcttacatgaattaaggttcttggatccattggtgtacggaaaatatccaacaataatgagagagatggtaggagatagattgccagaattcacacctgaggaatcagctttagttaaaggatcacttgattttctagggttgaactattac

SEQ ID NO: 170391 - DNA, 1461 bp, Arabidopsis thaliana landsberg
cagtagaaagtgctcaaaaaagacctcagaagaagaatggtgaaaaagatagtaatgccacttttacagcaacaaagaaggtttcagggattagtaagttgcccgcagctaaagtggatgtacacaagcaaagctctgttgttttgaatgagagaaatgtgttagataggtcggatattgaggatggaagtgatcgtttggacaagaaaacaaccgatgatgatgatttgttagaacaaaagttaaaacttgaaagagagaatcttcgtaggaaggaaatagaaacgcttgcagcggaaaatttggcgagaggtgatagaatgtttgtgtatcccgttattgtgaaacctgatgaagacatagaagtgtttctcaacaggaatctgtcgactctgaataacgaacccgatgttttgatcatgggggcgtttaacgaatggagatggaagtctttcacaaggagattggaaaagacctggatccatgaagattggttgtcatgtctccttcatatccccaaagaagcgtataagatggacttcgtgtttttcaatgggcaaagtgtatatgacaacaatgactcaaaagatttttgtgtagagataaaaggtgggatggataaagttgactttgagaattttcttctagaagagaaactgcgagagcaagagaagttagccaaggaagaagctgagagggagaggcaaaaagaagagaagagaagtatcgaagctcaaaaggctgcaattgaagctgatagagcacaagcaaaggcggagactcagaagagacgtgaattgcttcaaccggctattaagaaagctgtagtctcggctgagaatgtttggtacattgagccgagtgatttcaaggctgaagatacagtgaagctatattacaataaaaggtcaggtcctctgactaattccaaagaactgtggttacatggagggtttaataattgggttgatggattatctatcgttgtaaagcttgttaatgctgagttaaaggatgttgatccaaagagcggaaattggtggttcgctgaaggtatatatgtgaagcttttttatctttttgaacgaacctgctttttttttatacatttttgtggtaacatatcctttaactgccatctgatttattgatctttttcatttcaatatgcagttgtagtgcctggcggtgcactagtcattgactgggtctttgctgatggaccacctaaaggagcgtttctgtatgacaataatggttaccaagacttccacgcacttgttcctcaaaaacttcctgaagaactttactggttagaggaagaaaatatgatttttagaaaacttcagcaggataggcggttaaaagaggaagttatgcgtgccaaggtcagtgttcaatgcatgcccagaaacccagcttatcctcttactatataaagcataaagcaaattcttttta

SEQ ID NO: 170392 - DNA, 386 bp, Arabidopsis thaliana landsberg; identical to SEQ ID NO: 74272

SEQ ID NO: 170393 - DNA, 1297 bp, Arabidopsis thaliana landsberg
gttccttacgagggtgacgatcgacacactactctgtgtcgattgacacacaggagtctaatctgggacgtatcagatgatgagacagcttccactaaggacagagaggattgttcagtgcatgacggtgtcgaccgacactcgttcagtgtcgattgacacataccagaacaaacacaacgtgaggagctggcaccaaactattttcaagacatcttaacacctcagagacgtcgtgcaacggacacaacaagaagagttgacattgttgagtaaatctgtactatcactccgaaaaagcgagcccaaaagctcctcgatccaagtagcttcgttcttgactgttctatctcctccagcagattcagccattcactgtgtgatctttgatcattcatcaatctcatgccaaagtctgttgctgagatactaggcgtgactagctaaagtccaacaaggatcactctcctcttcgtggatcgctccaaacgagtccctgatggtatccttgaggatgttcctgtgagagttggtaattgcctcatccctgctgattttgtggtcctggcatatgatgaagaacccaaggatcctcttatccttggtagagctttgctacctacagttggaggtaggattgatgtgaagaagggaatgatatctctcaacatatgcgatgtgcagatggagtttggcatggatggttcggaatataaattgcttgtcagtagcattgcaacaaacaaagacacacctctaaggctgctcagatttcaactccaacgccaactatagaggctgctacagctcagcccacagatgagcattacagagagacaatgtcgatcgacaccacaccccatgtcgatcgataccatcgcgcttcacagacagatgcttctgcacctcttccacagcccacaactgctttagttccctgtgataggtactcctctatctcttatccaactgttactttgattatttctttagactcttcgaaatgtgcttcacatgtaaacaagaatcgagattctcgagagcttgtttcttctgctgatcttgcagataacagaaagagtatcgatcgacaaatgatgctgcacggagccgatctgtttacacacccccttggaaggcaagattgcaatccgccaagtagcacaagtcttctatcactcgatccaagttctgaactccgccaagtcaagttattgactctaaacaagcgcttagtgaaaggcaacccactagtatgttttttttactcaatcttttagttttgaattttgaatat

SEQ ID NO: 170394 - DNA, 2159 bp, Arabidopsis thaliana landsberg
gaagttgaggcgaggttacttcgctagcagaccgctcattttgatcttgatctgatcgttgactggaacactgagatcgctgcgagtaaaagcctctccacggatgagtctattgcggaactgtttgctctctgcgggtctggagatcgcccgatcatttacatgattcctggtgaagatgatcgtccttggagtcctcaacggggatatgtgtgtttatatgaggcctacttcagacaatgccatctctagtttccaatcccatctttaatcatttctttcctaactcgccgttgcatggcaatctcccagctcactccggcggcgatctgcaacttcgttgctgccttaacttttggtgctgaagagggttaccgggtgaatgttcgttgttttgaagaaatgacgacgttaaaatccgttaggtcgcctagatacagggtggtaaacaatcgccctaagtataacatccttcctggcctgaaggtcagcaatttcaagaactgggaggagtactatttctacgttaaggttgatcttgaatcccacgagcgtccgttctcgggaaggaagaggatgtgggcacaggatcccggcagacttctcttaaatagattggactaaaaaagtttcgactttgatcgcattctcataatttttctgtatattgcagctcggtacaagtctagcccagaattttctgttgagtttgtaggagttcgagaggcaatctttcgagctcgacgtcgtacgtggaaagacatcacgaggtcgcgagtcaacaacatcatgggaaaggtcaggaagtcctttattagcttcgcctcaagactcctgaacatgccgcctcctcctcctcccgttcaagaacaggctcgtccttcagacgatgtggcggttccagtgatccctcctgctaacttcggctcttttgacattgatcaggtgtctcgtgagatcctagtcgacctagattctcaagataggacatgtcttgaagaggctggaggtgttcaagctcaagagatcgtcggtgacgatctgaatcaacctattcctgctcaggccgtcaagcatgaggttcaaattgtcacaagcgaacagcctgctgcagttcagactgccactttgggaggcgagaaggtcgatgtcgacctgaccaaccttgattcaaacaaggatggcactgatgctgagatcgggactttgagaagatcccgcgaggaaaaagggaaaggagtggacaatcagtccaagaagagatcagcttctgaggccggactaaatgatgaagcccccgcgtcaaagactttctgtatttataggggcgaagctcgtaaccctgaccagtttacattcaagtatactggagccaaattcctcgtacgagatcgcgaagctgccagccatctcctgcgcaatctgatgcttcccggggtgagagaattccccaaccctgatgaattgatcctgagagaggagtacaagaagtttgtcagatcgtcattagaggtatgtgccgattccactggcgttctacttttactctgtactccgttctaacaacaaaattatttctccagaccgctgctttggcgaacgaccttattgccacctacgatcataagcagaggttgaagctcgcagacagagatgccttcgacaacctgaagaaatgcacggacaaagcgaaactcatttatgcgagggacattaaggagatggcccctttgaaggatgctgcggagacccacaaggcggagataagctcgctgaatgacgaggtcgccagacttaatggtcgcaaggttgatcttttgaaagagatcagtgatcttcagatcgcatttgtcgtggtgaaagagcacggggagaaggaatgcaacaggctgcagactgatcgagatgcgaaggttgcacgcaccactagaaaagcccaagctcgtttcgacaagatgaaggcctatctcaacgagcaagagaacatcgttaagcccaaggtggattcccagaatcaagcttaaggcgctgaagaagtggttggcattctgatgaagagaggtgcgaagattgcgacgtccgagctagaaggacttaatgctttaactcagaaggtgaatgacgaggtcaatgccttaagtcatgagttggggatgcga

SEQ ID NO: 170395 - DNA, 411 bp, Arabidopsis thaliana landsberg
  unsure (1)..(411): unsure at all n locations
gagggcatccgccagcttttcgccgacagcatcganccggtggaaaaaagcggccagctgcagctgtggagcgaccaccacgaagtgcaaggattgcccatcagcctggaacccgctcccggccacacgcccggctcctcgatcgtccggctgcgtgccggcacgggcgccttgttcgtgggcgacctgctgcacagcccgatgcagatccttcatccgcacagccattgctgcttcgatctggacgtccgccaggctcgcgccacccgccagcgcattctcgcccaggccgccgcggacggctcgaccctcctgccgggacatttccccggccacggtgccgccgtcatccgggcaggtaccggtgacaacgccttcacgattgcccgctgggccacctgaccccaagtt

SEQ ID NO: 170396 - DNA, 3776 bp, Arabidopsis thaliana landsberg
aaccataccttcccatgattcacgggaagcacctacttctatggataaggcaccggttcctgcgaagaagccatcgagaaggatgtctacaaaaggaagcactggaacgagaaagtcttcaaggctgacccgtgtttctcatgatgtggacactcctgcgctttctattggctgtaattccaaagaggaagattgggatgtccctggagtacataccactgctgtcggcggaagaagaaaaccttcaaagccgaagaaaaatgtttcttttgctgttgacactactgagctatctgattccaataaggaagatatgcaaggattcattgatgaacaggtaaggcatgtacgtacattgctaaatattttataatccatatgtataactgtattgtctgcttcgatacagtatggcgctaataatgaaagtgattttactgcaaatgatggattggattcttcggccgctgaagaagagatattagacactggatttttaatagttccttatgctggatccacacaatcccatccggtatgtcgtctactaatactcttaacaatctgtttaaatggtgtatgtacatattcgcttaagaagttagttaaactatgtttcaggatagaggaaattttgttgttggtaagactgtccttttaggttcaatgcctgggactgtctatgttacacaagaagggaggcctgtggaagaagctactgatgacaccgagatggaagaagttccatctaatgtgtctgcaagagtttcaaaggtagatcttgtggtaatcgttatatacagatttccatgactatatgcatatatattacattaatttctccacttatctaccgcttaactctattgtagcctatgtttcatgataatggaccaaaggatgttgttgaacctggcttagttggtacccatacaggggccgatgaaatagctgatgctgacacagagatggtagacaatccatcaagtttaccttcaacatctgcacaggtatgtgttagtcacttgttctttttccatatgtgtacgcccataagactttgaaaattatttttgtttcaggaagaagcaagagatgccagtgctgcgactgaagctaatggcagcgagtcagaagaaacttatgagccttctgatggagatacagctcacatacctagcacaagtgtacgtacatttttgtcactatgttctgtgtacatatatattgtttcatacattactaaaaagttgctttccgatgataaattctacaggttgaggcggcaggagaatccaaattagtgacaggaatggaagttgaaatacctgagaagacccacagtgatcccccgtcaccatttcaagtagttaacaatgtaagctaactcttgcaaaaaataaaatgtactattaactgtccaaatgtataaaatttatattatgcaggtcatacgggagttggataccaaagccgttggttatttagctgtagccactgatttggaggtaacaatttgtgtgtttcaattcctattttcggaatagcatacataggattatatgtgtacattatatatacttgtgtacgtaaacttgcacaggtagtcatggaagagccgtgtattgtcgaggggtctgtagaaactgaggatcctaacccagggtcagatgaagcagacaagaccgatattcctaaaaataatgtatgtacctattttaaacatagaaaaacgtatgaaactgttgttgacaatcatatttgtcaacaggatgaatcagacaatgctgctgctgtcgaagcaaaagaagaaaaaaaatcgtccccaaagaaagtgaagaaacaacttgtctatgaacaggatgatgcccatcctcatggttttaaggcaaaaacagtattggtgtccgatgtaccagctcaacagatagaggttgttatcagggctggaaatgtctcatacaaccccctggacgtggttgacccttcaaaagtagaggaattcagcaatatcattaaaggaccctctgtgtaagtacattatagtaaaatggattagttaatatctcaatcatcattttccaagtcttaaagttgttatcaaaaaattttctggatttacaggattcacactcttttcgggtttcgcaaagtgcccaacgagttttttgcgaaccttctaacacctggtgaatgggtcgaaagttcggtacgttgcatttatatacgtacattccttgttataaattgtacatagatgattaaatttttcgtggaagtgtacgtacactgatatattttttgaacatttcagcatttagaaatgatggcaatgttgatgtggcacaagaacggggaacagatgatagcaaacagatgtattgtattggacatgatgctgacgaatctacttaccaagcaggtacgcgacttcaagaagtgtattaataagaacgggttcaaatggggtaaattactgtccgacattgctaatggagttcacataaaccgtgaacccaatatgaagtggctgaaggatgtcgatgttgtgtatgctccgatgaactggaagagtgaacattgggctgctttgggaatcaaccttaatgaacggctaataactgtgtatgacgctttaatatcgcacacgcgggagtcggctgtgaaggcgagaatgactcctatttgcgaaatgatgccgtacttagtcagagcgatgtgccaggatgtattgatttctccgtactcagttgaaccttttgagtatgtgcgttgtcctaccgttgctcaaaacccaactacaggagattgcgggccatacacgatgaagttcctggagttgcttgcgtttggacacccttttttggatctgacaaccattcgagaagcagatatggtcttctaccgtcagaaatactccgttgacatctacgagcacggcaagcgggaggccggtactgtgcacttggtttaatcgtccaagaacaatattctggttctttgcaaccaattattatgaacaaacctgacttatatatatgattgcaactacatttaatttggagattgtcagaagttaatttattgtcctctatcatattgtcgtacacatcgttcacttataattacataatataaatgtgtacgtacatatctatatgtctcgtacactgcatattaactttataacataactcaagtgataaattgatttgacagccaacgcttaccaacacaagtatgacattcatttcaaccgtaattgccccaaccaaattcacagtagtggttattaaagtgaagaaattactgacgacctctgactatctcatttcaaacatggttaacccgactcttcccgacgatttactctcgaagatagctaagaacctggctgaccaatgctggtctgaccttggtccattggtacgagccggcactcgtggaagagacattgtctaccgtccggatgtcctcaaagatgccaatattctcaccttgtgtgactcgcccgatgacttccaagctggagggggccacaatccctccggatccgctgatgaaggccgacatcgaacatttttcttaaggtgttttgcagctaataatcccacggccgtgtattacgaaggtattcgtgttctaacgcatgaacgaaacatcaatggagccatcaggctcttacagcgtcaagctccagtacgagcaaatgcaacacttgcatgcgccattgtattcatatgtgctgggtatgattatatgggcggcttgtttct

SEQ ID NO: 170397 - DNA, 1796 bp, Arabidopsis thaliana landsberg
attccagttgctccaactagccgattaacacgggctgctgtggttatgcctccagttctgacagaagagctattaggtaaaggaaaacgcaacaggaccccgtcggttcatttaaaagattttgttgtcccacacgctcccaaaccgaaacaacaagaagaaattaatctggtttatgctgaaaatctgactcacaacgtggatgttcaccgtttctccgaaacacttgttgcttatgttgctgcagttctctccaacttggaaccaagatcattcaaacaagctatgcaagaagaaaagtggcgaaatgctgttggttcagaatatggagcattagaagaaaacaacacatggaccattgaagacttacctcctaacaaaaaggcaatagggagtcaatggatcttcaaggtcaaatttaaatcagatggtacaatagagagatataaagccagattggttgcaatgggaaataaacagattgagggagaagattatggagagactttctctcctgtggtaaagatgggaacagtgagattgtttcttgacattgatgttaaaaaagggtggattatacatcaaatggacgtccacaatgccttcttacatggtgatttagaagaagaggtatatatgaagctgcctcctggttttgagtttgttgataagaataaagtttgccgattgcgcaaatctctgtatggccttaagcaggcacctcgatgctggtttgcaaagctcacttcagctcttcttgagtatgggtttcagcaatcacgcagtgactactcattattcacttatgcacaaaggtactaccagtcttaacattctcgtttatgttgacgatttagttattgctggaagtagtcttaaagctacagaatcatttaaggcttatctctcgtcgtgtttccatatgaaagatcttggagaactgaaatattttctaggtatagaggttgctagaaatgcatcaggcatctatctttgccaaagaaaatatgcccttgatatcattacagaaactggtcaactagaagctaagccagcaaattttcctttggaacaaaatcacaagctagcactctccgtgtctgctctccgacctgatccgaaaccatatcgtcgtctgttaggccgtctcatttacttgggcgtcacacgtccggatctagcattttctgttcacgtactagctcagtttatgcaaacaccacggttcgatcattggctagctgcgttgcgtcttatcagatatttgaaatctgatcctggccaaggaatattgttgcgggctgattctaatattcaagtcaccggctggtgtgatgcagattgggatagctgtcctctaacgcgtcggtcagtcactggttactttgtgcagttaggagactctccaatatcgtggaaaacgaagaagcagaaaacagttcgtctttcatccgctgaagcagagtatagggcgatagctaaactggttcaggagcttatctggataaaaactgctgaagacacttggtgtggttcataaacaaccaatggtggtgcaatgtgatagtaaatctgctatttacattgcaacaaatccagtcttccatgaaagtacaaaacatatcgaaattgatctccattttgtcatagatgaggttttgaagagagaaattcagctgtatcatgttgattcacgttcacagctcgctgacatcttaacaaaggcaattggaaaggatggttttcgttacttcaagtccaagctgggaacacgaaatctgtattctccagcttga

SEQ ID NO: 170398 - DNA, 1251 bp, Arabidopsis thaliana landsberg
aaaagttgatagagtttggtctatatggagttacaaggttgcctttatacaacttgattatgctctgataacagctttggtggagagatggagacccgaaacgcatacttttcatcttcctgctggagagatcactgtgactttacaagatgtgaatattttgttgggtctacgtgtcgatggacctgcagtaactggtagtacaaaatacaactgggctgatttatgtgaggatttgcttggtcataggccaggtcccaaggatcttcatggttctcatgtgtccttagcgtggctgcgtgagaattttcggaatttacctgctgatcctgatgaagtgacgttgaagtgtcacactagagcttttgtattagctttgatgagtggttttctttatggagataagtctaaacatgatgtggctttgacgtttctccctctgctaagggactttgatgaagtggctaagcttagctggggtagtgctactctagcacttctctacagagagttgtgccgggcaagtaagaggactgtttctaccatatgtggccctcttgttctgctgcagttatgggcatgggaacgactgcatgttggtcgtccaggaagacttaaagatgttggtgcttcttatatggatggcatagatggtcctttaccagatccattaggctgtaggtaattgatatttgtcatattggttcagtttgtttttacaagttcaatttcaattatggtttgcttatgaaactgcttgaaatctaggtggagggcttctctgagtcataaagagaatcctcgtggaggactggacttttacagggaccagtttgaccagcagaaagatgagcaggtataataaaataatggcgtagatgaccgagctttgaccgttcagtttaggatagcagaggaagaattacagaccaactcctaatctagacaacttttgtttgtcattcaaggacttaatcttttcagtaatagaaatgtattttgtaacctcacggtgaccgatacttaattaagaaacacttacagtgtaagtactggtctcttatagcacttatagctaagatagtgtgtagtgatgggatatccaaaatggttttgtaatactagtttccagaagtcgtagattatcacttatcaggcaaaacttctttattttccatacacccatgaatattttatcaacagatctctgatacggtaaacgacgtgtgaatttctttatgatgtggtata

SEQ ID NO: 170399 - DNA, 549 bp, Arabidopsis thaliana landsberg
  unsure (1)..(549): unsure at all n locations
ctcaaggcggagtttgcgttttatcgccttgtgcatcgtcatccggaaacgccgcgattggcgaaatggctgctggggcttgccataggctacgtgctgttgccgttcgacctgattccggattttatcccggtgctggggcaactcgacgagctggtcatcgtgccggcgctggtttatttagcgctgaggctgattccggataaaattatcgtcgaatgccggcgtcagcgcgatgccgaagcggcagcggacacattnnnnnnnnnnnnnnnnnnnnnnnnnnnnnnnnnnnnnnnnnnnnnnnnnnnnnnnnnnnnnnnnnnnnnnnnnnctacgggcaaagatattcccaatgatttcaatgtcgtgatcgaaattccgtgccagggcgacccggtcaagtatgaagtggacaaggaaagcggcgccattttcgtcgaccgtttcatgggcacggccatgcaatatccctgcaaaaacggctacattccgcacacgctgtccgaagacggtgatccggtcgacgtgcttgtcatcacgccggtc

SEQ ID NO: 170400 - DNA, 1109 bp, Arabidopsis thaliana landsberg
ttgaaatgggttcaaaggataacgccatttctaatgactctgcattagttttatcgcttcttcttcttcttcttcttcccctgcttcacgaagcagcagaaggatgtgacatgttcacggggcggtgggtgaaggacgattcttaccctctctacaattcctccacgtgtccgttcataagacatgagttctcttgccagagaaatggacggccagatctcgattactctaccttcagatggcagcctctttcctgcaaattagcaaggtatcatccattctttatttattacatacatttttatcttttcaaaccttttttttttgggtgtctagctattgaaccaaggtatcgttatagatatgactatttttatttttttacttttgattcatgattttgttttaatatattcgtcggtttttatttgttgaaatatgacattacattagcgttataggaggaccacaattttttgatttgaaagataaacgcaataataattcagcagtgtgaagaaatcttgatttggttcatataattacttttcaagaaagttgaaaatgtttagagatattgtttttgtgtttgtaaaataaagcacttttgagtgagcaaccaatgagaaaagagaatgctatttatatagttgtttgctataattgaatggtgtttagaatctccaaaattgcacgagatgaaaacgaactttttttgtcacaatatatgccaagtggtggatccggcgtgagttacacgcgccgccattgagattaggacagccaccaaactcttcctcataagaagacataaattcccccacacttgtggggacagtaactcaaatctttcgacggttctgtcctcctgtttcttaagttaatttcaatgcatgccaccgacataaaacgccaccgtttatattgtttgttctaggttcaatggattgcagtttttgaagaaaaacaaagggaagaagattatgtttgttggtgattctcttagtctaaatcaatggcaatcgttggcatgtatgcttcattcctctgttccaaattctacgtatactttaaccacacaaggtagtatatcaacctacacattcaag

SEQ ID NO: 170401 - DNA, 1059 bp, Arabidopsis thaliana landsberg
tatctctccatcaagcaccactcttgtttcctcctcaaaattgcaggtccctcccaaagtacaatgttactgctactcttcaggttcattcttcctttgagtaaatcttctacctttagtttttctccacatttaatttaacatcacttttgtttcaatgcagtgtgccggtaacagaaggactgccatgagcaaagttaggaatgttagaggtgttggatgggatgtttctgctattggcaacggttcgtctctctttctcccattcccatgctttcaatacatacttgtcttgaaagaatttgcctttcagctgtctggggtggggcgaaactggccgatgttcttgagcttgtggggataccaaagctgactgcttctaccaatttaggagccagacatgttgagttcgttagtgttgatcgctgtaaggtagatatatattaataaattccacctttttatgctttgttatgaattcccatgaaaagtctatgctctttctatatctctaggaggaaaatgggggcccttataaggcgtcaatcactctaagtcaagccacaaatcctgaagcggatgttctactcgcttatgagatgaatggagaggtttgatatcgctctcctaaattagtctcacttgtgtttaaatcatcacttgtttgacatgtgagtatgagtgagtactcggaaatgtgcttatttgttggaaaacgtgtttcttctgtgaagaccctgaacagggatcacggatttccgttaagggtggttgtccctggtgtgattggtgctcgttcggtcaaatggcttgattccatcaatgtcatcgctgaagaaagccaggtctcaactaaagtgtccggcttttaccctctttttagcaatcagaaactgttctaacattgtaagggacttggatcaaaatgtgatgtagggattcttcatgcaaaaagattacaaaatgtttccaccctctgtcaattgggataatatcaactggtcctctaggagaccgcaaatggatttccctgttcaggtaaatacaactttcccttct

SEQ ID NO: 170402 - DNA, 2035 bp, Arabidopsis thaliana landsberg; identical to SEQ ID NO: 27335
  unsure (1)..(2035): unsure at all n locations

SEQ ID NO: 170403 - DNA, 557 bp, Arabidopsis thaliana landsberg
cgcttgaaattggcgaaaagaaacactacgatcataaggtggacgtttacagtttcgccattgttttctgggagttacttaccaacaaaaccccattcaaaggaaagaacaacatctttgtagcttatgctgccagcaaagtaagtaagccacaatttcaactcaaaatcacaggaacatgaattgattaagtcctttaatatctgcagaaccagagaccaagtgtggagaatcttccagaaggcgttgtttctatcctgcaatcatgctgggcagagaatcctgacgctcgtcctgagtttaaagaaattacatattcactaacaaacttgctcagaagcttaagctcagacactgatgctacttcatccaatagcaaagccaatatagctaccgaggattcaacaagcagtctggttcaagaacgtgttgtctgtgattgtcccggactaaagatgagcaagacgaagaagctgaagaagaagacgaataaactgatgaatatgatcgtcccttttctcaagatcttcaaaagttgtatgtccaagtgatggaag

SEQ ID NO: 170404 - DNA, 1158 bp, Arabidopsis thaliana landsberg
attataagttttgtcaagaatgtattaccaaatgaacacagcccttgtgcaagcatatagttaagaaccttaaaagcggcatccaaataaaaaagagttgaagaagcatgtgtggcacttagtttggagtaacagtgaggctgaatatcgagcaaacttgaatcatcagagagcttatgatctgcctttgtatgaagatgtcatgcgtgaggaaccaaagaattggtgtagagcttggtttatgcacgagagtttttgtgagaatgtggacaacaatgcaactgaatcgtttaatgccacaattgtcaaagctagggccaaggcattggttccaatgatggaaacaataagaagaaaatctatgacacatataagtaagagaaaggaaaagattagaagatggaagaaatctgtctctaagtatgtatcagatattctggccaaggaagaagaggatgctatgaggtgtgaagttacaaaagaacacatggcaagtatgaggtttgggttgatggatagttctaaccatgtgaacttgacgactgagcaatctcatgggattgctcatgctgcaagtggccaatcacatgcattccatctgaacatgcttatgcagcagtcatgtatgagaagaagaatgttgaagattatgttataccattgttttgtacgtttatttggaaagagcagtatgatacaacgcctgaacctgttagagaccaaatgtactggcctactggctatgctctgataaccgcaccagaagcacctattccacctggcagaaagaaaggtgagaagaagaattttgatcgggtcaaaggtaaacatgaatcaccaaagaagaagtcgggtgaaccagaagtacgcaagctaagcaggaaagcggcgacaattcattgcaaatcatgtaaggaggctggacacaatgcagcaaaatgtaagaagttccctaaagagaagaagggtgagaagaatggtaacggtaaaaagataaataatcaagaagaaattggtgtagaggtatgtatattttctaatattattgatgtcttactttctcattgtaaatgtcatatgtttatctttctccttctattgtaggctgctggatcttctcaaatcacctctcaagaaaacgacgtttttattgggtaa

SEQ ID NO: 170405 - DNA, 1350 bp, Arabidopsis thaliana landsberg
ctgtttatattctttcaggttcctttacctctatccaaagggacagagtcttaatgatgatcacatgtctctgtatctgtccgttgcaaatagtaaatccttgggaagtggatggaaacggagtgctaaattttacttctctgtgctgaatcaatctgacaaagagctctacagatcaactagtactgaagtttatatatccttgcatgttttttttctttctttttggtgatttgtcatttgtgtttggaattttcaaaggatctagtataaagcattgtgaagatggtttatttctctagattgatggtatactaataagaatattagacttggtttgattccgactcttatcaactggtcatgccttgctgaactatatataggatgtttttgcaacaggaaatagcctaaacttatgtttgaatcttgaagaggtgaaattatacatgagcaagcgttttatgtcttttctgtttatgatttgcagttagccaagaatcctgtctgttttgcgttcaggctctagcctggggtatccgaaacactttgcctcttagcaagtttgaggaacaagggtttttggagaaggacaaactcatcgttgaagtctacatcataaattttgaagctgtggatggagaaggcggaggtgtatcaaagaaggaggaggagcagactgtccatattatcggttcccaggattatgcttctcaggcaagtttcaaaggatccgtctctttttctgtttttgaataaatgccttgttttctaggggttgcgtctttgcgtctttttctgagtaacaaaaacatgttttccttggcaggttactttagtgagaaagatattcgcagagcacccagaaattgcagaagagttcaaaccaaagaaccaagtgttcaagaaagaatacatgaatatcctaagaaacgcttaccgcaaggttagtgagctagcggaagtaaagatggactgggtgaagtcaaagattgaagaagtttccttggagataaagaaacgaaatgatgaggttagtgaagttcccttggataataagatagcagatgatgatgatgatgattatgatgaatgggagcaagacatcgaggaacgcctcaagaatcttgaggggatggaatttgactccaagatggacagtttgaagtcaaagcttgatgaaatttccttagagaggaagaaatcatatgatgctgatgggtctcgggtccagcaactcgaggaacgagtcaaggatcttgagctgattttgagctcaaagcttgaggaagtttcctcggagaagaagaagaaagcagatgctgatgggtctctagaggatagagaaag

SEQ ID NO: 170406 - DNA, 636 bp, Arabidopsis thaliana landsberg
cgggttagcaaagggtgcgaacctgacatcgtgacttatagtattctcataaatagctactgcaaagctaagagagttgatgatggtatgagactttttcgtgagatttcttcgaaaggattgattcctaatacaatcacttataacactcttgtcctagggttttgtcaatcgggaaaacttaacgccgccaaagaactcttccaagagatggtttctcgtggtgtgccaccaagtgttgtaacttatggtattttgctggatggtttgtgtgacaatggtgaactaaataaagcattggagatatttgagaaaatgcagaagagtaggatgactcttggtattggtatctataatatcatcattcacgggatgtgcaatgctagtaaggtcgatgatgcttggagtttattctgtagcctctctgacaaaggagtgaaacctgatgtcgtgacatacaatgtaatgattggaggactatgtaagaaaggctcgttgtctgaagccgatatgctgtttagaaaaatgaaggaggatgggtgtactccggatgattttacgtacaacattcttatcagggcacatcttggaggtagtggtctaatctcttcagttgaactcatagaagaaatgaag

SEQ ID NO: 170407 - DNA, 1647 bp, Arabidopsis thaliana landsberg; identical to SEQ ID NO: 9940

SEQ ID NO: 170408 - DNA, 2045 bp, Arabidopsis thaliana landsberg; identical to SEQ ID NO: 65816
  unsure (1)..(2045): unsure at all n locations

SEQ ID NO: 170409 - DNA, 510 bp, Arabidopsis thaliana landsberg
aaagacgggagtgagaaatcgacggagactgtggtggtttggacgaacctatacggcccgaaaaaaacccgcgtgttcagcaccacaatcggtcataacaacgagacggtgagtgatccacggtatctcgaccttgtcacacgcggcgtgctctgggcaaccgatcatatcaatccggacggaaccccagcgaagggatacggacctggcggcaaataagcgtggtgtgatgctcatattgagcggctggacgacgtcggttaaagtctctatatggcgctgctaaaccagcggagaaattgagcgaggaggaatacctccggattgagcgatccgccccatataaaagcgaatttttcgatggagagatgttcgcgatgtcgggcgggactcggtggcatagccttatcagcagcaatttaattcgtgagatgagttaggcacctcaaggccgacgttgcctggtttacgacagcaataagcgggtgaaggtcgaggcgaccggactga

SEQ ID NO: 170410 - DNA, 2552 bp, Arabidopsis thaliana landsberg
  unsure (1)..(2552): unsure at all n locations
atggcgacaaaagatgcgatattatgtcggttacttattcagttttttctcatcgtttctgcgactgtttctaccattttcgccggcgtcgtgggtggtttcttctccactttccctctggcgttcatctccacgtccggacccacgtaccggagtgatgctacttcagcagttccacatctgtcattatataatgacgcatctgcaacccaaaaaatgcttgcaatcttcactattatctctgcaaatttctatcctcttcgattttatcgcactctcacaaaaatgggtgacaatctccgccgggcagttcaagaaatcaatctcggagtggaagacgaacctttcgctttaccggcggatgtcgtgaaccaggctattgctaaaaaccgtttcattctcgtcggtcgaccagtaatccctaggagacaaaatctccgatcgattgtggcttccatgcctcgtgtttggggctaatcagggttagttcacgagagaattgttccagggaatcagttccaattcatcttcccctctgaagaatcattggagacagtgatacgccggggaccatgggcgttcaacgaccgcatgctgctcctccaacggtggacaccacttgagaacccgcctttactcaatttcatcaatttctggatccaaattcgtggaatcccttttcactttctcaaccgtgaagtcataggtgaaattggtcgtgctattggtaatgttctgaacattgattttgatgcagaagccgtggctaggattgattttgtgcgtgtgctcctacactgggacatcacccaaccgttaagatttcaaaggaactttcaattcactgttggggttaacacgttgttacggtttcggtatgaaagacttcggggattttgcgaggtatgtggcatgctgactcatgactcaggggcttgccttattcaaaacggtggtcctgattccaattctgaaggtgatgatgatgacgacatgcctaatgctgacccaccaaatcagaatcaaggtgttgttatacggaaattgcagaggatgaggagaatgggggacctggtttgcagccagtgattgctgaacctgatgaagagacacatccccttgaagatattgatcctttgcacaatgctttggaggaggatgctgatctcggagacaaccaacgcgacctttatagtcgatactccgctgtcattcatccgcgacttgatatcatggagcagacaatgaaaactcaagaagcaatggtagcagatcgaggcaaggggaaacgagaggattatctggaccaaaatgatgagagtgctaaatcaaagatggtgatcagagaaatgggtgaaggtagcggttcctcaagcaggagcaaccagtgtagaggcgcggtgggccctaaaccaccacaactgccatgaatacagcctgctggaactgtcaaggtctcggcatagaccttacagttcgacgccttaaggaaatacaacgaaagtatttcccggacattttatgccttttggaaacaaagcaaggagatgataagatcagagatgtgtgcgctgaactcggatatgacagaagcatttcagttcaacctgttggtttaagtggtggtgttgctgtcttttggaattcacatgtttttctttctgtaatgtcccaaagttctaatcttgtagattgtcttgttaatagtaatggaatctgtttctacttgtcttttgtttacggatatccagaacctagtaacagacatctactttgggaaagactagaacgaatctcaacaacaagacattcaccttggttactcatgggcgacttcaatgaaattcgaagtaatgaggagaagagaggcggtcattcaagacctgaaagcagcttccgagacttcaggaaaatgataacagtttgtgatctccatgacttaaaatcatttggtgattgattctcttggaaaggaaagcgatactctcatgatatttggtgctgcctcgatcgttccatggcaaatacagaatggctagcttcatatccgtcaacacaaactgaattcctaccttnnnnnnnnnnnnnnnnnnnnnnnntgatcaccaacattaccagtttgttaagtcggcgctatggtacatttcgttatgataagagactgttttttaaagatggttttcaagaaaaggccatggagagttggaatgcggacacagcgactgaatctcttaacagaaaaattgcaagatgtcgtcaatcaatggctacatggaaaaggagaaaccgtacaaattctgcagtacaaatcgaagtactaaaacgaagattagattttgccctctcaaacacgggtttcacaacacaagatatacattatatccggcaagagctgagcaaggcgtatcgtgatgaagatttgtattggagattaaagagcagaaacaattggaagaattttggagacagaaatacaaaatatttctattctgcaacanaatcgaggttagccaganacagaattctatccactgaagatgatgcagggcttt

SEQ ID NO: 170411 - DNA, 469 bp, Arabidopsis thaliana landsberg
tgattatttggggtttaaggtcgtttactaatgagttccctcggcagcactgaacgagcaactgaaaaaggaagttgagaggctgaaattcgccacgggagaagtctcacccgcggatgcttataacctcggaatggcacacatgcaatatcagcaacaaccacaacaatccttctttcaacatcatcatcagcaacaaaccgatgctcaaaacctgcaacaaatgactcatcagtttcatctcttccagcctaacaacaaccagaaccaatcttctcgcacaaaccctcccaccgctcatcagcttatgcatcacgctacttctaatgccccggctcaatctcattcctattcagaggcaatgcatgaagaccatcttggccggttacaggggcttgacattagcagctgtggcagaggctcaaactttggtaggtctgacaccgtcagtgaaagcagcagcactatg

SEQ ID NO: 170412 - DNA, 545 bp, Arabidopsis thaliana landsberg; identical to SEQ ID NO: 41778
  unsure (1)..(545): unsure at all n locations

SEQ ID NO: 170413 - DNA, 820 bp, Arabidopsis thaliana landsberg
  unsure (1)..(820): unsure at all n locations
ctgaacttatgtgcgtgacaattcacagtcttataactgggttgctataacaataggggtcaggagtctgcngtttaaggcaagcgcgttgctgaacaccttgatgtttgactaccacaggcagcatggaataggtcagatgcaatttctcaaagctctcactttaacatttttgcctgtaatttcatcaagattttctcgagttctttatgtgcttgtgttatgttcagtctttatagaaatccgcattgccagaatcttcaacacttatggtccacgcatgaacattgatgatggacgtgttgaaagcaacttcattgctcaagcactccggtgagcccctttactcaatcgaacaaacaaaataccttttccgagctataacccgattgattactcatctcttgttattattcttgacataaatatgtaggggtgaggcattgactgttcagaaaccagggacacagactcgcaggttctgttatgcatctgacatggttgatggacttatgcgcctcatggaaggagatgacactggtcccatcaacatcggtaacccaggtaaagcccgcaatattcctccatttgacaaaacacaacccaacaaatctcttgaacttatgctttgtgtccgactctttggtttctcaggtgagtttacaatggtggagttggctgagacagtgaaagaggtgagagtctggtttctcgatatgatatgagtaagtaccttgaaattcttgggtgtccgctaatgaaatgttggtttacctgcagctgattaaccagagaacacccataaagatggttgagaaca

SEQ ID NO: 170414 - DNA, 1233 bp, Arabidopsis thaliana landsberg
accgtcttcctacaactcttcaaatgctaactctaaacagagaagtcttagctgtgatcttccgatgctaaatcaagagagcaaagttttggatccaaggaagagtcaaaatgttgctgttctgcttacaacacttaagctcaccacaaatgatgtttgtcaggcccttcgagatggtaaatcatcaatgacaaagctaatttcttctcattattcggattgtatcgagttgaatctgacttgtcttttatttcatcaggtcactatgatgcacttggagttgagcttcttgagagtttagcaagagtggcaccgagcgaagaagaagagaagaagttgattagctatagtgatgattcagtgatcaagcttgctccatcagagaggtttctcaaggaattgcttaatgttcctttcgtgttcaaacgggttgatgcattgctctctgttgctagttttgactccaaagtcaaacacttgaaaagatcattcagcgttatacaggtataaaacaaagatgaagataacaagagacatttatgaatgtgtatgttgttgtaagcttacgtctcataaagctatatgattcttttgcaggctgcttgtgaggcactgcgaaatagcagaatgttattgagacttgttggagctacctttgaggctggaatgaagagcgggaatgctcatgacttcaaacttgaggcgctccttcggccttgtcgatatcaaatcgtcagatggaagaaccagtatcttggattctgttgtacagaagatcactgaatcagaaggaatcaaagggctacaagttgtcagaaatctcagttcagttcttaacgatgccaagaaatctgcagagttggactacggtgttgtaagaatgaatgtgtcaaagctttatgaagaagttcagaaaattagtgaggttctgctactgtgtgaggagactggacacagtgaggaacaccaatggtggaaattcagggagtcggtgaccagattcttggaaactgctgctgaggagattaaaaagattgaaagagaagaaggttccacgctctttgcagtgaaaaagataacagagtatttccatgttgatcctgcaaaggaagaagctcagctattgaaagtattcgtaatcgtgagagactttttaaaaattctagagggagtatgcaagaagatggaggtgactagttctctggcttagatgtcgtgtcataaagatcctag

SEQ ID NO: 170415 - DNA, 533 bp, Arabidopsis thaliana landsberg
tgctgaccgaggtcggcctcgcggagcgggcggacgatcaggtgcggggcttctcgcgagggatgcagcagcggctggcgcttgcgcggacgttactgcacgaccccgagatcgtcctgctcgacgagccgtacaccgggctggacgcgcacgccgccggcatgttgcgacgagtgctggagcgcctgaaggacggtcggcgcaccgtggtgctcgtgacgcacaacctctcgcaggggctggagatggcggaccgggtagcggtccaggtggcggggcggtgggtctccgacgagccgagggccgccctggacgtggcggggttcgagcggctctacaccgcgcgggtcgccgggtcggtgtaggcgtgggcgcattcgcggtccagatcctcgcgatcgccgggaaggacctccggctggagctgcggtcgagggagcggctgaccagcatgctggtctttgccctcctggtggcggtagtcttcaacaacgcccacgaccccgcggtgcgcgcgagtgcggtcgccgggg

SEQ ID NO: 170416 - DNA, 652 bp, Arabidopsis thaliana landsberg
atgcaaccttcaagaacaagagtttcattttttgaaacaggagagaccatgaagcaaagaaagaagagttatctctcaatcttcgtgatcttcttctctcttttcttcttcgggatcttcatgtacaatgacaacctcaaatcctccattgctgacttcacatcttcgaacccattctctagttcatttgtggagttgccgccggatgagtgtgatctgttcaccggtcaatgggttttcgacaacaagacatatccattgtataaagaagaagagtgtgagttcttgacggagcaagtgacttgtttgagaaacggaaggaaagattctttgtttcagaattggagatggcaacctagagactgttctttaccaaagtaaagctaatgtttcaagatgccctgtttttatccggtttgatcgaattggtatttaacaattgtctgttttatgattggtttgatgaagattcaatgcaagagtgttgttagagaagctgaggaacaagagattgatgtttgtcggtgactcgttaaaccggaaccaatgggaatcaatggtttgtttggttcaatcagtgattcctcccggtagaaaaagcttaaaccagaccggttcactcactgttttcaaaatccaggtaataaacatt

SEQ ID NO: 170417 - DNA, 1260 bp, Arabidopsis thaliana landsberg
atggatgagtatcaagatatgaagagattcagtatggataatgactacgaaggaggtcgatggaaaggtgacgagttcgtatacgagaagaggaaggagaaacggaaccaaaccaaaagcgacgctacttatggaatcttcgctgagagcgattcggattccgatgattctggcggcggcggcagtcgtaggaagaggcgtaaggatcgtgattcgggaaggaaagcagacttaaccaagcctgtcaattttgtatctacaggtacggttatgccgaatcaagagattgataaggattctagagaacataatgatgagaaagatagggataaaatcgaagataatgatatgattgatgaggatgttgaagttagaggtggattgggtattggtagctcaggtttagggttagggtttaatgcgaatggttttgatgatgaggacaatcttttaccgggtgcattggggaagaagatagctgatcgggcaaagatgagagggaaggcaaaggtggagaagagaggtcaagagggtggtggtgcaaagggaggaaagaagaatactttaggcagtgatataggtcagtttgagaagtctactaaaggaattggtatgaagctgcttgaaaagatggggtacaagggaggtgggcttgggaagaaccagcaaggtattgtagctcctattgaagcgcagttgaggccgaagaatatgggtatggggtataatgatttcaaggaggcaaagttacccgatttaaagaaggttgaagagaagaagattattggagtcagtgtcagtgagaatgaacagagccatggtgatagaggagggaaaaatctttggaaaaagaagaaggtgaggaaggcagtttatgtcactgcagaggagttgttggaaaagaagcaggaagcggggtttggtggtgggcagaccattattgatatgcgaggaccacaagttcgggttgtgacaaatttggaaaatttagatgcagaggagaaagcaaaagaagcagatgttccaatgccggagttgcaacacaacttgcgcttgattgttgatctagttgagcatgaaattcaaaagattgatagggacttgaggaacgagagagaatcagccttgagcttacagcaggagaaggagatgcttataaatgaggaagagaaacaaaaaagacacttggaaaacatggaatatattgcagatgaaataagtcgaatcgagcttgagaatacatctgggaactctaaagcg

SEQ ID NO: 170418 - DNA, 751 bp, Arabidopsis thaliana landsberg
caggcgcagacgaagctgtgggcggtgcgccgggccgtcctggcaacgatcaggctggctacaatgacgatgggcgcaggccgcccggttcgagcaaaatctgataacgtgtcaaccgggcgatccagaccgaaggaatcccaggtcttcccgccaatcccaccctgcaaaagcttgtgcagcgcgtgcgcccgcttggcggcgcggtccatcttgtcggcatgatgtcgccggacggcgtcgccggtcaccagaaccatctggctgtgctggcggcccttttaagccatgaagggctcaaggttttcgttcacggcatcaccgacggcgtcgatgctgcgccccagaacggccttatctacctcaccgaatttcttgatgacgtggcaggcgccgagcatgtgcagcttgcaagcctcaccggtcgcgccctgacgctcgacatgacggcaaccccggccaacctcaaaaccgcatggaaagcccttgccgacgccgatgcgccgcgtactgaatatctctccacccatctcgaccagagttatgccaaaggcctcaccgacgatcgcattccgtctgccattgccctcaattatcgtggcatccggcgggacgacgcggtgttctttgtcaatatgcgccccgaccttggcgcggccataatacaggaactgctcgaatcggaaatcggcggcatgctttatgcgattacgtcgctccttcctctagacggtaaaggcctcgttagaaa

SEQ ID NO: 170419 - DNA, 454 bp, Arabidopsis thaliana landsberg
tttccaggaatctcttttgaaatgtcacgaaagcaaagcttgtcttccaccaatctttgtgtgaatgaacaacacgagattaagacatgatgtgctctttttgcgtgctgttatacaggttttctcgagtctctatggagagacattgacatgaacagactgcacatcaacccgtctcatgagctaaactttgtgattgtctcacatggcttaacatcgcgtgtgtttctgatgaaatggtttaagtggtcagtggaacagttcgagggactaaacaatccaagggaacagtagagatcagagtgatggaattaggacaaggcggtgattacagcttggcgattcatcacacagaggaagagttagccacatggggactgtcaccagagatgattgcagatcaaaagtggcggctaacgcgcataaaggcgaatggaaagaagattgtaagtgg

SEQ ID NO: 170420 - DNA, 760 bp, Arabidopsis thaliana landsberg
cgaattatcattgtcgagaagtaagattctcagggcgtttaagctttggtatcttagttgtaacttttttctttggttgtgtactgacttctccctggtatatcaaatatctctattagggctccaagctcgccaagattccacctccaaagaatgttcttgaagtactcttgattaactgttagtttgaattgcatctattgcaaattattagaatggtacagaataactcataaagtggcatttgattaaggtttgtgttcaaaattatagttcctgatggagttatatatggttgtggagatctaatattttcatcacatacgatattcaccttagtctttgtacgcacatatcaaagatacggcacacgaaggtactgtctcttatattgttccacagaagttcataacttcttcacaagattcttacatctcatgtttgtgaaatccccaggtggatcaaggacttggcttggcttatggcagtaatacagagcatattgattatagcatcaaggaaacattacacagttgacattgttgttgcatggtgagaaaaaaagaagaaatcaattatcttgtttgacaatattgattcctttacactatctcaacatttcaacattttcttctgcaggtatactgtgaaccttgtaatgttctacgttgacagtaaactgccaggtaagttggctaaataaaaaatcattctcccaaaatattacgaaaaccagattgttactccgctcctagttatc

SEQ ID NO: 170421 - DNA, 576 bp, Arabidopsis thaliana landsberg
atctctcctttacacgatgtttgggctaggaaaaaagaagcgaacgagtcctaaccttgctcagagagcctccacatccacggctggtcgacgacctcgttgtcttccgtctcaggacgatttcacgctggcagcagaacggtctcctcagctacagacgcctgcaacagaagccgctgttcctccattacaatcaacgacagctcatgtttggaactatccgctgccactacagttgttccagcactttgtcagtcgacaacctgaagtgcaaaggactgcctccgtagaagtgcagaacaatccagcgactcaagccgcgactactcagcaggttcctccggctcctcaacaagaccctccgccttctcagcaagaccctccgccttctccagttcaagagtctcgggctcacagtcacccatcctctcaaggcaacaacttcgaagaatatccacctctgtcgccggatctccagaaggacacacttcaatccctaaacgatctgcttatgttgccggagagggataagttcgtcactgtcctctctcccattcctcgaccaaatacgacatg

SEQ ID NO: 170422 - DNA, 895 bp, Arabidopsis thaliana landsberg
atgccggttttcgttgatcgcgaagctcctaaggtttttgttcttctgtttttcctgcgttaatcagagtctctctcttttcaaaagataaatgttgaaattgtttagtttgatagttatgcgtccatggttttgtgtgtgtatgtgaagctatggagacgaatttactcagaagcgacattagaagcttctcttcttgctgaaaaatggaagcttgttcttgctggacttgtatttcaggttcttaagcttccttctttgtgtttagattatagtcttgctttattggtgaatggtgatatgatcaagctaagttgtgacagatcaattagttatgctggttttttttgtttcagtagtttgcttaaaagtgggagctttaaagttagttcattatataaatcctatttgcattttcattgtttctggttccttcttaaatcagtacattcatggacttgctgctcatggagttcactacttacaccgacctggtcctactcttcaagatgctggtttctttattcttccagtgagtatacttgctttgacttttctcatcaattctgttatgtatcatacctctggtttgtttggtaattgatatgtgttccttcaggcacttgggcaagataaagcatttttcagtgaaactgtgtttgtcactatctttggatcatttatcttggtaagtttcctctaatgtatccgtttttctccttcaactcgctgtactggattgatcttatggctctatgtttcggtttacgttgattgcagaggacatttcatccttttgtttcccacaggaaaaagatttgtacagttttgatatggagcagagtttttgtttatttagctgatagtatcacttgcactacattaatacttctat

SEQ ID NO: 170423 - DNA, 1847 bp, Arabidopsis thaliana landsberg; identical to SEQ ID NO: 66199

SEQ ID NO: 170424 - DNA, 615 bp, Arabidopsis thaliana landsberg; identical to SEQ ID NO: 65552

SEQ ID NO: 170425 - DNA, 575 bp, Arabidopsis thaliana landsberg
  unsure (1)..(575): unsure at all n locations
cggaggctagtaaagctaaaggaatgctttaccacatttctcctgaaactaaaagaggcaagaagaaagcaaaatcatctcagggggattctcataagccacctaagcgtcaaagaaccggttacaacttcttcgttgctgagcaatccgtgaggattaaagctgagaacgctggacaaaaagtatctagccctaagaatttggggaacatgtggaccaatctctctgaatctgatagaaaggtaattcaaaagacttaagaaattaactgatgattttaaactacgttttcaagtttcatttatctcgaatggatttaacgggtttggtttatgatttttgaacaggtttattatgagaaaagtcgtgaggatgggaagaggtataaaatggagattttacagtacagatctttaatggaatctcgtgtggcggaaattgtnnnnnnnnnnnnnnnnnnnnnnnnnnnaagtgcagcggagactgcggatgaggcgagtcaagaaaatttagccaagactgatgcatgcacaagtgcaagtagtgcagctgagactgaggatgaggtgagtcag

SEQ ID NO: 170426 - DNA, 1184 bp, Arabidopsis thaliana landsberg
gggattttttcgcaatcctgggcaagttcaattaatacgtggtgatcctacatataagctaatgtctcccgaggaggttataggaaagtttgtgagctttgaattgatgatcaaaggctccaaacaaatcgtcaacttggagcaaggcggcacctccacactcgcggtgaaacccgtcgcattcaaagcgacggaggagaagaaagaagagtctacatcaaataggctccccatcgacgcctccaagctcgacaacgaggagatggcgctcatcatcaaaagcttccatcaggatcttaagcaaaggagggggaaggactacaaaccccgctccaagagggtgtgctacaagtgtggtaagcccggtcattttattgctaaatgtccaatgtctagtgatagtgacaggggcaaagacaagaaggggaagaagaaggaaaagaggaggcactacaagaagaagggcggcggtgcccacgtgtgtcgggaatgggactccgacgagagctccaccgactcctcctccaacgaggacgccgccaacatcgccatcaacaagggcctcctcatccccaacgtcggccacaaatgattcatggcgaaggacgacaaaaagaagaaggttaaatccaaatcatccactaaatatgagtcttctagtgatgataatgctagtgatgaggagaataatgtgcgcatcctctttgccaatcttaacatagagcaaaaagaaaaattaaatgaattgatgagtgctattcatgaaaaagatgacgttttggattcccaagaggattttctaattaaagataacaagaaacatgttaaggttaaaaatgcttatgctctagaagtagaaaaatgtcaaaaactatctagtgagctaagcacttgccatgagatgattgacaaccttagaaatgaaaatgctagtttaaatgctaaggttgattcacatgtttgtaatgtttcaatttccaatcctagagataataatgatgatttgcttgctaggattgaagaattgaacatttctctcgctagtcttagattagaaaatgaaaatttaattgctaaggctaaagattttgatgtttgcaaagttacaatttccgatcttagagataaaagtcatattgtacatgcaaagattgttgggtttaattggtgcaaaccataaacat

SEQ ID NO: 170427 - DNA, 1189 bp, Arabidopsis thaliana landsberg
atctgagaaggagcttttggcagtggtctttgacgttcagaaataggaggcactatgttgttacatgaccatgtattgtgatcataacagatcatagaagtttgaagtatttactggagcagcgtcctaatacagccattcagcagtagtggcatccaaaacttttggaatttgactatgagatccgctacgaggagggtaaggagaatttggtggccgacgcgttgtcaccagttgaaggttctgagattttgcatatggcattgtcagtattggagtgtgatctgcttcagaggctcaaagatgggtatgcttctgatgctgtggttcagaaacagattgaagctcttcagagaagtgcagattcgataaagaagatgagttggtcacaagggttgttgcaccgtaagaacaagctggttgtaccaaatgttgtagctttgaaagattctattttgggatggttacattgttcaggtgtggggggccactcaggtcgtgatgctacccatcagcgtgtgaagagtctgttttattggaaggggatgtctaaagatattcaagcttacatccggagctgttctgtgtgccagcagtgtaagtatgatactacagtatctccgggtttgcttcagccattacctattcctaatgcgatttggtctaacatatctatggattttattgatggtctgcctatttcttttgggaaatctgtgatcttggtggtggttgatcgtttaactaaagctgctcatttcattgcattgagtcatccttattctgccttgacagtagcacaagcattcatggataatatattcaagcttcatgggttgcctaattctattggcagtgacagggattcagtgtttttaagtgagttttggagagaattgttcacattacagggtgtggctctcaattactcaagcgcatatcaccctcaaagtgatggacagacagaggtggtgaataggtgtttggagacatatttacgatgtatgactagtgacagaccgggtttgtggagcagatggttgcctctcgctgagttttggtacaatacaagctgtcattcttcagctaacatgtcaccttatgaagctgtttatggtcaaccccctgcgcagtatttgccttatgttccgggcgagtccaaaggggctgtgggggctcagaacttaca

SEQ ID NO: 170428 - DNA, 410 bp, Arabidopsis thaliana landsberg
cgcaggccgcggacgcgggaaagactcgcttcgggagcggttgggcctgtctggtgaagaccgcgggcggtgaggtgcaggtgacgagcaccccgaaccaggactcgccctacatggaggggaacacgccccttctcggcctcgacgtctgggagcacgcctactacctcaagtaccagaaccgccgacccgactacatcgaggcatggtggaacacggtgaactgggacgcggtcgcggctcgattctgagacggaagagggaacaggaactgaggggggccgatatccgtaggggatgtcggccccgtccttttcccggggtccggatttggttaactgtaggatactccggaaagcggtcgtgaagtggacgtcattcccgcggacgcgggaatccagggtgaatga

SEQ ID NO: 170429 - DNA, 674 bp, Arabidopsis thaliana landsberg; identical to SEQ ID NO: 14123

SEQ ID NO: 170430 - DNA, 2077 bp, Arabidopsis thaliana landsberg
aacgcttagaagcgatccaaacaatttgagtagtaatgttgtatttattttctgtagattgctttaatctgtttcatgtaatctctgtaattctgtcaaaaatcaaaaatggtataaaacttaaccttttaccaaaaaaagaaaaaaaaagacctgtgactatgttgttttagcaaatgccatattagtagattaacatggtcttgctactttagaaagaaaacaaaatccaaattgatatcataactttagaaaagaagaaatgtgagcaacaaaatgatatcctcatctgccacgatttttcggaaacgtgaacaacaaaatattctatgatggcaatctttattgcccatgcgatccataaatcacaaaactcacacaaatatcatatctaataatactaaatcaacagtcattttagtagaaaccgcctatctatctacgtcttgctcgctaatattgaaagtgagtatctcttgatgatgttaaatgaaaagccttgggattacaatgaagcaaaagagtcaaaagaatggatagaagcgtgaaaagaagaaatttcatctattgaaagaaacaatacatagaatctagttgatcttcccgtcggagctaagctaattggattaaagtgggtctttgagatcaaacaaaactcagacagaagtataaataagttcaaaggcaagacttgtagcggaaggctatgtccaaagacatggtgtagattttgatgaagtgtttgcccctgttgcacgcatctaaacaatctgtttcatcatagctttggcagcttcaaatggttggaaggtgcatcatcttgatgtaaaaaccgcattcctacatggtgaattaaaggagatcgtacacgttgctcaaccagaaggatttgtagttaaagacagtgaagaaaaggtttacaagctaaacaaagcactatatggtttaaggcaagcaccaagggcgtggaacaacaagttaaacaaaatacttaacgaattggagtttgttaagtgttcgaaagagctctccttgtatcagaagcaagaaaatgagcaccttcttcttgtagcggtttatgtggatgatcttcttgtcagaggttcaagtttaagtatgatactcgatttcaagaacggaatggaatccaaatttgaaatgagtgatattgggatgctaacttattatcttgtattgaagtattgcaacatgacaaaggtattaccttaaagcaagagagatatgcgagaaagatcctagaagaaaccaagatggaggaatgtaatgttgttcacacaccaatggccttggggttgaaattatctacggcacacaatgagaaagatattgacggaaaagaatatcggagaagcattgggtgtcttcgttacttgcttcatacgcgacctgatctctctttttctgttggtgtactaagcagatatatgcaggaacataaggaatctaatggtgcagcactcaaacagattctcaggtacttaaagggaacataagaatacggcttggagtttgctcgtgggactgaaaaagatcttgtaggctatagtgatagcagccataacgtggatgaagatgacgggaaaagcacaactgggcaaatcttttacctgcatgaatgtctgattacttggtgcacacaaaagcaatatacggtagctctttcgtcgtgtgaagcgtattcatggcagccacagaggcggcaaagcaatcactatggcttcaagatcttcttagtgaatttaccggagaaacatgtgagaaagtgacactctgaatcgataccaagtccgcgatagctctcgccaagaacctcgtatttcacggacgaagcaaacatatcaagaagagatatcattttattcgagagtgtgttgagaatgagctagtggtcgtagaacacgtttccggagacgagaaaaaggctgatatcctaactaaagcccttggaaggatcaagttcaaggaaatgagaatttttatttgagtacaagatttgaaagaggttgagttcaagcttaaaggggagaatgttgaagtaagcttgaagaaagcttga

SEQ ID NO: 170431 - DNA, 671 bp, Arabidopsis thaliana landsberg
aatagtcgtatgtgtatctactatgggccggttgaagagaatgtatcagagacataagacagctgcggcaatgcgatggcatgctgagcaccaatcaaaggagggagaaatgaatcatccttcagatgcagctgagtggagatatttccaagggttacatccccagtttgctgaagaaccccgtaaggtttatctcgggttgtgtactgatgggttcaatccatttggcatgtctcgtaatcattcgttgtggcctgtgatcctaactccttataatttaccccctggtatgtgcatgaatacagagtacttatttcttaccattctgaattctggtccaaatcatcctcgagctagtcttgatgtcttcctccaacctcttattgaggagttaaaagagttgtggtctactggagtcgatgcgtacgatgtttcattgagtcagaattttaatctaaaagcagtactactgtggacgattagcgactttccggcgtatagcatgttatcaggatggactactcagttttgtaaatgtagtatgttcgaagattatctttctgcgaaatatccatgcttgcccgaaaaagaactctacgcgagaagagcggaagaatatcatctatgggttaaagaatatgtaagtctacatcaattttggttcattcgaa

SEQ ID NO: 170432 - DNA, 833 bp, Arabidopsis thaliana landsberg
  unsure (1)..(833): unsure at all n locations
gtgacgtttggagtgttgttcaatgacgatcgatgtgccaacatctttgaagcattggttgggactctgagagctgccaagaaacgcaaaatagtcgcatttgaaggtgaacttttgcttcaaggcgttcacgataaggttgagatcactctccgaccaacaccaccgccaccgcnnnnnnnnnnnnnnnnnncagcctcctcctaagttcccatttctgcttttaatctttatactattgagtgtaatgaaatgataaacttgaagatcaatgattcctttgcttctctattgtcatgatcacattgcttgagctatatttttaagttgttgcatgtagtaacaaagtcactattaacaagaaagatttcttctctttttctgccatataaactgaaaatacacaaaggaaatacaacaacagctcttaccacgtttctacccaatatagcagcaatctcagagaaacatacattaatttacatatatatatatatatatatctataaacttgtcaagctttacaatctaagtttcctttctgatcaaagactctctggcgtgttaaatcttcccccaatttaggtacctttatccaagctccagaagaaaaagcgagaccgtggatctctatactggtccagaaagacctgaacttgaagtaatcttatcttaggcacaaccgatctcatgaatctgcatataattaaaccatttcagttatacctttctcagtaccgacttcatatctactgtgtatctaggagtatacgtacacaatggttacagccagaagaaaacccttcctcgattgtagagcagaatacaactag

SEQ ID NO: 170433 - DNA, 630 bp, Arabidopsis thaliana landsberg
atggcgggaaaatcctttacgactccggcgattatgctcgccatgcttctccttatttcaccggagatttacgccggtcacgactaccgcgacgctctccgcaagagcatcctcttcttcgaaggtcaacgctccggcaaagttccaccagatcaacgccttaaatggcgccgtgactccgccttacgcgacggttcttccgccggcgtggatttaacgggagggtactacgacgctggagacaacgtaaaattcggattcccgatggcgttcacgacgacaatgatgtcatggagcgtcatagatttcggtaaaacaatgggaccggagcttgaaaacgccgtgaaagctatcaaatggggaacggattatctcatgaaagcgactcagattcccgacgtcgtctttgtccaagtcggagacgcttactccgatcataattgttgggaacgccccgaggacatggacacactacgaaccgtttataaaatcgataaagaccatcctggttctgaagtcgccggagaaaccgccgccgcactagcagccgcatcaatcgtgtttgaaaaacgcgatccaatatactccaaaatgctcctggaccgagcaacaagggtacttttctttaaa

SEQ ID NO: 170434 - DNA, 583 bp, Arabidopsis thaliana landsberg
aaccgcggccacgctggcgctgggcgccatcttcatggcagtgggcgcgggcatgctgtggaacgcgttccggcacgtgcaagagccgaccgcggtcggacacgtcggcaacgcggcgctggcggtggccgtgtccacgctgtgcgcgaaggaagggctgttccgctacatgctgcgcgtggccaagcgggtgcgctcgtcgatgctggtggccaatgcgtggcacgcccgatcggacgccgcctcgtcactggtggtggcggtgggcatcgttgccagcctggccggctttccgctcgccgacccgctcgcggcgctgatcgtcggcatcatcgtggaccgcatgggctggaagttcttcctttccgccttcaacgacctgaccgaccgggccgtggacgaagacaccgaaggccggatccgccagctcatcctcgagacggacggcgtgctgggcatccacgccctcaagacccgcaagctgggcgacatgatctccgtccacgtcgacctggaaatggacgccagcatgacaaacgcccagggccacgccattgccgaggctgcacgcgccaacgggctg

SEQ ID NO: 170435 - DNA, 2541 bp, Arabidopsis thaliana landsberg
ggagtctttgtgcactcagttttgtaaccctctgtattatttcagtgtattttacacggcgtggaaatcgcggggtgcctctggggaatgttctagcaatatctgcaggaattgttgatggaatgaatctcggtaacaactctatggcagctcttgtatcccaaggttgttcaaacataagatggttagccacaaaggtagtaagtttaatttgtgtctataattgcttcatagaaagtggttttttcggtccatgcaactcactacaatgattactaaatcctgtgtttattgcatttctgcgtttttctgtcttgtatgtgagaagatgggtgcaaagccaacaaccattactggtttatcaggaactggggacataatgcttacgtgttttgtaaatctttcaagaaaccgaacagttggagtcaggttagggtcaggggagacactagatgacatactaacctctatgaatcaggtgtgtttctcattggtgtcgctcttcatatggtaaaacaaaaaggattggttgaatctgaaacccatgaatcaaataacaattgctgcgcaggttgcagaaggtgtagcaacagccggggcagtgatagcattagcacagaaatacaatgtgaaactgccggttttgacagccgtagctaagataatagataatgaactgaccccgactaaggctgttcttgagctcatgaaccttcctcaggttgattataggtttcacagattcccatttcgactcggctactcttctggtatttttatttgactctgttctgtataattctggttttgcagattgaagaagtatgaggtagaacaatcgttttgaggaccacatattcaaagagatggctttaaggcggcaagagctttgcattcgtttagagatagctaacgatagagatgattcgaagtgagttttgtaatcgatttttaggcctgaatctcatgaatgtgaattgttcataaacattttacaaaatctctgtaaaaaaatctcttacatcaataaaaatgatgtttcagtatcttgtttagagtggagtgtggaatttggaataggcttcgtatgatcttcagactttcggagccatggatataagtatgggtgtttcaaattcgggtacacccaaccggtttaatccaaacttaaaccgtaaaaagccgatcaaaaaaataaacaatgcgcatgggctttgaagttgagaggcccacaatttttgaaggctcagacgtaaacggtgacgtataggaggcaaaacccttgcaattgcagtgtcgtcgtcgttgagtagtcgaagacggagggaaagaaacagagaacttgtttgtttcgtcgaagaataagatgatgaagagagcccaacaatcggcaagagaaacaaagcaagaagctaaagatgctagcaaagcgaagagcggtttgttcgcttcttgttccttctcttcacttggtttagataccaagctctctgaccagctcaaaggttctcttttttacctctgccgatgttgacatcctttgtttatgcctagtgagcttaaactttgagtttttccgtgtcaatttacacagaaaggatgggttttgaagctcctactcttgtacaagctcaagcaattcctgttattctctctggtcgagatgtgtatccttttcctacaaatttctgtcttctttttgtgtgaactatgattacatttgtagtttggtttgttttcagttaacttgggatatataaatgtatagacttgttaatgctccaaccggtactggaaagactatagcgtatttggcacccctcatccatcacttgcagggtcattctcctaaggttgatcgttctcatggaacttttggtatgtgcttttgttctagctacaatttagtatttctttgctggtaaagtgatgattttgatacttggcacttgtttgtggcagctttggtgattgtgcctacacgggaactatgccttcaggtgtatgaaaccttggagaagttactgcatcggttccattggatagtccctggctatgttatgggaggagagaaaaaggctaaagaaaaggctagattaaggaaaggtacaaatttgtgagaagcgagatggtcacttttgaatccagactaatcgttttatttcaggaatatccattctaattgcaaccccgggacgccttcttgaccatttgaagaacacagcttcatttgtgcacaaaaatctgcgttgggtcatctttgatgaagctgataggtataaatgctgtaccctgaaagttaatatcttccttgatcctgtgcttcctttaattaattcttcctttgcattttggcagcattctcgaattaggttatgggaaggagatagaacagataattaagcttctaggttcagggcaaaacgagcaaggggaagaagatgatattgttccaaagggtattcagaagcagaacttgttattgtcagcaacattgaatgataaagttaacgatcttgcaaacttagtttggacgatccg

SEQ ID NO: 170436 - DNA, 3490 bp, Arabidopsis thaliana landsberg
ctctcttctcacttctctcttctctctaacggcgatgatatcttgcatgtgagatctcgatctctcgatatccaaatccccacaaatactcgcttctgatctgagaatctactactttctagcttcatcaaagttgttgtgtagtcgaatcatattctctccatctccgacgctcgatcgctctctctcgaacagacccgtaacctagttctagtattaacgacctgtctctctcgtcatcactccatctccgacgttttcttagcttctacttcttcaacttcaaggtaagtcgcggttttcttctttttgattttatagttcgagcttctttcttttttcccagataaatcttgcgtgtgcaattgtttgaagctgtataatgtttgaaccaagggagatttttaatatcgactttttgacgagtttgtgattttttatagaaaccctagatgtaaaaaaaaaaacagtaatttttttcatctgttttaccaaagattttttcatcagttaaaccctactaactattctagtcttttttgatgtatattgtgcaagatgaatcttaacggcggcggttctggctctggtggttctggatctggtggttctggatctggtggttctggctctggtggttctggatctggtggttctggctctggtggttctggatctggtggttctggctctggtggacgtgctaatggtcgtggtaatggtggacgtggtagcggccgtggtggtggccgtggagatggccgtggagatggtcgtggaattggtggtggtggccgtggaagaggaagaattccggctgcatttatgggacgtggacgtggccgtggaaggggtaaccatggtcaaatgtccattgacgccttgcaagctcaggaagcaaggagattgatgccggttcttcattcatagagacctgttggaacgttgtggtacatgtgaatgtctctcttgtctgctttgttgacttgattaggattaacagaaaatatgatttggttcagattgatcataatttatgaacttgtgaaattgtttgactgatttggatcatgataataattgtgttattggtttttaagttgatgacataatcaaattgattgtttgttatttattaattttgtctctggtctttatagaacataaataaaaataacttgtatgctttgttatatacttgattaggattaacagaaaaaatgatttggttcactaatcataatctctgaacttgtgaaattgtttgactgatttggatcatgttaataattgtgtttgactcaagtaaatttgttaattggtttacatttacttgagtaaaacagaaaacgtgagtaaaacaaaacttgattattttttaaccctaaacgaaattatctacatttaactgaattgtttctgatttgaatattgctccaacttctatatgtgaaagaagctaattaattgtgtgtctactttgttatgttctgtatttaagaacttgtcaaattgtataactgattttagtgtcggattataaatttcatcactggtttttatatagatgagatgtggaaaaattgattgtgttacttgtgtataactgaacttgtgaaaaattgtatgattgatatcgatcaatatcatttgtctctctggtttttatacaacagaaataaaaattagttgtctgctttgttatttacttgattaggattaacagagaatatgatttggttcacattgatcataatctatgaacttgtgaaattgtttgactgatttggatcattataataattgtgtttttggtttttaagttgatgaaataatcaaattgattgtttgttttttattaattgtatctctgcgcggtcaaaaaaaaaaatttatgtctttggtttttatacaacataaataaaaatgacttgtctactttgttatttacttgattaggattaacagaaaatatgatttggttcactaatcattatctctgaacttgtgaaattgtttgactgatttggatcatgttaataattgtgtttgactcaagtaaatttgttaattggtttacatttgcttgagtaaaacaggaaacgtgagtaaaacaaaacttgattgttttttaatcctaaacgaaactttctacatttaactgaattgttactgatttgtatattgttccaacgtctatttgtgtctaatttgttaattttctggatttgaggtttggtatcgacaatggtcctcggcgtgcaattgtagctgcaataaaaagtcactttgatggtccatggttcaacatatcatctgttccccatcatcctatactccaatggttgggagacttcattgtaagtttgatatcttttaccaaatacatcaaaaaacttacgttatctttctaatttgtaacctaaattgtttgttctccttttgcagcaatctttctattgggatccaattcatttgaatgatgtgtatcacctctggtatcatgtagttgctgcccgccttagagacatgatctctaaggctaaaacttccgggaataaacctgaatggataagtgaggacacatggcaggatatgttggagtattggagcactgatgaagctaagaagaagagcaagacagcctctcccaatcgactctccgaccgtgacgggtttgggccacatcgacacaccgcatgtgctagatcttatgaacaactccgaaacataattgtaagtgaattcaaaattattacattttgttatcttcttaataagtaaacgtgtcattaatgtgttgtacatgttttctacagcggcaaaaggaaggtattgagccttcgatgctccgcatccttagagagactcatggtaaagttgatggcacatatgtggatgaaaaggcaaatgccggggatgaagaaattcagagacagcttgacgagatcgagctctctagaaactcatcaggtccttctgctactgatgatagcaccaattccacaggcctcgagatatactacaaggtaacgagtttctagttcttctatcatcgtgctattttagagggtttcaactaagtgctttagaaattgaagttgtttatatggtccaaacttatttagtttagaaactgaatttgtccttcttacaagctagcactttagaaactgaagttgttaatatggtctaaagttgtttagcgctttaagaaactttagaaactgaagttgtttggtccaaacttattagaaactttagaaactgaagttgtttagcactgtaagaaactttagaaactgaagtaagaaactttagaaactgaagttgtttaaaacctgaagttgtttggtccaaactaatagaaactaaagttgtttagcactttaagaaagtttagaaattgtaagttgtttagaaactgaagatgtttagcactttaagaaactgaatttgtttagaaactgaagttgttgagaaactgaag

SEQ ID NO: 170437 - DNA, 409 bp, Arabidopsis thaliana landsberg
atggattccgaaatcgcattcgactattctccgaggtttcgtatattcaagaacggtggcatcgaacgcctcgtacccgaaacattcgtcccaccgtcactaaatcccgaaaacgtcgtcgtatctaaagatgccgtctattcaccggagaaaaacctctctctccgcatttacctaccggaaaaagtcactgttaaaaagctcccaatcctcatcaacttccacggtggtggtttcatcatagaaacagctttttctccaccctaccacactttcctcacatccaccgtcgcggccgctaactgcttagcaatatcagtaaactatcgccgtgcaccggagtttccggtacctattccgtacgaagattcatgggatatcactcacataggtgtcaactcatatcaca

SEQ ID NO: 170438 - DNA, 1287 bp, Arabidopsis thaliana landsberg
atgcctttggactctaaatgggctgtctcatatttccaaaacaaaatagcccatcgaatgagggagtggggtgttacatgtaatgccatcttaaccagagatggagatgatgtgtgggaagaagttgatactgaagaagagctagaactcgctactatatagttggtgtcgaccgacaccttccagtgtcgatcgacactctatggaacactcttctctaagacgattccatatgacggtgtcgatcgacacacctcaagtgtcaatcgacactaggttcggactgcaccatatgaggtgtgaattctgatgaagcttgagtctgcttacactccccctgtctcttatccgaggacgcgtcgttctaagcaggagatccatgctactaagtgcacagccatcatggagaagatcctcacttctcttcctaaggatgtttctcagacatcttctactccactcaacaggtatgccaagcgacttgttgacaatggtattagctccgatgaagctaaattgctgacaaggaacatcagtgcaatcatgcttcttaaggttaagaaagaaaaggcacaaagagtggacattgcttagtacatctgtactatcactcccgatcagaccactgagaagcttccagatctaggtagctttgttcttgattggctctatctcttcaagcagcgttcagcacgctctttgtgtgagacggcatcaagtatcaacctcatgcctaagtctgttgctgagagattaggcatgactaactacaggccgactagaatcactctcctcttcgcggatcgttacaaacgaatccctgaaggtatcctagagaatgtgcctgtgagagtttgtaattgcctcatgccttctgatttcatggttcctgacatatgatgaagaactcaagaagtctcttattccttggtagaactttcctagctacagatcgtgccaggattgatgtgaagaagggaatgatctctctcaacatatgcgatatagagatggagtttggcatggatgattcaaaattcacattgcctatcagcaacattatcacccccaaagacacatctcctaaggctgctcagatttccaatctagagccaacatcaaaggcccttacagctcagcccgcatatgagaggtgcaccaaaccagtgtcgatcgacaccacacccctgtcgatcgacaccatcgcttgtcccagacaaatgcttattcacctccttcacagcccacacctatttcggttccctcatctttagtattaatcaaata

SEQ ID NO: 170439 - DNA, 1211 bp, Arabidopsis thaliana landsberg
tagatgatggcttggcttgtaaaatatcaattggcacccaaaatccttcatgagttctaatgtaatctaaaattttcagtcccataacccatatgtagatggtgtgtgtatatacattaagggttttcttttgtagaaaataacacatcaaataatgttctttctctaaatctgtgcagagacacgtggtgactaaagaagtgatacacttggggatgacacttctgaagtatgttccagtggcgatggtcgacacattggtgacgactatggcaaaaattttgtacggagatctctccaagtacggactcttccgaccaaaacaaggtcctttcgccaccaaactctttaccggaaaagctcctgtcattgatgttggaactgtcgagaagattcgcgatggcgagattcaggtaccttcacttgtccatcaaatttcatcttcatctttattttattttttaaaggatttttattggtttcttactaatgtataaaactgtcagtctatttttctgttttgtggtcaaacagtgtcagtcttttaaattttggtttatatgaaaaggataagcatttaaagtataaacagttgtaaaggaggataacgttagtaatttctgcacgactccaaaataacccttgattttagatgtttcaaacctcaatttttttttcatatatcctactgatttcacacaaattaatgaagatataacctcataagcatttattgttcaaagcttcttgaggatttagttaaatgataagtggtaacttcgattaaatggaaacactattaactaactaataatgcaatgttaggttatcaatggtgggattggaagcatcaacgggaagactttgacgttcgaaaacggacataaacaagatttcgatgcgattgtgtttgctactggttacaaaagctccgtttgcaattggttagaggtattttaacatgagtaccctattggacaacgatatatgttaagtatagatttgatcttatcaagtgaaaatgaaatcctaacgagtaacgagactaggaaatactcttgtgcataaatacttgtataatgatgtgtttttgtgatattatacaggactatgaatacgtgatgaagaaggatggattccccaaagcaccgatgccaaaacattggaaaggagagaagaatctttactgtgccggattttcaagaggagga

SEQ ID NO: 170440 - DNA, 3372 bp, Arabidopsis thaliana landsberg
atggcttcttggatgtggaaaaagctactcaaatatagagattgtgccaagactatgcacaaggtggaaattaagagtggcagctcaacctctttttggtttgataactggtcacagttgggcagattgatcgatataacaggtcctcgtggagtcattgatttgggtattcctctcgatgcaatggttgaaacagctctacatcctcgacggcgtcgaaagcatcgagttgatattctcaacagaattgaagctgagatacatactactcgccaacggatcagaataaatgagaaggacatctcgatgtggagatttgtgggagataagtttaagacaactttctcaacaaagttcacttggaataatatcagaggcacacatccaacagtggtttggtcgaaaggtgtatggttctcttactctacgcccaaatactcattcttaacgtggcttgcaattcataataaattagcaacaggggatcgaatcaagaagtggaatacggggcagcatgtacactgtgtcttatgtacgaacacggaggagacgagagatcatttgttcttctcctgcccatactcctcaacgatctgggagaacttggcacatcgccttcttcaaacaaactactcatcaaattggcaccagctcaccgcaatgcttcacaacacaagaactccccggctcaacctctttctgcttcgttatgtctttcaagctactctttaccatatatggcgcgagaggaatgctagacgacacggtgagatacctaccacaacaactcgacaaatcaagctaatcgatggaaccgtacggaaccgtctcagcacaatcacagccactagaaaccatcgttacaaggatggcctgcagctttggttctccacacgctcgtcctcttagcccgagtgttctgtttttctatgtcaaactctgtttctacttctcttctaaatttcagcatgaagtagcatttattgtataaacgttttttgtttgaatataattttacattctttcaaaaaaaaaaaaaaagaaggttgatcaccatgtatccgtgcatttttttttctctccatagggaatggaccgcattttggaacacatacttaagaatgaatctgctgagcctctctaaagaatactcaactagtttttcgataggtctcctatagtcatttctagtaaagcgaccatttcaatatcacctgaaagaacacccccacatatatatatatatatagagcatgaatttaaggtcttgaaatgggagaaagagtggtatcattgctcaataaattagtattctaataacttgattgagattttgtaaggcttggaggccaaaggtatagtatgacatgaagggtcttcctgactagagaaagtatagtatgacatgacgggtcttcctgattagagaaagtagatcgagattgtttcctcagttaaatataatgataattaaactgttcccctcgttgtgcaatgaagattgacatatccaatgcttttgattcgggccagaggggtttctttctaaacacgcctgagaagctctagaaaattccagaacagtttgtgaattgtatacaaaaatgtggtggtacagcttctttctcggtgcaagtgaatggagaacttgcaggttattacaatagcgaaagaggactcagacagggctgctctctaagcccctacctttttgtcatttgcatgaatgtgctagccgcaagttagacaaagctgcaaatgataaaagatttggtttccatccaaagtgaaaacaaatgaagctcacacatctctgtttcgcagacgacctcatggtatttgtagaaggcaataagaagtcgatagaaggcgcattaaaagttttggacgagtttgcagttcactccggcttacatattagccttgagaaatccacgctatacatggcgagagtacctttaagtacgaaggagagtatcttggagcaattcccttttgaatattgccacttatcggtgagatatttgggtttaccgctaatgacaaggaagatgacctctgcagactaccttccacttcttgagaagatccgtaaccaaataagttcctgaacaacaagaactctatcctttgcgggacgactgcagctcctaagctctgtcatttttagcctaacaaatttttggattgcagccttcaggttgtccaaagcttgtgttaaagaaatagacaagatgtgctcctctttcctgtggtcgagcccagctctgaatccaaggaaaagaaaggtagaatggtcagaggcgtgtctcccaaaagcgaaggtggtttagggctacgatcaattgaggaggcaaaaaaagtctgcatattgaagctaatatggagaattctttcagcgagaatttcattatgggttgattgggtcaaaaaacacctcataagagacggctcattttgggcagtgaaagataacacagctagtgggtcatggatatggaggaagatgccgaagtaccgggaacaagcaaagacattccacaaggtggaagtgaagaatggggacacaacttctgtttggtatggttcatggagccaatgggttgcatatatgaacaattaggagatagaggctgcatagctatgggagttctaagaaacagtacgcttagtaaagtgataagtaaaccctgaacaagaaaccatcgacaaagattcttgaacctcattcgagaaacagaacatgatataccactatggagagaaaaaaatgactgctacagaaagaattttacatccaaggagacgtggctacaaattcgttcagcaaggccagagatgcaaggctacaaagcgatatggttttcggatgccactccgaagtacgcgtttgtcatttggttggtggtgaagaataggattgcaacaggagagataatgcttaaatggaacaaaaacatggatactagttgtgttctctgcacctatcccttggagacaagagaacacttatttttccaatgcccttattcgagaacggtgtggagagaactagcgggcagactactagccaacaaattcacggaaaaatggctagatatcatgaaggagttagtgagtaaagatcttgacgtcactacaaggtttgtatttcggtatgtgtttcaaaacacgatacattctatctgaaaagaaagaaatgagaggagacatggagagacgccatcgatgatggagaagataatcaagctaataaacaaaaacataaggaatcgattaagcacactaagggtgagaggtgaagagaagtacgcaagaggaatccaagtatggtttgcttcaaggcaagatcaaaatcaaggattgatagga

SEQ ID NO: 170441 - DNA, 964 bp, Arabidopsis thaliana landsberg; identical to SEQ ID NO: 33985

SEQ ID NO: 170442 - DNA, 356 bp, Arabidopsis thaliana landsberg
gcgacattcacgataaccatatcggaatcaacaataattcggttaattcaacggtatctaagaaggccggttattggtatcaatcttttatctttggaaaaaaccggtggttgttcaaggaattgaagctaagtggaaacggatacagggcttggattgagtacgagaacgggaaagtgacagtcacgatcggacgttcacaagaaaaaccgaagaggccattgatcgaagcacgagtcgatctttctaaggtttttctcgagaaaatgtatgtcggttttgccggttcaatgggacgtggcgtcgagcgtcacgagatcttggactggagttttgagaacagtgccaaagactaa

SEQ ID NO: 170443 - DNA, 541 bp, Arabidopsis thaliana landsberg
agctcttggatcctatcaatgataaagtcttaagagacaatgtctttgctttacttctagctgggagagataccactgcctcggctctcacttggtttcttttggtttttgtccgaaaaaccttctagtggtgaccaagattcgccaagagattgacatgaatctaccaagaagttgtagtggccaagagagaccatcttgtgatccaatggagtacttaaacaaagatgtacttaaacaagattttggtctttatttatggggtggtgggtaggatgagagctgtatggggagaagatgcattagaattcaagccagagagatggatttccgagaccggagagttagcattcaatgccggtcgagaatatgccatggtaaacaaagagctatggttcaaatgaagattgtggcggtggagatattacaaaactatgacatcaaggttgccaacgggcagaagtttgagccagatactagtttaattcttaaaatgaagcatggctttaaggttaagattaacaagagatgttcatcttga

SEQ ID NO: 170444 - DNA, 1021 bp, Arabidopsis thaliana landsberg; identical to SEQ ID NO: 10262

SEQ ID NO: 170445 - DNA, 375 bp, Arabidopsis thaliana landsberg
gacgtcaccgccgacggcaaaccggtggaatacatcaacgactgggagtgggttaagggccagttctacgccaacgtggggctgaccacccgtttggcgcggatcgatccggccaacggcaaggtggtgggctggatcgatctggccggactcgtgcccaagcccaacaccctcgccgacccggtcaacgatgtactcaacggcatcgcctacgacgccaagcatgatcgcctctacgtcaccggcaaatgctggccgaagctgtacgagattcggttgaccgggcccaagcgcgagcattgatcccttggccacgcacgcctgccggaaggcgggcggcgtgatgcagaagcaagccttctaccgcaacacgac

SEQ ID NO: 170446 - DNA, 460 bp, Arabidopsis thaliana landsberg
cagcattggcgatgcgatctcgacacgatcagcttacgatatcaaagcgacgcttagacgtgcgcctatggttaccgtaatatcattcgtaggtccacgtgtcgaaaacacatgctttcggaaactccttgagaagcaaggcacgaaggttctaagaatcgtgaactccgacgacgtcatcaccaaagttcctggagttgttttagaaaacagagagcaagataacgttaagatgacagcgtcgataatgccgagctggatacagagacgcgtggaggagacgccgtgggtttacgctgaaatcggtaaggagcttcggctgagtagccgtgactcgccgcacttgagcagcatcaatgtggccacgtgtcatgagctgaaaacgtatctacatttggtagacgggtttgtgagctccacgtgtccattcagagaaacagctcggagagttctccataga

SEQ ID NO: 170447 - DNA, 1400 bp, Arabidopsis thaliana landsberg
  unsure (1)..(1400): unsure at all n locations
catcaaagaaaattcactattggcgacgcatacatttgccttgaggatgtaggtcttccagacatagacgtggctcatgagatgatccaccaagttgatgccattgttaatttagctgcaactaataagtttgatgaaaggtattgattttacatctcccttgtcccgagggaatatgttttacacatgataatttgtagttacatgtcttatatatactgtaaaactaaaggaatgttaattaattcatctgcagacacgatgtagctcttgggatcaacacatccggtgctctcaatgtcttgaactttgccaagagatgtgcaaagaataagatccttgttcatgtatcaacaggtatattcaaagtactatgctgtcaatgagactgtaataaattgtgtttattagacccaagtgaaatatttagtccctctatccgatttcctaatccttatcttaaaattagaaagatttcaatatatatacgttancgatttcatattatggtcgagaaggttggtttagaagtatgaaacgattaatacattaattttgagtttcatacttcttttttatttgtgcgagagttttataggtttatatatatatatatatatataaaaaaaacatcctcacatggaaaattagatagaaagggactatgtactaagtattaggggtttaggacaccgatataaatcagcataagttatctgatttcgacatataactaccaacaaacaagttatgagctaccaacattagaaatgaaagaaaaacttgcaactctccagtatttttgccaatctatccagtatccactataaacatgaccacattgatcaaaaaattaaaaaatgttattggatcataattgtggaatgtctttttcttggatagtactagtaaagaagcttatataactaaatgccagcaactaacgaattttgtatcaaagcttacgtgtgcggagaaaaatctggcttgataatggaaacaccgtaccgtatgggtgagacgttgaatggaaccaccggtttagacatcaactacgagaaaaaattggttcaggagaaacttgaccagctccgagtaatcggagccgctcctgaaaccatcacggaaaccatgaaggatctcggactcagacggttcatatccctacgtatatattttattgttaattagtgttaaatactttgaaataaagtggctatgatattataatgaatagggcaaagatgtacggatggccaaacacatatgtgttcaccaaagcaatgggggagatgatggtagggacaaaaagagaaaatctgtcacttgtgttgcttcgtccttcaattattaccagcacattcaaagaaccatttcctggttggactgagggcatcagg

SEQ ID NO: 170448 - DNA, 356 bp, Arabidopsis thaliana landsberg
gcaccacgcgcgcttgcccgacctaccgttcacgctgcctatgccgcagcgaccaccgcctgctcgacgtggcacaaacaatgttggcccatcttgacaacacccgcacgcacgacgcgtgggccgccgccgtgggcctgtccgcacacagccatgacccgccgctttcgcaaagaaaccggcctcacattagaacaatggagtcagcaggcccgcctcagccacgccctggaccagctcggtcacggtcaccccgtggcgcacgtgacccacgcgttgggctacgccagcgtcagaaacctaagtggccatgttcaagcgcgctctgggacaatcgcccgtccgttacctgaacc

SEQ ID NO: 170449 - DNA, 1270 bp, Arabidopsis thaliana landsberg
caagaagtgaggatgcagtagaaattacattgggacactggtttgcttgattttgtgttgaagtcgcttgggaaccaggtggtggaaactatttggtccgacgtagtctaaatccggtgaagaaagtgctagagtattccttggagatatatcaaatttgttaccaagtggtaacaatgaactcataacccttcaaaaccaaaactcaatggggaagatggcgacaaacggtcacaataagatcacaagaggtcaagttatgaaagacatgttttatttttacaaacacattctcatggactacaagggagtgttaggccccataggaggtatattgaaccaaatcggaatggcttcaagagcaatcctcgacgctaagtacttcatcaaagagtatcactacattagagatacatcggcgaaaacgttacacttagatcgaggggaagaattaggaatattctgcacgatcgcgtggaaatgtcatcatcataacaacgagataaaagttcctccacaagaatgcattgtagtgaagaaagatgcaacattgagtgaagtgtacggagaggcagaaagagtgtttagagatatctattgggaactaagagacgtcgtggtggagtcagtggtgggtggtcaaatagagatcacaagggtcgatgaaatggccttgaatgggaataagggattggtgttagaagggaacgtaggaatgatgatgaacattgaagtgacgaaatgttatgaagatgatgataaaaagaaggataagagaatagagtgtgagtgtggagcaacggaagaagatggagagagaatggtgtgttgtgatatttgtgaagtatggcaacacacaaggtgtgttggtgttcaacacaatgaggaagtgcctcgcatttttgtttgtcaaagttgtgatcaacatcttattcctctctcttttttaccctaaatcattcatgttatattaaaccttctttttttcaatcattacgtcataatacataaattatactcctcgatcaacgtgaattttaatgatccctcctgcgtctatatcaccaacatgttgaatcacagagtcatatccttgcctcctctggagcctgactgttctaataatatcattatcaacatgtcgctctcctcttcccgtgatgactcatgtgtcgtcatatactccaaccgtgattccaagttttacttgacaacaaccttaaggcttgtactccaagaaaagaggcagttaaattttaacagaagataa

SEQ ID NO: 170450 - DNA, 1054 bp, Arabidopsis thaliana landsberg
tgcccataatactcgaaatgctgaacaattttatgaacccgcggttaaagataatgcttgggaagccccaaatccttatactgcagattttatcaactgtttaaatacagcaagtgagcctctatatgacaactgcggcgaaggcttgtcaaaaatttcattggctgctaaaatgatgcacattaagacgaaacacaatcaaacagaagcgtgtgtcgatgatactgcagacttgtttcataaggttttaccaaaatgtaatgttgctccaagaacttattatgaaacagagaagttgatgcggactttgagtatgccgtaccacatgattgatgtatgccaatataattgcaaactcaggattaagatgtttgcaaattttgtgagcatccaaggtacaaacctcggaaagcatcggtacgggctactagaaagcatattccatacaagagaatgttctattgccaatatcataccggctcaagagattatatctatccgaaaagacagcgccccatatgagttggcacacaaaacatacatgtcttgatcgagttatgcaacatccttctgatggcaaggcatggaagaatttccaacatcttaatcctgagtttgcatccaaaagcaggaatgtttatctcgaattatgtactgatggttttaatccattcgaatcttctggtggtaactactctctctggcccataattcttactccttataatctcccgccagatatgtgtatgaaaagagaatatctatttctttccatattagtgctagtgcgaaaccatccaaaacgaagtttggattttttttttacgaccactgatagaagaattgctggaactttggatcaatggctttgacgggtttgatattcagcgaagcaaaattttaatttacaagcagtgttaatgtggacaataagtgactttccagcatatgggatgttgtccggatggacaactcatggaagaatgtcgtgtccgtattgtatggatcaaacggatgcttttcaattgaagaatggtcgtaaatctagttggtt

SEQ ID NO: 170451 - DNA, 252 bp, Arabidopsis thaliana landsberg
gctgtcactagagtaaagccgtatatttgcacaatgccactgaagatggacgagggatggaatcaaatccagcttaacttagcggatcttactaggagagcttatgggactaattatgctgagacattgcgagttcagattcatgctaactgccgccttaggcgcatatattttgctgatcgtctctactctgaagaggagcttcctccggaattcaagctgtatctcccagtgcaggtttggatttcactg

SEQ ID NO: 170452 - DNA, 490 bp, Arabidopsis thaliana landsberg
tttcggatctaggagtagagcgagggatatctatcctgatatcaatttcttgggatatcgttgttacgtggatgggtcatggaaaaaagacgattttttctctgggacaggatggtactgtacatcagcaattggagagacgccaacaatgggagcagcaaaccttagacgaagtttatccccactacatgccgaagtggaagctcttctatgggcgatgaagtgcatgattggcgccgacaatcaagatgttgtgtttctcacagactgttcggatctggtgaagatgatgtcttctccaaccgaatggccggctttttcagtgtatttggaggaattgcagagtgacaagaaagaattttcaagtttttttttatctttaatttctcgtagtgcaaatgtcaaagcggataatttggcgcgtaaagttcgtgtccaaccgtatcatatcacttatgtaaacaaaattcttcaggaatggctcttttga

SEQ ID NO: 170453 - DNA, 439 bp, Arabidopsis thaliana landsberg
  unsure (1)..(439): unsure at all n locations
aaattcccattttcaccagcagcccgggcgatagctccatcggcatgaacattgccgccatgtccatgcgcgattccaaactgctgctgaacgtgaaccgtgacgtgaaccagaccgcggcgatcgtgtacgaagcgaaatcaagcaaacataaatcgagcgtgtggattcttggtggcggatctcccaaaaacttcatgctccaaaccgagccccagattcaggaagtcatggggatccaggagaaaggccannnnnnnnnnnnnnnnnnnnnnnnnnngcggcctgacaccggcggcctgagcggcgcaaccccagcggaagcagnnnnnnnnnnnnnnnnnnatccaaacacgctgcccgattgcgtggtcgcttatgttgattcaaccatcgcgctgccgttgctaacagcctactagatgagccgggtgaaacc

SEQ ID NO: 170454 - DNA, 1863 bp, Arabidopsis thaliana landsberg
cgggtctttttttcgtgtataagaagcgataacggatcagaatttctttgtctaagtgaattctttaaacaacaaggcatagttcatgaaacgtcttttgttggcactcctcaacagaacggaagagtggagagaaaacaccagcaatgttgctagagcgcttggtttgaagccaatttaccgatagcgttttggggcgaatgtgttctcactgcggcttacttaataaatcgaactccaagtatggtgttgaaaggaatgacaccatatgagaggatatataatgagaaaccgaaatacaatcatatgaaggtgtttgggactctctgctatgctcatgatcaatttcataaaggagataagtttgcttttcggagtcgtcgatgcgttttcatcggatacccttatggaaaaaaggggtggaggttatatgacttggaaaaatatcaattctttgtttcaagggatgtggtattttatgaaaatgaatttccattcaagtttgaggtagaagaagaaattgcagaagaagaacttgaagttctaaatttacagtctctgtttgtcgaaaatgaagaagaaaatggacgtacaagctcaattcgtgaggatggcccattaacaccacaatcgactattgggcctacaccaagcccaactgggttattgaaaacccaatttctgaacacgctccttcacttcaaaacgtcatcatcgagggaagtcaaagaactgaaaatcaaaatcgctccactatgattccgacgccaactccggcgattgttccaatcatgtcatcgacgacgaatctgtaggtccaagaagaacaattgggtcgcggaaaaaggcagaaaactcagtcagtgaagttgaaagaatttgtggtaaacacgggaattctgaaatcgaagacggcttcaacgtctgattctacatcgagtcatccaattgcaaatttcatttcttgtgagcgtttctctactcaacatcaagcatatttggctgcaataacttcgggcgtataaccaaagtcatttaaacaagcaatgaaagatgagaaatggaaaagtgctatgtcttcagaaattgatgctcaagaacgaaaccactcatggacgatagaagatttgccacaaggaaagcaagcaataggcagtaaatgggtttacaagctcaaatacaaattagacggtacattggaacgacataaagcgaggttagttgctctcggtaacaaacaaattgaaggtgtagactacggtgaaactttcgcaccagttgccaagatgggaactgtacggttggttttggatacaactgtgaaaaatagaagggatgttcaccaaatagacgtctacaatgcgtttctacacggtgatttagaggaagaaatatatatgagactgccacccggatttcaagcttctgattcttttaaggtatgtagactttgcaagtcaatgtatgggttaaaacagagtccaagatgctggtttgcgaaactgtcaacaagcttacaagagtatggcgttggattattcactgtttactctcgacaaaaatgatcgcatattcgtgtattggtgtatgttgacgatttgataaccagtgctagttctccgacggtcatggatgacttcaagtcctatctttcgtcgtgcttccatatgagtgatataggacttttgaaatattttttgggtattgaagtggctcggaactctacgggtatgtatctctgtcaaaggaaatatgctttggatattatctccgacacagccttcctaggatctaaaacacatgaccggattaggcgaactgcattcatcttttggctcaatttatgctgcagccaaacgggat

SEQ ID NO: 170455 - DNA, 500 bp, Arabidopsis thaliana landsberg
gtgtcaatggcgacaacaacaagcacggcttttcgtttgtcagctcaccgttcgaggataccttgcgcatggccacgcgcctgcgcgacacgccgttcaagaacgccgcgcgcaaggtgcccgacggcaccatggtgcagctgctggctctgtggggcgatttcacgctgcaaaaaagcacggccatgccggcggttttcgtcatcggcggcatcggcatcacgccggtacgcagcatcatcgcgcaagcctgccatgacaagaccggacacaagctcacgctcatctacgccaaccgcacgcgcgagcaggccgcctacatcgacgagctggagcagttggcgcgcgacaacgaaaacttcaatctggtggccgtctatacgtccaaacagggtcacatcaacgcggacaccatcaaggccaacgtggcagacgtcgacggttcgcgcttttatctggccgggccggaaggcatggtcaaggccatgcgcaaactgctg

SEQ ID NO: 170456 - DNA, 577 bp, Arabidopsis thaliana landsberg
atgaaaagtggagccagaaaacgagaatctgagagtcttcagattcgcggattgaagaaagcgacaaagaaattcagacaagacagggtcgtagaatgcgaggattactctgttcgaaaattctacaagggctacatagatgaaaccacatttgcaccatcaagagctggaaccggaatcgctgtttctgtcatggaatgtgatagttcacgctctttacaagactggatggtaagcaaagtctgttcatttttacgcaatattgatacctatctcttattccttgttagtcttgtgtacttatctgatgggtacaaaaactatgagttgcaggcagtagtgaggtctcttggacagttgtctcatcagaatttggtcaatttcttgggttactgttgtgaagacaacaaaccattcttcttggtatttgaatactcgcacaaaggaagtttggacagtcacattttcggaagttaagatcttttctagctaatgggtccattctaagatatagacaactattgcattacctatagttttacgtttccctcaacagaagaagaagaggcattgccat

SEQ ID NO: 170457 - DNA, 907 bp, Arabidopsis thaliana landsberg; identical to SEQ ID NO: 23428
  unsure (1)..(907): unsure at all n locations

SEQ ID NO: 170458 - DNA, 421 bp, Arabidopsis thaliana landsberg
gcgttctgctcgtgcatccgtcggtgccggcaaagacggtcgccgagttcatcgactatgcgaagaaatccccgaacccgctgacatacggctcgcccggcgccggcacggccaatcatctcgcgcagaagctgttcgccagcgcggccggcatcaagctaacccacgtgccctacaagggctcgggtccggcgatgaacgatctcattggcggccacattccgatgagcttcgcgccgatcccggcggccatcggcaacgttcagggcggcaggctgcggggtctcggcgtcaccagcctgaagcggtcctcgctgctgccggaaatgccggcggtcgcggaaacgctcccaaacttcgaggtggcgctgcgctatggcctggtggccccggccggcacgcccaagccgatcatcgacaa

SEQ ID NO: 170459 - DNA, 993 bp, Arabidopsis thaliana landsberg
gaccatgtttggtcgatggcggaaatggactgttcttgtggcggcgatctggatccaagcatccacgggaaccaacttcgatttctcagcttactcttcccatctcaaatcagttctcggaatttctcaggtgaggttgaattacctcgcggtggcttctgatttggggaaagcgtttgggtggtcgtctgggattgctttaggttacttccctctctccgtcgttcttttcgctgcggcggctatgggatttgttggttacggtgttcagtggctagtcatcaccaacatcatcactttgccttattctctggtacacatatataactatttgttttcgaaagattcatacgaaattcttgttagtttttactaagatgttgttgcttcaaggatctgatttgaatgtggaattggtagattagtttgttagaatcgtgagagaactgcatttgatttggtttagtgattgaatcttttcaacatgataggtgtttctctgctgcttgttagctggattaagtatctgttggttcaacacagcatgtttcatcctctgcattcgtcatttcccgaacaatcgtgctctcgccttatctttaacggtaagcttcaatggaatcagtgcagcattgtactcccttgctttcaatgcaattaacccgtcgtcgtccaatctataccttctgctgaactctctggttccccttgttgtttcctttgctgctctttacccagttcttactaaaccgtctctagatcatacaccggacaatgaatcccgacgacatgactcccatgtgtttaccattttgaatgttttagctgtcatgacgagtttccatctcctcctatctagttctagtacttcatcagctcgtttgcatttctttggagctgtcgtcctactggttttccccttgtgtgctcctcttctcgtttatgctcgggattactttcttccggtcattaacgctcgtttaaccgtaaagc

SEQ ID NO: 170460 - DNA, 188 bp, Arabidopsis thaliana landsberg
cataggtgaaccttactcgtctcatctttaaagtaaagaaacggctcaaggccccgactcccaaagtggcacctctaagtcttgaaggtcataggtcggtcgaggctctcgcgcatgtggtgggaatcacccatcagtctgggtcgtacttgtctgctgttggtgatcttccgtccgagcagcaagaa

SEQ ID NO: 170461 - DNA, 392 bp, Arabidopsis thaliana landsberg
cggggcagaaatgtctattctcctgtcccaaaacgatttaccactagactagactatgacaagttcggccaaaaattccataaacctaaaattatgtcgtaagagagcgattcctctctcaacttcatcaaaagtatctcggaaaaggagttcttggctaaatggtgttgaaagtgtcatggggaagctcatggccaatcaaaatcttaagaaacttaattttctactacatggagaaaagttgctgggacaagtttttgaaccataacgggttaggtaataacgagtttcttacctttacgcacaaaggaaatctgtgctttcgcgtgggcatctactgaatagacggtaaggagatgcttagacgacgaaggtctgaaacgttcttctta

SEQ ID NO: 170462 - DNA, 265 bp, Arabidopsis thaliana landsberg
  unsure (1)..(265): unsure at all n locations
gaaatcgaatgggtcgtggagtgagcgtaggtggtgggcaagttctttagggtatctttttggtagcggagaagctccaaagccagccattaacaatgctcctgcaccatcatctgaaactctgcctataagtgctgatccttcaccaaaacatgnnnnnnnnnnnnnnnnnnntgttaccaagcaaatacctgctggtatcaataaatcctctacaaacaactacattcgagcagatggacagaacacaggcaacttccttacg

SEQ ID NO: 170463 - DNA, 411 bp, Arabidopsis thaliana landsberg
  unsure (1)..(411): unsure at all n locations
atgggagtcaaaagtttcgttgaaggtgggattgcctctgtaatcgccggttgctctactcaccctctcgatctaatcaaggttcgtcttcagcttcacggtgaagcaccttccaccaccaccgtcactctcctccgtccagctctcgctttccccaattcttctcnnnnnnnnnnnnnnnnnnnnnnnnnnnnnntccccaaagtaggaccgatctcactcggaatcaacatagtcatatcggaaggcgccgccgcgttattctcaggagtctccgctacacttctccgtcagacgttatattccaccaccaggatgggtctatacgaagtgcttaagaacaaatggactgatcctgagtcagggaagttgaatctgagtaggaagatgggtgcagggctagtcgctggt

SEQ ID NO: 170464 - DNA, 438 bp, Arabidopsis thaliana landsberg
atggcactggtacgtggatgcaataatagggacattaagtttcccctaaatttgttgtctatgccttgagagtctcgctctttgaaattctaagcggcaagaagggcataggattgtatgactcgagcaaagcctctcattggttaggtgaggtacatttttgtatttcacccttgaaacaaatgagaaaccttaaaaacccggccttatactacataagtacgtgaggaggtagtctagtgaaccctttaattctttcggaaccttcaagttttccaacaataatcttgtccttgatgatcaagctggtatccgtgtttggggcacaaattttatgggagttgttggctcatcgttggttaaaacccttcccgatgatggaaactttgttatcaagaacaaaaaggacaacgacaaagctggtttcatatggcaaag

SEQ ID NO: 170465 - DNA, 1854 bp, Arabidopsis thaliana landsberg; identical to SEQ ID NO: 16437
  unsure (1)..(1854): unsure at all n locations

SEQ ID NO: 170466 - DNA, 1138 bp, Arabidopsis thaliana landsberg
tgtggctaggtattatatcgaagatctggtggacataagcttagtggaagtcgtgaaaagaaagaaagggaaactgatgtcttttagaatccatgatcttgtaagagaatttactatcaagaaatccaaagagctcaactttgtaaatgtttacgacgagcagcattcttctactactagcagaagggaagtggttcaccatcttatggacgacaactacttgtgcgacagacgtgtgaacacacaaatgcgatctttcttgttcttcggtaaacggaggagcgacattacatatgttgaaactattactttgaaactgaagttacttcgagtgcttaatcttggaggacttcattttatttgtcaaggatatagcccttggagtttaccagatgtgatcggaggtttagtccacttgaggtaccttgggatcgccgataccgttgtgaacaacttaccagatttcatctccaacttacggtttctacagacactagatgcatcaggcaactccttcgagcgaatgactgatctaagtaagctcacatcactaaggcatctcactggaagattcatcggagaattgcttataagcgacgcagtgaatcttcagaccttgaggtctatctcctcctatagctggagcaaactaaaacatgagttactcataaatcttcgggacttggagatctacgagttccacatattgaacgaccaaataaaagttcctttggacttagtttccttatcgaaactcaaaaatcttcgtgtcttgaagattgaagtagtgtccttcagcttatttttcgaagaaacagttcgtttcgaactccttgtcaagctaacactgcattgcgacgtaaaaagacttcccagagacatggatttgatctttcccagtcttgagtccctgacacttgtaacaaatctccaagaagacccaatgcctactctgcaaaaactacaacgtttagaaaatctagtattgtattcttgtgtctacccgggagcgaaaatgttcatcaacgcacaaggtttttgtcggctgaggaaacttaaagtgatcataacaagattagatgagttggagattgaagaagaagccatgccatgtttgatgaagctaaaacttgacaat

SEQ ID NO: 170467 - DNA, 676 bp, Arabidopsis thaliana landsberg
gatgcaagccatgtctcatgcagaaagttcatacagacgcttgatggcttcactcactgtcaacttggatggagtgccgagagtcaacagcgagttgaaggaagcacagaaggcgcgacaagatgctgaagacggagactgggtagtagcgagtcgtaaagttgctgagatcatgcgtgaagcagagaaaacaagaaaagaagcggaagagatgaggatgaacgtggatgaactcaggagagaagcagcagcaaaacatatggtaatgggtgaagcagtgaaacagctcgagatagttggaagagcggtggagaaagcgaaaaccgcggagaaaagagctgtggaagacatgaaagtccttaccgagaagaaagagagtctaacacatgatgagcctgacaagaagattagaatatcattgaaagagtacgaagaattgagaggaaagcatgaagagtcagagagaatggtacagtttaaagcgaaaacggttgcggctcagctggaagagatcaatgagagcagaatagaaggggaaagaaagttggaggagaagattaaagagatggaagagttaaaagctgcgattgatggcgcgttgcgaaaagcagagattgcagaggaagcacacagtattgttgatgctgaactaagaaaatggaaaccacaaggcttg

SEQ ID NO: 170468 - DNA, 511 bp, Arabidopsis thaliana landsberg; identical to SEQ ID NO: 72489
  unsure (1)..(511): unsure at all n locations

SEQ ID NO: 170469 - DNA, 1342 bp, Arabidopsis thaliana landsberg; identical to SEQ ID NO: 33964

SEQ ID NO: 170470 - DNA, 919 bp, Arabidopsis thaliana landsberg
ttttaacaatttacgtctcttactcaaacttaaaacctaaatcgccaattttgtcggttcctctcgatcttgatcgttacgtaagcgattcaatgtttgttggattctctggatcaacacaaggaagcactgagattcacagtgtcgattggtggagctttagttcatctttcgaagaatcatcgaaatcaccaccgccgatgcctaattctcctctccgtcgtcaccgtcttcatcaatcacaccatccctatccaccgtccggagaaaaaccgccgatccatcgtcctcttgccgtaacaaactctgtaaaaaatcaccagccgccgtcgccggagtagtaaccgccggagcatttttcttagcattattcgccggagtgataatctgggtttactctaaaaagatcaaatacactcgaaagtctgaatctttagcatcggaaataatgaaatcgccgagagagttcacttacaaggagctgaaattagccaccgactgtttcagctcatcgagagtcatcggaaacggagcattcggcaccgtctacaaaggaatcttacaagattccggcgaaatcatcgcaatcaaaagatgcagccacatttctcaaggaaacacagaattcttatcggaattatctctaatcggaaccctccgtcaccggaatcttctccgtcttcaaggctattgcagagaaaaaggcgaaattctgttaatttatgatctaatgcctaatggatcacttgataaagcactctacgagtctccgactacattaccctggcctcaccggagaaaaatacttcttggagtcgcttctgctttggcttatttgcatcaagagtgcgagaatcagatcattcaccgtgatgttaaaacaagtaacattatgctcgacgcgaattttaatccgaag

SEQ ID NO: 170471 - DNA, 586 bp, Arabidopsis thaliana landsberg
gcgcgccctgtccatcgtgttcagcggggtgcgggccgccaccatcgtcgcggccccggtgggcagctatctgcgggcggtcataggctggcgcctggttttcgtggtcggcgcagcgctggggttggtggccctggcgacgcaagccatgacgctgccgcgcatggcgcctcgcagcgcgacgcacctggggacactgctgaaggtgctgcggcgcccgggcatcggaatgggcgtgctggccgccggcctggtcttcgcggggcatttcgccttcttcacctacctgcgcccgttcctggaggacgtgaccggcgtgggcatcgccggtgtttcggggatcctcctggtcttcggcatcgccaatttcctcggttccgcaataggaagctgggtcatccggtggggcctgtcgcgcacgctcgtcgccatgcccctgatcatgagcgcactgggcatcggcctggtcgggctgggcggttcgcaatggggcacggtgatcatgatcgccgcatgccgagtggtgttcggcatcgtccaaatgagatagtccacctgggtcgcacaggcggtccccgatgaagcg

SEQ ID NO: 170472 - DNA, 507 bp, Arabidopsis thaliana landsberg
acatttttgagttatctgaagcaatggcgtggaacagcgaaagaagcattcgagaatgtatcaatcgtcgccaagtttctctgtttgcttcatgtcaccgatcgatacataatctccacgacccacgtctgtaattgtttgtgacctaacgagactgaatctatttctctttcgtattctccaaggaatctgattttgtttgatttgggttttaggttcacgggccgagcatgcttccgacgcttaatctaaccggcgatgtaatattggcggaacatttatcacaccggtttggtaagattggactcggtgacgttgtattggttcgatctcctagagacccaaaaaggatggtgacaaagcgaatcttgggtttagaaggcgatagactcactttttctgctgacccattggtcggtgatgcttcagtgagcgttttggtatgaacattgaccaatctctctcttaaaaattcagtcttttggtgcatttggtaaaaacaattga

SEQ ID NO: 170473 - DNA, 629 bp, Arabidopsis thaliana landsberg
  unsure (1)..(629): unsure at all n locations
ctcttctctttatgaaagnatggtgcagaagtgagataaagaatctttcaagtcttaagttttcttttagtgatgatcaagaggaagagcattttgtgagatttgttgatcaagtgttgaggcagacaggtaaccgtaagttggatagtttctcgctgacactgaatgacgagatcgatgcaggatttgttactcatttagttgattatccattggacaatggagtagagaagctaaagcttagcatatatgatataaaaggaaatttccagctgagttcaagagtgttttcgcaagccactcttgtaactttgaagttagcaaccaaccgtagtttgatttggataaatggagatgatgtagctgctgctcatcttccttgtttgaagaccttgtggcttgacgacgttttagttgctgatgttaaagtgttcgttagactcttatcaagatgtccaatactagaggagctcgtgatgatagatatgaagtggcataattgggaagcctgttttgtggttagcgcaagtctcagaagattgaaaattgtttggactgattatgttgaaatggatgagtatgatagatgccctcaaagtgtactgtttgacactccgaatgtcttgtat

SEQ ID NO: 170474 - DNA, 326 bp, Arabidopsis thaliana landsberg
  unsure (1)..(326): unsure at all n locations
tgtctgggggcatgatcaagcgcgccgcgctggcccgtgccctggcgctggacccggacatcctgttcctcgacgaacccaccgccggcctggacccgatgggcgccgccgccttcgaccnnnnnnnnnnnnnnnnnnnnnnnnnnnnnnnnnnnnnnnnnnnnnnnnnnnnnnnnnnnnnnnnnnnnnnnnnnnnnnnnnnnnnnnnnnnnnnnnnnnnnnnnnnnnnnnnnnnnnnnnnnnnnnnnnnnnnnnnnnnnnnnnnnnnnnnnnnnnnnnnnnnnnnnnnnnnnnnnnnnnatggcccacgcgggcgcgcagccgag

SEQ ID NO: 170475 - DNA, 202 bp, Arabidopsis thaliana landsberg
tggttaccgactttgatggcagctgtggtcgctaaatcggaagaagcaaaagcaaaaggcatggaagaagtggaagaagggttgttgcaactagaagctgcgtttattgctctaagcaaagggaaatctttttttggcggtgaaacaatcgggttcatagacatttgccttggaagctttttagttctctttttagctatag

SEQ ID NO: 170476 - DNA, 1164 bp, Arabidopsis thaliana landsberg; identical to SEQ ID NO: 62668

SEQ ID NO: 170477 - DNA, 1296 bp, Arabidopsis thaliana landsberg; identical to SEQ ID NO: 7971

SEQ ID NO: 170478 - DNA, 1171 bp, Arabidopsis thaliana landsberg; identical to SEQ ID NO: 27583
  unsure (1)..(1171): unsure at all n locations

SEQ ID NO: 170479 - DNA, 223 bp, Arabidopsis thaliana landsberg
gggcaacaccacgcgcacaacacaaggggaagcaacagaacgccgagcaaaacagcgccgacgaggaaggggcccccagaaaacacggaccaaaacccgagaaccgtcgaggaagcgaagaaacgcagacagagcccgagaacggcgacacgacaccgaacggcgacaagcggcccgaggcaaggagaaaagacaacaccgtcagcaacaggagaagccacag

SEQ ID NO: 170480 - DNA, 994 bp, Arabidopsis thaliana landsberg
catccccacattgatcaatctgatcgaatcatcaagaggaacaggcaaaaagggacgcctctgcgtttacgcgatgcatctgatggagctttctgaacggtcatcagcgatcgcgatggttcacaaagctcgaaacaatggtctcccaatctggaataagatcgagagatcaacggaccagatggtgattgccttcgaggcttaccagcatctacgagcagtagcggttagacccatgactgcaatctctggcctcagcagcatccacgaggacatatgcacaagcgcgcatcagaaacgagtagcgatgatactgcttccgtttcacaagcatcagagaatggacggagcgatggagtcaataggacatgggttccatgaagtgaaccaacgggtcttgcaacgagctccttgctcagtcgggattcttgtggacagaggactcggaggaacctcacaggttgtagccagcgaagtggcttacaaagtcgtgattccattctttggaggcctcgacgaccgagaagctctcgcatacgggatgaaaatggtggaacatccaggaatcacactaactgtttacaaatttgtagctgcgagaggaacattgaagagattcgagaagagtgaacacgacgaaaaggagaaaaaagagaaagagactgacgaagagtttgtgagggagttgatgaatgatccaagaggaaatgagtcattggcttacgaggaaagagtcgttgagagcaaagacgatatcatcgcgacacttaaatcgatgagtaaatgcaatctcttcgtcgttggaagaaatgcagctgttgcatcgttggttaagagtacagactgtccagagttaggaccagttggacgcttgttgtcgtcatcagagttttccaccaccgcgtcggtgctcgtcgttcagggatatgatccagcagcagatacacgaccgctcgttgaggaagatgcagagtacgatcagtcttccagagat

SEQ ID NO: 170481 - DNA, 285 bp, Arabidopsis thaliana landsberg
taagtagtttttttttttttttaagttacaagtcagagataatagtagagtttttttttttaatatgcatgattaatagctttcttttccctataaattatagccactataaaaattcaaaattaccatcatttatagttatttcaatgcttacctatgagtttactatgtgtaacatgaggataagggttatcggaattattctacgtacatgacaaagttttcggtctaccgggaaaataataatgccgataaaaaaaaattaaattgaatttgaaaggcgaa

SEQ ID NO: 170482 - DNA, 324 bp, Arabidopsis thaliana landsberg; identical to SEQ ID NO: 63927

SEQ ID NO: 170483 - DNA, 566 bp, Arabidopsis thaliana landsberg; identical to SEQ ID NO: 59005

SEQ ID NO: 170484 - DNA, 781 bp, Arabidopsis thaliana landsberg; identical to SEQ ID NO: 7509

SEQ ID NO: 170485 - DNA, 329 bp, Arabidopsis thaliana landsberg
cctgccgaacgcggtatacatgctggcgctcaaccccgaacggcaggtgatcggcacatggcgcctgctgccgacgacagggccgacgatgatccgcaatttgtggccgcaattcctgccgccgctgaccatgcccgccgccgccaacgtatgggaagtcagccgctttaccgtcagcccgttcgccacggaccgtgtcatatcgcgccagcaggcgaagcagacggtgggcgagatgttctgcggcctgacggagatacccatgccctgcggcatcgatgagatctttcaaatataaaacgccgcatcgcgcgcttcatcagcatatc

SEQ ID NO: 170486 - DNA, 674 bp, Arabidopsis thaliana landsberg
ctcggagcttcacgttcaaggagttagctgcagttacaagaaacttccggtaagtgaatttgctcggagaaggaggttttggcagagtttataagggacgtttagattcagcacaagtcagatctctctctcttcctcaagcccttttaaagagaaactctgtttttaatgagcttttgatgtaatttgatatgatttgatgaaaacaggtattggctattaagcaattgaatccagatgggctttaagggaaccgagagtttatagtagaagttcttatgcttagcttattgcatcatcccaatctcgttacattgatcggttactgtacttctggtgatcaaagacttcttgtctatgaatacatgccaatgggaagcttagaagatcacctttttggttagtttactttgactccattgttctttcaagggttttgttgtaactatcttatgaatgttcagcttcaaatgttgtactcttttgtatgatttttcagatcttgagtgtaattaagaaccattaagcaggaatactcgaatgaaaatcgcgtgatggtgcagctcgaggaatagagtatgttcactgctcagctaacccgccagtgatttaccgtgatttgaaattcacagacatatagctagataaaaagttcagtccattactctagaatt

SEQ ID NO: 170487 - DNA, 793 bp, Arabidopsis thaliana landsberg
gggagccaagatagcatttccacttctttgcattaagattgttctccaattgtgattttttagattatagaaggaacatgatgaagaaaaatgaggactgttcttgtggcattgcttctcacttgattcttaggctataggttatataaagcttctttcttgtacagtggatcatgtaggattttgactcacaaagtagcactttggatgcactattctgagttattagcatgtaggtctgattaaaggattgaatttgaatctgatgtaattacagcttatcttgccgatattgagtggcttttcatagaatgctatctattatctatcagaattcgtctttgtctcataccttttccctttgattccagtccgaggtatttgcagtggcatttgcactattagcagccggggcggtgatccttacactaaacgtgcttctcctggtaaaccaccactgctctctccttgtatctcgtgcagatgtttttcgtttgatcacatacttacaaccattatgttgtgtcatgaacagggtggacatataatcttcttccaaagcttgagccttctaggttactgtttatttccgctagacgttggagccgtgatctgcatgttgaaagacaatgtgatactgaagatggtggttgtgtctgtaacccttgcctggagctcatgggctgcttacccttttatgagctcagcggttaacccaagaagaaaagcactcgctctataccccgtcttcctcatgtatgtgtcagtcggttttctcatcatagccatcaat

SEQ ID NO: 170488 - DNA, 2016 bp, Arabidopsis thaliana landsberg
  unsure (1)..(2016): unsure at all n locations
atggcgaagaaaggaatgagaacgcgagctcgatctgcttcaacacctccgacttctccgatcgcttcaaaacgagctcaatctccaaatccatgacattctcgagctgttgcagatgatcgaagaannnnnnnnnnnnnnnnnnnnnnnnnnnnnnnnnnnnnnnnnnnntctggacttgaatccttcgacagctctcacagtcctttcttcttacaccccggtgatcatccatgtttatctcttgtttctcacaacctcgatggatctaattacaatagctggagtgttgcgatgacgattgctttggaatcaaaaaacaaatggagtttnnnnnnnnnnnnnnnnnnnnnncctgctgaatcagaacctatacacaaaatctgaaatcgttgcaatagtatggtcaaatattggcttcttaatgtggttaatcaagagatctatgatagtatattgtacttcaatgatgcagctgaagtttggattgatttgataaagagatttcatatcagtaatttgccgagaaagtttcaattggaacaggacatacggtcattacgtcaaggagctttggatttatcaacattttatactaagatgaagaccttatggcagaagttagccagtacaaaatcacagaagagatgcaaatgcaattgtgggaaggttgaagaattgttagaggatactgaaactagcagagttatacagtttcttatgggattgaatgaatcttatgctaatgtttgtggtcagataatcaacaagaagaatagaccaagtctgagtgaaatctacaacatgctagatcaagatcaaagccagcgaagtgtgaactctgcaactaaaggttttgttggtgcatctccatctccctctgcatttcaagtctctgcgtctaatcctgcttcagtttgtgaaggaagtgttaatgcaactaattttcaacagagacctcgtcatgtttgtactcattgtggagctattggtcatcttaaagaaaggtgttatagacttcatggttatccacctggatggacagggaagaagaagtccttttcatcatcaccactccgagtacaaatgtcacatctctggattcttcaagcattactacttcagtatgtaaagcttcagatctccttgggaaagatttgagtatggatcagcttcaagatattatttcttactatagttgacagctttgcacttctagcatcactcctactcttgcaatttcccaagcttctacttctacttctgtgccaaatatcaaaccgatatctgatacatttgtgtcactttatccctctacctattatcacatgcttacttcttccaaatctgaaattggtatatctactagttctttggttatagattcgggagccactcatcatgtgtcaaacaatagagataggttcttagatttcctagcactagtcaatacctttgtcaacttacgtaatggaaacatagtgagcattgttggaataggttctgtgcagcttaatcaaagcattttattacatgatgtgttgtttatacctgaatttcgtttcaatttacttagtgtcagcatgttaacaaaaaaaaaaggattcattgtcaatttcacttccacttcttgtttcatttaggatcttactcatgaattgatgcttgggaagggtagtgaagtgtcgaatctttacattctccaatctgatactaatcatgtcacttttgaaattcaaggtagcattgattcttctattacaccatcatgttagtctgtttctgttgttaatgcaaatttgtggcatactcgtctaggacatccatctcagtctagaattgatatgctttctgatgtacttaaaattcctaaaactaataagaaaaataaaagtcatcattgttacatttgtcctttagctaaacaaaaacatttgccttttaattctaatcaaaataaatgtgcttcagtctttgatttacttcacattgatacttgggatcctttctctgaaa

SEQ ID NO: 170489 - DNA, 317 bp, Arabidopsis thaliana landsberg
atggtgaatctaccggattctttgtacgaggactacagtaaactcaagttgacttcaccctccaacgcttcttcatcctcctcagctcctccgcccaggctcagcgtcgtagctcatccaacggtagagatgattatccagtgggtctgtgatattcataaaccgaagtcatacatgtctgattttgcgctgcataatctcgcctatgtaagtgcaacaaatactcttcgatgctctctatgtttgatatggtttttgtttgatctgtcgtctctatgtttgattcaacatgcttttgatctttgaatcctatgaat

SEQ ID NO: 170490 - DNA, 1314 bp, Arabidopsis thaliana landsberg
gaatctttatgattttcgttttcttttgttcatatccatcattttgagctattctatttcagcttctgcaactatcgcagaagcaaatgctcttctgaaatggaaatccactttcacgaactcatcaaaactgtcttcatgggtccatgatgcaaacaccaatactagcttttcctgcaccagttggtatggtgtttcctgcaactcaagagggagtatcgaaaagttaaaccttactaacaccgctatagaaggtactttccaagatttccccttctcttctctcccaaaccttgcttacgtagatcttagcatgaaccttttatctggaaccatccctccccaattcggaaacctctctaaactcatctactttgacctctctacaaacaacttcaccggagaaatcccactttccttaggaaatctcaagaacttgacggttctttatcttttccagaactatctaactggtgtcattcccgcggaactaggcaacatggaatccatgatcgatttagatttaagtgagaacaaacttaccggttcaattccttcttccttaggaaatctcaagaacttgtcaattctttatcttcaccataattatttaactggtgtcattccctcggaactaggtaacatggaatccatgatcgatttagagttgagtaacaacaaacttaccggttcaattccttcttccttaggaaatctcaagaacttgtcaattctttatcttcaccataattatttaactggtgtcattccctcggaactaggtaacatgattaaattagagttgagtaacaacaaacttaccggttcaattccttcttccttaggaaatctcaagaacttgacgtatctttatcttttcgagaactttttaaccggtgtcattcccacggaactagggaacatggaatccatgatcagtttagatttaagtgagaacaaacttaccggttcaattccttcttccttaggaaatctcaagaacttgtcaattctttatcttcaccataattatttaactggtgtcattccctcggaactaggtaacatggaatccatgatcgatttagagttgagtaacaacgaacttaccggttcaattccttcttccttaggaaatctcaagaacttgacgtatctttatcttttcgataactttttaaccggtgtcattcccacggaactagggaacatggaatccatgatcattttagatttaagtgagaacaaactttcaggttctgttcctgattgctttggtaattttccaaacggaaagtttgtacctccgtagaa

SEQ ID NO: 170491 - DNA, 524 bp, Arabidopsis thaliana landsberg; identical to SEQ ID NO: 76427

SEQ ID NO: 170492 - DNA, 1398 bp, Arabidopsis thaliana landsberg
  unsure (1)..(1398): unsure at all n locations
aaaaaaagagagcttctcttcttatttctttctcacaggaaatggtgtttggttggagaaaagcgttttgcacttccgtttcaagtaatcaagataaacctcaacaacattcatcattacacactactgatcctccaattcccacaccaagattccgatcaaagtttggttttttatccaacccttcaactcctcgtctccgatcacgcggcggaagcggcactggatgccgctcctcagcttccacatcagtcactatcccatctcttccaactagtcccaaactccattgcaggactacgagcaatgctactccaaggactagtaacagctcaagtcccaagtttttctctaacccttcttctcctaaatcatcatcttcttcttcctctcaaggcggcggcggcgtctctctcctccgtgccacgcttcttctcaacaaggtagttacttttgattcaatcaagttcttaatttgaaagacataatctaaagctccgttttgtgtgtgtgtggatgcagagtaatagtagtagatgtgggatttgtttgcagagagtgaattcaaatcaaagcaactcgacggcggcaattttcacggcggagtgttcacattcgtttcacctttcttgcgtcaatggattagaagacaagcgttgtccgttttgctctgccgcatggaatcacgcgccaaagtcgaattatccggctgttaataataacttcggatccgacccgattagacgacccgagatccgagagatcaaaacggggaagtcactgagagtgtacaacgacgatgagccgttagcttattcgccggtttctcttgctcagatcaacactatacatgaatcagacgaaaacgacgacgttgaagatgacgatgacttccccggattcttccgagattcttcgattacgtctgatatggttccttcaatctcagggaatctggaggttaagttgctgccggaatctgccgttgtggaaaccgggaaaaagaaggagacacacgtcgtcatcatgaaactaaaagcgtctccgtcgccgtcgtccatcaccgatgcgattaaggcgcgaagaccatcgatagatctggtaacggttctcgatttaagcaacggcggtgctaatttgcaaacggttaaacacgcgatgagatcggtgatctctcttctccgagaaatggatcgtttatcgatcgtcgttttctcgacggggtcaaannnnnnnnnnnnnnnnnnnnnnnnnnnggcgaaaggaagacgatcggcgcggcgaatggtcgacgcactcggcggaatggaaaccaccggcggagttggaatgagcgttaacgacgcgttgaccaaagcggttaaagtcgttgaagatcggcgggaaaagaatccgtca

SEQ ID NO: 170493 - DNA, 457 bp, Arabidopsis thaliana landsberg
gcagcaaagctccttcaggccgccagctccaaggggcagaggtgtcaggggcttcggaggaagatatgaggatcagcctaggagaaactattgcttattctgtggagaggacaaaggccacactacaagaacctgccagatcaccatcctgaagcaaaaagagattgccgaagcagaagctcggcagaatcagccgaagcaagtcctacatactgcttcgtgccattctccttacataccagaatatgtgggcaaccaacctgcagcttctgttgcttcggcaagccattcataggcttcttggcctcagctcccaccgccaccactactgcaacctacttactcccgaagccagcagccagaagggcgccacgactcctaacaacaacatgaattcagggaggaattcgaagctcgtacattcaatagtactataccagaatcgaagcacatatac

SEQ ID NO: 170494 - DNA, 720 bp, Arabidopsis thaliana landsberg
acgcgtttcttgttttcttcttttctgtgtttcacgtgtatgcctaggcaaacaaggagcacaaaacagaaagagcttatcaacttgtctgttctggactggggaaaacttgaacacaccaaccgaaaaactcataaattagcaatggctgacagagtcatcagagctgatgcagaaggagttttgagagatgaggatgggcaagcctatgaggctggtcagagattggatgatcatggactcatcctacctgaggacgccaatgaggatcaggcgcacctcaatgcgcagttagctgctagagacgcagcagggctcagtgtcgagcgacaccaactaggtgtcgatcgacaccatcgagagcagcacgccgatgcaatcggtgacaccaataccaaattcttgcagctattccttcaactgcggaaccacgtcgtactcttggggatttcaacaggccagacctgttctatgctaatcgatcagcgattgtacccctaccattccagagaaacgactatgagctgaagcctgactactttgctttagttggcaagcatcctttccatggcttatctcattagcagccaatatattatatcgagtgatttgaggatcttgttctgagcatcaaggctaatggagtctcagaggactacctactgtgcaagctttttccttattcacttgctggggaagcagcttcttggctgaagcaac

SEQ ID NO: 170495 - DNA, 421 bp, Arabidopsis thaliana landsberg
gacatcgtggtcaacccgcttcacggcaacggcgagcaagtccgtgttccgcgtgccccccgacggcagcaatcttggcgcgctgaccgacctgttcgaccatgtttggcccgagccgttcatggtacagcctttccttcccgcagtcgcagagggaggcaagcgcatcgtcctggtcgatggagtgttcgccggcgcgatcacccgcaagtccggggcgggcgagttccgctcgaacctcgcggtcgacgtctataccaaggcgatgacgctgcccgcgcgcgaggaggaaatttgcgccccgatgggaccgatgctcaaggagaagggcctcctgttggacggccccgacgccctcggcggcaaatggctggcggagaacaaaaacacctcgcccaccgccattgtccccttcccccgt

SEQ ID NO: 170496 - DNA, 552 bp, Arabidopsis thaliana landsberg
gttgaagacattcctcttcattctcctacatgtgatgagatgtgcatcaatggtattctgtattatggagcttttattgacacaaattctaactgaacctgcaatcatgagttttgatgttaggtctgaaaagtttcttcttatcaagggactcgtcaatgccggtgttaactttcttacttcttgagagctaagaagatcttatgaggggcagctagctgtacttttttttgaaaattgagttatttgtatgtttgccttgtgggttttagaagatgttgtgaatgaggaatggtcatacatgagttttgatttctctagtttagttgggttgacaacagacttggaacttcaactgtttagtgcagccaacgcatgaaaagttgtttacgcaccattttgtgtgtatgcattgacatatcatgttgtttattatgatccaaaaaatgaatttacttttgaaaatttgagatagaaagaattatagaaaaacttgttcctaaaaactctcaacctagattgaataagtattattttccacttttagcaaaa

SEQ ID NO: 170497 - DNA, 644 bp, Arabidopsis thaliana landsberg; identical to SEQ ID NO: 12203

SEQ ID NO: 170498 - DNA, 478 bp, Arabidopsis thaliana landsberg
tcgctgcagtcatggtaaccagctcattacatgcttttgcgcaacctggccagaccttggatgtgtccgtatcttccatgggtaacgccaagagtctgcgtggtggcaccttgctcatgacgcttttaataggggcagatggtcatatttatcccatggcacagggcaacctggtcgttggcggtgtgggtgctgcggccatcggtagccagacccagatcaatcatttgagtgtagaccggatttccgaaggtgcgtccgttgagcgtgccctaccgaataccctggtacatcaggacagtgtcacactcgcattgaaagaaagcgacttctccaccgccaataatgtggtggaggccattaacaaaaagtttggcccgatgaccgcgcaagctgagagtggcagtgtgataacaggaacgtccaccggaaagcatgagccgcgtctcgttcctggccaatcaggagacgattaatg

SEQ ID NO: 170499 - DNA, 486 bp, Arabidopsis thaliana landsberg; identical to SEQ ID NO: 17961

SEQ ID NO: 170500 - DNA, 1023 bp, Arabidopsis thaliana landsberg
tgctttgaatatgagtaacactcggtttcaatgtactcacgttgcgggtctatggataaggcttaccaagtattttatggaatgcgtgaaagaaacgtagtctcgtggacggctctgatctcgggtttagctatgaatgggtttggaaaagaagccattgaagctttcaacgaaatgttgaagtttggaatctctccagaggaacagacactcactggtttattgtctgcctgtagccattccgggctggtcgctgaaggaatgatgtttttcgatagaatgaggagtggtgaatttaagataaagccaaatttacatcactatggctgcgttgttgacctcttgggacgtgctcgtctacttgataaagcttacagtctcattaagtcaatggagatgaaaccggactcaaccatttggcgtacgcttctcggggcttgtagagtccatggagatgtggaacttggggaacgtgtgatctctcatctcatcgaactcaaagccgaagaagctggagattacgttctgttactcaacacatactccacggttgggaaatgggagaaagtgactgaattgcgttctttaatgaaggagaaaagaatccatactaaacctggatgcagcgcgatcgagctacaaggaaccgttcatgagtttatagtagacgatgtttcgcatccgcggaaggaagaaatctataaaatgctggcggaaatcaatcagcagctgaagattgcggggtatgtggcggaaattacatcggaactgcacaatcttgagtcagaagaagaaaagggatacgcgttaagataccatagcgagaagctagctatagcctttgggattctggtgactccaccaggaacaaccattagagtgaccaagaatctcagaacttgtgttgattgtcataattttgcaaagtttgtatctgatgtttatgatcgtatcgtgatcgttagagaccgttccagatttcatcattttaaaggcggctcttgctcttgtaatgacttttgg

SEQ ID NO: 170501 - DNA, 488 bp, Arabidopsis thaliana landsberg; identical to SEQ ID NO: 64437

SEQ ID NO: 170502 - DNA, 206 bp, Arabidopsis thaliana landsberg
gtatttcagttttgcctcagaggatcatggaataatgggtccgccacagcttcaaacatgctttacagtccgtaatctatcagggtcagcaccacccaaggcaaggttgttggattgagtagacagtggagagcttgcgcaaggtttgggcattcccgccagtgcatgtttgtcccttcaacatcccttcattcccttctttgtac

SEQ ID NO: 170503 - DNA, 589 bp, Arabidopsis thaliana landsberg
aggatgatctccgatctgccagaggatttgatagaagagatactatatagggttccggtagcatctctgagaagcttacgagctacttgcaaacggtggtaccatcaagctttattcaaagatccgagattcatcaaaaaatacaatgataattaaaacagcaagacagtatcatgctctcatgctggttgatcatagagtatgtccaatgagctcctttctctgctagacttgagaaattcatatccatatctaaagatgggcatggcataatatctccccattctaatcaaccagtcgatttatctgaagcctttctctgcgatggcatattgctatgcccttttaagaagaacatgatgattgtggtttggaacccgttttatgggcaaacaagatggatacagctgcaaaataaagccaacatcggagcctttgctctcggatgcgacaagaatcaattgtgtcgtagctacaaatcctcaggtttgtgtgtatacacgaccccccggctcgggaaagaatggccatgtatgagttaaaaaatacttcatggaggaatcttgatgtgctcattcccgatcaggcc

SEQ ID NO: 170504 - DNA, 388 bp, Arabidopsis thaliana landsberg
atgcctcctccggcaatgcttgcgtttgacgatggtttagcccgtaaatctaacgataatgagtggcaaggtttcagagtttttccaggagaaaatactaaccctaaccctaatataaatttcttggttaagaaggcaattctgcagaacgagaaatcaatcagtcctcttttctcccgttcgtcggcaacagacgatagcttcagaattgtgttgccgccggcgttgcctcctcctagagactccaccgttccgcttcctatgcttccggagccgataagagcccggaagaagctttgccaccaagaatcagtcatatttatgaacaaatcgcgcttcgcagagaaaaccccttacaaggacgaacatttcacatgtgacgccttct

SEQ ID NO: 170505 - DNA, 540 bp, Arabidopsis thaliana landsberg; identical to SEQ ID NO: 80344
  unsure (1)..(540): unsure at all n locations

SEQ ID NO: 170506 - DNA, 269 bp, Arabidopsis thaliana landsberg
tccggcgggacaaatcacgggtttacgtttttggcgagaaaattactttttacgtttttgacgggaaaatcacgggtttacgtttttcgcgagaaaaccacaggttttggtttttggcgagaaaattacgggtttacgtttttggcgggaaaatcaccggtttacgtttttggcgggaaaatcacgggtttatgttttttggtggaaaattacgagtttactttttctcaatttcatcgcttgtacatttaaaaattttggaaaaatat

SEQ ID NO: 170507 - DNA, 1626 bp, Arabidopsis thaliana landsberg
  unsure (1)..(1626): unsure at all n locations
tgcttgcatcggggtgtttcgctctgtcttagtacgttcaacaagcttctacgtgttctttgcaagaaagcacatgttaaggagtgtcacaactacttgataaggttatcaaaacaggtgttttacggaatctgtttacttataatttattcattcaagggctttgtcagagaggtcagcttcatggtgcggttcgtatggtaggttgtctcatagaacagggacccaaacctgatgtcatcacgtataacaatcttatatatggcttatgtaagaattccaagtttcaggaggcagaggtttacttggggaaaatggtgaatgaagggcttgagcctgatagttatacctataacacactaatagctggatattgcaaaggtgggatggtacaacttgcagaaaggattgtaggtgatgctgttttcaatggatttgtgcctgatcagttcacatatcgctccttaattgacgggttgtgtcatgaaggtgaaacaaaccgtgctttagctttatttaatgaggccttagggaaagggataaagcctaacgttattctttacaacacactgatcaagggattgtctaaccagggtatgattctagaggctgctcagttggcgaatgaaatgtctgaaaagggtttgattcctgaggtacagacttttaacatactcgtaaatggactatgcaagatgggatgtgtttctgatgctgatggtcttgttaaagtcatgatctccaaagggtactttcctgacatatttactttcaacattttgatgcatggttattctacacagttgaaaatggaaaacgcacttgagatattagatgctatgttggacaacatagttgatcctgacgtgctcacttacaactttttgtataaaaggtctctgaaaaacttcaaagtttgaagatgtgatggaaacatataaaactatggtggagaaaggttgtgcccctaacttattaacgtttaatatacttctggagagtctatggggataccgtcaactatataaaacctttgggttattggaggaaatgaaaaacaagagtgtgaactcctaatgctgttccatttggaacgtagattgacaggttctgcataaacggagacttggatggagcatacacgctgctccggaaaatggaagaagcttaataggtttcaagatcaacgccaacattataatatcatcattcatgctttcactgagaagctaaatgttactatgngcggaaaagcttttccaagagatggttgatcgttgtcttggtcctgatggatacacataccggcttatggttgatggtttttgcaaaacgggaaatgtcaatttggggtacaagtttctactggagatgatggaaaatgggtttattccatctctcacaacgcttggacgtgtaataaactgtctttgtgtggaggatagagtttatgaggctgccggtattatccatcggatggtccagaaaggactggtccctgaagctgtgaacaccatttatgatgttgacaaaaaggaggtggctgctcctaagcttgtcttggaggatttgttgaagaagagctgtatcacgtattatgcttacgaacttctttttgatggcctt

SEQ ID NO: 170508 - DNA, 520 bp, Arabidopsis thaliana landsberg
  unsure (1)..(520): unsure at all n locations
ctatttcgggtatgataaagtgctgcccatgaataccggcgtggaaggtggcgaaaccgccatcaaactggccaggcgctgggcctataccaggaaaggcgttcctgaaaaccaggcccggatcgtttttgcggaaggcaatttctgggggcgcacgctggctgccatctcctcttccaccgacccctccagctacagcggtttcgggccctttatgcccggttttgatatagtgccttacaatgaccttaccgcactggagaaagcgctgcaaaataaccatgtggctgcttttatggtagaacccatacagggcgaagccggtgtagtggttccggatgatggctacctgcagggagtacgcaggctctgctcgcagtatcatgttctgttcatcgccgnnnnnnnnnnnnnnnnnnnngcaagaacaggcaaaatgctggcctgtgatcatgaaggtgtgcgcccggacatactcatactcggcaaagcactcagcggcggcatgatcccggtatct

SEQ ID NO: 170509 - DNA, 763 bp, Arabidopsis thaliana landsberg
atgaatattctcgtatttactatggtcggtgagtggagatgcaaataagataaatggaaatttgaaccaaaggaagacatgtttggtcgctgtgtacgtgttaaggaaaacatgacgtacacagaatttgtacgtacactaagcgaggctttcagtttgaaatccatagagatcaatcccataattagttactggatgccgggagagatgttagtgatgatagatactaaacgccctcctgtctacattgacagtcaagtggggttggatacgttctttttaattcgtggtcggtatccttctctcaacttgtttgtctctttcattacaaccgtcaagacactcgagaataatgtctctaggactcatggtgacgatgctgaaagtgaccgtgtatgtgatagtgtttcaaatgttgatgaaaataatgaggccgtagatgagcaagacgacgatgaagacgataaaacaaatgaggatgaagaggagggggacaacaaagatggtggtgggtatgatgattatcagggtgacgatggatctatagggggaagtaccctcgatcctactattgatggtagtgaaagtagtggcgaagattatgattacaacaagtggaacgatgtaattgtagaagaatatggaatagggaatgttgaggagaacgtcattctcacaccaggggaattcagtcgtctgttggcagtacgtacacaagtcagcgtgtacctggcggagataacatttcccactcgggtgaccg

SEQ ID NO: 170510 - DNA, 475 bp, Arabidopsis thaliana landsberg
  unsure (1)..(475): unsure at all n locations
tgtgggagcacgacgaccagttcaaggattacntgcgccgcacccgctgcatggcggtggacatggaaaccgccaccatcttcgccgccggctttgccaacggcattccatgcggcgcgctgctgctggtctccgaccagccgatgatccccgaaggcgtgaagaccgaggccagcgaccgcagcgtgaccacgcagttcgtcgaatcgcacatccgcatcggcatcgaggcgctgaagctggtgcgccgcaacggacgcagcgtgaagcatctgcgcttcgaggaagatatcgagggcgaatgagccgggtatccgccggcctttcgtgacgggtgaagccgggccgtgttccggacgccgcaatggcgtctgatgcgtcgaagacgcaggttttcgcggaagtgtgacaaaacgagacttgtatcgttgaaattttgttacgggatggcctagtctcgaattagatcgattga

SEQ ID NO: 170511 - DNA, 960 bp, Arabidopsis thaliana landsberg; identical to SEQ ID NO: 31590
  unsure (1)..(960): unsure at all n locations

SEQ ID NO: 170512 - DNA, 2370 bp, Arabidopsis thaliana landsberg
caccttcacagcttgtgaggagcagaggaacgcaacgagctgttcaagcagctaagaaacagaatcgagatggttctgagggagaaaagtgaagatggaatcagtgaagaagacgtgaaagaagcgataaagagagtgctctgtttggacaaagcttacccacttcctctagttggcaccatgctcgagaagttccctcaagaattcaagccagcgacttggtggcctgaaacaaaacccgaacccactcattccagaacggaagctaacgggtggaactcggagctagagatggagatgagagaggtggttgaggtaattaagagtagagatgcagaggagtacgagaggttaggtaacgtggccttgaagttaaatcgggttttggcaatctctggaccggtgttaaccggaattgctgctgtaagttccggttttataggtcacggttcaggtttagctggagtagtagcaacaacgtgtgcttcattggctgccgtagtgaacacgttagagcacggaggtcaagtagggatggtggttgagatgtatagaaactccgccggattcttctctcttatggaagatacgatcaaaacagagagacgagagaatggacaagttttcgagaccaaagtagcgttgaaacttgggagaagcttgtctgaattgagagatctggccagaagatctagcttgtctaggttacaaggatcagccatagatgaatgcgcaagcaagctcttttaattagtctacatacaaattgatattcattaattatttttgtgtatagagaaaatgatagatgatttttgagtttctatacaaacctgaatataactatgcaaattagttttggttacttatcttttaatatattacgcttttactctccctgtgatataacctagtgcagatcatacaaagctaaaacaaaagttttgtatatacacggttaatatttagacatgtaagttatcactacaagaaaacatgacatttgtgagggacaaaaccgtagctaatccctcgcaaaacgctattagcgaggaaactgcgacgaacgacacttcctcgcaaatcgcgcgtcgcaaattagaaacagtcgtaattccctcgcaaatttgcgacggaataaatgtcttgctaaacgctcgcaatttgcaagggatataaaacgtcgcaaattcgtcgcaaatgagctgtcttgctaattcctcgcaaagtttgcgagggatttgcaattaatatttctgtagcaaacctgcgagggagttgcgagttgcagcattcgtagtagcacatccctcgcaaaatttgcgagggatttgcaattaatatttctgtagcaaacctgcgagggagttgcgagttgcagagttcgtagtagcaaatacctcgcaagttttgcgatggacttgctaggtttttgcaacgttcttaattattagataaacgtgattactgttctgtttagcttaattatattcttaattattttcttaggttaatctaatattaatttttggtattaacactgaattagaaacttaattgatagcctaactcatattattaatactgaaactttggtgttcaaataaaattagaaagctaacaaaataaatatacacaatgttgcaagttttagggtttagatgaaacaaaataaaatagagggatgcaagtttttttagaaagcaagagagggagaggatccagtgttgtttgcctcagtctcaactgcctcctcagccctaactgtttcagcttcaacagcttcagttgttgtgatcccagcttcaggcatctcaggtggctggttggagccttcaggctctgtcctagaagatccagctcgaaagatggcagcaaagtctggatctttctccgcaaggtagtcgaagtacacatggaagctactaatcttctctgcttggtttgcaatgagagcttcagcggcagccagcttttgagagagttcacccggatcatctcgaggaactgaaggaccgatgtgagctgatgcggcttctagctgcaatgaaccagccccatatatcctccctttcttctttggagccacctaagagaaactcaaaaccaaaaacaaaaacaagtcactattacataatgtaaccaaaactgagacaaacaaatcaagacaataacaaatccaattacataatgaaaccatcgacaaatacagctaagtaacaatgccaagacaaatacaactacaacaaacaaaaaccaattcatgacaaaacattgaacacaatgccaagttacaatgcattctaattgcgttgactacacacacaaacaaaggcagaaaaaaactgacaaacacaaagccaagtcgct

SEQ ID NO: 170513 - DNA, 785 bp, Arabidopsis thaliana landsberg
taacctgttctatgctaatcgatcagcgatcgtacccccacccttccagaggaacgattatgagctgaagcctggctacttcgctttagttagccagcatccttgacatggcttatctcatgagcagccaatggaccatatcgagcgctttaaggaccttgttctgagcatcaaagctaatggagtctcagcggactagctactttgcaagctcttcccttattcacttgctggggaagctgcttcttggctgaaacaactcaaagcaggtttcctcaagacttggagaagcatcaagagagctttcttgaacaatttatatgatgttgttatgtctgaggagctgagaaacaagctgtctaccttcacacaaggtccagctgaggttttcaaagccgcttgggttcgtttcaagaagtatcagcggaactgccaacatcatggttttagtgaggtacaacttcttggtacctttttcagaggagttgattggagatacccgatggctctagatgcaacgagcaatgataacttcaatacacgttatctagctgatgctactactctgatagagaaacttgctcgtagcaacaataccaagaatgccaattttgagaggaagaagattgttggagctgtttcagacaaccaaatggcagaggttaatgccaacttatattcagttcataacttgcttacaggaaagaagcatgtccactttgtagttgaggatgagactattgagcctaaaactgagtctgaagagggaatcttttacatagatg

SEQ ID NO: 170514 - DNA, 327 bp, Arabidopsis thaliana landsberg
  unsure (1)..(327): unsure at all n locations
gggccagagatattttttgaagaccagaatctgaacatggcgaggctagcctagcaagctgcccgtctcgnnnnnnnnnnnnnnnnnnnnnnnnnnacagttgcaagcgctgccaccacctttgaaggcacctgctgagagaggacaaatgtttttgtggcttacaaaagcttggccgcatttgtacactcaaactgtaggaactgggcgtcggttgcactgaaggaagattggaggaacaactacatgctcgcgtcgtttgttagggatttcagatcttaacatgcatgagcgctatatgatgtatgatctggtgtgctcatatgt

SEQ ID NO: 170515 - DNA, 391 bp, Arabidopsis thaliana landsberg
tctccctcatctaatcccgcaccgtggcgccgcgaagttagccgcgcccgtaccttcggctgcgtcagcgactttgccaagctgtgggaagccgggttcgcgcggggagcgtcgttcgagaactcggtggtgttcgacgagacccatttgctgaatgccgaagggttgcgctacgccgactaatgcgcccgccacaaggtgctcgacgtgatcggcgatctggcgctggccgggttaccgctggttgcctcgttccgctcggtacgcggtggccacaagctcaatcatgcggtgctgaccgcgctgctggctgaccgcagcgcatggcgattggtcgaagcagagcgcgcgcgtcgttccagtgtcgcggatgccgtggacggcatggtcg

SEQ ID NO: 170516 - DNA, 1782 bp, Arabidopsis thaliana landsberg
atattaggtatccaccaagaaagaggtataagcattttttgagaatctcctgaaaagatccatggacccaagggacaaggttttgcctttgtacaagatcgtctaaaaaaccgaataaatacttggtcgtcaaaattactctctaagggagctaaagaggttcttatcaaatcagtggcacaagcctttccaatgtatgtaatgtcgagtttccttttaccaaaaaaacattcgttccaaactgaacagtgcactttctaacttctaatggagcaacaaccaagagagtagaggtctccgttgggttgtgtgggacaaattctgctttccacaatctaaaggaggactgggcttcagatggttagaagaacttaatctagccctccttgccaaaaagttgtggaaactaatgaaatatccaaactctcttgtggtgcgagtcctaagaggaatgtacttctgttactcgagcccccttctcgtcaagccctcatatttaccctcctatggttggcgtaataagcttgcggctagaccactccttctctcaggcttgaggaaaaacattggctcagggttcgacaccagagtttggagtgatccatggattccaaccatactagagtgcccaatgacaagtaagttgacatcaatagattctaacctatacgttatcgctgatagacccgatcattgaggcatgaaagctggaataacttcaagaattgatagctacattagaaataccccacattctcagactacatataagtcatgcctttttgagagacttgtacatctgcaaatctggcaattacactttcagatccggcttcagggcaacaaaagctttcctttgaggagattttgcctccctttttagtcacccaatgttaaggcactacatgaacattcatggatgatgcaatcctttagaaaaattaaacactttgtctggcaatctgccacgagatgtctagctacctgccaacaactttttgatagccacttacgaacaaataaggtgtgccctcactgtgaatgtgtgatgagaccataaaccatgtgctttttaaatgtcctcaagcctatcaggtttggtctctctcctgaatacctccaatccaagatgtcttccttgcaccctcgatttacacaaatttagattacctcttgtggagaacgaaagaactcggcggaagcgaagaaagtataaaggactttccttggattatatggtttatttgaaaagcatgcaattccaaagtctttggtaacatagaagtccaccatgcatacaccattcagcttgcaagctaagaggcgaaatctttccgagtggcaagaacccgggaaaagattattgattcgctaccacctatccaagacttagtcgcttgttcccctatcagagattgcttgacatgccaggtacatgggtcatgggtaaacacaacctccttatgtggtttaggatggattgttggttttgatcatcatttctctaatcttggcttaaagtgcattcgccattgtttatctctccttcacacagagtttgaagctcttctcttggcaatgtgttccctcatgtcatcatccattccaatgtttcttttgagatagattgcaaggagcttattcgggtcttggacacccccgatgagtggcccacattttcttcttaggagtcaccagatctgagtatgttaaaacttggatttcttcatttatatatctatcttttgttccacgttaaacaatgtccgtcatggaggtttt

SEQ ID NO: 170517 - DNA, 411 bp, Arabidopsis thaliana landsberg
atgaatgaacggaaaattaatgacgaaccgaagtccatgctcttactccagcgaggtgaggagttcggtaaagtcaacaacggttcgaaagtgaacaatgggccgagcttcggaaagcgcatgaaaatgataaaagagttcaaataaagacgttaaagcattgaatagaaaatcaaatagacacatttaaaagtattaattgtattcaatagccaataaatgtgaatcatattgtataaatatgaggttgaaaagcacctaaagagagggggcatattttgtatcaagagctaatactatactcttttgttatccacatttacttacatttttaatactatttgctatttgaatttatcttgtattttgatcttgagagttttatcctacaaataattaaatacttaagtg

SEQ ID NO: 170518 - DNA, 3454 bp, Arabidopsis thaliana landsberg
atggagtggattcgaggagaaactatcggatacggaactttttctacagtaagtctagcgacgcggtctaataacgattccggcgagtttcctccgttaatggctgtgaaatctgcagactcatacggcgctgcttctctggcaaacgagaaatcagttctagataatctcggagacgattgcaacgagatcgtacggtgtttcggcgaggatcggacggtcgaaaacggtgaagagatgcataatttgttcttggaatacgcttctagaggaagcttagagagttatcttaagaaattagccggtgaaggtgtaccggaatccaccgtgcgtcgccacacaggatcggtgcttagaggtgtacgacacatccacgctaacggattcgctcactgtgatttaaaactcgggaatattctgttgttcggtgacggcgccgttaagattgcggattttggattggcgaagagaattggggatttaacggcgttaaattacggtgtgcagattagaggtacgccgttgtacatggcgccggaatctgttaacgataacgagtacggatcagaaggtgacgtgtgggctttaggatgcgtagtagttgagatgtttagtggtaaaacggcatggagtttaaaagaagggtcgaacttcatgtcgttgttgttacgcatcggtgttggtgacgaggttccgatgattcccgaggagttgtcggaacaaggaagagattttttgtcaaagtgtttcgttaaagatcccaaaaagagatggacggctgagatgcttctaaaccatccatttgtaaccgtcgatgttgatcacgacgttttagtcaaagaagaagatttcgttgttaatatgaaaacagaggacgtctcgacatcgccgagatgcccattcgaatttcccgattgggtttcggtttcttccggttcacaaacgatcgattcgccggatgagagagttgctagtttggtgactgatatgatccctgattggtctgttaccaatagctgggtcaccgtacggtgacgatagtgattaaaaaacaggggacaaaaacagagttgcagagaaagactagagcttttttttaattcctagtcagatccaacaattctaatttaattcgttgtataaatatttcttattagaaattgattatttatttatatgtaaataccagttttgtattcatgatctcaaatcttgattctctttagtactatatggaaattgtattcatgactcatgagcccattatctcgattatctttctccatgaatgtgaataaagatcgtatattcagacataatcacacggaataagagaataagtttaaccaaagaagaaaaaaaacaaatcttttgcaaagtaaagatcaagactcttggacaaggctcgtggccaccacagaacagctcacttcaaactcagcttcatcttcatcaacccaactcaccaatccataaaccacgttctcttgtaaccctcttggactctccaatctcacagtgtagcttagcttctcgtttttctcgctgaacattagtttctttggctctacgacgacgtttagacccttcaagcctctcactctcacgatgtagcttctctttgcttctcccacgtttgtcaatgtcctcttaaagatcttgggactgctttgatcagacgtgaagtaggcaatgattgaagggtaattgagatatggagatggctttttacaagcgtcggagatattcgatctcgtgatgatattgatcaattttcttgattgttttgcctcgtgacaaaggaagtttatgaaatcttgtggagttgtatcatagattaggccagggtttaagactttgttcgtactcacatgccctgctccaacggctaatgggttgtctaaagtcaaagccgttgtcataattgcagattttatagccgatggactccaatttggatggacttgctttataagcgcagcgactccagctacatgaggtgcagccattgatgtcccggttaagagattgaatccgctgaataacggtagtgctcgagttccggtgatttgctcaaccgacggccaagcagagagtataagtgtcccaggagctagaatgtctggtttcaggatttgagggaagcttgtgaatggaccccttgagctgtatgtgccaacttctggcgctggttttgtcccgattaccgttttacgaaactccagctttgcggtcgcgttgtttttgttgcttgatgcgtagctttcaatagtttctcggtgttttgagccgatgaatgctactggaaactggaattttattgtgtcttgctcctcaagtaacttatctgttattaaaactactgctgcagctccggtggatctgatttgatgaagtttgctaccgatgtttatgttttcgttacagacaacaattctgtttgcgagagtcttgttttcaacgctgccagattcgatgtaagttactggaaactgaaccgaagggaactctccaggaaacagagatggaaaactgaaactaactctgtttccaaacgttagggttccttgaaattgcctaccaattgttcccgctccaaccgtcataatccacggcgctccgttaatcaaactccagtaatatggcccgtcgttaccgccggaagtaaccacgaaaacgcctttttgaatcgctgcaaaagatgcgactgcgattggatcattttctagaccgaaaccatcattgtcgtcatcatcctcaaaactcaatcctagcgacagagatatcacatggactccatctcgaatcgcttgatcaatcgctgcgattacatctgatgagtaaatcccttcttcccacgcggctttgtagattgctagatgcgcgtgtggtgcgattcctgaggcggttccttgggcgtaagagaagtaagacgcgttcttaacatgattcccagctgcaatggctgcaacatgagtgccgtgtccgattgtatcgtacggtgaagagtattggccaatcttggtttctctcaaatcagggttgttggcgaacaaacccttgttgaataccttagcaccgattagtttcttgttgcacaaggaagaagaattgaattcacatgctcctttccatttagacggaaccgaaccaaccccatcgtcgtgaaagctgggactatcgggccaaatcccggtatctataataccgattactataccagctccataattcgagaccggccatgtaccggatgtcgaatttaaagcgataaactttggagagaaagtggtatgaagcttaaccggtaaatctttggtgaacgagacatacccgggtttgtgtttaagacgttggagctcagagttggtgagaaccgcgctaaacccgtgaaccgaatcggtataagcgtagataatctttggatttctattggttataactgaagtaagag

SEQ ID NO: 170519 - DNA, 497 bp, Arabidopsis thaliana landsberg; identical to SEQ ID NO: 12501
  unsure (1)..(497): unsure at all n locations

SEQ ID NO: 170520 - DNA, 801 bp, Arabidopsis thaliana landsberg
gcaccacgcttcatatttattgtttacttggcctagatccatattataaggctggtcaaacttaggaaattgatgaggttgagattattttgcatttgttgaatgagatttcatcctacacgaaaaatatgcatttgcttctcgtaaaaagttccatcaattgcatccacatccacttaaacaaaaagctgcaaatgtggaaaacgtattcacctgtcatgcttgtaatcgctgaagtactagtttcagctatgagtctaccaacgaggattgttacaacaaggataccatctactctctaaatatagtgcatgcctcgatttctgagccattaattatcaaggtcattaacaacctttatttctagctttagatcccaaagagaggccgatctgccacatttgcaagttaatgggcgttaataaggttctaaactccattgaatgcgactttattatatgttgtctagtaaagtataaacatgatgaacattacctcatattttatcatggagatgaggcaaatgacgcaaattagtgtgagttatgcgtgggaaaattagcaattagaagaaaagaagggttctatataaatgttgcatcacacttcaaataaattgtttacttggcccatatccgtatttgaagcctgttctaactatctcattggctggtggtgaactgctttttcaacgcaacaattctgcatctcgtccaatttgctgtgaatgcaatatccgttgtccgtatccaatatatttggaattcagaaacgaaatggtttcttcgtttcgatgtgccg

SEQ ID NO: 170521 - DNA, 2209 bp, Arabidopsis thaliana landsberg
catcttatgcagctctacaaggagagtaacccctcctctaaggctgcctgtccaaaatcgaagaaacgtgcaaatccaaagattttcttaattcctgcagcccagaaaaataaagtggattttcataatccattagccccgcttccttaaggatagtaagctggaactgttgtgggttggggaatcccatgacagtccagcggttaaaagaaattcgtaaatcgatatttcccgacattctattcctcatggaaaccaagaatacctctgaaaatgtcctgcaaacgcttcagtggctagacaataactcaaatcatttggttgcacccctttctcctgctgctggtggtttagctcttttctggaggtcaagtttacaagtggaaattatcagctcctatattcactttatggacacaaaaataactgctaagggtaaatcactttatggagagccagagagatcagaaagacttcaggtgtggtctctccttcaggaagtctactccactagatctggtccttggttgattaccggcgtcttcaatgacatcatttgcagagaggagaaatctggaggaccagacagaactgaaggttctttcactgatttaaggtcctttatgtcttcctacgacttgtttgatctaaaacactttggtaacttcctatcttggcggggtaggcgccacactcatatggtacgatgtcggcttgacagagttatggctaatagcgattggattattgcttatccctcagaccgtagtgaatacctaagatttgagggttcagatcatcgtccacttgtcacttcactagaacccttacaaaagaaaagaaagacccttttcagatatgataggaacttaaaagataatccagaaatcagagagctggtcactaatacctggcgccataacccttcagtctctgtggatcatcgtattcaactatgtagagatgccattatctcatggagtaaaacccaccacttgaatagccagaaagaaattcgctccctaagagatgagctggaaacatcactgagtagtaattctgcttcccaaaccaatatcgatgacctgaaccagagactacttattgcttatcagacataagaggcctattggaagcaacacagcagacagttgtggctgaaactgggggacagaaattctggatattttcatgctgcaacaaaaggacgccgtgctttaaacaacatatctgttattgaattctcttctggtacaagtgtctatgaggaacatgaaattttaaagaccatctcagattattttcaagatatttttacctctaaggaaggagatagatcctccgtggcaaatgaggctctttcaccgtgtatatcagttgatatgaatgctcaacttgttagaatgcctaatgtctctgagattaaacaagcttgcttctctatccatgctgataaagatccgggtccagatggattttcggctagtttctgtcaatccaactggaactctgtaggtgatgagattattgctgaaatccaaaccttcttcataaccggcattctacttgcaagaataaaccatacacatgtgagattaatcccaaaagttccctgtccctagaaagtttctgattataggctaatagcacattgttctgtctattacaggataatagctaaactcctggctaaaagactccaaccaattctccatgcctgtatctctgagaatcagtcagcctttgtttcccaaagagcaatctcagataatgtattgataactcatgaatccctccactatctaaaaacttcaagtgctaaagagagatgtttcatggcagtcaagactgatatgagttaggcctatgatagattggagtgggattttattaaatcagccctagagaagatggggtttcatagtacttttactaggtggcttctacaatgctttacaactgtctcttactcctttctactcaacggccaggctaaaggattggttattccacaacgtggtattagacagggcgaccccctatccccatatctattcatcatctgcaatgaagtgttatccggtttatgcctaaaagcccaaagtaatggctccttacctagtttgagagtagcaacaggcagtcctcgtgttaaccaccttctgttcgctgatgatacaatgttcttagtaagagctgatcaacatag

SEQ ID NO: 170522 - DNA, 416 bp, Arabidopsis thaliana landsberg
gtctcaagcaactgggagctgaagtcatggtatgcggtccgaccaccgtgattcccaaatatgtcggttcgcttggcgttaaggtcaaacacaatttgctcaaggcgctcaggtggtgagacgttgccaacatgctccgcatacagctggaacggcaggatatcaaatattttctttctctgcgggagtacaccatggtatacggtttaagcaagcaaatactcgattcgcttgaaaaagagatcgttgtgatgcatcccggcccgatcaaccggggcgtggaaataaccagcgatgtagccgacagtaagcagtcgatcatcctcgaccaggttgagagcggtgtggccatccgcatggctgtcctgtttttgctggcagggcaaacaccgtaaatgagcaaataaatgaagaga

SEQ ID NO: 170523 - DNA, 507 bp, Arabidopsis thaliana landsberg
caatgcaagagagaaaagaaaagaagagattatgagaaaatgaactcacttcttgatgatgctgttagcttttctcttttcaatttccctcatgtaagtctttctattttcaacgaatgttggtaaccaactgataatagtccactctgttacttaagaacaaagatctatcttttggatgcgtttacatagtgtttacgttccatgttataattattagctcatattacaaacccagacgtaaacacaaacagataatcatgtcactatacagaatttacctagtatagaagtccatagaggttggtctttgtaccttgtcatagaaaagcgaaggtctgtagttctgtgggatttaacattcggtgtaatatattcttgagatgtagcataaaagtgttggtgggtatatttatagagcaaacctttgcagataggacattggataactcacaaggcttttcggctactcagtttcagggttctctctcttcactatctctctga

SEQ ID NO: 170524 - DNA, 976 bp, Arabidopsis thaliana landsberg
gaaaaggatgggcacaccgactatggttgtttcattattagccaaagattatccgggataaattgtcactccaactctaaaagatcttattgacttggttcaaggaagatttagtgtgcaagtctcatattctaccgcgtggagaggaaaaagagaagctgcaaatgatattagaggtacaccagaggaaggttttaggtttgttgattattatatgtacatgttacaaaagatgaatcatgaatcaggttcgtatgtggaagtggatgaggaaaataagtttaactacttgttttttgctttaggatcttccattgaaggctttcgacttatgagaaaagtcataattttggatggaactcatatgaagactgcttatggtggaatcctaattgttgctacgactcaagatcccgttcatagtcggtgtgcctctccttggtttgtcattatctgactgcttttggtgtagttgatggtgagaaaaacgatagttagacttggtttctcaagaagctcaaatcgattataccggattatcatgaaattatgtttgtttcgaatagaaaccaaagtctcatcaagacaatagccgacgtctatccgttgtgccactatggacattgcatctaccatttgtctcaaaacgtgaaactgaatgtttatagagtaaaaaaggcataagtgcaaaaacatttagggaatgtgctcgagcttatacggaggcggagttcttaaggttttatgaagttttttcgactacatatccttcaacacgtatatatctagatgattatgcggatgcgacaaatgtggtagatgttattttggaggagaaaaatacaacagagacacaagcaattcggttgaatctgtaaatggtgttttagagaaagtaaggaactactcgctattacaattgatagatgcaatagtgggaaagatagcggagtggtttgccaaacatagaaaatct

SEQ ID NO: 170525 - DNA, 235 bp, Arabidopsis thaliana landsberg; identical to SEQ ID NO: 71305

SEQ ID NO: 170526 - DNA, 1450 bp, Arabidopsis thaliana landsberg
tcgacgaaagttatcgttaacacaatatcaggtcccatagacttaattgaagggaccggtaaagcaatttttgcattacctaacgggacaaagttctcgataaacaatgcattgttttttccaaattcaaacagaaattttttgagttttaaagatatatacctttatggatttgacactcagtttgcagctgagaatggatggaaaaaagtacatgtatatcacttctgaaaatttaggaaaaagacacattttggaaaaattaccaagactcccatcaggattgcatcatacatccattaattcaatagaatcacatcatgttatcaaaagagatcatgatgatcacattgtggcacgatcgtcttggtcatccaggcaccacgatgatgcaaaaaattatagagagctcacatggacattcaataaaaccccaagcgatttatcaagggacatgtgttgcgtgttccctaggaagattgattataaggccatcgccaagcaaaatcgataaagaattaccaaaattccttgaacgagtctaaggtgacatttgtagacctatacacccaccatgtggaccattctattatttcatggtaatgatagatgcgtctagtagatagtcacatgtttgtttgttatcatctcaaaatgtggcatttgaaagatttttgactcaaataatcaaactaagagctcagtttcatgattgtcaaatcaaaggacttagattagataacggtgatgaatttacgcctcaagcattcaatgatttttgcatggtaacaagaataaatgtcgaacaccatgtagcccataccaatacacaaaatggcttggctgaatctttaattaaacgtttgcaattaattgtgaggccgttaatcatgagatcaaatcttccaacctcagtctagagacattctattttgcatgcaaaatcacttatacgcataagaccaagtgcatatcacaatcattctccattacaattagcatttggtcgaaaacttaatatttctcatctaaaaatcttaggttgtgcggtatatgttctcattgcacctccataacgtactaaaatggggccacggagaaggttaggaatatatgttggttgtgatactccgtaaattatatgatacctataacatcaaactggtgacgtatttaccgcatgttttgccgattgtcactttgacaaaaaagaattcccagttctagggagagaaaataaaaagatggaaaaggaaattaaatggtgtgtaccatcactattacaccttaatcctcccactaaacagtcagaactggaagtttgacgaattgtgcatttatagagtatagcaaaccaactacctaatgcatttgtggataccaaaacggtaactaaatcacatataccagctgtaaatgctcgtgatcggcttgaaatcccacaagaaca

SEQ ID NO: 170527 - DNA, 495 bp, Arabidopsis thaliana landsberg
gatgctcaagacgaaacatgtgggatatgtcggatggcttttgatggttgttgtcctgattgcaaacttcctggagatgattgccctctaagtaaagttctcttctttcatgtcttcgcttttatatatgttgcttagaacacccactatttctcttgcttacggaaacattgctaaacatttacttatggtaataactcaaaacaaaactgcatgccttagaccttatctgttttggtgttttggtgtttgggcagtttggggagcctgcaaccacgcgtttcatcttcactgtatattgaaatgggtgaattcgcagacgagccaagctcattgcccaatgtgcagaagagaatggcagttcaaagagtaagcaagttatgaggaggattagtctgcagctctcgtcataggggatgttttggaatgatctcgtgtagttgtatttggaccgttagtgttgagtatgatcatctgctgaaacgcaagatagag

SEQ ID NO: 170528 - DNA, 621 bp, Arabidopsis thaliana landsberg
cctacatcaagaacaaggattcctaggatgcgattatctttggagatgggaactaaggcaaagtttaaggattgggaaagatagccattacatccgagcattctatctcaaatgtgtttttagttgaatcgctcgggtacaacttattgtctgtaagtcaattatgtaacatgagctataattgtttattcacaaatatagatgtatctgtctttagaaggagtgatggttcattagcgtttaagggtgtattagacgacaaactttatctagtagatttttcgaaagaagaggctggtctagatgcatgcttaatggctaagacttgcatgggctggctgtggcatcgccgcttagcacatgtggggatgtagaaccttcacaagcttctaaagggagaacacgtgataggtttgactaacgtgcatttcgaaaaagatagaccttgtgcagcttgtcaagcaggtaaacaagtgggaggagcacatcacagcaagaacgtgatgaccacttcaagacccctggagctgctgcatatggacctcttcggacctgtcgcctatctaagcataggagggagtaagtatggtttagttattgttgatgacttttcccgcttca

SEQ ID NO: 170529 - DNA, 536 bp, Arabidopsis thaliana landsberg
ctggagctaacggcttcttgcaggtggaaggcgagaaaatgtccaagtcggcgggcttttttttcaccatccgcgatcttctggccgactggccgggggaggttttgcgtttcaacatgctgcggacccattatcgccagcccatcgatttcaccgtggcgggcctcaacgagagctggaagacgctggagcgctggtacgagcgaaccgagccgctggccgatcccgcgcccgatgcggcgttccttgacgcgctggccgacgatctcaacacgccggccgcgattgcctccttgcatcaggcgggtgatatggcgctggccggcggtctgggtttcctcggtttctccaatgtgcaaatgaagatcgccgcccagcccgcgctggatgaagccgaaatcgcccgggccattgaagcgcgcaatgccgcccgcaaagcccgggacttcgccgaaagcgaccgcatccgcgatgagcttctggccaaaggcattctgttgaaagatcggccctccggcaccagctgggaggtccgg

SEQ ID NO: 170530 - DNA, 487 bp, Arabidopsis thaliana landsberg
catccgttctggtatggacatattgtatgggcatactctggggtatcggcgggctcacttatggcctcggtgtccggttcctgggtatgtcgctcggcaactcggtgatactgggtttctgttctgcattcggctcgctgatccctcccgtctattattatttttccggtgcggaaggtaaggttaccattgcgcagatgctcggcagtgacggcgggcgtatggtattgctcggcgtgctggtatgcctcacaggcatattcatctgcggccgcgccggtatacgtaaggaaaaagaattgccggaagagcagaagaagggctccggtacaggaattcagtcttgtgaaaggactgatcgttgccacggtttcgggcatattgagcgcctgtttcaatttcgccatagaagcgggcaagcctatggcagaaaaggctaatcatgcatggcaggcagtacatccgcaacagggtaatttgcttttca

SEQ ID NO: 170531 - DNA, 507 bp, Arabidopsis thaliana landsberg
atggctgatgagatttggcatgatatacagtacatggttttgggtcgcgatgatccagaactttttgtacctcaggcagcttatggtgttgttgttgctggcaacagactgagtcttattgcaagaccgcttaacatccatgctcaacacctcagaagagtacttagggccttgcctcgcagctggggtatggcttctcgtgtacatggccgcatcattgatgataggtgcatccagtttcgttttcgctctggtattgacttggcttcggtcatgctgagaggcccatggttattcaaccaatggtttgtacctctgcagagatgggaagactttccccgtgctgactttcttacctatattgatctttgggttcaagttagaggcatacctctctatgtgtctactatgactgtcaggtttattgctagtactctggggccagtcacggggcttgattttgatgaagagacctctactcagatagcctttatcagagtgaaagtg

SEQ ID NO: 170532 - DNA, 471 bp, Arabidopsis thaliana landsberg; identical to SEQ ID NO: 71183

SEQ ID NO: 170533 - DNA, 806 bp, Arabidopsis thaliana landsberg
cgcaagatcacttccgatcatctaaaggagtcatgtcggttagtgtgtatgatttcttaactggtactctggttggatactggaggggatttgaatagcaatctttatagcttgcggagcaactaaaaatttagcttctacatttcatttcaaaccacaatcatgaattcttacgtatgttatttattcaggatgtgtttttagcgggagtgaacgcgggagtgatcacaatgatatggacgatgacagagctaaccagacatccaagagtgatgaagaaacttcaaaaaaaagattcgagcaacactcggttccaacaaagagagaatcacagaagaagatctagagaaagttgagtacctaaagatggtgatcgaggaaacattcagactacacccacctgctccactcttgctcccaagattaacaatgtccgacgtcacaattcaaggctacaacattcccaaaaacaccatgattgagatcaacacttataccataggtcgtgatccaaaatgttggactaaccctgaagcattcattcctgagaggttttccgacacctctataaactacaagggtcagcatttcgagctcttgccctttggagctggtcgtaggagctgtcccggaatgtccttgggaatcaccattcttgaggtaggcctttttaaccttctttatttctttgattggcgtttgcccaatggaatgaccattgctgacattgacatggaagaagttgcagctttaaacatagctaaggagagtacctcttgagctcgtgaccaactcttcatcattcg

SEQ ID NO: 170534 - DNA, 1119 bp, Arabidopsis thaliana landsberg
acaccatatttagctcttacggaacgaacagtacacgtggaaagtatacgatccgtggacgggttttctatatttgtcttcgatagctggggagtgggcgaagtcgacggtggaaaagaagccacgcgtcaagatctaagaattggaaaagtacgtatacgtatatcgacgctggagactggtaaagcgtatagaaatacgtatccgctactgatgttagttaacggcggcgttaaaaaattgggagagatagaattggccgttagattcgtgagaacagctccaccgttggatttcttacacgtgtatactcaaccgttattgcctttgatgcatcacattaaaccgttgagtttgtttcaagaagatatgttgaggaacactgcagtgaagatcttggccgcacatttgtcacgatctgagccgcctttaaggccggagatagtacggtatatgctcgacgccgatactcatactttcagtatgcgtaaagtcagagcaaattggcttcggatagtgaatgtagtcgccggaatggtcgacgtggtgcggtgggttgatgacacccgtttctggaagaatccgacatcaactttactagttcacgcacttgtcgtgatgctgatttggttcccggatcttatcgtaccgacattagcgttttacttgttcgtgattggtgcgtggaattataggttcaggtcacgtgctgctctaccacatttcgatccaagactctcgttagctgatgcagctgatagagacgagctcgacgaggagtttgacgtcgtaccgagcaaccgaccaccggagatggttcggttgaggtacgataagctacgaaacgtcggagctagagttcaaacgattcttggtgaagtggctgcgcaaggggagaagatgcaagctttggtgacgtggcgtgacccacgagcgactggtatattcgtggggctgtgtttctttgtggcgttggtgttgtatcatgtgccgacgaagatggtggctatggcgtcagggttttattacttccggcatcctattttccgtgatcggaaaccttctccggtgttaaatttcttccggcgactaccatcattatctgatcggctcatgtaa

SEQ ID NO: 170535 - DNA, 648 bp, Arabidopsis thaliana landsberg
ttatgtaacaaacgaacggagtgcagagactttccacagatggctgaagacccgaagatggatggtttgacatcggagtcacatccaattcaaaacatagacctggtcgggactacaggaagtggaaaactgccacctcaagcagcatcaaaggaaagaaggtggtccaatcgggaacacacgcaactggtgctaccatggaatgccagacatatgaagttttgacaccagatggccccataagcaataagattgacactcctggtacgaatttttttgtatgtgcttattataccttactaaaaataatcatgcataaaatattgttctttaatattaattattattaaattagttaattacgaatttttgttaattttttaattcgaatttattttattttgttaatttatttaaataatatttaagtaaatagaaagggtattatagtcatttttcattaaaaatttgtagttttcaaaatagtgtaaaactgagtatgattttcaaatttctaataaaatttaggctagttataaaattgccccatatttctattctattctatgcataaaatattactgttgatgtttgaatcttcgggttcgtcaagcatagagtcacgtttttcttactcgtcaagcacag

SEQ ID NO: 170536 - DNA, 882 bp, Arabidopsis thaliana landsberg
tttcaacttgttgctgacctgcctttgcgaaagaaacgtgaatcgaaacccgtctgggcttgttcctgaagctttgaatattatgttggagatgaggtcttacaaaatccaacctacgtctatgagttacaacattttgctctcttgtttgggaaggactaggagggtgagagagtcctgccagattttagaacagatgaaaagatcgggatgtgatccggatacagggagctattacttcgttgtgagggtcctgtatttgacaggaaggtttggtaaaggcaaccaaattgtggatgagatgatcgagagaggatttagacccgaacgcaaattctattatgatctgatcggggttctttgtggggtcgagcgggttaactttgctcttcaattgtttgagaagatgaagagaagctcagtgggtggttatggtcaggtttatgatctgctcataccaaaactatgtaaaggaggaaactttgagaaaggaagagagctttgggaagaggcattgtcaattgatgttacacttagttgctccattagtttgcttgatccatctgtcacagaggttttcaaacctatgaagatgaaagaagaagctgcaatggtggatcgtcgtgctcttaacttgaagattcacgctagaatgaacaaaacaaagccaaaactgaaactaaaaccgaaacgcaggagcaagacaaagaagaagaatctgtaacattgatggatttcttctacccattgatgagaacatctgttgaagcaggcaaagtatcacaagaaactgaagtaagatgttcttgcttcttatgaatcagtaggaatgcagaagcaaatgacatgggatttttttgatggtttctttggtccattgat

SEQ ID NO: 170537 - DNA, 179 bp, Arabidopsis thaliana landsberg
  unsure (1)..(179): unsure at all n locations
atgtgtgtagaggcgataatggtgagggctagcgtcttaaacgattgtctcaagagcatgagtaatgcagagaaacaagggaaacgccaagtcatgataagaccatcttccaaagtgatcattaagtttctcactgtgatgcanaagcatggtacacttggtttactcaatgagcttct

SEQ ID NO: 170538 - DNA, 864 bp, Arabidopsis thaliana landsberg
aggttttgagggctatgccagttgttgacttggaaatgccgactctttgccttgtcggagcaccaaacgttgggaagtcatcattggttcgcatactttcaacagggaagcctgaggtctgccttatgtaccaatctttatatatgtgataataacttgctttgtctagtgcttatgattttttcggttgtcagatttgcaattatcctttcacaaccagaggaattctgatgggtcacatcgttttaaactaccaacgatttcaggttgcgttgcttacttcgctgcgtctaatcactttcctcatgatatagattatttaatcatccaaaaacgcattgcaggttacagacacccctggccttcttaggagatgcgatggtaaagtctagttgctacgaactctcatgtggattaatacctatatgatatttgattaagtcttgattcttgtatttttttatttggtaattacagaggataggaataatctagagaagttaactcttgctgtactcactcatcttccaaccgcggttctatatgttcatgatctaacgggagaatgtgggacttctccttctgatcaggtatatagtaagaaacaaatccttatggatttcgttgcatcagatgtgtcaaaggaaagcacaagaatgtgcaccgttatctgatttgccgaataattgggtctgatatatcctgattcagttatatgtttgttgtgagggcattgcagtttcaaatatataaagagatgaaagagaggtttaaggattacctgtggattgatgctgtgtccaaatgcgatctgctgggaggctcaccggtatgtgtgcctcacacgataggactgggaactct

SEQ ID NO: 170539 - DNA, 508 bp, Arabidopsis thaliana landsberg
  unsure (1)..(508): unsure at all n locations
taaacnnnnnnnnnnnnnnnnnnnccaattcggtttgcccgtatcggcatacgccatcagcgcaggtgtttctggcttgcttacagcaggctttgcctcctagttttgacagaaaaaaactctacctctttttctatattgcatttatcataggaaccctgttttgtggattatccccttcttatcacctgcttattgctgcacggattttccccggtattttcgcaggtgtgattggttccatcaccatggctattgatgcagatctgtttacaatagaaacccgcgggcgtgctatgggttttatccacatgggctttggggcaacccaggtattgggtattcctataagcctgtatttgacaaatgcctgggactggccaatcccatttttaatgatagtagggctagcaccctttataaggatgtttgttgtcctttaaataaaaaccatcaaagagcttcttaaagtgaacaatgctcatatcgcatttcacccttgggccca

SEQ ID NO: 170540 - DNA, 575 bp, Arabidopsis thaliana landsberg; identical to SEQ ID NO: 76185

SEQ ID NO: 170541 - DNA, 761 bp, Arabidopsis thaliana landsberg
atggatatttccgtatttactatggtcggtgagtggagatgcaaagaagaaaaatgaaaatttgaatcaaaggaagacatgtttcgtcactgtgtacgtgttaaggaaaacatgacgtacacggaatttgtacgtacactaagcgaggctttcagtttgaagtccacagagatcaatcccataattagttactggatgccaggagagatgttagtgatgatagatactaaacgtcttcctgtctacattgacagtcaagtggggttggatacgttctttttgattcgtggtcggtatccttctctcaacttgtttgtccgtcaagacactcgggaataatgtctttaggactcatggtgacgatgctgaaagtgaccgtgtgtgtgatagtgtttgaaatgttgatgaaaataatgaggtcgtagattagcaagacgacgttgaagacggtaaaacagatgaggatgaagatggggacaacaaagatggtgatggatatgatgattatcagggtgacgatggatctatgggggcaagtaccatcgatcctactattgatggtagtgaaagtagtggcgaagattatgattacaacaagtgaaatgatgtaattgtagaagaatatggaatagggaatgttgaggagaacgtcattctcatacaactgactgttcaacatcgaggggaattcagtcgtctgttggcagagtgtacgtacaaaagtcagcgtgtacctggcggagataacatttctcactcgg

SEQ ID NO: 170542 - DNA, 699 bp, Arabidopsis thaliana landsberg
gtttttctctgatttcagggttccgatcggaatcaaatcaggaagtcgttgaggaagttaaaaaagcagattggggaattggagaaacttgaatctccggatcggttgaataatgtgaagcctatcttcatcaagcgcagtatccttttctgttgtcacaagatgctatttttttttgtcatacaaaactgtggaatattatttgttttcacatgacgagcttggttttaagatatatacttgaagaagaaactcaagaagaaagttaaggatcatggcatattctgttcttgctccttggatcctggttcttcaactctttgtggcagcgattgcaattgtgggtatgttccatatctgatcacaagtacttgtctgactaaatattcgtggcggcattggttctgattgttgatgtattgttggttttttccttgatgtataggattctactctcaagctgttcgtctagttgcaaatgcagtagtgaatgcaccaacaagccgttccaacaacgacatatcaagaagatgaagttagttcaggttggtttattacaatttgttgtcttatataaagaatgcattttcaacgttagttgaataagttgttgcttgcagacagagaaatgtggatatgggattgtagcagatgaagatatcaactcaggagagtttatcattgaatatgtgggagaag

SEQ ID NO: 170543 - DNA, 708 bp, Arabidopsis thaliana landsberg
gaaaaacatacttgctaaggatcgtaaacgcagcactcaacactcacctcttcttcaaaatagccaatcacaacgtcacagttgtcgctgtagatgctgtctactcgacgccgtacctcaccgatgtgatgatcttaacgccgggacagaccgttgacgcacttctcaccgccgaccaggccattggaaagtactatatggccaccctcccttacattagtgccattgggataccaacccccgacatcaaacccaccagaggcttaatcgtctaccagggtgccatgtcatcatcatcgccagcggagccgttgatgcctgtgccgaatgacatgtccaccgctcataggttctcctcaaacatcactagcctcgttggtggaccacactggacaccagtccctcgtcacgtggacgagaagatgttcataaccatggggcttggcttagacccatgtccagcgggcaccaagtgtattggaccgttaggtcaaaggtatgctggttctctcaacaaccgcacttttatgatcccggagagaatctctatgcaagaggcttatttttacaacattagtggcatctacaccgacgattttcccaaccaaccaccgcttaaatttgattacacaaaattcgaacaacgtaccaataatgacatgaagatgatgtttccggaaagaaagactagcgtcaagaaaattagat

SEQ ID NO: 170544 - DNA, 956 bp, Arabidopsis thaliana landsberg
aggttttgatagcaagcaattaaaagtatccgaaactaacaaaacctatctggtcttggactcttagtctttatataaacaacatcagatagatcgagagaccatacgcaacaatttactaatttctcttctccttcgttgcttttgaaaccctagttattatcgagagatcaaacacgtacgtacacaaaagaccgatcaaacagagaaggatgcagaagcgtgagttcatggagttgttcgaggcagcacttagagcggctaagtctgtgaaaggtgatgagaattctccagaggtatcgaggtttgtcgatgccatgaatcgtttgaaggaagcacccaagtcacttgtttgtgacgtggtctgcaaaacctccatggggcagggtttggaattcttcatcgatcacaaaaaccctaaaattcgatcggaaggaaagattcgtcgggatctttggatgaagtttttttacgcttcaggtagagaaaagagccgtgataatagagaaactcaggtgaagattccgacgcacgcaacgatgaagaagactggagattcaaagcgagacaaagtgcgtgagattcttcaaacatctctggttaaagtcgcttctgagattgttgacacagagatgaagacacgagtcactgcttgtgatccttctgtcgtggctgtttcagtggaatctgcaatgtttgagaaattaggttgtttcatgggacctcataaagcaaagtaccggtcgattctgttcaacatgggagatagtaacaatccggatttgaggaggaaagtgttaatcggtgagatcaatggggagagactcgtgacaatggagagacaagagatggggagtgagaagattcagaaggaggttcaaaggattaaagagaatgcaaggtttaaggaagagagtcgaatgaagattcttcaatcagcatctatgatcatgact

SEQ ID NO: 170545 - DNA, 471 bp, Arabidopsis thaliana landsberg
atgaaccggaatcaacacaaacctatgtatgttacattcctgattattattcttctcctccaacttgtaaaccttaccaatgcattaccatccccaccaataacagccctatacggcctttggcgactccacggtggattccggccacaacaattacattcccactcttttccagagcaaccatcctccctatggtaaatcctttccgtccaaactctccaccggaaggttctccgacggaaaactcgccactgacttcattgtctcctctctaggactcaaacccactctaccagcttacctcaacccttcggtcaaacctgtagatcttttgaccggtgttagtttcgcctcggacggaggtggattagatgatcggacggcaaagtcatcattgactattaccatggacaagcaatggagttacttcgcagaggcgctgggtaaaaagaagagttagcgtggagactc

SEQ ID NO: 170546 - DNA, 560 bp, Arabidopsis thaliana landsberg
tggagatcgacgatcgagtctcaatcttcgaagagagacacttaaagatcgccgagcgattccatgcacatcatcctagggttatggtgattactgaaaaagatcccctaaaactattgcctcgacctcgtccagacgcagacattggttttaggttattctgcttggaatcgggttctcttctatcctttattcttctcaatttccctcaaagtttcgccaactatatctacgtttctggatgctgcgatggccttttctgcgtccattcaccgagatcgcaagccatgtatgtagtaaatccggctacacggtggttacgacaacttcctccagctaggtttcagattttgatgcaaaaggccacttatagagattggttagacatgaagtcagtctttcatctagcattcgtgaaggccaatgattataaattagtgtggttgtataattttgacaagtacaatgctgatgccttgagtccaaacccgggagccccaaagtgcgaggtttttgactttagggcaaactcttggagagacttgacttgcactccaagt

SEQ ID NO: 170547 - DNA, 908 bp, Arabidopsis thaliana landsberg
gagagtcctttttactccacagggttagtgatctgttttttttttttgcccacacgaagtgttcgacggaaatttcaatttacgatgtttgaattattttgcagtttcctttagtggctcggtgtggaaagattaggaaaatggtggcagagatgaaagaatcatcttcaaatctctcgcatacagagctccgagactttccaggtgggtctaagacgtttgaactcgccatgaagttctgctacggcatcaacttcgagatcactatctccaacgtggttgctatccgttgcgcagctggttatcttgagatgacagaggacttcaaagaagagaatttgattgcgcggaccgagacttacctcgagcaagtcgcgtttcgcagtcttgagaagtctgtggaagtcctctgttcctgtccgacgctttatcctcaagacattgctgaaactgctcacattcctgatagatgtgtggaggctatcgctgtgaatgcttgcagagaccagttagtgttaggcctgtccgggttgaaccggggctccgagtcaggggaactcaagcgaggagatagtcctgagtggtgaattgaagacctctctgctgtgaggattgactattacgcaacggagttgtctctgcgatggctagaacaggcttgcggtcagagagtatcataacgtctttgatgcattacgctcaagaatcgttgaaaggtattgaaactgcaaggagcgaccaagctcgattcgggtacttttgagaatgaacagaggaacgtccttgaagccattgttagtcttttcccaaatgacaatgtccctttgagtttcctccttggaacgtgagggtcgggattccataaacgagaaatctctgcaggctgagctgacggagaatgccggcag

SEQ ID NO: 170548 - DNA, 358 bp, Arabidopsis thaliana landsberg
gagaaaaggaagtgtgtcggatagagaggaagaatattatcgggaaaagagttctgtagaacgggaagaagagtttaaagagcgaagcagccttaggtcatatcacagtcacaggtcgagcgcacacacacacagttctcatagaagacgcagcaaagacagagaggagtgttccagggaagagtcccgttctgatagaaaagagagagcacgaggtatggaagatcgatatggtgacaacaagggtgaagtttctggcagcaaaagatcaaaacgttctgaagaagaccgatctcgcaaacgtcataaacacttgccttcccatcatcataggaggtcctatagtcaagatcatcat

SEQ ID NO: 170549 - DNA, 774 bp, Arabidopsis thaliana landsberg
atcggacttgacggtatcaacttaaaggaagagacgttccaacgttggtcttacacttcattcctacaagagcttggccagagactaaacaatcctcaaaaaactatagccactgcgattgtcttgtgtcaacgattcttcactcgtcaatcactcacaaagaacgacccgaaaacagtcgccatcatctgtatgtttatagccggaaaagtcgaagggtctccaaggccggccggtgacgtcctctttgtctcgtacagggttttattcaataaggagccgttgagagacgtgttcgagagattgaagatgactgtgttaaccggtgagaagcttgtgctctctactttagaatgtgatcttgaaatcgaacacccttataaactagtgatggattgggttaagagatcggttaagaccgaggatggtaggcggttatgtcaggctgcatttaatttcgttaatgacagtctgaggacgtcgctttgcttgcagtttgggcctagtcagatcgcatcggctgctatatatatcggtttgagcatgtgtaagatgacgttaccgtgtgatggagataaagcgtggtggcgagagtttgatgtcacgaaacgtcaattgtgggagatttgtgaccagatgcttgatctttatgttcaggacttcgttgttccgagacatggcttgtgacttttttgtttattgagattgcgtttatagaagtctttctcacaatttattttcaactgcgtaggagagtttaattttgttgaaact

SEQ ID NO: 170550 - DNA, 601 bp, Arabidopsis thaliana landsberg; identical to SEQ ID NO: 72863
  unsure (1)..(601): unsure at all n locations

SEQ ID NO: 170551 - DNA, 1166 bp, Arabidopsis thaliana landsberg
gaggcggaacaagccttcgaatagttgaagcagcacctggtgtccctaccaatactggtagccccagagcctagggagctgctgtatttatacatcgcggcggctgtagaagcagtgagcatggtgctagtcgtcgagaggacggcacaagaagaccagaaacctgagggctcgggaccggctacaggggttcggaccaatcagaagccggtctactacgtcagcgaggtcctccacgaggcaaagaccgggtaccttgagacgcataagcttctctatgctgtgtttgttgcgtccaggaagctgtgccactatttccaggtacacagggtcgtggtggtgacctcctacccgttaaaggccatcctccacaactctaacaccacgggcaacatcgccaagtgggcagcggagcttgctgggttccaactggacttccagccttgccacgctatcaagagccaggtcctggctgacttcatcatggagtggaccccttccccgagcgctcctgggggtccggatcccgattcaaatcccacacctgcggagcccagggctccagtcttcactgagccccactggaccctattcttcgacgggtccgcccgccagcagggtggcggtgccggagtggtcctcatcgacccaagcggagatcaagtgaagtatatggtgcaccttgagttcaaggccaccaacaacatggcagagtatgaagcactgattttcggctcgtctgcggccctatccctagggatccgccagctcctcgtgaagggggactcctagctgattatcaatcaggtccgcggggaatgtagctgcaacgagcccaggctcacagcttaccttctccatgtaaggaagccggaaaaggacttcatggccctggaactgcaacatgttccttgggctaacaatttagtggcagatgaactctccacgagggcatcaacttgggcacccgtgcccgagggcgtcttcgaaagacggctgctgagacctaccacccagcctaccgagccggacgaagggtgtgagactagcacctcgaagctagcggtcccggtggcgttacatctgcagaacccaccaaggattgtgtgtgctacagggggtcctgccaaccccttagcaccacagccggtatctgagactagtcc

SEQ ID NO: 170552 - DNA, 150 bp, Arabidopsis thaliana landsberg
tttatttcatcagagatatagtgtctcaaggcggagtttttttcacaaaattcacacaacagtcaatccggctgatttcttaactaagacggtacctggtcagaagttccagctttgctacgagcttctcaacatccactaagatggagc

SEQ ID NO: 170553 - DNA, 436 bp, Arabidopsis thaliana landsberg
tcatggtgggcgtaatcgctcagtacctggtgggcaagcattcggacaaggtcatggaacgccgctggcatgtggcgatctgcttgagtatttcggcgctaggttggttgaccttggccatcctgcaacccagcaccaccgtatcggtcattctgctgattgtcgccactgcatcggttctgggtgcgaccggtccgttctgaacactgcccggcagcctgctgaccggtaaggcagcagcgggcagcatcgccttggtcacgacgctggccggtgtcggtaacgtgttcatgccggcgctggtgggggcattgattgatcttaccggcagcatggccgcgtcacaggtcgcctatggcgtgctgatgctgaccggcgccgcgatgatcctgctgggtaccccggctgaagcgggcaagcccgtcgtcaaagccaa

SEQ ID NO: 170554 - DNA, 606 bp, Arabidopsis thaliana landsberg
  unsure (1)..(606): unsure at all n locations
atcaacccgaaaccgattgcgaaaaattacgttaaagccgccgccctacctgaaaaaacatcctcacgatttgtgccttgtcaccgacggtgatgcggaccgcgtgggcggcatggatggccgtggcaacgctcttacaacccataatctgatttgtttgttgctggagcattttatcaaaaatcgaaaaggcaaaggccgcgttgtcaaagcactcaccaccacttcgatggtggataaaatctgcgagacccacggcctgcccatgaccgagaccggcgttggtttcaaatttatttgcgccgagatgttgaagggtggggttttgctcggtttcgaggagagcggcgggatcggatacccgggccacgttcccgaacgggacggaattttatccggcctgatgctcctggagatgctcgcttatnnnnnnnnnnnnnnnnncaaactgctcgaacggttggagaaggaatacgggccacatcgttatgctcgcattgatgcgcactttcccttggagaagcgcccggctttcatggattactgcaaggcgaacccgccaacgaagtagttaacccccattgcaagatgtgaagagcttcgatg

SEQ ID NO: 170555 - DNA, 802 bp, Arabidopsis thaliana landsberg; identical to SEQ ID NO: 21535

SEQ ID NO: 170556 - DNA, 363 bp, Arabidopsis thaliana landsberg
atgttgtagagaaggcaagtgggatttcattttagaaaatgattgcttcgctaggagcatttctgtatctgctgagatgactttcaacgagttacaaaacgctgttgcctcagcgtttgactttaatgtccaggattggaaacaaaacatcagttattggctgccagagcagctgtcaatcttctctgctcgtaaaaggcctcccgtttgtttggatagcacaatggcgttgaagagcttcgtgacggttaaggctatggagccacatttaaacttgtgcctctcccatgagagcatcctggatgagggaccacagaaacagcttgttcctcagcttggggagtgttccaatagaggcaaagc

SEQ ID NO: 170557 - DNA, 226 bp, Arabidopsis thaliana landsberg
atcaagataatgacgaagaagaaaccgaggcagcttcttaagctcataacttctatacaaagcctaaggctcactcttcttcatctcaatgtcaccactctccacaactccattctctactccatcagcgtcagggtacgtacattttcaacttctcatcattactttgtttgcttttggggtaatcatgagattaaagtgagtaatgactgtgtgtgtggtgcat

SEQ ID NO: 170558 - DNA, 443 bp, Arabidopsis thaliana landsberg; identical to SEQ ID NO: 75758

SEQ ID NO: 170559 - DNA, 1239 bp, Arabidopsis thaliana landsberg; identical to SEQ ID NO: 4428

SEQ ID NO: 170560 - DNA, 482 bp, Arabidopsis thaliana landsberg
tacgtgttcccacggaaaatgggagactgatcccaccgttcatcgacgacgataacagcccattgcccggttggatgatcgagtctctcaaagccgttaagtacgtagacaaagcacacttcgctgtccccgaaggacaccgagccatcgagcttgttggaggcaaagagagcgccatttctcagatagtgaggacgtcactgaacaaattctacgccctcacgttcaacgtgggagacgccagagacggttgtgagggaccaatgattgtggaagcgttcgctggacagggcaaggtcatggtggactacgcttctaaaggaaaaggcgggtttagacgtgggaggcttgtgttcaaggcagtgtcggccaggacacgtgtcactttcttgagcacgttttaccacatgaaaagcgatcactctggctcgctatgtggtccggtgatcgatgatgttaggctggtagcggttgggaaactc

SEQ ID NO: 170561 - DNA, 1022 bp, Arabidopsis thaliana landsberg
atatcttcgcggctccaatcctgacctttataggccaaaccgctgcaatctcggccatggcagggattttctccatttacatgatcccacaaatctttgcctacgctatcaacttcccaacggcgaagtttttgcaatcacaaagcaagatcatggtcatggctggaatatccggtgtggttcttgtgatccatagtttcttcacgtggctagtcatgtctaggttacactggggacttcctggtttagctttagtgcttaacacgtcgtggtgggtcatcgttgttgcacaacttgtgtatatctttaattgtacgtgtggagaggcttggtctggatttacgtgggaggcttttcacaatttgtgggggtttgttaaattgtctttggcttctgctgccatgctctggtgagtgcaaatattttttctcttccaattattttggtccgatttgatccaaccccattaatgaattcatattttaaatacaatttatttacttttgtagtttggagatttggtattttatggcactcgtattatttgctggatatttgaagaatgctgaagtctccgtagctgcactctccatatggtaaaatttgttatatctcttaaactaattaacatctttacaacatttaaggtttacatgatttgttatttgattcatttatttattatcagagagattctctgaataaagactagacccaacgtgcgtagtagtctcttgttttgtttattaatcaatgtccttaatgtattaagaattcaaaattttgaatacttccactgcaaagaaatttctaatgatttgttttccttaattaatggtgtgtggaatatgaagcatgaacattttgggatgggcagtattggttgcgtttgggacaaacgcagcagtaaggtaaattctagcgtgtgaaataaaactaactctttacaaattctacacatctaacacgtgccaagctaataatacttttttggttggcagtgtgagagtggcaaatgagct

SEQ ID NO: 170562 - DNA, 388 bp, Arabidopsis thaliana landsberg
ttttgtagtttcctcgtgaaagatcttaaatggttttccaagaagtacgctggcgagtttctccagttctcgcctcggttccaatcttggcaagaacgagtcatgtggataattgaagctctcccttgcagcacaaagttccctgaatagaacaactcatgttttccattttgtggccatcttgtgtaatgttttctgcatttttagtttttgaaaccatgattccactatgtgttacggttcagtatatttttacattctccgagagtgtatccgctatatactatgagcgtgttattagtatacctaaaagaacgaaacatctttcacgtttctaaccctgaacattttactcgcacactattcagctaacttaccactcaaaagt

SEQ ID NO: 170563 - DNA, 235 bp, Arabidopsis thaliana landsberg
gaccgcagaagagaattcgtgaaaagagtgaatggagaaggtgaatatagcttaagtggccattcgtaatattcgcagagatgctgttgaggccatcaaaaaactgcaaaaagacggattaagtgaagatagtgctaaagatgcggaagccgatatccagcaattaacagataggaatattgtgttagtggacaaacattgtgaagctaaagaaaaggaaataatggctgtatag

SEQ ID NO: 170564 - DNA, 379 bp, Arabidopsis thaliana landsberg
  unsure (1)..(379): unsure at all n locations
agggctagaagttggcaatttcccggcggaggtgagttcatcggcggtgtttaggtgcgtgcgtgtgagctcagtagaagatggagaagaagagtttgcttaccaaacagctgtaagcattggtggtcacattttcaaaggcattttatacgacctcggtcctggaagtagtggtggcggaggctacaacgttgttgccgccggtgagagctcctctggtggtggtggagctcaacagctgaatctcataacagctggctctgtaaccgttgctaccgcttcttcctctactccnnnnnnnnnnnnnnnnnnnngctcatcagccgcggcagccacgtacattgatccagccgctctttatccaactccgatcaataca

SEQ ID NO: 170565 - DNA, 283 bp, Arabidopsis thaliana landsberg
tttacttgctctggtttctgaaattgttctcttgcagggttgtctgcttataccacagatcaatctctgaggcaattgttctctccttttggtcaaatcaaagaaggtaaaaacctgaaattgaatttgtttaaggctcggttatgaactaaatttgtgtttgtggggttgtttagctcggcttattagagattcagaaacacagagacctaaaggattcggctttatcaccttcgattctgaagatgatgcacgaaaggcattgaaaagcttagatgggaag

SEQ ID NO: 170566 - DNA, 358 bp, Arabidopsis thaliana landsberg
ataatggctgaatttatggaaccaaatcttgtatccaattttgatgatgagaagagcaattctgtcgacacaagatcgatttttcagatgggttttcctctggagagcgaagagatcgttagagagatgattgagaaagagagacaacactcaccgagagatgattacctcaagagactgagaaacggagatttggatttcaatgtcagaatccaagcccttggttggatttggaaggtcagtaaatcagacaaaaatttcttctttgtttcttctgttggctcaatttctacccaagtcaataatcttgatgactttgatatgaaaaaagacttgacttttgcccttattcttgttt
